United States Patent Application Publication US 2012/0159672 A1 - sequence listing, part 11

SEQ ID NO: 24062 - protein, 398 aa, Zea mays subsp. mays
  peptide (1)..(398): Ceres Seq. ID no. 12387121
  misc_feature (80)..(345): Pfam Name: Pfam Description:  Protein phosphatase 2C
  misc_feature (45)..(394): NCBI GI NO: 34894410 NR Description: putative protein phosphatase
  misc_feature (48)..(394): NCBI GI NO: 25352221 NR Description: phosphoprotein phosphatase (EC 3.1.3.16) 2C
  misc_feature (1)..(394): NCBI GI NO: 30695577 NR Description: protein phosphatase 2C (PP2C), putative
  misc_feature (1)..(394): NCBI GI NO: 15228717 NR Description: protein phosphatase 2C
  misc_feature (38)..(366): NCBI GI NO: 15221047 NR Description: protein phosphatase-2C, putative
  misc_feature (43)..(366): NCBI GI NO: 30684431 NR Description: protein phosphatase 2C (PP2C) -related
  misc_feature (69)..(394): NCBI GI NO: 15226152 NR Description: protein phosphatase 2C
  misc_feature (70)..(396): NCBI GI NO: 10140768 NR Description: putative protein phosphatase-2C [Oryza sativa]
  misc_feature (70)..(396): NCBI GI NO: 37536524 NR Description: putative protein phosphatase-2C
  misc_feature (64)..(394): NCBI GI NO: 20146108 NR Description: protein phosphatase 2C
MHQSPVPVLEVQYHRRATTKGVDDVVGMSAPAPAEVGVGVGVEVEVEVEVAVEVPRMGLEQPDVAPSLSTDMIQQFVPNIRSGSFADIGPRRYMEDEHIRIDDLSAHLGSMLVCPLPSAFYGVFDGHGGPDAAAYMKRHAMRFLFEESEFPQASQVDEVYLESVESCVRRAFLQADLALADDLDISRSSGTTALTALVFGRQLVVANTGDCRAVLCRKGVAMEMSRDHRANHVEERERVAASGGYIEDGYLNGVLSVTRALGDWDMKAPGASASAALIAEPEFRRATLGEDDEFLVMGCDGIWDVMTSQHAVSLVRRGLRQHDDPARCARELVMEAKRLETADNLTVVVVCFAPEMGSPFTPQQQQEEELPARPRSCKKGLSTEALCSLRSWLDTDHR

SEQ ID NO: 24063 - protein, 371 aa, Zea mays subsp. mays
  peptide (1)..(371): Ceres Seq. ID no. 12387122
  misc_feature (53)..(318): Pfam Name: Pfam Description:  Protein phosphatase 2C
  misc_feature (18)..(367): NCBI GI NO: 34894410 NR Description: putative protein phosphatase
  misc_feature (21)..(367): NCBI GI NO: 25352221 NR Description: phosphoprotein phosphatase (EC 3.1.3.16) 2C
  misc_feature (1)..(367): NCBI GI NO: 30695577 NR Description: protein phosphatase 2C (PP2C), putative
  misc_feature (1)..(367): NCBI GI NO: 15228717 NR Description: protein phosphatase 2C
  misc_feature (11)..(339): NCBI GI NO: 15221047 NR Description: protein phosphatase-2C, putative
  misc_feature (16)..(339): NCBI GI NO: 30684431 NR Description: protein phosphatase 2C (PP2C) -related
  misc_feature (42)..(367): NCBI GI NO: 15226152 NR Description: protein phosphatase 2C
  misc_feature (43)..(369): NCBI GI NO: 10140768 NR Description: putative protein phosphatase-2C [Oryza sativa]
  misc_feature (43)..(369): NCBI GI NO: 37536524 NR Description: putative protein phosphatase-2C
  misc_feature (37)..(367): NCBI GI NO: 20146108 NR Description: protein phosphatase 2C
MSAPAPAEVGVGVGVEVEVEVEVAVEVPRMGLEQPDVAPSLSTDMIQQFVPNIRSGSFADIGPRRYMEDEHIRIDDLSAHLGSMLVCPLPSAFYGVFDGHGGPDAAAYMKRHAMRFLFEESEFPQASQVDEVYLESVESCVRRAFLQADLALADDLDISRSSGTTALTALVFGRQLVVANTGDCRAVLCRKGVAMEMSRDHRANHVEERERVAASGGYIEDGYLNGVLSVTRALGDWDMKAPGASASAALIAEPEFRRATLGEDDEFLVMGCDGIWDVMTSQHAVSLVRRGLRQHDDPARCARELVMEAKRLETADNLTVVVVCFAPEMGSPFTPQQQQEEELPARPRSCKKGLSTEALCSLRSWLDTDHR

SEQ ID NO: 24064 - DNA, 1250 bp, Zea mays subsp. mays
  misc_feature (1)..(1250): Ceres Seq. ID no. 12406761
aagccaagcaaggagagcagcagcttagcctagcactgctgcagcttgcttgctttgctttgcttcttcttggccaggcctcagagcagagctttggcttggctagtcgtcgtccgcggatagtctccgctacaccgtgtgcgtgcaagcaaggcaaggcaaccagccagccgcggcgacgaccgatcgtcaacaagctcgatcgccttggccggcggccgggcgggccaccgcaagccgcgagcgatggaggagcagctgggcccggtggcggtgacgcacctgctgcagcacacgctgcggagcctctgcaccggcgacgccccgcagtggggtctacgccgtcttctggcgcatcctgccccggaactacccgccccccaaatgggatctccctggcgccgcgtacgacaggacccgagggaacaggaggaactggatcctggcatgggaggacgggttctgcaacttcgcggcggccagcagctctgccgccgcgtccgcgtgcggccaagagggggcagcggcagctgcggcggttgcatatgccggggactgtgaggcagctgtgcaggatgcggtgaagcaccagcaccagcaggcgcagggcctgcagcctgagctgttcttcaagatgtcccatgacatctacaactacggcgaaggtctgatagggaaagtggcggcagaccacagccacaagtgggtgttcaaggagccccaggagcacgagacgagcaacctcatctcctcctggagcaaccctgcagactctcatccgaggacgtgggaggcgcagttccagtgcggcatccaggtgcacacttttaggccttgacaaatcgcaatccggcccctttttgatcagaggcaggcagctagcgctagctagctgtgggctgtgtggcctacctcctctggctgcgattgcccaagacaagacatggccagctagctgactctgccatgccatggccaattggcctgcctgcctgcgtcggcttttctttttctttttttcccccctcgctcacattctgcgctttgctctgcacttgtgcagaccatcgccctgatcgctgtcagggagggcgtcgtgcagctcggctccatgaaaaaggtgccgctactctctcagtcagctactgctcaccggtcgttctctgcactccgattgagggtccgaggcagggcagcgcgtgtgtgcagtagcgagcgctgtagtatggtttttgtgttgtgtgtgtgtg

SEQ ID NO: 24065 - protein, 193 aa, Zea mays subsp. mays
  peptide (1)..(193): Ceres Seq. ID no. 12406762
AKQGEQQLSLALLQLACFALLLLGQASEQSFGLASRRPRIVSATPCACKQGKATSQPRRRPIVNKLDRLGRRPGGPPQAASDGGAAGPGGGDAPAAAHAAEPLHRRRPAVGSTPSSGASCPGTTRPPNGISLAPRTTGPEGTGGTGSWHGRTGSATSRRPAALPPRPRAAKRGQRQLRRLHMPGTVRQLCRMR

SEQ ID NO: 24066 - protein, 104 aa, Zea mays subsp. mays
  peptide (1)..(104): Ceres Seq. ID no. 12406763
  misc_feature (1)..(29): NCBI GI NO: 18406603 NR Description: expressed protein; protein id: At1g60060
MEEQLGPVAVTHLLQHTLRSLCTGDAPQWGLRRLLAHPAPELPAPQMGSPWRRVRQDPREQEELDPGMGGRVLQLRGGQQLCRRVRVRPRGGSGSCGGCICRGL

SEQ ID NO: 24067 - DNA, 968 bp, Zea mays subsp. mays
  misc_feature (1)..(968): Ceres Seq. ID no. 12350331
aaaaatcaactgattcgctgaaaaacggagaattgaaagcgaatgctgtctcccaccacactgcggccgctggttccggcggcggcgccagcgcaccttaccgcctgcttcttgcccgcgtcggggcggcgtgcgccggcggcggcggtgcgcgcggtgcggaactacgactccatcccgaagcgggagcccttcacctccaaccgcagcaccctcgacgagttcctccggctggacaagccgctcgtccagcgtaccaaggaccagatcacagattattgcatgaccgtcgaaggtgatgaatgttgcagctgttgggatgcttactttgaactgaataaacttgagcaagagctgcctaaagaggaaatctcaaggatggtgaaggactcagagggtgacgtgaggtacctgatcgagagcatccatcatcgctcagatttgcggaagaagatggcagagaaatctcgtaattcagtaccatccggctcccaggggcaaactgcaaagccaaggccattccccgtgcctgatgggataccgaaaacacaggaagagctcaccgaagaagaggaagcgttgatgccagagtctccatacacaaggttgctgagaaggatgggtagataccctgaatggtacaccccacgccctgatcatgagactgactgaatcaagtcatctaccatccaggtgtcccttttggaagttttgcagcatgataatctgaagctgaagctcgttttatggtatgtggtaatattttagtgttgcacctatgctgctttgcagattagacttgtccttttctacttattaatgaaaaccggtgtgtgcggtttatgctgtaaatacctggagtgttcagaatatgttttgttcgaggttctgtgtactgaagtacggagtactaatgaatttccttgtacataacatcgaataaaatcactgggttttactttggtttc

SEQ ID NO: 24068 - protein, 209 aa, Zea mays subsp. mays
  peptide (1)..(209): Ceres Seq. ID no. 12350332
  misc_feature (1)..(209): NCBI GI NO: 31415923 NR Description: unknown protein
  misc_feature (1)..(193): NCBI GI NO: 31415945 NR Description: hypothetical protein
  misc_feature (22)..(209): NCBI GI NO: 18397956 NR Description: expressed protein; protein id: At2g15890
MLSPTTLRPLVPAAAPAHLTACFLPASGRRAPAAAVRAVRNYDSIPKREPFTSNRSTLDEFLRLDKPLVQRTKDQITDYCMTVEGDECCSCWDAYFELNKLEQELPKEEISRMVKDSEGDVRYLIESIHHRSDLRKKMAEKSRNSVPSGSQGQTAKPRPFPVPDGIPKTQEELTEEEEALMPESPYTRLLRRMGRYPEWYTPRPDHETD

SEQ ID NO: 24069 - protein, 129 aa, Zea mays subsp. mays
  peptide (1)..(129): Ceres Seq. ID no. 12350333
  misc_feature (1)..(129): NCBI GI NO: 31415923 NR Description: unknown protein
  misc_feature (1)..(113): NCBI GI NO: 31415945 NR Description: hypothetical protein
  misc_feature (1)..(129): NCBI GI NO: 18397956 NR Description: expressed protein; protein id: At2g15890
MTVEGDECCSCWDAYFELNKLEQELPKEEISRMVKDSEGDVRYLIESIHHRSDLRKKMAEKSRNSVPSGSQGQTAKPRPFPVPDGIPKTQEELTEEEEALMPESPYTRLLRRMGRYPEWYTPRPDHETD

SEQ ID NO: 24070 - DNA, 936 bp, Zea mays subsp. mays
  misc_feature (1)..(936): Ceres Seq. ID no. 13564260
gccccgtcccaaatccccctgtcccgctaggattcccccgaaaccctcccccaaaaccccagagcggagaagagcgcaagatgttcggcttcgggcaccacggccaccacggccagaacccgccggcgcacggcggcgtgcaccagcccaccttcaagatcttctgcaaggccgacgaggggtactgcctcaccgtccgcgacggcaacgtggtgctggcccccgccaacccgcgcgacgagcaccagcactggtacaaggacatgcgcttcagcacccaggtcaaggacgaggagggcaaccctgcgttcgccctcgtcaacaaggccactggggctcgccatcaagcactccctcggccagtcccacccggtgaagctggtgccgttcaacccggagtaccaggacgagtcggtgctgtggacggagagcggcgacgtgggcaagggcttccgctgcatccgcatggtgaacaacatccgcctcaacttcgacgccttccacggcggacaagggccacggcggcgtgcgcgacggcaccaacatcgtgctctggaagtggtgcgagggcgacaaccagcgctggaagatcgtcccctggtaaatgtgctgttctgtggctgcactggtcatcaccatgatctggagctttgaaggcatagccacctgtggtcagcaactgctgccgtgttgctagaataaagttggtggcgatcgatcgatcgatctttggtgatgggtgtccctccctgtgtgtttgtgtttagttccagtcgtttgtgaggaagtcagttatgtttgagtgagaggggtacttcgctcttcggttaactctgtacttgtcatgaggagagttttcatacccggagtgtagaaccctgtactgtactcggatccttcctttttcatccaagtgggttttattttatcaaccgc

SEQ ID NO: 24071 - protein, 212 aa, Zea mays subsp. mays
  peptide (1)..(212): Ceres Seq. ID no. 13564261
  misc_feature (51)..(87): Pfam Name: Pfam Description:  QXW lectin repeat
  misc_feature (27)..(111): NCBI GI NO: 7489571 NR Description: r40c1 protein - rice
  misc_feature (27)..(111): NCBI GI NO: 34902150 NR Description: Putative r40c1 protein - rice
  misc_feature (27)..(111): NCBI GI NO: 7489572 NR Description: r40g2 protein - rice (fragment)
  misc_feature (27)..(111): NCBI GI NO: 34394517 NR Description: r40g2 protein
  misc_feature (48)..(111): NCBI GI NO: 7489573 NR Description: r40g3 protein - rice
  misc_feature (44)..(111): NCBI GI NO: 34394517 NR Description: r40g2 protein
  misc_feature (44)..(111): NCBI GI NO: 34394518 NR Description: putative r40c2 protein
  misc_feature (44)..(111): NCBI GI NO: 7489572 NR Description: r40g2 protein - rice (fragment)
  misc_feature (41)..(111): NCBI GI NO: 34894060 NR Description: putative r40c1 protein
  misc_feature (88)..(111): NCBI GI NO: 34394518 NR Description: putative r40c2 protein
PVPNPPVPLGFPRNPPPKPQSGEERKMFGFGHHGHHGQNPPAHGGVHQPTFKIFCKADEGYCLTVRDGNVVLAPANPRDEHQHWYKDMRFSTQVKDEEGNPAFALVNKATGARHQALPRPVPPGEAGAVQPGVPGRVGAVDGERRRGQGLPLHPHGEQHPPQLRRLPRRTRATAACATAPTSCSGSGARATTSAGRSSPGKCAVLWLHWSSP

SEQ ID NO: 24072 - protein, 186 aa, Zea mays subsp. mays
  peptide (1)..(186): Ceres Seq. ID no. 13564262
  misc_feature (25)..(61): Pfam Name: Pfam Description:  QXW lectin repeat
  misc_feature (1)..(85): NCBI GI NO: 7489571 NR Description: r40c1 protein - rice
  misc_feature (1)..(85): NCBI GI NO: 34902150 NR Description: Putative r40c1 protein - rice
  misc_feature (1)..(85): NCBI GI NO: 7489572 NR Description: r40g2 protein - rice (fragment)
  misc_feature (1)..(85): NCBI GI NO: 34394517 NR Description: r40g2 protein
  misc_feature (22)..(85): NCBI GI NO: 7489573 NR Description: r40g3 protein - rice
  misc_feature (18)..(85): NCBI GI NO: 34394517 NR Description: r40g2 protein
  misc_feature (18)..(85): NCBI GI NO: 34394518 NR Description: putative r40c2 protein
  misc_feature (18)..(85): NCBI GI NO: 7489572 NR Description: r40g2 protein - rice (fragment)
  misc_feature (15)..(85): NCBI GI NO: 34894060 NR Description: putative r40c1 protein
  misc_feature (62)..(85): NCBI GI NO: 34394518 NR Description: putative r40c2 protein
MFGFGHHGHHGQNPPAHGGVHQPTFKIFCKADEGYCLTVRDGNVVLAPANPRDEHQHWYKDMRFSTQVKDEEGNPAFALVNKATGARHQALPRPVPPGEAGAVQPGVPGRVGAVDGERRRGQGLPLHPHGEQHPPQLRRLPRRTRATAACATAPTSCSGSGARATTSAGRSSPGKCAVLWLHWSSP

SEQ ID NO: 24073 - protein, 125 aa, Zea mays subsp. mays
  peptide (1)..(125): Ceres Seq. ID no. 13564263
  misc_feature (1)..(24): NCBI GI NO: 7489571 NR Description: r40c1 protein - rice
  misc_feature (1)..(24): NCBI GI NO: 34902150 NR Description: Putative r40c1 protein - rice
  misc_feature (1)..(24): NCBI GI NO: 7489572 NR Description: r40g2 protein - rice (fragment)
  misc_feature (1)..(24): NCBI GI NO: 34394517 NR Description: r40g2 protein
  misc_feature (1)..(24): NCBI GI NO: 7489573 NR Description: r40g3 protein - rice
  misc_feature (1)..(24): NCBI GI NO: 34394517 NR Description: r40g2 protein
  misc_feature (1)..(24): NCBI GI NO: 34394518 NR Description: putative r40c2 protein
  misc_feature (1)..(24): NCBI GI NO: 7489572 NR Description: r40g2 protein - rice (fragment)
  misc_feature (1)..(24): NCBI GI NO: 34894060 NR Description: putative r40c1 protein
  misc_feature (1)..(24): NCBI GI NO: 34394518 NR Description: putative r40c2 protein
MRFSTQVKDEEGNPAFALVNKATGARHQALPRPVPPGEAGAVQPGVPGRVGAVDGERRRGQGLPLHPHGEQHPPQLRRLPRRTRATAACATAPTSCSGSGARATTSAGRSSPGKCAVLWLHWSSP

SEQ ID NO: 24074 - DNA, 934 bp, Zea mays subsp. mays
  misc_feature (1)..(934): Ceres Seq. ID no. 12344895
atcaatccctaatctcggcggatggctccttccttccccgcgctcgctcccacggcgaccgagctccaaaacaacgccgccgccagatccgcccgccaccggccgtcctcagctcatgccggctgcaccaagccagatccaaccccgcaccctcctccagcaccaccagctcgccctcctgtgtcccagctcccatcgccaccgcccccaccaccaccgccggcccgcccttccgacccagctgtaagccgtgcgccggcggccccccgccctaccaagagggtgaggtttgcattcactacaagcaccatgccgccccgcattcaccacccctcccccgtatcccgcagccataatgccacccccgccccgatagctggtttgaagcccccctggaagctacgaccgcattgaagatgaggatcttgaaggatggacgacgattcggtgcaggcgtggacgcgtcacccgcgtaggcctaggccgcgccccagcggcgcctcgcctgctctcagctcaagcccctagccgtcttatgcctcgtgtgaagatgctagagaagacaaaaggcaagcgctgatgatcctgcaagtggtaatgaatagagagcctataaagcgcctttctggcgcacaatctgaagctgcaaagcaaacgcaatgctgccgtcgggagattggaactacaatatctttgcatctctagctagtggatgttcctttggactgatgactttgccgtagaggttagccgtcactcgtcactggacagtgcgtttgctgctatatcaagaggttcttcttttttttaagcttggtttcaatgtatacaaagtttcgtttaaggaccctttgctaccgagtgtagtccaaaggctacttaactcataaacacatgagacacaaagatataggaggtattgatactttcattc

SEQ ID NO: 24075 - protein, 130 aa, Zea mays subsp. mays
  peptide (1)..(130): Ceres Seq. ID no. 12344896
  misc_feature (2)..(124): Pfam Name: Pfam Description:  Extensin-like region
  misc_feature (35)..(123): NCBI GI NO: 21219450 NR Description: putative secreted proline-rich protein
  misc_feature (38)..(124): NCBI GI NO: 6523547 NR Description: hydroxyproline-rich glycoprotein DZ-HRGP
  misc_feature (32)..(89): NCBI GI NO: 141279 NR Description: HYPOTHETICAL PROLINE-RICH PROTEIN
  misc_feature (38)..(130): NCBI GI NO: 15230108 NR Description: protein kinase, putative; protein id: At3g24400.1
  misc_feature (6)..(124): NCBI GI NO: 13265426 NR Description: At2g14890 [Arabidopsis thaliana]
  misc_feature (6)..(124): NCBI GI NO: 15226024 NR Description: arabinogalactan-protein
  misc_feature (2)..(130): NCBI GI NO: 34894166 NR Description: P0439B06.4
  misc_feature (25)..(117): NCBI GI NO: 539030 NR Description: cysteine-rich extensin-like protein 2 precursor -common tobacco
  misc_feature (1)..(117): NCBI GI NO: 134920 NR Description: SULFATED SURFACE GLYCOPROTEIN 185 (SSG 185)
  misc_feature (38)..(130): NCBI GI NO: 6523547 NR Description: hydroxyproline-rich glycoprotein DZ-HRGP
MAPSFPALAPTATELQNNAAARSARHRPSSAHAGCTKPDPTPHPPPAPPARPPVSQLPSPPPPPPPPARPSDPAVSRAPAAPRPTKRVRFAFTTSTMPPRIHHPSPVSRSHNATPAPIAGLKPPWKLRPH

SEQ ID NO: 24076 - protein, 117 aa, Zea mays subsp. mays
  peptide (1)..(117): Ceres Seq. ID no. 12344897
QSLISADGSFLPRARSHGDRAPKQRRRQIRPPPAVLSSCRLHQARSNPAPSSSTTSSPSCVPAPIATAPTTTAGPPFRPSCKPCAGGPPPYQEGEVCIHYKHHAAPHSPPLPRIPQP

SEQ ID NO: 24077 - protein, 81 aa, Zea mays subsp. mays
  peptide (1)..(81): Ceres Seq. ID no. 12344898
SIPNLGGWLLPSPRSLPRRPSSKTTPPPDPPATGRPQLMPAAPSQIQPRTLLQHHQLALLCPSSHRHRPHHHRRPALPTQL

SEQ ID NO: 24078 - DNA, 1385 bp, Zea mays subsp. mays
  misc_feature (1)..(1385): Ceres Seq. ID no. 12348953
acctgcacgctggccccccgccccgccgcgggatcaaatacgccgcctccgcccgtccactccctcgccgcccccgtctcctctcctctcctctcccccgcatccacggccgcaggccgcagccagccactcgacgatctagtcgtctctctctccccgctctgccgcctcgctgccgcggcttcccgtcggctggaggatgaaggtcacggtcgtgtcccggagcggccgggaggtcgtcaagggcggcatcgacctcaaggactcggccaaggtcgcggacctgcaggaggccatccatgccaggactaagaagtattatccttctaggcagcggctcaccctcccccttcaacctggaaaaggcgggaagccagttgtcctcagtccgaaggccagcctgctagaatactgcgagaagggttctgggtcactgacagtggtcttcaaagatttagggccacaggtctactacagcacactgttcttcttcgagtacctgggtcctctcatcatctaccccatgttctactatctgcctgtctacaaatacttcgggtacgagggggagcgggccatgcaccctgtccagacctacgccatgtactactggtgcttccactacttcaagcggatcatggagacattcttcgtgcaccgcttcagccacgcgacgtcgccgctctcgaacgtcttcaggaactgtgcctactactggaccttcggcgcctacattgcttactactgcaaccacccgctgtacaccccagtgagtgatctgcagatgaagattgggtttggttttggggtcgtctgccaggtcgcgaacttctactgccacatcctgctgcggaacctcaggagcccaagcggcagcggcgggtaccagatcccccgcggtttcttgttcaacatcgtgacctgcgccaattacaccaccgagatctatcagtgggtcggcttcaacatcgccacgcagaccgtggcaggttacgtcttccttgtcgtggcggcaggcatcatgaccaactgggcgctcggcaagcacagccgtctgaagaagctgtttgacggcaaggatgggaggcccaagtaccctcgccggtgggtgattctccctccgttcctgtgaagaggtggtggtggtcggcctattgtgattcgatgtctacagacagttgtactgtactaatcgtgcctgtttagcggttgaacttggattccgttgtccgaaatttctaatccgaaagatggatttcattgtcttcttcttcttagcattatgtcactatctcacgtcgtcctgtctcaatacagtctaaggttcatgtgatgttatccccatttgtccacgcacaagtgaatgcagtcactatttcgatccg

SEQ ID NO: 24079 - protein, 310 aa, Zea mays subsp. mays
  peptide (1)..(310): Ceres Seq. ID no. 12348954
  misc_feature (158)..(310): Pfam Name: Pfam Description:  3-oxo-5-alpha-steroid 4-dehydrogenase
  misc_feature (1)..(310): NCBI GI NO: 34895848 NR Description: putative glycoprotein
  misc_feature (1)..(310): NCBI GI NO: 15233250 NR Description: synaptic glycoprotein SC2-like protein
  misc_feature (1)..(310): NCBI GI NO: 25004880 NR Description: steroid 5-alpha reductase [Cicer arietinum]
  misc_feature (38)..(310): NCBI GI NO: 39590267 NR Description: Hypothetical protein CBG11196
  misc_feature (38)..(310): NCBI GI NO: 17531783 NR Description: Synaptic glycoprotein SC2 (35.1 kD)
  misc_feature (24)..(291): NCBI GI NO: 13111809 NR Description: Unknown (protein for IMAGE:2901253) [Homo sapiens]
  misc_feature (24)..(291): NCBI GI NO: 24475816 NR Description: glycoprotein, synaptic 2
  misc_feature (24)..(291): NCBI GI NO: 30585427 NR Description: Homo sapiens glycoprotein, synaptic 2
  misc_feature (24)..(310): NCBI GI NO: 33585860 NR Description: Glycoprotein, synaptic 2 [Xenopus laevis]
  misc_feature (20)..(291): NCBI GI NO: 31418870 NR Description: Unknown (protein for MGC:64025) [Danio rerio]
MKVTVVSRSGREVVKGGIDLKDSAKVADLQEAIHARTKKYYPSRQRLTLPLQPGKGGKPVVLSPKASLLEYCEKGSGSLTVVFKDLGPQVYYSTLFFFEYLGPLIIYPMFYYLPVYKYFGYEGERAMHPVQTYAMYYWCFHYFKRIMETFFVHRFSHATSPLSNVFRNCAYYWTFGAYIAYYCNHPLYTPVSDLQMKIGFGFGVVCQVANFYCHILLRNLRSPSGSGGYQIPRGFLFNIVTCANYTTEIYQWVGFNIATQTVAGYVFLVVAAGIMTNWALGKHSRLKKLFDGKDGRPKYPRRWVILPPFL

SEQ ID NO: 24080 - protein, 202 aa, Zea mays subsp. mays
  peptide (1)..(202): Ceres Seq. ID no. 12348955
  misc_feature (50)..(202): Pfam Name: Pfam Description:  3-oxo-5-alpha-steroid 4-dehydrogenase
  misc_feature (1)..(202): NCBI GI NO: 34895848 NR Description: putative glycoprotein
  misc_feature (1)..(202): NCBI GI NO: 15233250 NR Description: synaptic glycoprotein SC2-like protein
  misc_feature (1)..(202): NCBI GI NO: 25004880 NR Description: steroid 5-alpha reductase [Cicer arietinum]
  misc_feature (1)..(202): NCBI GI NO: 39590267 NR Description: Hypothetical protein CBG11196
  misc_feature (1)..(202): NCBI GI NO: 17531783 NR Description: Synaptic glycoprotein SC2 (35.1 kD)
  misc_feature (1)..(183): NCBI GI NO: 13111809 NR Description: Unknown (protein for IMAGE:2901253) [Homo sapiens]
  misc_feature (1)..(183): NCBI GI NO: 24475816 NR Description: glycoprotein, synaptic 2
  misc_feature (1)..(183): NCBI GI NO: 30585427 NR Description: Homo sapiens glycoprotein, synaptic 2
  misc_feature (1)..(202): NCBI GI NO: 33585860 NR Description: Glycoprotein, synaptic 2 [Xenopus laevis]
  misc_feature (1)..(183): NCBI GI NO: 31418870 NR Description: Unknown (protein for MGC:64025) [Danio rerio]
MFYYLPVYKYFGYEGERAMHPVQTYAMYYWCFHYFKRIMETFFVHRFSHATSPLSNVFRNCAYYWTFGAYIAYYCNHPLYTPVSDLQMKIGFGFGVVCQVANFYCHILLRNLRSPSGSGGYQIPRGFLFNIVTCANYTTEIYQWVGFNIATQTVAGYVFLVVAAGIMTNWALGKHSRLKKLFDGKDGRPKYPRRWVILPPFL

SEQ ID NO: 24081 - protein, 184 aa, Zea mays subsp. mays
  peptide (1)..(184): Ceres Seq. ID no. 12348956
  misc_feature (32)..(184): Pfam Name: Pfam Description:  3-oxo-5-alpha-steroid 4-dehydrogenase
  misc_feature (1)..(184): NCBI GI NO: 34895848 NR Description: putative glycoprotein
  misc_feature (1)..(184): NCBI GI NO: 15233250 NR Description: synaptic glycoprotein SC2-like protein
  misc_feature (1)..(184): NCBI GI NO: 25004880 NR Description: steroid 5-alpha reductase [Cicer arietinum]
  misc_feature (1)..(184): NCBI GI NO: 39590267 NR Description: Hypothetical protein CBG11196
  misc_feature (1)..(184): NCBI GI NO: 17531783 NR Description: Synaptic glycoprotein SC2 (35.1 kD)
  misc_feature (1)..(165): NCBI GI NO: 13111809 NR Description: Unknown (protein for IMAGE:2901253) [Homo sapiens]
  misc_feature (1)..(165): NCBI GI NO: 24475816 NR Description: glycoprotein, synaptic 2
  misc_feature (1)..(165): NCBI GI NO: 30585427 NR Description: Homo sapiens glycoprotein, synaptic 2
  misc_feature (1)..(184): NCBI GI NO: 33585860 NR Description: Glycoprotein, synaptic 2 [Xenopus laevis]
  misc_feature (1)..(165): NCBI GI NO: 31418870 NR Description: Unknown (protein for MGC:64025) [Danio rerio]
MHPVQTYAMYYWCFHYFKRIMETFFVHRFSHATSPLSNVFRNCAYYWTFGAYIAYYCNHPLYTPVSDLQMKIGFGFGVVCQVANFYCHILLRNLRSPSGSGGYQIPRGFLFNIVTCANYTTEIYQWVGFNIATQTVAGYVFLVVAAGIMTNWALGKHSRLKKLFDGKDGRPKYPRRWVILPPFL

SEQ ID NO: 24082 - DNA, 1825 bp, Zea mays subsp. mays
  misc_feature (1)..(1825): Ceres Seq. ID no. 12373878
atcaactctatccagtttcctgtctcgtttcatattgttttcccagaaatggaccggatgtgatttgtattcgtttttatccctaaatctgagtttagggggatttttagggaaataatggaggtgctgtaagtacccttccgtctgtctctccctcactcccttcgcgacgactacgcccggtgctcttcttcggccccaggtagctttcgctgccgtcctacggcaggtgcccaagtcttcttcgggcccttcaacgacgacgagcactaccagtttgttgaagatggaaaataaagagttgttcaagatgggaagtgcagatacagatactgctgcactgcacaaggagtgggatgatgttctctgtccgatatgcatggaccatccgcacaatgctgtccttctgttgtgcagctcccatgacaaaggatgccgatcctatatatgtgatacaagctataggcattcaaattgcctagataggttcaagaaaatgaaagtgaatgatgaggacagtccttcacagtcaagctcgtccatgcctaggggtacaggaaaccaaaatgttgtccagagatctcgttttggtcccactagagagagccccaggctacacatagacatatctgtacccgatgaaacttccgatcatcaagatgccagccacagacctgctgccatagttggagaacaggaagaaaacatctacaatgaaggcccagatttgacattggaaactcacgaggttgggatcaatggttcttcagtgtcaagcgacgtgtcaagcttaaatcaattgttgtgcccactgtgcagaggggtggttagtggctggaagatcatcaaagaagctagacagtatttggatgggaaatccagagcttgctcacgagaagcctgcatgttttctggtaactacagggagatccgtagacatgccagaagggtgcaccccacaacaaggcctgctgatgttgatccatcaagacgtcgtgcgtggcaccacctggagcatcagcgggattatgctgacatagtaagcgcaataaggtccgctatgcctggggcagttgtgcttggtgattatgctattgaaggcggagaaatattttcacatgaccgggaaaccagtgaaccaagtgggtctcttctgacaacattctttctatttcatatgctcagcagtagtccgattagatcaggtgatgagccaagaggcacatcaaggggcctgagaaggcagaggagacgctatctgtggggagagaatttgttaggtctccaatatgatgatgatgatgacgacgacgataacgaaggggaggaggatgaagtggatgctgtggatgaagttcagagaccaaggagtcgccggaggttcataagatcaagatcagaggagcgggcctaatacattgtggagatgtggatgatgtgcttccttgcttggttaaaatgctgtgcgcatccctgcaatcaaagaccaaaaggcaaatggacctcaagttcaagtttagatgatttggatgcgtctgacaccatccatgtgccctctttaatctgacgatcataagaaacactcattcttagggcaaagctggactgctctcagaccagaactgacatggaagctagcgtttggagatgctcgctccatcacaacagctggtgccgtcactcattcaccatgcctttttacctttgcactgcgtgtcatctgcatctgtagtatattctttccgtattacgtctcattgagtccatgctgctactgttctggttgatatccttgttcaaaggctataaaatttattatattttc

SEQ ID NO: 24083 - protein, 375 aa, Zea mays subsp. mays
  peptide (1)..(375): Ceres Seq. ID no. 12373879
  misc_feature (1)..(375): NCBI GI NO: 38346521 NR Description: OSJNBa0027H09.16
  misc_feature (109)..(371): NCBI GI NO: 15230170 NR Description: unknown protein; protein id: At3g24740
  misc_feature (21)..(373): NCBI GI NO: 18404727 NR Description: expressed protein; protein id: At3g25910
  misc_feature (167)..(374): NCBI GI NO: 15221290 NR Description: unknown protein; protein id: At1g68140
  misc_feature (9)..(89): NCBI GI NO: 15221290 NR Description: unknown protein; protein id: At1g68140
  misc_feature (171)..(286): NCBI GI NO: 34912600 NR Description: P0046B10.17
  misc_feature (11)..(99): NCBI GI NO: 34912600 NR Description: P0046B10.17
  misc_feature (173)..(356): NCBI GI NO: 7486671 NR Description: hypothetical protein F8F16
  misc_feature (173)..(356): NCBI GI NO: 18417801 NR Description: expressed protein; protein id: At4g31410
  misc_feature (14)..(68): NCBI GI NO: 7486671 NR Description: hypothetical protein F8F16
MENKELFKMGSADTDTAALHKEWDDVLCPICMDHPHNAVLLLCSSHDKGCRSYICDTSYRHSNCLDRFKKMKVNDEDSPSQSSSSMPRGTGNQNVVQRSRFGPTRESPRLHIDISVPDETSDHQDASHRPAAIVGEQEENIYNEGPDLTLETHEVGINGSSVSSDVSSLNQLLCPLCRGVVSGWKIIKEARQYLDGKSRACSREACMFSGNYREIRRHARRVHPTTRPADVDPSRRRAWHHLEHQRDYADIVSAIRSAMPGAVVLGDYAIEGGEIFSHDRETSEPSGSLLTTFFLFHMLSSSPIRSGDEPRGTSRGLRRQRRRYLWGENLLGLQYDDDDDDDDNEGEEDEVDAVDEVQRPRSRRRFIRSRSEERA

SEQ ID NO: 24084 - protein, 367 aa, Zea mays subsp. mays
  peptide (1)..(367): Ceres Seq. ID no. 12373880
  misc_feature (1)..(367): NCBI GI NO: 38346521 NR Description: OSJNBa0027H09.16
  misc_feature (101)..(363): NCBI GI NO: 15230170 NR Description: unknown protein; protein id: At3g24740
  misc_feature (13)..(365): NCBI GI NO: 18404727 NR Description: expressed protein; protein id: At3g25910
  misc_feature (159)..(366): NCBI GI NO: 15221290 NR Description: unknown protein; protein id: At1g68140
  misc_feature (1)..(81): NCBI GI NO: 15221290 NR Description: unknown protein; protein id: At1g68140
  misc_feature (163)..(278): NCBI GI NO: 34912600 NR Description: P0046B10.17
  misc_feature (3)..(91): NCBI GI NO: 34912600 NR Description: P0046B10.17
  misc_feature (165)..(348): NCBI GI NO: 7486671 NR Description: hypothetical protein F8F16
  misc_feature (165)..(348): NCBI GI NO: 18417801 NR Description: expressed protein; protein id: At4g31410
  misc_feature (6)..(60): NCBI GI NO: 7486671 NR Description: hypothetical protein F8F16
MGSADTDTAALHKEWDDVLCPICMDHPHNAVLLLCSSHDKGCRSYICDTSYRHSNCLDRFKKMKVNDEDSPSQSSSSMPRGTGNQNVVQRSRFGPTRESPRLHIDISVPDETSDHQDASHRPAAIVGEQEENIYNEGPDLTLETHEVGINGSSVSSDVSSLNQLLCPLCRGVVSGWKIIKEARQYLDGKSRACSREACMFSGNYREIRRHARRVHPTTRPADVDPSRRRAWHHLEHQRDYADIVSAIRSAMPGAVVLGDYAIEGGEIFSHDRETSEPSGSLLTTFFLFHMLSSSPIRSGDEPRGTSRGLRRQRRRYLWGENLLGLQYDDDDDDDDNEGEEDEVDAVDEVQRPRSRRRFIRSRSEERA

SEQ ID NO: 24085 - protein, 344 aa, Zea mays subsp. mays
  peptide (1)..(344): Ceres Seq. ID no. 12373881
  misc_feature (1)..(344): NCBI GI NO: 38346521 NR Description: OSJNBa0027H09.16
  misc_feature (78)..(340): NCBI GI NO: 15230170 NR Description: unknown protein; protein id: At3g24740
  misc_feature (1)..(342): NCBI GI NO: 18404727 NR Description: expressed protein; protein id: At3g25910
  misc_feature (136)..(343): NCBI GI NO: 15221290 NR Description: unknown protein; protein id: At1g68140
  misc_feature (1)..(58): NCBI GI NO: 15221290 NR Description: unknown protein; protein id: At1g68140
  misc_feature (140)..(255): NCBI GI NO: 34912600 NR Description: P0046B10.17
  misc_feature (1)..(68): NCBI GI NO: 34912600 NR Description: P0046B10.17
  misc_feature (142)..(325): NCBI GI NO: 7486671 NR Description: hypothetical protein F8F16
  misc_feature (142)..(325): NCBI GI NO: 18417801 NR Description: expressed protein; protein id: At4g31410
  misc_feature (1)..(37): NCBI GI NO: 7486671 NR Description: hypothetical protein F8F16
MDHPHNAVLLLCSSHDKGCRSYICDTSYRHSNCLDRFKKMKVNDEDSPSQSSSSMPRGTGNQNVVQRSRFGPTRESPRLHIDISVPDETSDHQDASHRPAAIVGEQEENIYNEGPDLTLETHEVGINGSSVSSDVSSLNQLLCPLCRGVVSGWKIIKEARQYLDGKSRACSREACMFSGNYREIRRHARRVHPTTRPADVDPSRRRAWHHLEHQRDYADIVSAIRSAMPGAVVLGDYAIEGGEIFSHDRETSEPSGSLLTTFFLFHMLSSSPIRSGDEPRGTSRGLRRQRRRYLWGENLLGLQYDDDDDDDDNEGEEDEVDAVDEVQRPRSRRRFIRSRSEERA

SEQ ID NO: 24086 - DNA, 1429 bp, Zea mays subsp. mays
  misc_feature (1)..(1429): Ceres Seq. ID no. 12407830
tttttataagggagcaagagggctcggcggcagcggcgacggcgaccgcgacggcagtggcagtggcagtggcaggctgtcagccgtccctatcttgtgtgtcaagcgcgaactccctatctcgtgtgtcaagcgcgttcgcgtccgttctaggcacaggcagccgaggcgagccccttccgctcagtggccgccgccggaccgtggacgcagctagcccatcagcccatggcagggacggacgtcgcaggctccgcacgcggctccgatgccgcgctcgggaagacgggcgaaccacccgccgcggcgcggctctggcgcagccaagaaggtggctctcgctctgctagcctccttctcggcgctgctgtacagccagattcagccgccgccgtctaagatccccggcatgccgggcgggcctccggtcacggcgcccagaacaaggctcaaggacggccggcacttggcgtacctggaatctggcgtcccaaaggagaaggccaagtacaagatcatattcgttcacggcttcgactgctgtagatacgacgtgctgaatgtctcccaggggctgttggaagagctgggaatctacctgttgtccttcgaccggcccgggtacgccgagagcgacgcccacccggcccggacagagaagagcatcgcccttgacatcgcggagctggcggacaatctccagctcggccccaagttccatctcatcggcttctccatgggcggcgagatcatgtggagctgcctcaagtacatcccgcacaggctcgccggcgtggcgattcttgccccggtgggcaactactggtggtccggcttcccgccggacgtgttcaaggaggcgtggcgcgtgcagtttccgcaagaccagcgcgcggtctgggtcgctcaccacctgccgtggctgacgcactggtggaacacccagaagctgttccgcggatccagcgtcaaggacggcgaccctgccatgctatccaaggaggacaggcttgtagctgacaagttcgagaagcgaacctatgagaagcaggtcagacagcagggagagcacgactcgctccaccgcgacatgatggtcggtttcgggaagtgggactggagcccgctggagatggagaacccgttcgccggcggcctagacgaggtgaaggtgcacctgtggcacggcgtcgaggacctctacgtgccggttcaactgtcgcggtacatcagcgagaggctcccatgggtcatctaccatgagctcccgacggccggccacctcttcccggtcgccgacggcatgcccgacgctatcgtcaggtcgcttctgctcggagatgagtgatcagtatttaggatgcgcggatccaggacttgtgcactttttgcagcttcatcagtaataaaaatacactcggaggtcgag

SEQ ID NO: 24087 - protein, 359 aa, Zea mays subsp. mays
  peptide (1)..(359): Ceres Seq. ID no. 12407831
  misc_feature (109)..(353): Pfam Name: Pfam Description:  alpha/beta hydrolase fold
  misc_feature (20)..(359): NCBI GI NO: 38346334 NR Description: OSJNBa0073L04.5
  misc_feature (16)..(358): NCBI GI NO: 18404095 NR Description: expressed protein; protein id: At2g36290
  misc_feature (16)..(358): NCBI GI NO: 28416665 NR Description: At2g36290 [Arabidopsis thaliana]
  misc_feature (22)..(359): NCBI GI NO: 18410575 NR Description: expressed protein; protein id: At1g74280
  misc_feature (4)..(359): NCBI GI NO: 21537089 NR Description: unknown [Arabidopsis thaliana]
  misc_feature (1)..(359): NCBI GI NO: 15228377 NR Description: putative protein; protein id: At3g48410
  misc_feature (24)..(355): NCBI GI NO: 21592662 NR Description: unknown [Arabidopsis thaliana]
  misc_feature (32)..(355): NCBI GI NO: 18410582 NR Description: expressed protein; protein id: At1g74300
  misc_feature (4)..(358): NCBI GI NO: 15221193 NR Description: unknown protein; protein id: At1g74290.1
  misc_feature (172)..(359): NCBI GI NO: 25407040 NR Description: protein T23G18.18
MPRSGRRANHPPRRGSGAAKKVALALLASFSALLYSQIQPPPSKIPGMPGGPPVTAPRTRLKDGRHLAYLESGVPKEKAKYKIIFVHGFDCCRYDVLNVSQGLLEELGIYLLSFDRPGYAESDAHPARTEKSIALDIAELADNLQLGPKFHLIGFSMGGEIMWSCLKYIPHRLAGVAILAPVGNYWWSGFPPDVFKEAWRVQFPQDQRAVWVAHHLPWLTHWWNTQKLFRGSSVKDGDPAMLSKEDRLVADKFEKRTYEKQVRQQGEHDSLHRDMMVGFGKWDWSPLEMENPFAGGLDEVKVHLWHGVEDLYVPVQLSRYISERLPWVIYHELPTAGHLFPVADGMPDAIVRSLLLGDE

SEQ ID NO: 24088 - protein, 312 aa, Zea mays subsp. mays
  peptide (1)..(312): Ceres Seq. ID no. 12407832
  misc_feature (62)..(306): Pfam Name: Pfam Description:  alpha/beta hydrolase fold
  misc_feature (1)..(312): NCBI GI NO: 38346334 NR Description: OSJNBa0073L04.5
  misc_feature (1)..(311): NCBI GI NO: 18404095 NR Description: expressed protein; protein id: At2g36290
  misc_feature (1)..(311): NCBI GI NO: 28416665 NR Description: At2g36290 [Arabidopsis thaliana]
  misc_feature (1)..(312): NCBI GI NO: 18410575 NR Description: expressed protein; protein id: At1g74280
  misc_feature (1)..(312): NCBI GI NO: 21537089 NR Description: unknown [Arabidopsis thaliana]
  misc_feature (1)..(312): NCBI GI NO: 15228377 NR Description: putative protein; protein id: At3g48410
  misc_feature (1)..(308): NCBI GI NO: 21592662 NR Description: unknown [Arabidopsis thaliana]
  misc_feature (1)..(308): NCBI GI NO: 18410582 NR Description: expressed protein; protein id: At1g74300
  misc_feature (1)..(311): NCBI GI NO: 15221193 NR Description: unknown protein; protein id: At1g74290.1
  misc_feature (125)..(312): NCBI GI NO: 25407040 NR Description: protein T23G18.18
MPGGPPVTAPRTRLKDGRHLAYLESGVPKEKAKYKIIFVHGFDCCRYDVLNVSQGLLEELGIYLLSFDRPGYAESDAHPARTEKSIALDIAELADNLQLGPKFHLIGFSMGGEIMWSCLKYIPHRLAGVAILAPVGNYWWSGFPPDVFKEAWRVQFPQDQRAVWVAHHLPWLTHWWNTQKLFRGSSVKDGDPAMLSKEDRLVADKFEKRTYEKQVRQQGEHDSLHRDMMVGFGKWDWSPLEMENPFAGGLDEVKVHLWHGVEDLYVPVQLSRYISERLPWVIYHELPTAGHLFPVADGMPDAIVRSLLLGDE

SEQ ID NO: 24089 - protein, 203 aa, Zea mays subsp. mays
  peptide (1)..(203): Ceres Seq. ID no. 12407833
  misc_feature (1)..(197): Pfam Name: Pfam Description:  alpha/beta hydrolase fold
  misc_feature (1)..(203): NCBI GI NO: 38346334 NR Description: OSJNBa0073L04.5
  misc_feature (1)..(202): NCBI GI NO: 18404095 NR Description: expressed protein; protein id: At2g36290
  misc_feature (1)..(202): NCBI GI NO: 28416665 NR Description: At2g36290 [Arabidopsis thaliana]
  misc_feature (1)..(203): NCBI GI NO: 18410575 NR Description: expressed protein; protein id: At1g74280
  misc_feature (1)..(203): NCBI GI NO: 21537089 NR Description: unknown [Arabidopsis thaliana]
  misc_feature (1)..(203): NCBI GI NO: 15228377 NR Description: putative protein; protein id: At3g48410
  misc_feature (1)..(199): NCBI GI NO: 21592662 NR Description: unknown [Arabidopsis thaliana]
  misc_feature (1)..(199): NCBI GI NO: 18410582 NR Description: expressed protein; protein id: At1g74300
  misc_feature (1)..(202): NCBI GI NO: 15221193 NR Description: unknown protein; protein id: At1g74290.1
  misc_feature (16)..(203): NCBI GI NO: 25407040 NR Description: protein T23G18.18
MGGEIMWSCLKYIPHRLAGVAILAPVGNYWWSGFPPDVFKEAWRVQFPQDQRAVWVAHHLPWLTHWWNTQKLFRGSSVKDGDPAMLSKEDRLVADKFEKRTYEKQVRQQGEHDSLHRDMMVGFGKWDWSPLEMENPFAGGLDEVKVHLWHGVEDLYVPVQLSRYISERLPWVIYHELPTAGHLFPVADGMPDAIVRSLLLGDE

SEQ ID NO: 24090 - DNA, 1980 bp, Zea mays subsp. mays
  misc_feature (1)..(1980): Ceres Seq. ID no. 12355925
aagaacagcgccatttcttaatcgcagagcctaaacccggtcctcctaattatatcgccacagtgctgtcacaaccaggcgcgatcacaaagcttaaaacgcactggcatggccactactgtactggatgccggtgaactgcacttgcacccctatgccgtcgccgccgcggcggcggcattggtgtcgatgtacatggtgtggttctgggcgctgacacgggggctgtccgggccgcggatgtggcccctcgtcggcagcctgcccagcgtcgtcctgaaccgggcgcgggttcacgactggatcgtcgacaacctgcgctccacgggggaagcggccacgtaccagacgtgcatcttgccgatgccgttcctcgcgcggcgccaggggctggtgaccgtgacgtgcaacccgcggaacctggagcacatcctgcgcgtgcgtttcgacaactaccccaagggccccatgtggcaggcggcgttccacgacctcctgggccagggcatcttcaactccgacggcgagacgtggctgctccagcgcaagacggcggcgctcgagttcaccacgcggaccttgcgccaggcgatggcgcgctgggccaaccgcatcatcaagtaccgcctgtggagcatcctcgcggaccgctgcgaggccgccgcgagcgtcgacctccaggacctgctcctgcgcctcaccttcgacaacatctgcggcctcacgttcggcaaggaccccgagacactgtcgccggggctgcaggagaaccccttcgccaacgccttcgactccgccaccgaggcgacgctgcagaggttcctgttccccagcttcctgtggcgcgtcaagaaggcgctcggcgtcggcagcgagcggagcctccgcgagagcctcgcgaccgtggaccagtacatgacggaggccatcgcggcgcgcaaggcgacgccgtcggacgacctgctctccaggttcatgaagaagcgcgacggcagcggcagggcgttcccagaggacgtgctccagtgggtcgcgctcaacttcgtgctcgccgggcgcgacacgtcgtccgtcgcgctcagctggttcttctggatgctcatgctgcggcgcgacgtcgagcgcaaggtggtcctggagatcgtctccgtggtcagggagacgcggggcgacgaccgcaggaggtggaccgaggagccgctggacttcgacgagctggaccgcctcgtgtacctcaaggcagcgttggcggagacgctgcggctgtacccgtcggtgccgcaggactccaagtacgtggtggaggacgacgtgctgcccgatggcaccgtggtgccggccggctcagcggtcacctactccatctactcggttggacggatggagagcatctgggggaaggactgcgctgagttccggcccgagcggtggctctcggctgacggcacccgtttcgagccgcccaaggacgcgtaccgcttcgtggcgttcaacggcgggccccggacgtgcctgggcaaggacctggcgtacctgcagatgaagtccatcgcgtccgctgtgctgctgcgccactcggtcgagctcgtccctgggcacaaggtggagcagaagatgtcgctcactctgttcatgaagagcggcctccgcgtgcacgtcaagccgcgggacctcgccggctacgtcgcggcaccggaggacgcaccgcagctgggagcctttgtgatcccgaccacaactgcagcagctgcataagccttgcatatgcccgcgcacattggctcgggcttcttcctgctgaacttttttctgctatgtgatgtgcctctgcatgccaaagtcgtatcgttttctctgcacccccttcattagactgttaggtttgtggctacctggcgttttatggttgtaactgtgtatttttgtgtggatggatgtggtggtggatttaggataaaggatgaatgatacaaaattatt

SEQ ID NO: 24091 - protein, 548 aa, Zea mays subsp. mays
  peptide (1)..(548): Ceres Seq. ID no. 12355926
  misc_feature (22)..(520): NCBI GI NO: 19698839 NR Description: cytochrome P450 [Arabidopsis thaliana]
  misc_feature (22)..(520): NCBI GI NO: 15237768 NR Description: cytochrome p450 family; protein id: At5g58860
  misc_feature (22)..(520): NCBI GI NO: 7430725 NR Description: cytochrome P450 CYP86A1 - Arabidopsis thaliana
  misc_feature (20)..(529): NCBI GI NO: 10442763 NR Description: cytochrome P450 [Triticum aestivum]
  misc_feature (24)..(522): NCBI GI NO: 15236789 NR Description: cytochrome p450, putative; protein id: At4g00360
  misc_feature (24)..(522): NCBI GI NO: 18650607 NR Description: AT4g00360/A_IG005I10_21 [Arabidopsis thaliana]
  misc_feature (19)..(526): NCBI GI NO: 15223436 NR Description: cytochrome P450, putative; protein id: At1g01600.1
  misc_feature (19)..(526): NCBI GI NO: 26449891 NR Description: unknown protein [Arabidopsis thaliana]
  misc_feature (17)..(527): NCBI GI NO: 15225914 NR Description: cytochrome P450, putative; protein id: At2g45970
  misc_feature (17)..(522): NCBI GI NO: 15222515 NR Description: cytochrome P450, putative; protein id: At1g63710
MATTVLDAGELHLHPYAVAAAAAALVSMYMVWFWALTRGLSGPRMWPLVGSLPSVVLNRARVHDWIVDNLRSTGEAATYQTCILPMPFLARRQGLVTVTCNPRNLEHILRVRFDNYPKGPMWQAAFHDLLGQGIFNSDGETWLLQRKTAALEFTTRTLRQAMARWANRIIKYRLWSILADRCEAAASVDLQDLLLRLTFDNICGLTFGKDPETLSPGLQENPFANAFDSATEATLQRFLFPSFLWRVKKALGVGSERSLRESLATVDQYMTEAIAARKATPSDDLLSRFMKKRDGSGRAFPEDVLQWVALNFVLAGRDTSSVALSWFFWMLMLRRDVERKVVLEIVSVVRETRGDDRRRWTEEPLDFDELDRLVYLKAALAETLRLYPSVPQDSKYVVEDDVLPDGTVVPAGSAVTYSIYSVGRMESIWGKDCAEFRPERWLSADGTRFEPPKDAYRFVAFNGGPRTCLGKDLAYLQMKSIASAVLLRHSVELVPGHKVEQKMSLTLFMKSGLRVHVKPRDLAGYVAAPEDAPQLGAFVIPTTTAAAA

SEQ ID NO: 24092 - protein, 521 aa, Zea mays subsp. mays
  peptide (1)..(521): Ceres Seq. ID no. 12355927
  misc_feature (1)..(493): NCBI GI NO: 19698839 NR Description: cytochrome P450 [Arabidopsis thaliana]
  misc_feature (1)..(493): NCBI GI NO: 15237768 NR Description: cytochrome p450 family; protein id: At5g58860
  misc_feature (1)..(493): NCBI GI NO: 7430725 NR Description: cytochrome P450 CYP86A1 - Arabidopsis thaliana
  misc_feature (1)..(502): NCBI GI NO: 10442763 NR Description: cytochrome P450 [Triticum aestivum]
  misc_feature (1)..(495): NCBI GI NO: 15236789 NR Description: cytochrome p450, putative; protein id: At4g00360
  misc_feature (1)..(495): NCBI GI NO: 18650607 NR Description: AT4g00360/A_IG005I10_21 [Arabidopsis thaliana]
  misc_feature (1)..(499): NCBI GI NO: 15223436 NR Description: cytochrome P450, putative; protein id: At1g01600.1
  misc_feature (1)..(499): NCBI GI NO: 26449891 NR Description: unknown protein [Arabidopsis thaliana]
  misc_feature (1)..(500): NCBI GI NO: 15225914 NR Description: cytochrome P450, putative; protein id: At2g45970
  misc_feature (1)..(495): NCBI GI NO: 15222515 NR Description: cytochrome P450, putative; protein id: At1g63710
MYMVWFWALTRGLSGPRMWPLVGSLPSVVLNRARVHDWIVDNLRSTGEAATYQTCILPMPFLARRQGLVTVTCNPRNLEHILRVRFDNYPKGPMWQAAFHDLLGQGIFNSDGETWLLQRKTAALEFTTRTLRQAMARWANRIIKYRLWSILADRCEAAASVDLQDLLLRLTFDNICGLTFGKDPETLSPGLQENPFANAFDSATEATLQRFLFPSFLWRVKKALGVGSERSLRESLATVDQYMTEAIAARKATPSDDLLSRFMKKRDGSGRAFPEDVLQWVALNFVLAGRDTSSVALSWFFWMLMLRRDVERKVVLEIVSVVRETRGDDRRRWTEEPLDFDELDRLVYLKAALAETLRLYPSVPQDSKYVVEDDVLPDGTVVPAGSAVTYSIYSVGRMESIWGKDCAEFRPERWLSADGTRFEPPKDAYRFVAFNGGPRTCLGKDLAYLQMKSIASAVLLRHSVELVPGHKVEQKMSLTLFMKSGLRVHVKPRDLAGYVAAPEDAPQLGAFVIPTTTAAAA

SEQ ID NO: 24093 - protein, 519 aa, Zea mays subsp. mays
  peptide (1)..(519): Ceres Seq. ID no. 12355928
  misc_feature (1)..(491): NCBI GI NO: 19698839 NR Description: cytochrome P450 [Arabidopsis thaliana]
  misc_feature (1)..(491): NCBI GI NO: 15237768 NR Description: cytochrome p450 family; protein id: At5g58860
  misc_feature (1)..(491): NCBI GI NO: 7430725 NR Description: cytochrome P450 CYP86A1 - Arabidopsis thaliana
  misc_feature (1)..(500): NCBI GI NO: 10442763 NR Description: cytochrome P450 [Triticum aestivum]
  misc_feature (1)..(493): NCBI GI NO: 15236789 NR Description: cytochrome p450, putative; protein id: At4g00360
  misc_feature (1)..(493): NCBI GI NO: 18650607 NR Description: AT4g00360/A_IG005I10_21 [Arabidopsis thaliana]
  misc_feature (1)..(497): NCBI GI NO: 15223436 NR Description: cytochrome P450, putative; protein id: At1g01600.1
  misc_feature (1)..(497): NCBI GI NO: 26449891 NR Description: unknown protein [Arabidopsis thaliana]
  misc_feature (1)..(498): NCBI GI NO: 15225914 NR Description: cytochrome P450, putative; protein id: At2g45970
  misc_feature (1)..(493): NCBI GI NO: 15222515 NR Description: cytochrome P450, putative; protein id: At1g63710
MVWFWALTRGLSGPRMWPLVGSLPSVVLNRARVHDWIVDNLRSTGEAATYQTCILPMPFLARRQGLVTVTCNPRNLEHILRVRFDNYPKGPMWQAAFHDLLGQGIFNSDGETWLLQRKTAALEFTTRTLRQAMARWANRIIKYRLWSILADRCEAAASVDLQDLLLRLTFDNICGLTFGKDPETLSPGLQENPFANAFDSATEATLQRFLFPSFLWRVKKALGVGSERSLRESLATVDQYMTEAIAARKATPSDDLLSRFMKKRDGSGRAFPEDVLQWVALNFVLAGRDTSSVALSWFFWMLMLRRDVERKVVLEIVSVVRETRGDDRRRWTEEPLDFDELDRLVYLKAALAETLRLYPSVPQDSKYVVEDDVLPDGTVVPAGSAVTYSIYSVGRMESIWGKDCAEFRPERWLSADGTRFEPPKDAYRFVAFNGGPRTCLGKDLAYLQMKSIASAVLLRHSVELVPGHKVEQKMSLTLFMKSGLRVHVKPRDLAGYVAAPEDAPQLGAFVIPTTTAAAA

SEQ ID NO: 24094 - DNA, 1090 bp, Zea mays subsp. mays
  misc_feature (1)..(1090): Ceres Seq. ID no. 12387248
aatcagatgtcatactggggtctaaaaagattgaggctcctgtattatttcgtggaattggacacacggctaatccatcaaacagtttggttctgaaagtcctatctgcctctccatcagcatactcagctaacccaaagactaagttatcgttgcctccatcgcttactgggtcagctatatcactggtttcggttatgcaggcaagaaataatgctcgggtgctgctatctggatcacttgatctttttagcaaccggttcctgaagtctggtgttcaaaaggctggtagcaaaacgagatacgagagagctggaaatgagcaatttgtgacagagacaagcaaatgggtcttccatgagagggggcaccttaaggctgttaatgttaagcaccacaaggttggggagaccaatgaaccaggcatgtaccgcattaacgatgacctggaatactctgttgagatctatgaatggtctggaacaagctggaagccatatgttgctgatgatgtgcaactccagtttttcatgatgagtccttatgttctgaaaactatgtcgaatgacaacaagggtttatactcaacatccttcaaagttcctgatgtctacggagttttccagttcaaagttgagtaccagaggctgggatatactggtttgtcttttacaaagcagattccagtgcgcccttacaggcataacgagtatgagaggttcataacatcagcgtacccatactacactgcctcattttcaacgatgtgtgctttcttcatattctcgcttgtgtacctgtaccacaaataaaggactcacgggagcgcacaagtttctggaggctgctgatgcgacctagatctgtggccaagtgttacccggtgcaattttatggaatcatatatttgtagtaggccaacttagctagaattagacgaccgtgaccgcaatcatgggaaatttactcgtgctagtaggatgttcgatctgccccacaattttttgttttcggatccttctgatcagcacttgtgaaaacgtttacagtctgtagcattgaaaggatgatgaagcatgtagtgattttg

SEQ ID NO: 24095 - protein, 269 aa, Zea mays subsp. mays
  peptide (1)..(269): Ceres Seq. ID no. 12387249
  misc_feature (1)..(269): Pfam Name: Pfam Description:  Dolichyl-diphosphooligosaccharide- proteinglycosyltransferase 48kD subunit
  misc_feature (1)..(269): NCBI GI NO: 38175467 NR Description: putative dolichyl-di-phosphooligosaccharide-protein
  misc_feature (1)..(269): NCBI GI NO: 18425101 NR Description: dolichyl-di-phosphooligosaccharide- proteinglycotransferase
  misc_feature (1)..(269): NCBI GI NO: 21553942 NR Description: dolichyl-di-phosphooligosaccharide- proteinglycotransferase
  misc_feature (1)..(269): NCBI GI NO: 14334506 NR Description: putative dolichyl-di-phosphooligosaccharide-proteinglycotransferase
  misc_feature (1)..(269): NCBI GI NO: 8843726 NR Description: dolichyl-di-phosphooligosaccharide- proteinglycotransferase
  misc_feature (4)..(269): NCBI GI NO: 627424 NR Description: dolichyl-diphosphooligosaccharide- proteinglycotransferase
  misc_feature (4)..(269): NCBI GI NO: 20070197 NR Description: dolichyl-diphosphooligosaccharide- proteinglycosyltransferase
  misc_feature (4)..(269): NCBI GI NO: 21104416 NR Description: dolichyl-diphosphooligosaccharide- proteinglycosyltransferase
  misc_feature (4)..(269): NCBI GI NO: 30584753 NR Description: Homo sapiens dolichyl-diphosphooligosaccharide- protein glycosyltransferase
  misc_feature (4)..(269): NCBI GI NO: 1352649 NR Description: Dolichyl-diphosphooligosaccharide-- proteinglycosyltransferase 48 kDa subunit
SDVILGSKKIEAPVLFRGIGHTANPSNSLVLKVLSASPSAYSANPKTKLSLPPSLTGSAISLVSVMQARNNARVLLSGSLDLFSNRFLKSGVQKAGSKTRYERAGNEQFVTETSKWVFHERGHLKAVNVKHHKVGETNEPGMYRINDDLEYSVEIYEWSGTSWKPYVADDVQLQFFMMSPYVLKTMSNDNKGLYSTSFKVPDVYGVFQFKVEYQRLGYTGLSFTKQIPVRPYRHNEYERFITSAYPYYTASFSTMCAFFIFSLVYLYHK

SEQ ID NO: 24096 - protein, 204 aa, Zea mays subsp. mays
  peptide (1)..(204): Ceres Seq. ID no. 12387250
  misc_feature (1)..(204): Pfam Name: Pfam Description:  Dolichyl-diphosphooligosaccharide- proteinglycosyltransferase 48kD subunit
  misc_feature (1)..(204): NCBI GI NO: 38175467 NR Description: putative dolichyl-di-phosphooligosaccharide-protein
  misc_feature (1)..(204): NCBI GI NO: 18425101 NR Description: dolichyl-di-phosphooligosaccharide- proteinglycotransferase
  misc_feature (1)..(204): NCBI GI NO: 21553942 NR Description: dolichyl-di-phosphooligosaccharide- proteinglycotransferase
  misc_feature (1)..(204): NCBI GI NO: 14334506 NR Description: putative dolichyl-di-phosphooligosaccharide-proteinglycotransferase
  misc_feature (1)..(204): NCBI GI NO: 8843726 NR Description: dolichyl-di-phosphooligosaccharide- proteinglycotransferase
  misc_feature (1)..(204): NCBI GI NO: 627424 NR Description: dolichyl-diphosphooligosaccharide- proteinglycotransferase
  misc_feature (1)..(204): NCBI GI NO: 30584753 NR Description: Homo sapiens dolichyl-diphosphooligosaccharide- protein glycosyltransferase
  misc_feature (1)..(204): NCBI GI NO: 21104416 NR Description: dolichyl-diphosphooligosaccharide- proteinglycosyltransferase
  misc_feature (1)..(204): NCBI GI NO: 20070197 NR Description: dolichyl-diphosphooligosaccharide- proteinglycosyltransferase
  misc_feature (1)..(204): NCBI GI NO: 1352649 NR Description: Dolichyl-diphosphooligosaccharide-- proteinglycosyltransferase 48 kDa subunit
MQARNNARVLLSGSLDLFSNRFLKSGVQKAGSKTRYERAGNEQFVTETSKWVFHERGHLKAVNVKHHKVGETNEPGMYRINDDLEYSVEIYEWSGTSWKPYVADDVQLQFFMMSPYVLKTMSNDNKGLYSTSFKVPDVYGVFQFKVEYQRLGYTGLSFTKQIPVRPYRHNEYERFITSAYPYYTASFSTMCAFFIFSLVYLYHK

SEQ ID NO: 24097 - DNA, 1056 bp, Zea mays subsp. mays
  misc_feature (1)..(1056): Ceres Seq. ID no. 12340732
tttttgccttgcctgcctgccttccttctcgtagaagataagcaaagcaaggcaaccgttgtcgttgtctctgttcctccgcttcctgctctcttggcttgctgcttgccctcggagcagtgccttccgccgccgccgccgccgcctgttgtgagaaggagaggccggggctgggaggagatgagcgtgaccaagttcatcaagtgcgtcacggtgggggacggcgcggtgggcaagacctgcatgctcatctgctacaccagcaacaagttccccacggattacatccccacggtgttcgacaacttcagcgccaacgtctccgtggacggcagcatcgtcaacctgggcctctgggacactgcaggacaagaggactacagcagattgcggccactgagctacaggggcgcggacgtgttcgtgctggccttctccttgatcagcagggcgagctatgagaacgtccttaagaagtgggtgccagagcttcgcagattcgcgcccgacgtcccggtcgttcttgtcgggaccaagttagatctccgtgaccacagggcctaccttgctgaccatcctggagcgtcgacgatcacgacggcacagggcgaagaactgaggaggcagatcggcgctgcggcttacatcgagtgcagttccaaaacgcagcagaatgtcaagtcggtcttcgacacagccatcaaagtggtccttcagcccccgcggaggagggaggcgacgcctgccaggaggaagaacaggcgtggctccgggtgctctatcatgaacctcatgtgtggcagcacgtgcgctgcttaggagtctagaacactgatctggaaggaggtgaaggtgaaggcatggtgtctatgtgctatggcgactggcaagttaatggggccgcatggatgactgctgctcttgtttttttaagctcgtctgccgtatgctttgtttttttaggcttcaaggactgacaattgcaagaatgcagtgtttatgtaagaggttgtttgctggaataggattgctgtaactgtaatgttgttctccgag

SEQ ID NO: 24098 - protein, 272 aa, Zea mays subsp. mays
  peptide (1)..(272): Ceres Seq. ID no. 12340733
  misc_feature (68)..(239): Pfam Name: Pfam Description:  Ras family
  misc_feature (61)..(272): NCBI GI NO: 8979880 NR Description: putative Rop family GTPase, ROP7 [Zea mays]
  misc_feature (61)..(272): NCBI GI NO: 8979882 NR Description: putative Rop family GTPase, ROP6 [Zea mays]
  misc_feature (61)..(272): NCBI GI NO: 38524281 NR Description: putative ROP6 protein
  misc_feature (64)..(270): NCBI GI NO: 5902928 NR Description: small GTP-binding protein OsRac2 [Oryza sativa]
  misc_feature (61)..(272): NCBI GI NO: 15235495 NR Description: rac GTP binding protein Arac7
  misc_feature (62)..(270): NCBI GI NO: 11274346 NR Description: racC protein - maize
  misc_feature (62)..(272): NCBI GI NO: 34904284 NR Description: unnamed protein product
  misc_feature (62)..(272): NCBI GI NO: 38502278 NR Description: RAC-ROP-like G-protein
  misc_feature (62)..(267): NCBI GI NO: 7262647 NR Description: Rac-like protein Rop1 [Tradescantia virginiana]
  misc_feature (53)..(262): NCBI GI NO: 27527525 NR Description: putative rac protein [Nicotiana tabacum]
FLPCLPAFLLVEDKQSKATVVVVSVPPLPALLACCLPSEQCLPPPPPPPVVRRRGRGWEEMSVTKFIKCVTVGDGAVGKTCMLICYTSNKFPTDYIPTVFDNFSANVSVDGSIVNLGLWDTAGQEDYSRLRPLSYRGADVFVLAFSLISRASYENVLKKWVPELRRFAPDVPVVLVGTKLDLRDHRAYLADHPGASTITTAQGEELRRQIGAAAYIECSSKTQQNVKSVFDTAIKVVLQPPRRREATPARRKNRRGSGCSIMNLMCGSTCAA

SEQ ID NO: 24099 - protein, 212 aa, Zea mays subsp. mays
  peptide (1)..(212): Ceres Seq. ID no. 12340734
  misc_feature (8)..(179): Pfam Name: Pfam Description:  Ras family
  misc_feature (1)..(212): NCBI GI NO: 8979880 NR Description: putative Rop family GTPase, ROP7 [Zea mays]
  misc_feature (1)..(212): NCBI GI NO: 8979882 NR Description: putative Rop family GTPase, ROP6 [Zea mays]
  misc_feature (1)..(212): NCBI GI NO: 38524281 NR Description: putative ROP6 protein
  misc_feature (4)..(210): NCBI GI NO: 5902928 NR Description: small GTP-binding protein OsRac2 [Oryza sativa]
  misc_feature (1)..(212): NCBI GI NO: 15235495 NR Description: rac GTP binding protein Arac7
  misc_feature (2)..(210): NCBI GI NO: 11274346 NR Description: racC protein - maize
  misc_feature (2)..(212): NCBI GI NO: 34904284 NR Description: unnamed protein product
  misc_feature (2)..(212): NCBI GI NO: 38502278 NR Description: RAC-ROP-like G-protein
  misc_feature (2)..(207): NCBI GI NO: 7262647 NR Description: Rac-like protein Rop1 [Tradescantia virginiana]
  misc_feature (1)..(202): NCBI GI NO: 27527525 NR Description: putative rac protein [Nicotiana tabacum]
MSVTKFIKCVTVGDGAVGKTCMLICYTSNKFPTDYIPTVFDNFSANVSVDGSIVNLGLWDTAGQEDYSRLRPLSYRGADVFVLAFSLISRASYENVLKKWVPELRRFAPDVPVVLVGTKLDLRDHRAYLADHPGASTITTAQGEELRRQIGAAAYIECSSKTQQNVKSVFDTAIKVVLQPPRRREATPARRKNRRGSGCSIMNLMCGSTCAA

SEQ ID NO: 24100 - protein, 191 aa, Zea mays subsp. mays
  peptide (1)..(191): Ceres Seq. ID no. 12340735
  misc_feature (1)..(158): Pfam Name: Pfam Description:  Ras family
  misc_feature (1)..(191): NCBI GI NO: 8979880 NR Description: putative Rop family GTPase, ROP7 [Zea mays]
  misc_feature (1)..(191): NCBI GI NO: 8979882 NR Description: putative Rop family GTPase, ROP6 [Zea mays]
  misc_feature (1)..(191): NCBI GI NO: 38524281 NR Description: putative ROP6 protein
  misc_feature (1)..(189): NCBI GI NO: 5902928 NR Description: small GTP-binding protein OsRac2 [Oryza sativa]
  misc_feature (1)..(191): NCBI GI NO: 15235495 NR Description: rac GTP binding protein Arac7
  misc_feature (1)..(189): NCBI GI NO: 11274346 NR Description: racC protein - maize
  misc_feature (1)..(191): NCBI GI NO: 34904284 NR Description: unnamed protein product
  misc_feature (1)..(191): NCBI GI NO: 38502278 NR Description: RAC-ROP-like G-protein
  misc_feature (1)..(186): NCBI GI NO: 7262647 NR Description: Rac-like protein Rop1 [Tradescantia virginiana]
  misc_feature (1)..(181): NCBI GI NO: 27527525 NR Description: putative rac protein [Nicotiana tabacum]
MLICYTSNKFPTDYIPTVFDNFSANVSVDGSIVNLGLWDTAGQEDYSRLRPLSYRGADVFVLAFSLISRASYENVLKKWVPELRRFAPDVPVVLVGTKLDLRDHRAYLADHPGASTITTAQGEELRRQIGAAAYIECSSKTQQNVKSVFDTAIKVVLQPPRRREATPARRKNRRGSGCSIMNLMCGSTCAA

SEQ ID NO: 24101 - DNA, 1312 bp, Zea mays subsp. mays
  misc_feature (1)..(1312): Ceres Seq. ID no. 12349927
agtcactaggctacgaaacagtgccgcggtgcgcgcacacacagccgccacagcccagacccctcgcctcggcctcttttaaatatcgcgcattccggcgccgcaaatggctcacgcggcgctgctccattgctcccagtcctccaggagcctcgcagcctgccgccgcggcagccactaccccgccccttcgcacgtcccgcgccactcccgccgtcgccgacgcgccgtcgtcagcctgcgtccgatggcctcgtcgacggctcaggcccccgcgacggcgccgccgggtctgaaggagggcatcgcggggctgtacgacgagtcgtcagggctgtgggagaacatctggggcgaccacatgcaccacggcttctacgactcgagcgaggccgcctccatggccgatcaccgccgcgcccagatccgcatgatcgaggaggcgctcgccttcgccggcgtcccagcctcagatgatccagagaatacaccaaaaacaatagtcgatgtcggatgtggcattggtggtagttcaaggtacttggcgaagaaatacggagcgcagtgcacggggatcacgttgagccctgttcaagccgagagaggaaatgctctcgctggagcgcaggggttgtcggatcaggttactctgcaagttgctgatgctctggagcaaccgtttcctgacgggcagttcgatctggtgtggtccatggagagtggcgagcacatgccggacaagagaaagtttgttagtgagctagcacgcgtggcggctcctggagggacaataatcatcgtgacatggtgccataggaacctggatccatccgaaacctcgctaaagcccgatgaactgagcctcctgaagagaatatgcgacgcgtactacctcccggactggtgctcaccttcagactatgtgaacattgccaagtcactgtctctcgaggatatcaagacagctgactggtcggagaacgtggccccgttttggcccgccgtgataaaatcagcgctaacatggaagggcttcacctctctgctgacgaccggatggaagacgatcagaggcgcgatggtgatgccgctaatgatccagggctacaagaagggcctcatcaaattcaccatcatcacctgtcgcaagcctggagccgcgtaggaggaggccaaggagcaggagttacaggcacaggcacaggagtgccaagtgcaataatgtagatccgtggccccatcgccgtctactcatctgtactgcaccaaaatcaacattctcctaggacatgttaaataattttctgccacc

SEQ ID NO: 24102 - protein, 352 aa, Zea mays subsp. mays
  peptide (1)..(352): Ceres Seq. ID no. 12349928
  misc_feature (51)..(350): NCBI GI NO: 22208517 NR Description: putative gamma-tocopherol methyltransferase
  misc_feature (37)..(351): NCBI GI NO: 17224292 NR Description: gamma-tocopherol methyltransferase
  misc_feature (43)..(349): NCBI GI NO: 24211769 NR Description: Tocopherol O-methyltransferase
  misc_feature (46)..(349): NCBI GI NO: 27448218 NR Description: gamma-tocopherol methyltransferase
  misc_feature (43)..(349): NCBI GI NO: 15217804 NR Description: gamma-tocopherol methyltransferase
  misc_feature (43)..(349): NCBI GI NO: 21592747 NR Description: gamma-tocopherol methyltransferase
  misc_feature (63)..(348): NCBI GI NO: 23128517 NR Description: hypothetical protein [Nostoc punctiforme]
  misc_feature (63)..(344): NCBI GI NO: 17229295 NR Description: gamma-tocopherol methyltransferase
  misc_feature (63)..(348): NCBI GI NO: 23039419 NR Description: hypothetical protein
  misc_feature (44)..(349): NCBI GI NO: 16331764 NR Description: delta(24)-sterol C-methyltransferase
MAHAALLHCSQSSRSLAACRRGSHYPAPSHVPRHSRRRRRAVVSLRPMASSTAQAPATAPPGLKEGIAGLYDESSGLWENIWGDHMHHGFYDSSEAASMADHRRAQIRMIEEALAFAGVPASDDPENTPKTIVDVGCGIGGSSRYLAKKYGAQCTGITLSPVQAERGNALAGAQGLSDQVTLQVADALEQPFPDGQFDLVWSMESGEHMPDKRKFVSELARVAAPGGTIIIVTWCHRNLDPSETSLKPDELSLLKRICDAYYLPDWCSPSDYVNIAKSLSLEDIKTADWSENVAPFWPAVIKSALTWKGFTSLLTTGWKTIRGAMVMPLMIQGYKKGLIKFTIITCRKPGAA

SEQ ID NO: 24103 - protein, 305 aa, Zea mays subsp. mays
  peptide (1)..(305): Ceres Seq. ID no. 12349929
  misc_feature (4)..(303): NCBI GI NO: 22208517 NR Description: putative gamma-tocopherol methyltransferase
  misc_feature (1)..(304): NCBI GI NO: 17224292 NR Description: gamma-tocopherol methyltransferase
  misc_feature (1)..(302): NCBI GI NO: 24211769 NR Description: Tocopherol O-methyltransferase
  misc_feature (1)..(302): NCBI GI NO: 27448218 NR Description: gamma-tocopherol methyltransferase
  misc_feature (1)..(302): NCBI GI NO: 15217804 NR Description: gamma-tocopherol methyltransferase
  misc_feature (1)..(302): NCBI GI NO: 21592747 NR Description: gamma-tocopherol methyltransferase
  misc_feature (16)..(301): NCBI GI NO: 23128517 NR Description: hypothetical protein [Nostoc punctiforme]
  misc_feature (16)..(297): NCBI GI NO: 17229295 NR Description: gamma-tocopherol methyltransferase
  misc_feature (16)..(301): NCBI GI NO: 23039419 NR Description: hypothetical protein
  misc_feature (1)..(302): NCBI GI NO: 16331764 NR Description: delta(24)-sterol C-methyltransferase
MASSTAQAPATAPPGLKEGIAGLYDESSGLWENIWGDHMHHGFYDSSEAASMADHRRAQIRMIEEALAFAGVPASDDPENTPKTIVDVGCGIGGSSRYLAKKYGAQCTGITLSPVQAERGNALAGAQGLSDQVTLQVADALEQPFPDGQFDLVWSMESGEHMPDKRKFVSELARVAAPGGTIIIVTWCHRNLDPSETSLKPDELSLLKRICDAYYLPDWCSPSDYVNIAKSLSLEDIKTADWSENVAPFWPAVIKSALTWKGFTSLLTTGWKTIRGAMVMPLMIQGYKKGLIKFTIITCRKPGAA

SEQ ID NO: 24104 - protein, 267 aa, Zea mays subsp. mays
  peptide (1)..(267): Ceres Seq. ID no. 12349930
  misc_feature (1)..(265): NCBI GI NO: 22208517 NR Description: putative gamma-tocopherol methyltransferase
  misc_feature (1)..(266): NCBI GI NO: 17224292 NR Description: gamma-tocopherol methyltransferase
  misc_feature (1)..(264): NCBI GI NO: 24211769 NR Description: Tocopherol O-methyltransferase
  misc_feature (1)..(264): NCBI GI NO: 27448218 NR Description: gamma-tocopherol methyltransferase
  misc_feature (1)..(264): NCBI GI NO: 15217804 NR Description: gamma-tocopherol methyltransferase
  misc_feature (1)..(264): NCBI GI NO: 21592747 NR Description: gamma-tocopherol methyltransferase
  misc_feature (1)..(263): NCBI GI NO: 23128517 NR Description: hypothetical protein [Nostoc punctiforme]
  misc_feature (1)..(259): NCBI GI NO: 17229295 NR Description: gamma-tocopherol methyltransferase
  misc_feature (1)..(263): NCBI GI NO: 23039419 NR Description: hypothetical protein
  misc_feature (1)..(264): NCBI GI NO: 16331764 NR Description: delta(24)-sterol C-methyltransferase
MHHGFYDSSEAASMADHRRAQIRMIEEALAFAGVPASDDPENTPKTIVDVGCGIGGSSRYLAKKYGAQCTGITLSPVQAERGNALAGAQGLSDQVTLQVADALEQPFPDGQFDLVWSMESGEHMPDKRKFVSELARVAAPGGTIIIVTWCHRNLDPSETSLKPDELSLLKRICDAYYLPDWCSPSDYVNIAKSLSLEDIKTADWSENVAPFWPAVIKSALTWKGFTSLLTTGWKTIRGAMVMPLMIQGYKKGLIKFTIITCRKPGAA

SEQ ID NO: 24105 - DNA, 1236 bp, Zea mays subsp. mays
  misc_feature (1)..(1236): Ceres Seq. ID no. 12405803
aatagaggttactgctctcctgggctgtgaggctgtgaggctgtgaccaaacgctctacgctcccacttcccaccaactcccaaatcctccctgaaaataagaatacgagggtgagcgatcgagcggtcgagggggttgtgcttgtgcgtcagatcaaccgactggtggcgaggctgcgggaggagatggccggcgaagggaatggggatgaagggtggaggcggagcggcatcgaggtcagcgccctgcagttcggctacgacgggcagccgccgctcttcgcgcgcttcaacctctgcgtcgcacccggctcccgctgcctcctcgtcggcgccaacggatcaggcaagaccacactcttgaagattcttgcgggaaagcatatggttggaggaagagatgtggtccgtgtcctcaatggttccgcttttcatgatacacagctagtgtgcaatggtgacctttcgtacttgggtggttcttggagccgtactattggttcagctggggatgttccactgcaaggcgacttctctgctgagcacatgatttttggagttgatggggttgatcctgtcaggcgagagaagctggttgatctgctagacattgatctgcagtggcgcatgcataaagtttcagatgggcagcgccgcagggtgcaaatctgcatgggtcttcttcatccatacaaggtgcttttgctcgatgagatcacggttgatctggacgtggtgaccaggatggacctgcttggtttcttcaaggaagagtgcgagcagagggaagctaccatcgtgtacgccacccatatatttgacggactcgagacgtgggctaccgactttgcgtacatccaagaaggcgagctgagaaggtccgggagatactccgacatcgaggagctaaggagcgccaagaacttgctgtcggtagtcgagtcgtggctgaggtcagagaccaaactcccgaagaaggaacccccaccacgtcctgagacccaggccaggcgttcctcgccgttcgatgcttctcctttccgttcgtcacgccacatggcctactaccgttgatggtttcccaactcgtactacaccattgcctcttgttattttgttgtcactcatatcgtatagtagctgtggagtttaatatgtgtcctcttcacggcccttgtagacatcaatcaatatatagcaggcagcacagaaataaaagtttggttcggttggtct

SEQ ID NO: 24106 - protein, 295 aa, Zea mays subsp. mays
  peptide (1)..(295): Ceres Seq. ID no. 12405804
  misc_feature (42)..(227): Pfam Name: Pfam Description:  ABC transporter
  misc_feature (16)..(295): NCBI GI NO: 18379174 NR Description: ABC transporter family protein
  misc_feature (16)..(295): NCBI GI NO: 15240093 NR Description: ABC transporter family protein
  misc_feature (16)..(295): NCBI GI NO: 21592901 NR Description: NBD-like protein [Arabidopsis thaliana]
  misc_feature (1)..(295): NCBI GI NO: 25406749 NR Description: hypothetical protein
  misc_feature (8)..(281): NCBI GI NO: 15241744 NR Description: ABC transporter family protein
  misc_feature (42)..(260): NCBI GI NO: 19115648 NR Description: probable ATP-dependent transporter
  misc_feature (16)..(245): NCBI GI NO: 14318491 NR Description: CCR4 associated factor; Caf16p
  misc_feature (93)..(258): NCBI GI NO: 40738662 NR Description: hypothetical protein AN6512.2
  misc_feature (36)..(250): NCBI GI NO: 23483625 NR Description: NBD-like protein [Plasmodium yoelii yoelii]
  misc_feature (36)..(190): NCBI GI NO: 23509543 NR Description: ABC transporter, putative
MAGEGNGDEGWRRSGIEVSALQFGYDGQPPLFARFNLCVAPGSRCLLVGANGSGKTTLLKILAGKHMVGGRDVVRVLNGSAFHDTQLVCNGDLSYLGGSWSRTIGSAGDVPLQGDFSAEHMIFGVDGVDPVRREKLVDLLDIDLQWRMHKVSDGQRRRVQICMGLLHPYKVLLLDEITVDLDVVTRMDLLGFFKEECEQREATIVYATHIFDGLETWATDFAYIQEGELRRSGRYSDIEELRSAKNLLSVVESWLRSETKLPKKEPPPRPETQARRSSPFDASPFRSSRHMAYYR

SEQ ID NO: 24107 - protein, 229 aa, Zea mays subsp. mays
  peptide (1)..(229): Ceres Seq. ID no. 12405805
  misc_feature (1)..(161): Pfam Name: Pfam Description:  ABC transporter
  misc_feature (1)..(229): NCBI GI NO: 18379174 NR Description: ABC transporter family protein
  misc_feature (1)..(229): NCBI GI NO: 15240093 NR Description: ABC transporter family protein
  misc_feature (1)..(229): NCBI GI NO: 21592901 NR Description: NBD-like protein [Arabidopsis thaliana]
  misc_feature (1)..(229): NCBI GI NO: 25406749 NR Description: hypothetical protein
  misc_feature (1)..(215): NCBI GI NO: 15241744 NR Description: ABC transporter family protein
  misc_feature (1)..(194): NCBI GI NO: 19115648 NR Description: probable ATP-dependent transporter
  misc_feature (1)..(179): NCBI GI NO: 14318491 NR Description: CCR4 associated factor; Caf16p
  misc_feature (27)..(192): NCBI GI NO: 40738662 NR Description: hypothetical protein AN6512.2
  misc_feature (1)..(184): NCBI GI NO: 23483625 NR Description: NBD-like protein [Plasmodium yoelii yoelii]
  misc_feature (1)..(124): NCBI GI NO: 23509543 NR Description: ABC transporter, putative
MVGGRDVVRVLNGSAFHDTQLVCNGDLSYLGGSWSRTIGSAGDVPLQGDFSAEHMIFGVDGVDPVRREKLVDLLDIDLQWRMHKVSDGQRRRVQICMGLLHPYKVLLLDEITVDLDVVTRMDLLGFFKEECEQREATIVYATHIFDGLETWATDFAYIQEGELRRSGRYSDIEELRSAKNLLSVVESWLRSETKLPKKEPPPRPETQARRSSPFDASPFRSSRHMAYYR

SEQ ID NO: 24108 - protein, 175 aa, Zea mays subsp. mays
  peptide (1)..(175): Ceres Seq. ID no. 12405806
  misc_feature (1)..(107): Pfam Name: Pfam Description:  ABC transporter
  misc_feature (1)..(175): NCBI GI NO: 18379174 NR Description: ABC transporter family protein
  misc_feature (1)..(175): NCBI GI NO: 15240093 NR Description: ABC transporter family protein
  misc_feature (1)..(175): NCBI GI NO: 21592901 NR Description: NBD-like protein [Arabidopsis thaliana]
  misc_feature (1)..(175): NCBI GI NO: 25406749 NR Description: hypothetical protein
  misc_feature (1)..(161): NCBI GI NO: 15241744 NR Description: ABC transporter family protein
  misc_feature (1)..(140): NCBI GI NO: 19115648 NR Description: probable ATP-dependent transporter
  misc_feature (1)..(125): NCBI GI NO: 14318491 NR Description: CCR4 associated factor; Caf16p
  misc_feature (1)..(138): NCBI GI NO: 40738662 NR Description: hypothetical protein AN6512.2
  misc_feature (1)..(130): NCBI GI NO: 23483625 NR Description: NBD-like protein [Plasmodium yoelii yoelii]
  misc_feature (1)..(70): NCBI GI NO: 23509543 NR Description: ABC transporter, putative
MIFGVDGVDPVRREKLVDLLDIDLQWRMHKVSDGQRRRVQICMGLLHPYKVLLLDEITVDLDVVTRMDLLGFFKEECEQREATIVYATHIFDGLETWATDFAYIQEGELRRSGRYSDIEELRSAKNLLSVVESWLRSETKLPKKEPPPRPETQARRSSPFDASPFRSSRHMAYYR

SEQ ID NO: 24109 - DNA, 1179 bp, Zea mays subsp. mays
  misc_feature (1)..(1179): Ceres Seq. ID no. 12381139
aggtttgcttggtgcccccgatttgcctgctactcgtggcgcgccgctcctaggcgaagggaaggatccgactcaacatggccgccgccgcttctaccatgtccctgctcccgatctcccagcccaggaagcagcagcagcaaggcgcgggcgccgtggtcgtgttccagcggcggccctgggacgcgcggcggaggcgatacgtcgtcccgacggcgaggttgttcgggccggcgatcttcgaggcgtccaagctgaaggtgctgttcctgggcgtggacgagggcgaggggagcagcaagcatctgcatgcgcaccacccggcgccggcgccggcgctgctgccgcggacgtacacgctgacgcacagcgacgtgacggccagcctgacgctcgccgtctcccacaccatcaaccgcgcgcagctgcagggctggtacaaccgcctgcagcgcgacgaggtggtggccgagtggaagaaggtgcgcggccggatgtcgctgcacgtgcactgccacatctccggcggacacttgctcctggacctcatcgccggcctccgctactacatcttccgcaaggagctccccgtggtgctcgaggcgttcgtgcacggcgacggcgacctgttcagccgtcacccggagctggaggaggccacggtgtgggtctatttccactccaacctggcccgcttcaaccgcgtcgagtgctggggtccgctccgcgacgccgccgcccccgcgcccgccgaggacgactccaccgcgccggccgccgcctccatcgccatggagggccagatgcccgtgggcgagtggccgcaccggtgtccccagcagtgcgactgctgcttcccgccgcacagcctcataccctggccgaacgagcaagacatggccaccgccgccggccaggtccgacagcagtagtgaagctgcacctgtacctgtacgtacggaggaagagcctttgccgcagctaataatacactactagcgcgttgtttggtttgctattgctagatgcaagcgtgtgcgtgcaccgtgcagtgcaggtgtggagtggcgtcaacaccttgcatgcacgcgctattctttaattggtagcttagctcagctcagctcagttccacttctacaccttcgtatttggaagtagcttggttgaggttggggg

SEQ ID NO: 24110 - protein, 327 aa, Zea mays subsp. mays
  peptide (1)..(327): Ceres Seq. ID no. 12381140
GLLGAPDLPATRGAPLLGEGKDPTQHGRRRFYHVPAPDLPAQEAAAARRGRRGRVPAAALGRAAEAIRRPDGEVVRAGDLRGVQAEGAVPGRGRGRGEQQASACAPPGAGAGAAAADVHADAQRRDGQPDARRLPHHQPRAAAGLVQPPAARRGGGRVEEGARPDVAARALPHLRRTLAPGPHRRPPLLHLPQGAPRGARGVRARRRRPVQPSPGAGGGHGVGLFPLQPGPLQPRRVLGSAPRRRRPRARRGRLHRAGRRLHRHGGPDARGRVAAPVSPAVRLLLPAAQPHTLAERARHGHRRRPGPTAVVKLHLYLYVRRKSLCRS

SEQ ID NO: 24111 - protein, 284 aa, Zea mays subsp. mays
  peptide (1)..(284): Ceres Seq. ID no. 12381141
  misc_feature (6)..(234): NCBI GI NO: 18416035 NR Description: expressed protein; protein id: At4g22920
  misc_feature (251)..(268): NCBI GI NO: 18416035 NR Description: expressed protein; protein id: At4g22920
  misc_feature (6)..(234): NCBI GI NO: 21592527 NR Description: unknown [Arabidopsis thaliana]
  misc_feature (251)..(268): NCBI GI NO: 21592527 NR Description: unknown [Arabidopsis thaliana]
  misc_feature (1)..(261): NCBI GI NO: 15234348 NR Description: putative protein; protein id: At4g11910.1
  misc_feature (45)..(268): NCBI GI NO: 15234348 NR Description: putative protein; protein id: At4g11910.1
  misc_feature (43)..(220): NCBI GI NO: 8778672 NR Description: F9C16.20 [Arabidopsis thaliana]
  misc_feature (43)..(220): NCBI GI NO: 18401163 NR Description: expressed protein; protein id: At1g44000
  misc_feature (56)..(194): NCBI GI NO: 38567838 NR Description: OSJNBb0020J19.16
  misc_feature (88)..(218): NCBI GI NO: 15896657 NR Description: Uncharacterized protein, homolog of YYBI B
MAAAASTMSLLPISQPRKQQQQGAGAVVVFQRRPWDARRRRYVVPTARLFGPAIFEASKLKVLFLGVDEGEGSSKHLHAHHPAPAPALLPRTYTLTHSDVTASLTLAVSHTINRAQLQGWYNRLQRDEVVAEWKKVRGRMSLHVHCHISGGHLLLDLIAGLRYYIFRKELPVVLEAFVHGDGDLFSRHPELEEATVWVYFHSNLARFNRVECWGPLRDAAAPAPAEDDSTAPAAASIAMEGQMPVGEWPHRCPQQCDCCFPPHSLIPWPNEQDMATAAGQVRQQ

SEQ ID NO: 24112 - protein, 277 aa, Zea mays subsp. mays
  peptide (1)..(277): Ceres Seq. ID no. 12381142
  misc_feature (1)..(227): NCBI GI NO: 18416035 NR Description: expressed protein; protein id: At4g22920
  misc_feature (244)..(261): NCBI GI NO: 18416035 NR Description: expressed protein; protein id: At4g22920
  misc_feature (1)..(227): NCBI GI NO: 21592527 NR Description: unknown [Arabidopsis thaliana]
  misc_feature (244)..(261): NCBI GI NO: 21592527 NR Description: unknown [Arabidopsis thaliana]
  misc_feature (1)..(254): NCBI GI NO: 15234348 NR Description: putative protein; protein id: At4g11910.1
  misc_feature (38)..(261): NCBI GI NO: 15234348 NR Description: putative protein; protein id: At4g11910.1
  misc_feature (36)..(213): NCBI GI NO: 8778672 NR Description: F9C16.20 [Arabidopsis thaliana]
  misc_feature (36)..(213): NCBI GI NO: 18401163 NR Description: expressed protein; protein id: At1g44000
  misc_feature (49)..(187): NCBI GI NO: 38567838 NR Description: OSJNBb0020J19.16
  misc_feature (81)..(211): NCBI GI NO: 15896657 NR Description: Uncharacterized protein, homolog of YYBI B
MSLLPISQPRKQQQQGAGAVVVFQRRPWDARRRRYVVPTARLFGPAIFEASKLKVLFLGVDEGEGSSKHLHAHHPAPAPALLPRTYTLTHSDVTASLTLAVSHTINRAQLQGWYNRLQRDEVVAEWKKVRGRMSLHVHCHISGGHLLLDLIAGLRYYIFRKELPVVLEAFVHGDGDLFSRHPELEEATVWVYFHSNLARFNRVECWGPLRDAAAPAPAEDDSTAPAAASIAMEGQMPVGEWPHRCPQQCDCCFPPHSLIPWPNEQDMATAAGQVRQQ

SEQ ID NO: 24113 - DNA, 775 bp, Zea mays subsp. mays
  misc_feature (1)..(775): Ceres Seq. ID no. 12544805
aagtcagcacactgaaacccctgcaaaccctagtgcttcccaccgatccatttcagccgccgccgcgcgtagcaagcaggagcagcaaggatgccggctggccacgggctgcgctcgcggacgcgcgacctgttcgcgcgccccttccgcaagaagggctacatcccgctcaccacctacctccgcacctacaagatcggcgactacgtcgacgtcaaggtgaacggcgccgtccacaaggggatgccgcacaagttctaccacggccgcaccggtcgcgtctggaacgtcaccaagcgcgccatcggcgtcgagataaacaagcaggtgaatggtcgcatcatcaggaagcgtatccatgtccgcgtggagcatgtgcagccgtcccgctgcacagaagagttccgcctgaggaaggtgaagaatgatcagctgaaggcggatgcaaaggagcgcggcgaggtcatcagcaccaagaggcagccgttgggtcccaagcctggcttcatggttgaggggactaccatcgagaccgtcactcccatcccgtacgatgtggtcaatgatcttaagggcggatactaggttgtttgtttggtctttctacctgttctacatctgtgttactctagtgcgtacaattttgctcacactgagcagtagtatgaacctattgtgtgttcatgttgaaaattttcccgttctgtgcaaacctgagtttagaagaacgctatgccttgatctttgcttctgagaacaaagatttgcatttttc

SEQ ID NO: 24114 - protein, 164 aa, Zea mays subsp. mays
  peptide (1)..(164): Ceres Seq. ID no. 12544806
  misc_feature (2)..(100): Pfam Name: Pfam Description:  Ribosomal protein L21e
  misc_feature (1)..(164): NCBI GI NO: 37535194 NR Description: 60S ribosomal protein L21
  misc_feature (1)..(164): NCBI GI NO: 11276828 NR Description: ribosomal protein L21 [imported] - rice
  misc_feature (1)..(164): NCBI GI NO: 18406015 NR Description: 60S ribosomal protein L21, putative
  misc_feature (1)..(164): NCBI GI NO: 18391042 NR Description: putative 60S ribosomal protein L21
  misc_feature (1)..(157): NCBI GI NO: 15213768 NR Description: ribosomal protein L21 [Spodoptera frugiperda]
  misc_feature (1)..(155): NCBI GI NO: 6094029 NR Description: 60S RIBOSOMAL PROTEIN L21
  misc_feature (1)..(157): NCBI GI NO: 38048363 NR Description: similar to Drosophila melanogaster CG12775
  misc_feature (1)..(157): NCBI GI NO: 20129705 NR Description: CG12775-PA [Drosophila melanogaster]
  misc_feature (1)..(155): NCBI GI NO: 40741182 NR Description: hypothetical protein AN4802.2
  misc_feature (1)..(155): NCBI GI NO: 6319668 NR Description: Homology to rat L21; Rpl21ap
MPAGHGLRSRTRDLFARPFRKKGYIPLTTYLRTYKIGDYVDVKVNGAVHKGMPHKFYHGRTGRVWNVTKRAIGVEINKQVNGRIIRKRIHVRVEHVQPSRCTEEFRLRKVKNDQLKADAKERGEVISTKRQPLGPKPGFMVEGTTIETVTPIPYDVVNDLKGGY

SEQ ID NO: 24115 - protein, 141 aa, Zea mays subsp. mays
  peptide (1)..(141): Ceres Seq. ID no. 12544807
VSTLKPLQTLVLPTDPFQPPPRVASRSSKDAGWPRAALADARPVRAPLPQEGLHPAHHLPPHLQDRRLRRRQGERRRPQGDAAQVLPRPHRSRLERHQARHRRRDKQAGEWSHHQEAYPCPRGACAAVPLHRRVPPEEGEE

SEQ ID NO: 24116 - protein, 113 aa, Zea mays subsp. mays
  peptide (1)..(113): Ceres Seq. ID no. 12544808
  misc_feature (1)..(113): NCBI GI NO: 37535194 NR Description: 60S ribosomal protein L21
  misc_feature (1)..(113): NCBI GI NO: 11276828 NR Description: ribosomal protein L21 [imported] - rice
  misc_feature (1)..(113): NCBI GI NO: 18406015 NR Description: 60S ribosomal protein L21, putative
  misc_feature (1)..(113): NCBI GI NO: 18391042 NR Description: putative 60S ribosomal protein L21
  misc_feature (1)..(106): NCBI GI NO: 15213768 NR Description: ribosomal protein L21 [Spodoptera frugiperda]
  misc_feature (1)..(104): NCBI GI NO: 6094029 NR Description: 60S RIBOSOMAL PROTEIN L21
  misc_feature (1)..(106): NCBI GI NO: 38048363 NR Description: similar to Drosophila melanogaster CG12775
  misc_feature (1)..(106): NCBI GI NO: 20129705 NR Description: CG12775-PA [Drosophila melanogaster]
  misc_feature (1)..(104): NCBI GI NO: 40741182 NR Description: hypothetical protein AN4802.2
  misc_feature (1)..(104): NCBI GI NO: 6319668 NR Description: Homology to rat L21; Rpl21ap
MPHKFYHGRTGRVWNVTKRAIGVEINKQVNGRIIRKRIHVRVEHVQPSRCTEEFRLRKVKNDQLKADAKERGEVISTKRQPLGPKPGFMVEGTTIETVTPIPYDVVNDLKGGY

SEQ ID NO: 24117 - DNA, 1573 bp, Zea mays subsp. mays
  misc_feature (1)..(1573): Ceres Seq. ID no. 13493056
gcattttggctcctcactgccgcgccgccacccactacaggtgaatgaatataacgaatccgccgccggcgtcatctcctcctcccacctcgactcgccttgctcgccgtcggcggccatttcgtcgcctcgcggcgagccgcccaagttgagctcgcggcggatctgatgggcttgttgtgatctcctgcaggtaaggaagaggaggagggcaggatgtcgcaccgtaagttcgagcacccgaggcacggctccctcggcttccttcccaggaagcgctcctcccgccaccgcggcaaggtgaagtcatttcccagggatgaccccaagaagccttgccatctcactgccttccttggctacaaggctggcatgactcacattgtccgtgaggttgagaagccaggatccaaactccataagaaggaaacttgtgaggctgttaccatcattgaaacccctcctcttgtcattgttgggctcgtggcatatgtgaagactcctcgtggcctccgcacactcaactctgtttgggcccaacatcttagcgaagaagtgaggagaaggttctacaagaactggtgcaagagcaagaagaaggctttcacaaagtatgctctcaaatatgaaaatgatgctggcaagaaggaaattcagctgcagcttgagaagatgaagaaatatgcttctgttatccgtgtcattgctcatacccagattaggaagatgaagggtttgaagcagaagaaggctcacctgatggagattcaggtcaatggtggtaccattgctgacaaggtggactacggctataaattttttgagaaagaggtccctgttgatgctgtcttccagaaggatgagatgattgacatcattggtgtgaccaaaggtaaaggttatgagggtgtggtcactcgttggggtgtcacccgccttccccgcaaaacccacaggggtctccgcaaggttgcttgtatcggtgcatggcatccggctagggtctcgtatacggttgcccgtgctggtcagaatgggtaccaccaccgcactgagatgaacaagaaggtctacaagatcggcaaggctggacaagagacccacgatgcctccacagagtttgacaggaccgagaaggacatcactcccatgggtggcttcccccactatggtatcgtgaagggtgactacctgatgatcaagggatgctgtgtgggtccaaaaaagagggtggtgaccctccgccagtccctcctgaagcagacttcccggctggcgctggaggagatcaagctcaagttcattgacacatcgtccaaatttgggcacggtcgcttccagactaccgatgagaagcagaggttctttggtaagctcaaggcgtaaggtgctgcggtgcagcgaaagtcccatttgtcaaaatcatcaaactgtgaaacctttgtttgttaccttgctgtaccaagttttgtagcaggatgatttgggagcatgttccggtcttcaatggattgttctacgcttcagaactgcagtgactatgttttgtgctattttggttgttttaatgccc

SEQ ID NO: 24118 - protein, 389 aa, Zea mays subsp. mays
  peptide (1)..(389): Ceres Seq. ID no. 13493057
  misc_feature (50)..(343): Pfam Name: Pfam Description:  Ribosomal protein L3
  misc_feature (1)..(389): NCBI GI NO: 548770 NR Description: 60S RIBOSOMAL PROTEIN L3
  misc_feature (1)..(381): NCBI GI NO: 6688812 NR Description: L3 Ribosomal protein
  misc_feature (1)..(389): NCBI GI NO: 15220533 NR Description: 60S ribosomal protein L3 (RPL3B)
  misc_feature (1)..(389): NCBI GI NO: 81658 NR Description: ribosomal protein L3
  misc_feature (1)..(387): NCBI GI NO: 15218306 NR Description: 60S ribosomal protein L3 (RPL3A)
  misc_feature (1)..(387): NCBI GI NO: 23397228 NR Description: putative ribosomal protein [Arabidopsis thaliana]
  misc_feature (1)..(387): NCBI GI NO: 81657 NR Description: ribosomal protein L3
  misc_feature (1)..(388): NCBI GI NO: 7305441 NR Description: ribosomal protein L3; ribosomal protein L3 homolog
  misc_feature (1)..(388): NCBI GI NO: 4506649 NR Description: ribosomal protein L3
  misc_feature (1)..(388): NCBI GI NO: 22203712 NR Description: ribosomal protein L3 [Chlamys farreri]
MSHRKFEHPRHGSLGFLPRKRSSRHRGKVKSFPRDDPKKPCHLTAFLGYKAGMTHIVREVEKPGSKLHKKETCEAVTIIETPPLVIVGLVAYVKTPRGLRTLNSVWAQHLSEEVRRRFYKNWCKSKKKAFTKYALKYENDAGKKEIQLQLEKMKKYASVIRVIAHTQIRKMKGLKQKKAHLMEIQVNGGTIADKVDYGYKFFEKEVPVDAVFQKDEMIDIIGVTKGKGYEGVVTRWGVTRLPRKTHRGLRKVACIGAWHPARVSYTVARAGQNGYHHRTEMNKKVYKIGKAGQETHDASTEFDRTEKDITPMGGFPHYGIVKGDYLMIKGCCVGPKKRVVTLRQSLLKQTSRLALEEIKLKFIDTSSKFGHGRFQTTDEKQRFFGKLKA

SEQ ID NO: 24119 - protein, 337 aa, Zea mays subsp. mays
  peptide (1)..(337): Ceres Seq. ID no. 13493058
  misc_feature (1)..(291): Pfam Name: Pfam Description:  Ribosomal protein L3
  misc_feature (1)..(337): NCBI GI NO: 548770 NR Description: 60S RIBOSOMAL PROTEIN L3
  misc_feature (1)..(329): NCBI GI NO: 6688812 NR Description: L3 Ribosomal protein
  misc_feature (1)..(337): NCBI GI NO: 15220533 NR Description: 60S ribosomal protein L3 (RPL3B)
  misc_feature (1)..(337): NCBI GI NO: 81658 NR Description: ribosomal protein L3
  misc_feature (1)..(335): NCBI GI NO: 15218306 NR Description: 60S ribosomal protein L3 (RPL3A)
  misc_feature (1)..(335): NCBI GI NO: 23397228 NR Description: putative ribosomal protein [Arabidopsis thaliana]
  misc_feature (1)..(335): NCBI GI NO: 81657 NR Description: ribosomal protein L3
  misc_feature (1)..(336): NCBI GI NO: 7305441 NR Description: ribosomal protein L3; ribosomal protein L3 homolog
  misc_feature (1)..(336): NCBI GI NO: 4506649 NR Description: ribosomal protein L3
  misc_feature (1)..(336): NCBI GI NO: 22203712 NR Description: ribosomal protein L3 [Chlamys farreri]
MTHIVREVEKPGSKLHKKETCEAVTIIETPPLVIVGLVAYVKTPRGLRTLNSVWAQHLSEEVRRRFYKNWCKSKKKAFTKYALKYENDAGKKEIQLQLEKMKKYASVIRVIAHTQIRKMKGLKQKKAHLMEIQVNGGTIADKVDYGYKFFEKEVPVDAVFQKDEMIDIIGVTKGKGYEGVVTRWGVTRLPRKTHRGLRKVACIGAWHPARVSYTVARAGQNGYHHRTEMNKKVYKIGKAGQETHDASTEFDRTEKDITPMGGFPHYGIVKGDYLMIKGCCVGPKKRVVTLRQSLLKQTSRLALEEIKLKFIDTSSKFGHGRFQTTDEKQRFFGKLKA

SEQ ID NO: 24120 - protein, 237 aa, Zea mays subsp. mays
  peptide (1)..(237): Ceres Seq. ID no. 13493059
  misc_feature (1)..(191): Pfam Name: Pfam Description:  Ribosomal protein L3
  misc_feature (1)..(237): NCBI GI NO: 548770 NR Description: 60S RIBOSOMAL PROTEIN L3
  misc_feature (1)..(229): NCBI GI NO: 6688812 NR Description: L3 Ribosomal protein
  misc_feature (1)..(237): NCBI GI NO: 15220533 NR Description: 60S ribosomal protein L3 (RPL3B)
  misc_feature (1)..(237): NCBI GI NO: 81658 NR Description: ribosomal protein L3
  misc_feature (1)..(235): NCBI GI NO: 15218306 NR Description: 60S ribosomal protein L3 (RPL3A)
  misc_feature (1)..(235): NCBI GI NO: 23397228 NR Description: putative ribosomal protein [Arabidopsis thaliana]
  misc_feature (1)..(235): NCBI GI NO: 81657 NR Description: ribosomal protein L3
  misc_feature (1)..(236): NCBI GI NO: 7305441 NR Description: ribosomal protein L3; ribosomal protein L3 homolog
  misc_feature (1)..(236): NCBI GI NO: 4506649 NR Description: ribosomal protein L3
  misc_feature (1)..(236): NCBI GI NO: 22203712 NR Description: ribosomal protein L3 [Chlamys farreri]
MKKYASVIRVIAHTQIRKMKGLKQKKAHLMEIQVNGGTIADKVDYGYKFFEKEVPVDAVFQKDEMIDIIGVTKGKGYEGVVTRWGVTRLPRKTHRGLRKVACIGAWHPARVSYTVARAGQNGYHHRTEMNKKVYKIGKAGQETHDASTEFDRTEKDITPMGGFPHYGIVKGDYLMIKGCCVGPKKRVVTLRQSLLKQTSRLALEEIKLKFIDTSSKFGHGRFQTTDEKQRFFGKLKA

SEQ ID NO: 24121 - DNA, 1103 bp, Zea mays subsp. mays
  misc_feature (1)..(1103): Ceres Seq. ID no. 12407827
atggcggtgaccacttaagcgtggtggcttctgagttttgcctcgatttcgattctttctttttcccccacgtgcgccgccgcgaccttcctcgatcccatctcccaacgcccccgcctcgcctcgggatcccgccgccgctccatctgcctttgctcccccacccgcaggcagcgagcgacagcgacggcgagggatggccaaggccaggtcgttggcgaagcagaagcaggcgcagcaatcaaacggcggcggcggccacgcgctgtcctccaagctcgcccggtacctcgacccggaggcctccttggacaaggaccaactgctggacgcggtgcactggatccgccaggcggtggggctcatatgcggcctgctctggggagccgtccccgtcgtcggcgccgtctggatcgcactatttatggccatctcgactggcattatctattggtactacacctacttgctgaaggttgacgaggaggaatatggaggccatggggcgcttcttcaggagggtcttttcgcttcattcacccttttcctgctttcgtggactctagtatacagtctggctcacttctgagaagctcctttggcgcacatacctttgttcactgtgccagacagaaaagactcaccaggacagtgtagactaaggagcttctcagaagttgagcgagatgagctgatcaaagtccacgaggacaagaagttgaagctcaagaaagaatacatggatctggagctggagctggagaaggagtttgacgcagccctgacgggcctgatggagaagcataagccagataccttcgaggcctccagctcgtaagggggcttcagcggctaagcgctttccttaggccccagctaagcttggagcagtctcgtacatgctcctgcttgcttatccatgaaataatgcctggacagtctgtagatgttgcgaaaacatggtgccccctgtggttgccgcgtgtgtagtaagtatctctcagtcgtagtgtggttgaagcatctgaactcttgagcggtttgcctgtgatggcatatgggtcaaactacaactggagtgtgatatctagtttatatggtcc

SEQ ID NO: 24122 - protein, 156 aa, Zea mays subsp. mays
  peptide (1)..(156): Ceres Seq. ID no. 12407828
GGDHLSVVASEFCLDFDSFFFPHVRRRDLPRSHLPTPPPRLGIPPPLHLPLLPHPQAASDSDGEGWPRPGRWRSRSRRSNQTAAAATRCPPSSPGTSTRRPPWTRTNCWTRCTGSARRWGSYAACSGEPSPSSAPSGSHYLWPSRLALSIGTTPTC

SEQ ID NO: 24123 - protein, 130 aa, Zea mays subsp. mays
  peptide (1)..(130): Ceres Seq. ID no. 12407829
  misc_feature (1)..(119): NCBI GI NO: 14719336 NR Description: hypothetical protein [Oryza sativa]
  misc_feature (1)..(130): NCBI GI NO: 15238396 NR Description: putative Rab5-interacting protein - like
  misc_feature (4)..(130): NCBI GI NO: 18401926 NR Description: expressed protein; protein id: At2g29020
  misc_feature (1)..(118): NCBI GI NO: 8885547 NR Description: gb|AAF17201
  misc_feature (1)..(130): NCBI GI NO: 13385630 NR Description: RIKEN cDNA 1110008F13 [Mus musculus]
  misc_feature (1)..(130): NCBI GI NO: 10047116 NR Description: putative Rab5-interacting protein [Homo sapiens]
  misc_feature (1)..(130): NCBI GI NO: 27704314 NR Description: similar to RIKEN cDNA 1110008F13
  misc_feature (6)..(130): NCBI GI NO: 27503935 NR Description: Similar to RIKEN cDNA 1110008F13 gene
  misc_feature (1)..(129): NCBI GI NO: 34872254 NR Description: similar to RIKEN cDNA 1110008F13
  misc_feature (1)..(129): NCBI GI NO: 24211596 NR Description: Protein C20orf24
MAKARSLAKQKQAQQSNGGGGHALSSKLARYLDPEASLDKDQLLDAVHWIRQAVGLICGLLWGAVPVVGAVWIALFMAISTGIIYWYYTYLLKVDEEEYGGHGALLQEGLFASFTLFLLSWTLVYSLAHF

SEQ ID NO: 24124 - DNA, 1290 bp, Zea mays subsp. mays
  misc_feature (1)..(1290): Ceres Seq. ID no. 12410757
gaatttgttcctcgtttcgttgccagcccaatcggttcagtttcggcggtaacaagatcaactgcggtcgccagtcgattctgtgagcctgccagccatggagttgtccagttccgtctcgtccacggcggcggcggcggcgcaggcgcggctgctccggccgccgtcgtttcgccagccggggccggcgggattcgtgtcctgtaggagttacgctataaggagcaaactggtgagggcgatgcctccgatccttgctagcttccagcctgcatctcctcggtacccaagctttcaagacgcaaatggcaaaagacgaaatgttccttgttatcagagacaacaaaccccgcaggtagaagccaggtcgatggaggaggtatatgacgctttggctgaacaccttctttcggtcttgaagaatattgaacatcttgattcaaaatacattgttggtctagctggcccacctggtgctggcaagtccacagttgcctctgaagttgttcgacgtgttaatacattttggtcccagaagcacacaaagggtagtggagcaccgcttcctaccaaggaaattgctgcaatgcttccaatggatggtttccacctttatcgtgcccagcttgatgcaatggaggatccaaaagaagcacatgcaagaagaggagcaccctggacattcaatccatcactgtttctgaaatgtctacatacactaagaacagagggttcagtttatgctccatcatttgatcatggtgttggcgacccagttgagaatgacatatttgtaaagccacagcacaaaatagtgatagttgaagggaactatctgttactggaagaagatgtttggaccgaaattagagacttgtttgatgagaaatggttcattgacattgacatcgatatctccatgcaaagagtgctcaagagacatattgcaaccggaaaagagccagatgtagcagcatggaggatctcctacaacgaccgaccgaatgcagagcttatcctggaatcaaggaagaatgctgaccttgtgatcagatcagtagacttctcaagctagtgttcaattctttcaataggaaatagcattgtggttctagagttggaggttgttgtgggctgtttccgtggagattcctgtacatataataagctgaatgcctgtttcaaattttcatggtgattgtgttgcatgtaataagatattccttcactatgtaccgtggaggattgttaagtaatttattgacattttttaatagaaacacccttcag

SEQ ID NO: 24125 - protein, 325 aa, Zea mays subsp. mays
  peptide (1)..(325): Ceres Seq. ID no. 12410758
  misc_feature (118)..(321): Pfam Name: Pfam Description:  Phosphoribulokinase / Uridine kinase family
  misc_feature (72)..(322): NCBI GI NO: 15218676 NR Description: unknown protein; protein id: At1g03030.1
  misc_feature (76)..(191): NCBI GI NO: 25363622 NR Description: hypothetical protein F10O3
  misc_feature (214)..(322): NCBI GI NO: 25363622 NR Description: hypothetical protein F10O3
  misc_feature (114)..(320): NCBI GI NO: 40741109 NR Description: hypothetical protein AN4382.2
  misc_feature (86)..(321): NCBI GI NO: 19113880 NR Description: similarity to uridine kinase
  misc_feature (116)..(305): NCBI GI NO: 38108268 NR Description: hypothetical protein MG02303.4
  misc_feature (150)..(318): NCBI GI NO: 23500977 NR Description: kinase-related protein [Brucella suis 1330]
  misc_feature (84)..(172): NCBI GI NO: 23500977 NR Description: kinase-related protein [Brucella suis 1330]
  misc_feature (162)..(319): NCBI GI NO: 40740541 NR Description: hypothetical protein AN8109.2
  misc_feature (160)..(318): NCBI GI NO: 15887420 NR Description: AGR_C_100p [Agrobacterium tumefaciens]
MELSSSVSSTAAAAAQARLLRPPSFRQPGPAGFVSCRSYAIRSKLVRAMPPILASFQPASPRYPSFQDANGKRRNVPCYQRQQTPQVEARSMEEVYDALAEHLLSVLKNIEHLDSKYIVGLAGPPGAGKSTVASEVVRRVNTFWSQKHTKGSGAPLPTKEIAAMLPMDGFHLYRAQLDAMEDPKEAHARRGAPWTFNPSLFLKCLHTLRTEGSVYAPSFDHGVGDPVENDIFVKPQHKIVIVEGNYLLLEEDVWTEIRDLFDEKWFIDIDIDISMQRVLKRHIATGKEPDVAAWRISYNDRPNAELILESRKNADLVIRSVDFSS

SEQ ID NO: 24126 - protein, 277 aa, Zea mays subsp. mays
  peptide (1)..(277): Ceres Seq. ID no. 12410759
  misc_feature (70)..(273): Pfam Name: Pfam Description:  Phosphoribulokinase / Uridine kinase family
  misc_feature (24)..(274): NCBI GI NO: 15218676 NR Description: unknown protein; protein id: At1g03030.1
  misc_feature (28)..(143): NCBI GI NO: 25363622 NR Description: hypothetical protein F10O3
  misc_feature (166)..(274): NCBI GI NO: 25363622 NR Description: hypothetical protein F10O3
  misc_feature (66)..(272): NCBI GI NO: 40741109 NR Description: hypothetical protein AN4382.2
  misc_feature (38)..(273): NCBI GI NO: 19113880 NR Description: similarity to uridine kinase
  misc_feature (68)..(257): NCBI GI NO: 38108268 NR Description: hypothetical protein MG02303.4
  misc_feature (102)..(270): NCBI GI NO: 23500977 NR Description: kinase-related protein [Brucella suis 1330]
  misc_feature (36)..(124): NCBI GI NO: 23500977 NR Description: kinase-related protein [Brucella suis 1330]
  misc_feature (114)..(271): NCBI GI NO: 40740541 NR Description: hypothetical protein AN8109.2
  misc_feature (112)..(270): NCBI GI NO: 15887420 NR Description: AGR_C_100p [Agrobacterium tumefaciens]
MPPILASFQPASPRYPSFQDANGKRRNVPCYQRQQTPQVEARSMEEVYDALAEHLLSVLKNIEHLDSKYIVGLAGPPGAGKSTVASEVVRRVNTFWSQKHTKGSGAPLPTKEIAAMLPMDGFHLYRAQLDAMEDPKEAHARRGAPWTFNPSLFLKCLHTLRTEGSVYAPSFDHGVGDPVENDIFVKPQHKIVIVEGNYLLLEEDVWTEIRDLFDEKWFIDIDIDISMQRVLKRHIATGKEPDVAAWRISYNDRPNAELILESRKNADLVIRSVDFSS

SEQ ID NO: 24127 - protein, 234 aa, Zea mays subsp. mays
  peptide (1)..(234): Ceres Seq. ID no. 12410760
  misc_feature (27)..(230): Pfam Name: Pfam Description:  Phosphoribulokinase / Uridine kinase family
  misc_feature (1)..(231): NCBI GI NO: 15218676 NR Description: unknown protein; protein id: At1g03030.1
  misc_feature (1)..(100): NCBI GI NO: 25363622 NR Description: hypothetical protein F10O3
  misc_feature (123)..(231): NCBI GI NO: 25363622 NR Description: hypothetical protein F10O3
  misc_feature (23)..(229): NCBI GI NO: 40741109 NR Description: hypothetical protein AN4382.2
  misc_feature (1)..(230): NCBI GI NO: 19113880 NR Description: similarity to uridine kinase
  misc_feature (25)..(214): NCBI GI NO: 38108268 NR Description: hypothetical protein MG02303.4
  misc_feature (59)..(227): NCBI GI NO: 23500977 NR Description: kinase-related protein [Brucella suis 1330]
  misc_feature (1)..(81): NCBI GI NO: 23500977 NR Description: kinase-related protein [Brucella suis 1330]
  misc_feature (71)..(228): NCBI GI NO: 40740541 NR Description: hypothetical protein AN8109.2
  misc_feature (69)..(227): NCBI GI NO: 15887420 NR Description: AGR_C_100p [Agrobacterium tumefaciens]
MEEVYDALAEHLLSVLKNIEHLDSKYIVGLAGPPGAGKSTVASEVVRRVNTFWSQKHTKGSGAPLPTKEIAAMLPMDGFHLYRAQLDAMEDPKEAHARRGAPWTFNPSLFLKCLHTLRTEGSVYAPSFDHGVGDPVENDIFVKPQHKIVIVEGNYLLLEEDVWTEIRDLFDEKWFIDIDIDISMQRVLKRHIATGKEPDVAAWRISYNDRPNAELILESRKNADLVIRSVDFSS

SEQ ID NO: 24128 - DNA, 1632 bp, Zea mays subsp. mays
  misc_feature (1)..(1632): Ceres Seq. ID no. 12410754
agacgtgcagccagcgccggggcgtccagctaactcgcaaacatttttataacccgagcacgcgtcagacatgggaaacggcggtgggactggcgataagacgaagacgaaggcgacaggagggctcaccggtcgcgaatcctcctcctccagccacgcctcgaaacggcgtcggggcctgcgcggcgagtccatggctgatcgcttcattcccaatgactttcctgacttcgtcgccgaggctgaggcctccgacggcgaggggcaccgccccgcagggcatcggggcctgctctcgcttccgtacaccaggctctccgaccacttcgtccgcgccgcgcgccgcctcaaggacaaggtggttgaggagacgtgggtgaaagccggacggaaggtgacggactacacgctctacacgggctctctcgggacagcgctgctgctgttcaagtccttccaggtcactggagaccgcggggacctcgccctcgccgctgatatcgtccgcgcgtgcgatgatgcatcgcggggcctgccgttcttgacattcatatgcgggagggcgggtgtctgcgctcttggggcggtgattgccaagcattgcgatgatcagctgagggtcactcagtatctgagctcctttgatgagataacaatcaccgagaaagttccaaatgagttgctgtatggaagggcaggctatctgtgggcttgtttgttcttgaataagcatctcagcgagaagacgatccctctcgatcacattaattctgtggcgaaggacattattaatgagggaagaggttttgcaagcaaggggagtagccctctgatgtacgaatggcatgggaagaaatactggggggctgcgcatggtcttgctggaatcatgcacgtgctaatgcacaccgaactgaaaccagatgagcaggatgatgtaaagaacaccctgcggtatatgatcaaaaacaagtttcctagtggcaattatccctcaagtgaaggcaatgaatcagatcacttggtgcactggtgtcatggtgccccaggtgttgctcttacccttgctaaagcatatgaggtcttccatgatgattatttcgagcaatcagctgcagaggctgctgaggttgtctggaaccgagggcttctgaagagagtcggaatatgccacggtgtaagcgggaatgcctatgcgtttctctcactctacaggctaaccggtaatgttgagtacctctaccgggcaaaggcttttgcctgctttcttctggagaaagctgatcagttgatagccgagggggccatgcatggtggtgatcgcccgttttcactgtttgaagggaaagctgggatgtcatacctcctcttggacatggttgatccatctgaatcaaggttccctgcgtatgaactttgagatatactattaccctgcgacttgtgaggctgttcgatgatccatcagtcacgaaaactctgtttgtattttctcgtctagtatgtgatgtgtgcttagacctcggtggtctgttgtgtttgtagatttggcgttcgtgatgttgcaaacttgaatcttctgtgaagtatgtgtgaccatcacattctgctaaatagattataatctcaaac

SEQ ID NO: 24129 - protein, 449 aa, Zea mays subsp. mays
  peptide (1)..(449): Ceres Seq. ID no. 12410755
  misc_feature (93)..(449): Pfam Name: Pfam Description:  Lanthionine synthetase C-like protein
  misc_feature (1)..(449): NCBI GI NO: 37535720 NR Description: putative lanthionine synthetase
  misc_feature (42)..(449): NCBI GI NO: 30681129 NR Description: expressed protein [Arabidopsis thaliana]
  misc_feature (74)..(449): NCBI GI NO: 15219126 NR Description: putative G protein-coupled receptor
  misc_feature (93)..(449): NCBI GI NO: 25411993 NR Description: hypothetical protein At2g20770
  misc_feature (99)..(449): NCBI GI NO: 8489877 NR Description: putative 7-transmembrane G-protein-coupled receptor
  misc_feature (109)..(449): NCBI GI NO: 15238395 NR Description: G protein-coupled receptor-like protein
  misc_feature (109)..(449): NCBI GI NO: 15451140 NR Description: G protein-coupled receptor-like protein
  misc_feature (73)..(449): NCBI GI NO: 19526936 NR Description: RIKEN cDNA 1700003F10 [Mus musculus]
  misc_feature (81)..(449): NCBI GI NO: 8923911 NR Description: LanC lantibiotic synthetase component C-like 2
  misc_feature (81)..(449): NCBI GI NO: 19584353 NR Description: hypothetical protein [Homo sapiens]
MGNGGGTGDKTKTKATGGLTGRESSSSSHASKRRRGLRGESMADRFIPNDFPDFVAEAEASDGEGHRPAGHRGLLSLPYTRLSDHFVRAARRLKDKVVEETWVKAGRKVTDYTLYTGSLGTALLLFKSFQVTGDRGDLALAADIVRACDDASRGLPFLTFICGRAGVCALGAVIAKHCDDQLRVTQYLSSFDEITITEKVPNELLYGRAGYLWACLFLNKHLSEKTIPLDHINSVAKDIINEGRGFASKGSSPLMYEWHGKKYWGAAHGLAGIMHVLMHTELKPDEQDDVKNTLRYMIKNKFPSGNYPSSEGNESDHLVHWCHGAPGVALTLAKAYEVFHDDYFEQSAAEAAEVVWNRGLLKRVGICHGVSGNAYAFLSLYRLTGNVEYLYRAKAFACFLLEKADQLIAEGAMHGGDRPFSLFEGKAGMSYLLLDMVDPSESRFPAYEL

SEQ ID NO: 24130 - protein, 408 aa, Zea mays subsp. mays
  peptide (1)..(408): Ceres Seq. ID no. 12410756
  misc_feature (52)..(408): Pfam Name: Pfam Description:  Lanthionine synthetase C-like protein
  misc_feature (1)..(408): NCBI GI NO: 37535720 NR Description: putative lanthionine synthetase
  misc_feature (1)..(408): NCBI GI NO: 30681129 NR Description: expressed protein [Arabidopsis thaliana]
  misc_feature (33)..(408): NCBI GI NO: 15219126 NR Description: putative G protein-coupled receptor
  misc_feature (52)..(408): NCBI GI NO: 25411993 NR Description: hypothetical protein At2g20770
  misc_feature (58)..(408): NCBI GI NO: 8489877 NR Description: putative 7-transmembrane G-protein-coupled receptor
  misc_feature (68)..(408): NCBI GI NO: 15238395 NR Description: G protein-coupled receptor-like protein
  misc_feature (68)..(408): NCBI GI NO: 15451140 NR Description: G protein-coupled receptor-like protein
  misc_feature (32)..(408): NCBI GI NO: 19526936 NR Description: RIKEN cDNA 1700003F10 [Mus musculus]
  misc_feature (40)..(408): NCBI GI NO: 8923911 NR Description: LanC lantibiotic synthetase component C-like 2
  misc_feature (40)..(408): NCBI GI NO: 19584353 NR Description: hypothetical protein [Homo sapiens]
MADRFIPNDFPDFVAEAEASDGEGHRPAGHRGLLSLPYTRLSDHFVRAARRLKDKVVEETWVKAGRKVTDYTLYTGSLGTALLLFKSFQVTGDRGDLALAADIVRACDDASRGLPFLTFICGRAGVCALGAVIAKHCDDQLRVTQYLSSFDEITITEKVPNELLYGRAGYLWACLFLNKHLSEKTIPLDHINSVAKDIINEGRGFASKGSSPLMYEWHGKKYWGAAHGLAGIMHVLMHTELKPDEQDDVKNTLRYMIKNKFPSGNYPSSEGNESDHLVHWCHGAPGVALTLAKAYEVFHDDYFEQSAAEAAEVVWNRGLLKRVGICHGVSGNAYAFLSLYRLTGNVEYLYRAKAFACFLLEKADQLIAEGAMHGGDRPFSLFEGKAGMSYLLLDMVDPSESRFPAYEL

SEQ ID NO: 24131 - DNA, 1479 bp, Zea mays subsp. mays
  misc_feature (1)..(1479): Ceres Seq. ID no. 12410751
agtcgctcgtcccgcttcctgatcctcacccctgcctgcgcggctcggctcctcggctttccgcgttcgctacggtcggtttgtgccagcagccgtgccggatcgttggccttgcgccgttgcgcggttacaccgtgctccaggcaatggcgagccaacagcaagcaaaaggcacaatcctgtgagccaatcaacactcactaggactctaggagccagggcattgattcagagaactctgagaccatttttgttgcatcttttgacaggattacatgatgagtgctcttgtttttcctctggttgtatatgttatccagtgaacacatgtttaattttataaacatttcaatttttgtcatgtttgaatctattattttctagctttcgcagtttcaaaaaagtgtggtccagtgtctgtacttttatgctgtttaggttttcgcggccactgcctcctcccatcgtggtattcattccttccggactgtcagagagcggggatctatctacgctagtattcagttcttccattactggtctaccacacgatggttccctgtcatggagcggctactgcgaatcctcagcagtttggtgttattgccgcaaaccgctatggttctcctgtgaagccatctttatgccctagtgttgcgtttctgagactgcagggttccgcatttcgtcttgggaataaatccttggctttgagagctggtgcggattctcaccgttatgcgacatcttcagcatttgcaaagtataatcctgtcaagaacatcaagccactactgtcatccccaaagttgaaaccaagaactaaagttggttgtcaagcatccttgtcgtcattcagctaccctgagttatcttccaaaccgaaatggtggtggaggaccctagcatgtgtaccttatcttctgccactgcacaacatgtgggggcatgcagatgctatctatcagcttcatccatacttgcaaagatttagcctgccttacgctttcatcgatacaatggctctgctccctgggtggcttttcctggcgatcttcatgactatatacttctttgttgtgaggcggaagtggtcgccacacttcttgcgcttccacatcatattggctatcctgcttgacacgggctcacaagctctggccactgcctgcaactggaatccaagcattgcttttcagggcaaacaaatggcacatttctggatggcaatggccttcattcaaatcttcacggttgccgagtgtgtaaggtgtgcactttcaggggtgtatgcaaatgttccatttatatgtcatgcagcactcatccattcagatcttaacctgtttaggtagttgatcattgcaaagtgcatttttggaattaagaggtactgaattggttaaactgtcgagtagaggactaatcagactatcagaggaaattaatgtaaccattgctcttcactgcattgttgtc

SEQ ID NO: 24132 - protein, 267 aa, Zea mays subsp. mays
  peptide (1)..(267): Ceres Seq. ID no. 12410752
  misc_feature (1)..(267): NCBI GI NO: 34393290 NR Description: putative Tic20 protein
  misc_feature (36)..(267): NCBI GI NO: 34899836 NR Description: putative Tic20 protein
  misc_feature (100)..(259): NCBI GI NO: 26449432 NR Description: unknown protein [Arabidopsis thaliana]
  misc_feature (8)..(259): NCBI GI NO: 6984128 NR Description: Tic20-like protein [Euphorbia esula]
  misc_feature (64)..(259): NCBI GI NO: 3769673 NR Description: Tic20 [Pisum sativum]
  misc_feature (100)..(244): NCBI GI NO: 15220356 NR Description: unknown protein; protein id: At1g04940.1
  misc_feature (7)..(265): NCBI GI NO: 15236283 NR Description: putative chloroplast protein import component
MVPCHGAATANPQQFGVIAANRYGSPVKPSLCPSVAFLRLQGSAFRLGNKSLALRAGADSHRYATSSAFAKYNPVKNIKPLLSSPKLKPRTKVGCQASLSSFSYPELSSKPKWWWRTLACVPYLLPLHNMWGHADAIYQLHPYLQRFSLPYAFIDTMALLPGWLFLAIFMTIYFFVVRRKWSPHFLRFHIILAILLDTGSQALATACNWNPSIAFQGKQMAHFWMAMAFIQIFTVAECVRCALSGVYANVPFICHAALIHSDLNLFR

SEQ ID NO: 24133 - protein, 138 aa, Zea mays subsp. mays
  peptide (1)..(138): Ceres Seq. ID no. 12410753
  misc_feature (1)..(138): NCBI GI NO: 34393290 NR Description: putative Tic20 protein
  misc_feature (1)..(138): NCBI GI NO: 34899836 NR Description: putative Tic20 protein
  misc_feature (1)..(130): NCBI GI NO: 26449432 NR Description: unknown protein [Arabidopsis thaliana]
  misc_feature (1)..(130): NCBI GI NO: 6984128 NR Description: Tic20-like protein [Euphorbia esula]
  misc_feature (1)..(130): NCBI GI NO: 3769673 NR Description: Tic20 [Pisum sativum]
  misc_feature (1)..(115): NCBI GI NO: 15220356 NR Description: unknown protein; protein id: At1g04940.1
  misc_feature (1)..(136): NCBI GI NO: 15236283 NR Description: putative chloroplast protein import component
MWGHADAIYQLHPYLQRFSLPYAFIDTMALLPGWLFLAIFMTIYFFVVRRKWSPHFLRFHIILAILLDTGSQALATACNWNPSIAFQGKQMAHFWMAMAFIQIFTVAECVRCALSGVYANVPFICHAALIHSDLNLFR

SEQ ID NO: 24134 - DNA, 963 bp, Zea mays subsp. mays
  misc_feature (1)..(963): Ceres Seq. ID no. 12353619
ctgttctccaccagccccggaggtcgacacgtgcgccacaccatagggcagggcccagggagcccggcgacctccatctccatggccgagtgcgaggagctggtggagagcggcggcgccgaggaggacatgccccgcgtcgtagccgccctcgccggcatcctggagcgcgtcgcgaaccgcaacgacgctgcggcggtcgcagaggtctcggccgtagccccggcgtcggcgttccgggcgacgacgaagccgggcatctcggtgcgcgcgtacatggcgcgcatcgcgcggttcgctgggtgcagccccgcgtgctacgtcgtggcctacgtctacctcgaccgcctcctgcgccgcggccgcctcctggcgctggccgtcgactcctacagcgtgcaccgcctcctcattaccgccgtgcttgccgccgtcaagttcatggacgacatatgctacaacaacgcctacttcgccaaggtcgggggcatcagcctggtggagatgaactacctggaggtggacttcctgttcggcgtcggcttcgacctcaacgtggcgccggagacgttcggcgactactgcgccgtgctgcggtcggagctactgtgcgcggaggctgcccccgcgccactcaggctgcagcactgctgcctgtccgaggatgacgccggggccggatgcagcgcccagcagcagctcgctgcatgaatgaaagaaacctaagcccatcgatcgatcgacgactcatccggtggcttgggcgcaggagttgtaagccggtgcaaattgttccaaattattagatgttttgtcttttctagattataaagctttcgatatatacacacatctatatatacagtgtgtctagaggtgtagtggtggtgtaggtcgtcgtcggttgtaccagctgctacagtagattgtgtatacagtgctggtgtctttggtgactttctg

SEQ ID NO: 24135 - protein, 236 aa, Zea mays subsp. mays
  peptide (1)..(236): Ceres Seq. ID no. 12353620
  misc_feature (64)..(185): Pfam Name: Pfam Description:  Cyclin, N-terminal domain
  misc_feature (28)..(236): NCBI GI NO: 14140116 NR Description: PREG-like protein [Oryza sativa]
  misc_feature (35)..(233): NCBI GI NO: 37536902 NR Description: hypothetical protein
  misc_feature (42)..(203): NCBI GI NO: 15240794 NR Description: putative protein; protein id: At5g07450.1
  misc_feature (44)..(235): NCBI GI NO: 15224950 NR Description: putative PREG1-like negative regulator
  misc_feature (42)..(202): NCBI GI NO: 15240306 NR Description: PREG-like - like protein; protein id: At5g61650.1
  misc_feature (41)..(204): NCBI GI NO: 25493992 NR Description: PREG-like protein
  misc_feature (36)..(202): NCBI GI NO: 38345471 NR Description: OSJNBa0010H02.9
  misc_feature (41)..(207): NCBI GI NO: 15233185 NR Description: PREG-like protein, putative; protein id:At3g21870
  misc_feature (34)..(201): NCBI GI NO: 15229382 NR Description: putative protein; protein id: At3g63120
  misc_feature (34)..(201): NCBI GI NO: 21593009 NR Description: unknown [Arabidopsis thaliana]
LFSTSPGGRHVRHTIGQGPGSPATSISMAECEELVESGGAEEDMPRVVAALAGILERVANRNDAAAVAEVSAVAPASAFRATTKPGISVRAYMARIARFAGCSPACYVVAYVYLDRLLRRGRLLALAVDSYSVHRLLITAVLAAVKFMDDICYNNAYFAKVGGISLVEMNYLEVDFLFGVGFDLNVAPETFGDYCAVLRSELLCAEAAPAPLRLQHCCLSEDDAGAGCSAQQQLAA

SEQ ID NO: 24136 - protein, 221 aa, Zea mays subsp. mays
  peptide (1)..(221): Ceres Seq. ID no. 12353621
VLHQPRRSTRAPHHRAGPREPGDLHLHGRVRGAGGERRRRGGHAPRRSRPRRHPGARREPQRRCGGRRGLGRSPGVGVPGDDEAGHLGARVHGAHRAVRWVQPRVLRRGLRLPRPPPAPRPPPGAGRRLLQRAPPPHYRRACRRQVHGRHMLQQRLLRQGRGHQPGGDELPGGGLPVRRRLRPQRGAGDVRRLLRRAAVGATVRGGCPRATQAAALLPVRG

SEQ ID NO: 24137 - protein, 209 aa, Zea mays subsp. mays
  peptide (1)..(209): Ceres Seq. ID no. 12353622
  misc_feature (37)..(158): Pfam Name: Pfam Description:  Cyclin, N-terminal domain
  misc_feature (1)..(209): NCBI GI NO: 14140116 NR Description: PREG-like protein [Oryza sativa]
  misc_feature (8)..(206): NCBI GI NO: 37536902 NR Description: hypothetical protein
  misc_feature (15)..(176): NCBI GI NO: 15240794 NR Description: putative protein; protein id: At5g07450.1
  misc_feature (17)..(208): NCBI GI NO: 15224950 NR Description: putative PREG1-like negative regulator
  misc_feature (15)..(175): NCBI GI NO: 15240306 NR Description: PREG-like - like protein; protein id: At5g61650.1
  misc_feature (14)..(177): NCBI GI NO: 25493992 NR Description: PREG-like protein
  misc_feature (9)..(175): NCBI GI NO: 38345471 NR Description: OSJNBa0010H02.9
  misc_feature (14)..(180): NCBI GI NO: 15233185 NR Description: PREG-like protein, putative; protein id:At3g21870
  misc_feature (7)..(174): NCBI GI NO: 15229382 NR Description: putative protein; protein id: At3g63120
  misc_feature (7)..(174): NCBI GI NO: 21593009 NR Description: unknown [Arabidopsis thaliana]
MAECEELVESGGAEEDMPRVVAALAGILERVANRNDAAAVAEVSAVAPASAFRATTKPGISVRAYMARIARFAGCSPACYVVAYVYLDRLLRRGRLLALAVDSYSVHRLLITAVLAAVKFMDDICYNNAYFAKVGGISLVEMNYLEVDFLFGVGFDLNVAPETFGDYCAVLRSELLCAEAAPAPLRLQHCCLSEDDAGAGCSAQQQLAA

SEQ ID NO: 24138 - DNA, 1459 bp, Zea mays subsp. mays
  misc_feature (1)..(1459): Ceres Seq. ID no. 12454773
aaaacgtgtggcgtcggcagccgggcaggtaggaaaaggtatcagcgtcgccaatctccatggagctcacaggcgccgcgctccggcgatacgcgctgccgtcggcgtccccggtggccgcgagggtggggaggaggaggcgaccagccagggtggcctgcgtcgggggcggggggttcgcggaggaggggcacctcaggtactacgaggcggccccgcggaggaaggcggtggaggcggtggcgagggacctgggaaagctccgggccatggggctcgtcgcgggggacgcagccaaggagaaggtcctctcggaagccacggatcttctgctgcaggagctgagccagatgaaggatgcggaatacaagataaacaagatggagaaagaacagaatgctgctatgaaagcactgaagaagcaggagaggcgcaccaagaagactgccatcatgatgatgaagtgtgaagaagatgagtcatctgagtcgagcgagagcgattgtgaggacgaggcaaccatgaatgccgagcaggacatggtgatgtcaacagcggttcccgaggttgttgcatcaagcatctcagctgtcctcgcgatggagtgtgataaggctgcagtgaaggccatgaagaaaatggagaaggaacaaatgaaggccatgaagaagatggagaaggaacagaagaaggctgcgaagaaggccatgaagatggagaaggaagcaaagaagatggcaatggctacactgaatggctgcagggatgaagacgattcctcatgctcatcagagtcgagtgaaagtgaatgcgagggccaagttatgaggatgagccgctgcggctacaatcaccgcaccggaaatgccacctccaagcacgggtcttccaatcatagttcctcaaattccagcacctttggcaccacagccgtctcaatctcaaccttcagagccagcaaccgcagtgcaagccaccagagtcagcagcgttgcagtaactgagacatccacaaccagcagaattgaggtctgcatggggggcaaatgcaagaagtcaggcgcgcttgctctcctgcaggagttcgagaaggctgtgggcaccggtggcgcggtcgtcggctgcaagtgcctggggaagtgcggcctaggtcccaacgtgaggctgaggagcggtgcctctgcggaaggttctgcaaaggggaacccactctgcatcggtgtaggctttgaagatgttgacaccatcgtggctggtctctttggaggcgctgatctgggcatgacacccacctagacctggtggtactacctcgacctagtcgtacttcaagaaatcaagagcacaacttgtaatcacagatgttgcattgaacaaatgtatagtgcagctacggccttgctagtgctaagtttatgtactctatgtctatatagaacacgtatggtaatcttgttcc

SEQ ID NO: 24139 - protein, 314 aa, Zea mays subsp. mays
  peptide (1)..(314): Ceres Seq. ID no. 12454774
  misc_feature (72)..(183): NCBI GI NO: 22330104 NR Description: hypothetical protein; protein id: At1g48300
  misc_feature (72)..(183): NCBI GI NO: 25405260 NR Description: hypothetical protein F11A17.15
  misc_feature (168)..(259): NCBI GI NO: 22330104 NR Description: hypothetical protein; protein id: At1g48300
  misc_feature (168)..(259): NCBI GI NO: 25405260 NR Description: hypothetical protein F11A17.15
  misc_feature (41)..(253): NCBI GI NO: 23102768 NR Description: hypothetical protein [Azotobacter vinelandii]
  misc_feature (93)..(297): NCBI GI NO: 16759686 NR Description: tolA protein
MELTGAALRRYALPSASPVAARVGRRRRPARVACVGGGGFAEEGHLRYYEAAPRRKAVEAVARDLGKLRAMGLVAGDAAKEKVLSEATDLLLQELSQMKDAEYKINKMEKEQNAAMKALKKQERRTKKTAIMMMKCEEDESSESSESDCEDEATMNAEQDMVMSTAVPEVVASSISAVLAMECDKAAVKAMKKMEKEQMKAMKKMEKEQKKAAKKAMKMEKEAKKMAMATLNGCRDEDDSSCSSESSESECEGQVMRMSRCGYNHRTGNATSKHGSSNHSSSNSSTFGTTAVSISTFRASNRSASHQSQQRCSN

SEQ ID NO: 24140 - protein, 244 aa, Zea mays subsp. mays
  peptide (1)..(244): Ceres Seq. ID no. 12454775
  misc_feature (2)..(113): NCBI GI NO: 22330104 NR Description: hypothetical protein; protein id: At1g48300
  misc_feature (2)..(113): NCBI GI NO: 25405260 NR Description: hypothetical protein F11A17.15
  misc_feature (98)..(189): NCBI GI NO: 22330104 NR Description: hypothetical protein; protein id: At1g48300
  misc_feature (98)..(189): NCBI GI NO: 25405260 NR Description: hypothetical protein F11A17.15
  misc_feature (1)..(183): NCBI GI NO: 23102768 NR Description: hypothetical protein [Azotobacter vinelandii]
  misc_feature (23)..(227): NCBI GI NO: 16759686 NR Description: tolA protein
MGLVAGDAAKEKVLSEATDLLLQELSQMKDAEYKINKMEKEQNAAMKALKKQERRTKKTAIMMMKCEEDESSESSESDCEDEATMNAEQDMVMSTAVPEVVASSISAVLAMECDKAAVKAMKKMEKEQMKAMKKMEKEQKKAAKKAMKMEKEAKKMAMATLNGCRDEDDSSCSSESSESECEGQVMRMSRCGYNHRTGNATSKHGSSNHSSSNSSTFGTTAVSISTFRASNRSASHQSQQRCSN

SEQ ID NO: 24141 - protein, 217 aa, Zea mays subsp. mays
  peptide (1)..(217): Ceres Seq. ID no. 12454776
  misc_feature (1)..(86): NCBI GI NO: 22330104 NR Description: hypothetical protein; protein id: At1g48300
  misc_feature (1)..(86): NCBI GI NO: 25405260 NR Description: hypothetical protein F11A17.15
  misc_feature (71)..(162): NCBI GI NO: 22330104 NR Description: hypothetical protein; protein id: At1g48300
  misc_feature (71)..(162): NCBI GI NO: 25405260 NR Description: hypothetical protein F11A17.15
  misc_feature (1)..(156): NCBI GI NO: 23102768 NR Description: hypothetical protein [Azotobacter vinelandii]
  misc_feature (1)..(200): NCBI GI NO: 16759686 NR Description: tolA protein
MKDAEYKINKMEKEQNAAMKALKKQERRTKKTAIMMMKCEEDESSESSESDCEDEATMNAEQDMVMSTAVPEVVASSISAVLAMECDKAAVKAMKKMEKEQMKAMKKMEKEQKKAAKKAMKMEKEAKKMAMATLNGCRDEDDSSCSSESSESECEGQVMRMSRCGYNHRTGNATSKHGSSNHSSSNSSTFGTTAVSISTFRASNRSASHQSQQRCSN

SEQ ID NO: 24142 - DNA, 1132 bp, Zea mays subsp. mays
  misc_feature (1)..(1132): Ceres Seq. ID no. 12352055
tatatatgcatgcgcatcaagatcaagaataatccagcgccacacgggatcgacctagtacatagatacaacaagtcaacaacgtactaactagcccaccatggcgtcacgcctcgccgccgcccttctcctctccgtcgtcgccctgctgacgtccgtggcgccgctggcgtgcggccaggcagcgtcggcgccgtccccagcccccgcgccgcccaagaccatcacggcgatcctgagcaaggccgggcagttcaccaagttcctccagctgctgcagtcgacgcgggaggcggagcagatcaccaaccagctcaagggcaagccgtccaacggcgggctcacggtgttcgcgccgcccgacagcgccttctccgcgctccccgccggcacgctcaactccctctccgaccagcagaagacgtcgctggtgcagttccacgtcgtgtccgcggcgctccccgccgcgcagctcgagaccgtcagcaacccgctgcggacgcaggctggcgacaccggcaggggcaagtacccgctcaacctcaccgcggacggctccagcgtcaacgtctccacgggggtcgtcaacgccacgctcgacgccacgccgctttacgccggggacaggctcgtcgtctaccaggtcagcaaggtgctgctgccgtgggcgctctacggcccgccggtccccgcgccggccccttccccggcggagagcaagaagaagaagaaggccacgccggatgctgtggcggatgcgccggcggctgagactgcggcggggacgacgacggcgtcggcggccgcgcgcgcgggagggaccccagctggcgtccgagctgcttcgtcctgcgtcgtggcgctcgccgccgtggcagctttgtggtgggctatctgaccacgtacagtacagtaaggatgcatgcgtgttttgccatcgtggagcttctttccggacagatttgtttctaattcatcaatcgaccagttcattattcttttcttcgttttataaaaaaagatgtattgtggatgtatttggtggcgttttgtaatgtttgtattgtatactttgaagaactgtacatcatattttgtggacgtatattgttatccaattgtattaatgtgg

SEQ ID NO: 24143 - protein, 265 aa, Zea mays subsp. mays
  peptide (1)..(265): Ceres Seq. ID no. 12352056
  misc_feature (42)..(188): Pfam Name: Pfam Description:  Fasciclin domain
  misc_feature (21)..(258): NCBI GI NO: 34896012 NR Description: EST D25138
  misc_feature (23)..(249): NCBI GI NO: 30841338 NR Description: arabinogalactan protein [Gossypium hirsutum]
  misc_feature (31)..(262): NCBI GI NO: 15242651 NR Description: fasciclin-like arabinogalactan-protein
  misc_feature (31)..(262): NCBI GI NO: 21553523 NR Description: arabinogalactan protein-like
  misc_feature (9)..(222): NCBI GI NO: 15239344 NR Description: fasciclin-like arabinogalactan-protein
  misc_feature (9)..(222): NCBI GI NO: 15294288 NR Description: AT5g60490/muf9_140 [Arabidopsis thaliana]
  misc_feature (9)..(222): NCBI GI NO: 21553590 NR Description: arabinogalactan protein-like
  misc_feature (23)..(223): NCBI GI NO: 5919185 NR Description: arabinogalactan protein Pop14A9
  misc_feature (1)..(254): NCBI GI NO: 34910950 NR Description: putative arabinogalactan-like protein
  misc_feature (15)..(257): NCBI GI NO: 2129473 NR Description: arabinogalactan-like protein - loblolly pine
MASRLAAALLLSVVALLTSVAPLACGQAASAPSPAPAPPKTITAILSKAGQFTKFLQLLQSTREAEQITNQLKGKPSNGGLTVFAPPDSAFSALPAGTLNSLSDQQKTSLVQFHVVSAALPAAQLETVSNPLRTQAGDTGRGKYPLNLTADGSSVNVSTGVVNATLDATPLYAGDRLVVYQVSKVLLPWALYGPPVPAPAPSPAESKKKKKATPDAVADAPAAETAAGTTTASAAARAGGTPAGVRAASSCVVALAAVAALWWAI

SEQ ID NO: 24144 - DNA, 473 bp, Zea mays subsp. mays
  misc_feature (1)..(473): Ceres Seq. ID no. 13564955
acgcgctcaactccacgggccttgagctagggttttcttcgccgctacctccctacgargcgggcgtgcagccatggcgctggtgcaggcgggcatgggccttacccgggtcgttatcctcgtcggcgccggcgttgccgctccgtcgtcctccgcaacggccgcctcgccgagatcctcggcgagctccaggagatactcgacaaggggaagaaggtgaaggatggavgarggggagacggggaaaccgatctcaacgaggctcttacctcgcaggtgcgtcgccttgccatggaggtccggcaacttggtaattcacgttcaataactgttctcaatggaggttctgcacaatcaggagtatcaggcctgatagtacctgcagcaactgtaggagcactgggttacggttatatgtrgtggaaggggatctcgttctcagatctaatgtatgtcaccaagcgcaacatggc

SEQ ID NO: 24145 - protein, 103 aa, Zea mays subsp. mays
  peptide (1)..(103): Ceres Seq. ID no. 13564956
  misc_feature (19)..(19): Xaa is any aa, unknown or other
  misc_feature (76)..(76): Xaa is any aa, unknown or other
  misc_feature (77)..(77): Xaa is any aa, unknown or other
ALNSTGLELGFSSPLPPYXAGVQPWRWCRRAWALPGSLSSSAPALPLRRPPQRPPRRDPRRAPGDTRQGEEGEGWXXGRRGNRSQRGSYLAGASPCHGGPATW

SEQ ID NO: 24146 - protein, 60 aa, Zea mays subsp. mays
  peptide (1)..(60): Ceres Seq. ID no. 13564957
  misc_feature (1)..(59): NCBI GI NO: 18396143 NR Description: bZIP family transcription factor
  misc_feature (1)..(59): NCBI GI NO: 21537323 NR Description: unknown [Arabidopsis thaliana]
  misc_feature (1)..(59): NCBI GI NO: 25361065 NR Description: protein T7N9.6 [imported] - Arabidopsis thaliana
  misc_feature (1)..(59): NCBI GI NO: 15227027 NR Description: expressed protein [Arabidopsis thaliana]
  misc_feature (1)..(59): NCBI GI NO: 7487252 NR Description: hypothetical protein At2g02730
  misc_feature (1)..(59): NCBI GI NO: 34906300 NR Description: unnamed protein product
  misc_feature (1)..(59): NCBI GI NO: 18390460 NR Description: expressed protein [Arabidopsis thaliana]
  misc_feature (1)..(59): NCBI GI NO: 34894218 NR Description: P0439B06.30
  misc_feature (1)..(59): NCBI GI NO: 22329773 NR Description: expressed protein [Arabidopsis thaliana]
  misc_feature (43)..(43): Xaa is any aa, unknown or other
MEVRQLGNSRSITVLNGGSAQSGVSGLIVPAATVGALGYGYMXWKGISFSDLMYVTKRNM

SEQ ID NO: 24147 - DNA, 1377 bp, Zea mays subsp. mays
  misc_feature (1)..(1377): Ceres Seq. ID no. 12407875
aaaacccaatccacttcgcaagccccgccgcacacttcttccccctgcctccaaaaactcagaaaaccctgaccgccggcggcggccatgcttctccaccaccgcctcctccctcgcctacttcttgttccttccacacatacctccacactcctctgcccctcccgtttgccgcgccgcctctccctctcgccgcgcttctacgcgctgccccacctcgcggcaccccagaccgtcgaccactccgacgatgagggggcaccccagggggaggggcagatcaagctcccgctcgaccatctcttcgtgccgcccggggcaacaatggatgcgggggaccaggaggccgtgagcgcacgggtgcttaagggctccaacatcgtgctgggcccatacgcgcgcggcgacgcacaggtggtcaacgcagattttgtaaagagcagcgtgcgtcccgatgactgccctcgggacggccttccggagtttgcactcgttggccggtccaacgtcggcaaatcgtcgctgctcaactcgcttgtccgccgcaagcgccttgcccttacctccaagaagcctgggaagacccaatgtatcaatcatttcaaagtaaatgacagctggtatcttgttgacttgcctggttatggatatgcttctgcaccacaggaagctcgtaccaattgggatgaatttactagaaattactttctcagtcgggagaatttggtatctgtttttcttcttatagatgcaagtatacctgccaagaagattgatcttgactatgctagttggcttggccaaaacaaggttcccatgacccttgtgttcacaaaatgtgacaagcgcaagaagaagaagaacggcggcaggaaacctgaagaaaacgtggaaactttccagggcctaatccgcgaatacttcgaggccgcgcctccttggatcatgacgagcagcgtgaccaaccagggccgcgatgagatactcctgcacatgtctcagcttaggaattattggctcaagcattgagatgcaatgataaccaaaccggagcgaagcaactagaacagcatgcaaagcactgtagtccattgacgcatggacattcagcagtcggcgcctccgcaatcaggcgttcgcaccaactagtccagccttttgagctgttgactgtccaatatggcccctgtacatgattacccaatcaacactccggggatgcggacaaggtgctaaaatcagctgatcatggttttttttctttatttctattgtgtacacgtacaatcccaaccaacgttttccccttgttcccatctgattataggcttgtgtatactgtggggttaaatgattaataaattctggtgttagctg

SEQ ID NO: 24148 - protein, 313 aa, Zea mays subsp. mays
  peptide (1)..(313): Ceres Seq. ID no. 12407876
  misc_feature (132)..(259): Pfam Name: Pfam Description:  GTPase of unknown function
  misc_feature (1)..(313): NCBI GI NO: 34910170 NR Description: putative GTP-binding protein
  misc_feature (16)..(313): NCBI GI NO: 15239069 NR Description: putative GTP-binding protein; protein id:At5g11480
  misc_feature (16)..(313): NCBI GI NO: 21592799 NR Description: putative GTP-binding protein
  misc_feature (35)..(310): NCBI GI NO: 18400109 NR Description: putative nucleotide-binding protein
  misc_feature (92)..(310): NCBI GI NO: 25306612 NR Description: probable nucleotide-binding protein
  misc_feature (188)..(310): NCBI GI NO: 20330773 NR Description: Putative nucleotide binding protein
  misc_feature (92)..(187): NCBI GI NO: 20330773 NR Description: Putative nucleotide binding protein
  misc_feature (109)..(306): NCBI GI NO: 29346493 NR Description: putative GTP-binding protein
  misc_feature (111)..(306): NCBI GI NO: 23137475 NR Description: hypothetical protein [Cytophaga hutchinsonii]
  misc_feature (109)..(308): NCBI GI NO: 19705309 NR Description: GTP-binding protein
MLLHHRLLPRLLLVPSTHTSTLLCPSRLPRRLSLSPRFYALPHLAAPQTVDHSDDEGAPQGEGQIKLPLDHLFVPPGATMDAGDQEAVSARVLKGSNIVLGPYARGDAQVVNADFVKSSVRPDDCPRDGLPEFALVGRSNVGKSSLLNSLVRRKRLALTSKKPGKTQCINHFKVNDSWYLVDLPGYGYASAPQEARTNWDEFTRNYFLSRENLVSVFLLIDASIPAKKIDLDYASWLGQNKVPMTLVFTKCDKRKKKKNGGRKPEENVETFQGLIREYFEAAPPWIMTSSVTNQGRDEILLHMSQLRNYWLKH

SEQ ID NO: 24149 - protein, 234 aa, Zea mays subsp. mays
  peptide (1)..(234): Ceres Seq. ID no. 12407877
  misc_feature (53)..(180): Pfam Name: Pfam Description:  GTPase of unknown function
  misc_feature (1)..(234): NCBI GI NO: 34910170 NR Description: putative GTP-binding protein
  misc_feature (1)..(234): NCBI GI NO: 15239069 NR Description: putative GTP-binding protein; protein id:At5g11480
  misc_feature (1)..(234): NCBI GI NO: 21592799 NR Description: putative GTP-binding protein
  misc_feature (1)..(231): NCBI GI NO: 18400109 NR Description: putative nucleotide-binding protein
  misc_feature (13)..(231): NCBI GI NO: 25306612 NR Description: probable nucleotide-binding protein
  misc_feature (109)..(231): NCBI GI NO: 20330773 NR Description: Putative nucleotide binding protein
  misc_feature (13)..(108): NCBI GI NO: 20330773 NR Description: Putative nucleotide binding protein
  misc_feature (30)..(227): NCBI GI NO: 29346493 NR Description: putative GTP-binding protein
  misc_feature (32)..(227): NCBI GI NO: 23137475 NR Description: hypothetical protein [Cytophaga hutchinsonii]
  misc_feature (30)..(229): NCBI GI NO: 19705309 NR Description: GTP-binding protein
MDAGDQEAVSARVLKGSNIVLGPYARGDAQVVNADFVKSSVRPDDCPRDGLPEFALVGRSNVGKSSLLNSLVRRKRLALTSKKPGKTQCINHFKVNDSWYLVDLPGYGYASAPQEARTNWDEFTRNYFLSRENLVSVFLLIDASIPAKKIDLDYASWLGQNKVPMTLVFTKCDKRKKKKNGGRKPEENVETFQGLIREYFEAAPPWIMTSSVTNQGRDEILLHMSQLRNYWLKH

SEQ ID NO: 24150 - DNA, 1282 bp, Zea mays subsp. mays
  misc_feature (1)..(1282): Ceres Seq. ID no. 12353623
acctgggactgggaggctgggaatcccggcaggcaaagcgaaagcatccgcgcgagaggcgtcgcgtgttccttgcttcgtcctcacgtgccgtggcccttccgcttcccccgtatccgcccgtcctgttcccgccccgagcgaaccggcggcggcggaggcgatgcagcacgagccgtggcggcctggcgctgagcccgccgccggggctggggcgggccctgctcccaccaccgtcgacgaggcatccatggagcggagcatgagcttcgtcaaggcgcttcaggagctcaagaacctgcgcccgcagctctactcggcctccgagtactgcgagaagtcctacctccgcagcgaacagaagcaagtggtgctggacaacatgaaagattacgctgtcagggccctggtcaacgctgtcgaccatcttggcacagtggcctacaagctgacagacctatacgaagagcaggcttcagaaataacaaccctcgagttgaaagtagcatgcttgaaccagcaagtccgtacctgccagacatacacggacaaagaaggccttaggcaacagcagatgatgggggctgccagaagacaccataaccattacatcgtaccatatgcgggaaacaaaagaatgcaggccttctctgttacgcaagccgatgctgatttcgacccaacgccaaggcctttctcttcagcaaggacccttgagtggcatttggtttccgagaagaattccaaaaccagtagaccagatcagtctgaaactgccttaggagaaacaaaaaccactaaggcttcgtcaagtggtttccgccttctcggcaaggaatcatctgcatctcccttgtccaggaatgtgcagtccaacataaccagtttggatattgtcagcgtcggcatgaaggatcagcccacgaccaggcacttgtcatcgttcagttctttggacaaccccagggggcgccaaatccagaaggccccgcttcgcacaaaaagtatgctagccgctttcttcgtcaaacacagatcagcaaagatgaaaaacgtctctgtgcgttgatcaactgcaagccaagcctgtagtttgctccagccaaaccaacgtggaagtgttaagggcatgagatgtatacatgtttgtatatggtatttgggtcttgtatgctagtgctctagagataaacctttacggatgcgctttcaatctagagtctttggcattttgctcatgaccttaatgtaatgatttatatggatatatattactagtttt

SEQ ID NO: 24151 - protein, 355 aa, Zea mays subsp. mays
  peptide (1)..(355): Ceres Seq. ID no. 12353624
  misc_feature (69)..(355): NCBI GI NO: 34912804 NR Description: P0501G01.11
  misc_feature (74)..(350): NCBI GI NO: 18407012 NR Description: expressed protein; protein id: At2g46225
  misc_feature (74)..(350): NCBI GI NO: 26452761 NR Description: unknown protein [Arabidopsis thaliana]
  misc_feature (95)..(222): NCBI GI NO: 25408977 NR Description: hypothetical protein At2g46220
  misc_feature (234)..(350): NCBI GI NO: 25408977 NR Description: hypothetical protein At2g46220
  misc_feature (80)..(224): NCBI GI NO: 15229112 NR Description: putative protein; protein id: At3g49290.1
  misc_feature (68)..(212): NCBI GI NO: 10177091 NR Description: emb|CAB66408
  misc_feature (68)..(212): NCBI GI NO: 30689382 NR Description: expressed protein [Arabidopsis thaliana]
  misc_feature (69)..(213): NCBI GI NO: 34913914 NR Description: OSJNBa0066C06.8
  misc_feature (80)..(217): NCBI GI NO: 15238265 NR Description: putative protein; protein id: At5g42030
PGTGRLGIPAGKAKASAREASRVPCFVLTCRGPSASPVSARPVPAPSEPAAAEAMQHEPWRPGAEPAAGAGAGPAPTTVDEASMERSMSFVKALQELKNLRPQLYSASEYCEKSYLRSEQKQVVLDNMKDYAVRALVNAVDHLGTVAYKLTDLYEEQASEITTLELKVACLNQQVRTCQTYTDKEGLRQQQMMGAARRHHNHYIVPYAGNKRMQAFSVTQADADFDPTPRPFSSARTLEWHLVSEKNSKTSRPDQSETALGETKTTKASSSGFRLLGKESSASPLSRNVQSNITSLDIVSVGMKDQPTTRHLSSFSSLDNPRGRQIQKAPLRTKSMLAAFFVKHRSAKMKNVSVR

SEQ ID NO: 24152 - protein, 301 aa, Zea mays subsp. mays
  peptide (1)..(301): Ceres Seq. ID no. 12353625
  misc_feature (15)..(301): NCBI GI NO: 34912804 NR Description: P0501G01.11
  misc_feature (20)..(296): NCBI GI NO: 18407012 NR Description: expressed protein; protein id: At2g46225
  misc_feature (20)..(296): NCBI GI NO: 26452761 NR Description: unknown protein [Arabidopsis thaliana]
  misc_feature (41)..(168): NCBI GI NO: 25408977 NR Description: hypothetical protein At2g46220
  misc_feature (180)..(296): NCBI GI NO: 25408977 NR Description: hypothetical protein At2g46220
  misc_feature (26)..(170): NCBI GI NO: 15229112 NR Description: putative protein; protein id: At3g49290.1
  misc_feature (14)..(158): NCBI GI NO: 10177091 NR Description: emb|CAB66408
  misc_feature (14)..(158): NCBI GI NO: 30689382 NR Description: expressed protein [Arabidopsis thaliana]
  misc_feature (15)..(159): NCBI GI NO: 34913914 NR Description: OSJNBa0066C06.8
  misc_feature (26)..(163): NCBI GI NO: 15238265 NR Description: putative protein; protein id: At5g42030
MQHEPWRPGAEPAAGAGAGPAPTTVDEASMERSMSFVKALQELKNLRPQLYSASEYCEKSYLRSEQKQVVLDNMKDYAVRALVNAVDHLGTVAYKLTDLYEEQASEITTLELKVACLNQQVRTCQTYTDKEGLRQQQMMGAARRHHNHYIVPYAGNKRMQAFSVTQADADFDPTPRPFSSARTLEWHLVSEKNSKTSRPDQSETALGETKTTKASSSGFRLLGKESSASPLSRNVQSNITSLDIVSVGMKDQPTTRHLSSFSSLDNPRGRQIQKAPLRTKSMLAAFFVKHRSAKMKNVSVR

SEQ ID NO: 24153 - protein, 272 aa, Zea mays subsp. mays
  peptide (1)..(272): Ceres Seq. ID no. 12353626
  misc_feature (1)..(272): NCBI GI NO: 34912804 NR Description: P0501G01.11
  misc_feature (1)..(267): NCBI GI NO: 18407012 NR Description: expressed protein; protein id: At2g46225
  misc_feature (1)..(267): NCBI GI NO: 26452761 NR Description: unknown protein [Arabidopsis thaliana]
  misc_feature (12)..(139): NCBI GI NO: 25408977 NR Description: hypothetical protein At2g46220
  misc_feature (151)..(267): NCBI GI NO: 25408977 NR Description: hypothetical protein At2g46220
  misc_feature (1)..(141): NCBI GI NO: 15229112 NR Description: putative protein; protein id: At3g49290.1
  misc_feature (1)..(129): NCBI GI NO: 10177091 NR Description: emb|CAB66408
  misc_feature (1)..(129): NCBI GI NO: 30689382 NR Description: expressed protein [Arabidopsis thaliana]
  misc_feature (1)..(130): NCBI GI NO: 34913914 NR Description: OSJNBa0066C06.8
  misc_feature (1)..(134): NCBI GI NO: 15238265 NR Description: putative protein; protein id: At5g42030
MERSMSFVKALQELKNLRPQLYSASEYCEKSYLRSEQKQVVLDNMKDYAVRALVNAVDHLGTVAYKLTDLYEEQASEITTLELKVACLNQQVRTCQTYTDKEGLRQQQMMGAARRHHNHYIVPYAGNKRMQAFSVTQADADFDPTPRPFSSARTLEWHLVSEKNSKTSRPDQSETALGETKTTKASSSGFRLLGKESSASPLSRNVQSNITSLDIVSVGMKDQPTTRHLSSFSSLDNPRGRQIQKAPLRTKSMLAAFFVKHRSAKMKNVSVR

SEQ ID NO: 24154 - DNA, 1067 bp, Zea mays subsp. mays
  misc_feature (1)..(1067): Ceres Seq. ID no. 12336665
agcccctcctaaatttttttctagatccgtccctgtttgccgctgtgtttagctctcttccccgcaagatccatcgatcggtcggacaggataagacatgggtcagattttgggtttagttcaggttgatcagtcaactgtagccatcaaagaaaattttggcaagttcagcgaggtcctggagcctggttgccacttcctgccctggtgcatagggcagcagattgctggttacctctccttgcgtgtgcgccagctggatgtccgctgcgaaacaaagacaaaggacaatgtctttgtcactgttgttgcatctgttcaatatcgcgctcttgctgataaggcatctgacgccttctacaagctgagcaacaccagggaacaaatccagtcatacgtatttgatgtcatcagagctactgttccgaagctgggcttggacgatgcatttgagcagaagaatgagatcgcaaaagcagtggaagaggagcttgaaaaggcaatgtctacttatggctatcagatcgtgcaaacgctaattgttgatattgagcctgacgaccgcgtcaagagagcaatgaacgagatcaatgcagctgctaggatgagggtggcagccagtgagaaagctgaggctgagaagatactccagatcaagaaagccgagggagaggcggaatccaagtacctggctggcgtgggtattgcaaggcagcgccaggccattgtggatgggctgagggacagtgtgctcgccttctcagagaacgttccaggcaccactgccaaggacatcatggacatggtcctggtcacccagtactttgacaccatgagggagattggggcctcctccaagtcctcttcggtgttcatcccccacggtcctggagctgtcaaggatgtctcggcgcagataagagatggcctcctgcaggctaatctgcactgagggtaccctgagaaaacgaaggattcagagggatgagggcatcggtcctatgatgctataaaattgtcaattatagactatatatgatatatagaggcaggcttgattgatttgt

SEQ ID NO: 24155 - protein, 284 aa, Zea mays subsp. mays
  peptide (1)..(284): Ceres Seq. ID no. 12336666
  misc_feature (1)..(284): NCBI GI NO: 7716468 NR Description: hypersensitive-induced response protein [Zea mays]
  misc_feature (1)..(282): NCBI GI NO: 13194676 NR Description: hypersensitivity-induced response-like protein
  misc_feature (1)..(283): NCBI GI NO: 14150732 NR Description: hypersensitive-induced response protein
  misc_feature (1)..(283): NCBI GI NO: 7716466 NR Description: hypersensitive-induced response protein [Zea mays]
  misc_feature (1)..(282): NCBI GI NO: 28476864 NR Description: hypersensitive-induced reaction protein 2
  misc_feature (1)..(283): NCBI GI NO: 9998903 NR Description: putative membrane protein [Zea mays]
  misc_feature (1)..(283): NCBI GI NO: 23345042 NR Description: hypersensitive-induced reaction protein 1
  misc_feature (1)..(282): NCBI GI NO: 15241939 NR Description: putative protein; protein id: At5g62740
  misc_feature (1)..(282): NCBI GI NO: 3928150 NR Description: hypothetical protein [Cicer arietinum]
  misc_feature (1)..(282): NCBI GI NO: 15222481 NR Description: unknown protein; protein id: At1g69840
MGQILGLVQVDQSTVAIKENFGKFSEVLEPGCHFLPWCIGQQIAGYLSLRVRQLDVRCETKTKDNVFVTVVASVQYRALADKASDAFYKLSNTREQIQSYVFDVIRATVPKLGLDDAFEQKNEIAKAVEEELEKAMSTYGYQIVQTLIVDIEPDDRVKRAMNEINAAARMRVAASEKAEAEKILQIKKAEGEAESKYLAGVGIARQRQAIVDGLRDSVLAFSENVPGTTAKDIMDMVLVTQYFDTMREIGASSKSSSVFIPHGPGAVKDVSAQIRDGLLQANLH

SEQ ID NO: 24156 - protein, 149 aa, Zea mays subsp. mays
  peptide (1)..(149): Ceres Seq. ID no. 12336667
  misc_feature (1)..(149): NCBI GI NO: 7716468 NR Description: hypersensitive-induced response protein [Zea mays]
  misc_feature (1)..(147): NCBI GI NO: 13194676 NR Description: hypersensitivity-induced response-like protein
  misc_feature (1)..(148): NCBI GI NO: 14150732 NR Description: hypersensitive-induced response protein
  misc_feature (1)..(148): NCBI GI NO: 7716466 NR Description: hypersensitive-induced response protein [Zea mays]
  misc_feature (1)..(147): NCBI GI NO: 28476864 NR Description: hypersensitive-induced reaction protein 2
  misc_feature (1)..(148): NCBI GI NO: 9998903 NR Description: putative membrane protein [Zea mays]
  misc_feature (1)..(148): NCBI GI NO: 23345042 NR Description: hypersensitive-induced reaction protein 1
  misc_feature (1)..(147): NCBI GI NO: 15241939 NR Description: putative protein; protein id: At5g62740
  misc_feature (1)..(147): NCBI GI NO: 3928150 NR Description: hypothetical protein [Cicer arietinum]
  misc_feature (1)..(147): NCBI GI NO: 15222481 NR Description: unknown protein; protein id: At1g69840
MSTYGYQIVQTLIVDIEPDDRVKRAMNEINAAARMRVAASEKAEAEKILQIKKAEGEAESKYLAGVGIARQRQAIVDGLRDSVLAFSENVPGTTAKDIMDMVLVTQYFDTMREIGASSKSSSVFIPHGPGAVKDVSAQIRDGLLQANLH

SEQ ID NO: 24157 - DNA, 1520 bp, Zea mays subsp. mays
  misc_feature (1)..(1520): Ceres Seq. ID no. 12349893
atttttcctccgcctgcccaccctcgccgatgtagggcgcgccgccaccacctgcgcctccttccgccgcgtcgtcgccgacagcaccttcctgcgccgcctccgctccgtccacccggcgcccctcctcggcttactgctcttctcatcagtccacccggcggagccgccccacccctccgcgccctatgcgcgagctctgcagagggccgcagacctctccttctccttcgtcccctgcgccggccgctggatcccgatcgacgcccgcgacggccgcgtcctcctggagagcgagaccatgggcggcgactttgcggtgtgcgaccctgtgtcccggcgatacctctttctgccccgtatccccggacacccagccgctcagcgctgccgccgtctggagccgttcctcgttcccgccagtaacgaggagccggagacgtcgctgagggtggtctgcgtggcagagcgcaaacctggacagctggtcgccttcgtcttctcttcggacaccgggcgatggggaagtctgaccgtggatgtcagcgtgcctccctcttgcaaattttcgtggtcctcctacggtttcggcagctgctactggaaggtgactgggagtaacaaactccttgggctcgacacgcgttccatggtgttctcctctttcgatatcccgtctggttacggccagcaagattctgtcgttgtggaggcagcggaaggcagattcagaatgttcactctccacaacagcatgatttctgctgcatcttacctggttcatgctgttcgggtaatccgcgaagaaggcaacaacctttggcaggttaagaggagagtcaggttgccgtcccaatatattttcagctttgcagatgcaacggataagcacttactccttcgtgggattccatggaatttgcacctggagccttctactcctggcgctgatataggatacttctctgttgagttcgagtctatgcaggttgagaaaatttgtggcatcaggaatcttctatacgccaaactgtacactggttttccaccgtcattgtccctaccaagcatatgaaatggtggcttcacaacgtgaatgaactatgctggctattgacttcaatctggtggtttggaaaggaagcaaaggattcatgtatgaactacttccagggcagggtcactaaggagtaaaaggacttgaggactgatgagcagttggatgatctgtttttcagtcttttaggacatgtttggatgcagccctggcctggaccgcctgctggcttaggcagctttcccgtgccgccatccaaacatgcccgcccttattttgtcgtcgtaccaatatttcgatgtgattctgcatccgcatctgccagagtgctgttgcaacgttgcatcctatcctggaaggctggaatgtttatttggtgctcggcatctctctgaacttcatgtttccccggcgtaccatgctagtgtttttcaatggagccattattgcacttcgctgtgcc

SEQ ID NO: 24158 - protein, 357 aa, Zea mays subsp. mays
  peptide (1)..(357): Ceres Seq. ID no. 12349894
  misc_feature (132)..(357): NCBI GI NO: 34393354 NR Description: hypothetical protein
  misc_feature (3)..(132): NCBI GI NO: 34393354 NR Description: hypothetical protein
  misc_feature (3)..(132): NCBI GI NO: 34393352 NR Description: hypothetical protein
  misc_feature (3)..(127): NCBI GI NO: 32480316 NR Description: OSJNBa0042D13.1
  misc_feature (2)..(127): NCBI GI NO: 34393351 NR Description: hypothetical protein
  misc_feature (2)..(127): NCBI GI NO: 37530886 NR Description: hypothetical protein
  misc_feature (3)..(241): NCBI GI NO: 34914942 NR Description: B1096D03.38
  misc_feature (3)..(111): NCBI GI NO: 37530888 NR Description: hypothetical protein
FFLRLPTLADVGRAATTCASFRRVVADSTFLRRLRSVHPAPLLGLLLFSSVHPAEPPHPSAPYARALQRAADLSFSFVPCAGRWIPIDARDGRVLLESETMGGDFAVCDPVSRRYLFLPRIPGHPAAQRCRRLEPFLVPASNEEPETSLRVVCVAERKPGQLVAFVFSSDTGRWGSLTVDVSVPPSCKFSWSSYGFGSCYWKVTGSNKLLGLDTRSMVFSSFDIPSGYGQQDSVVVEAAEGRFRMFTLHNSMISAASYLVHAVRVIREEGNNLWQVKRRVRLPSQYIFSFADATDKHLLLRGIPWNLHLEPSTPGADIGYFSVEFESMQVEKICGIRNLLYAKLYTGFPPSLSLPSI

SEQ ID NO: 24159 - protein, 257 aa, Zea mays subsp. mays
  peptide (1)..(257): Ceres Seq. ID no. 12349895
  misc_feature (32)..(257): NCBI GI NO: 34393354 NR Description: hypothetical protein
  misc_feature (1)..(32): NCBI GI NO: 34393354 NR Description: hypothetical protein
  misc_feature (1)..(32): NCBI GI NO: 34393352 NR Description: hypothetical protein
  misc_feature (1)..(27): NCBI GI NO: 32480316 NR Description: OSJNBa0042D13.1
  misc_feature (1)..(27): NCBI GI NO: 34393351 NR Description: hypothetical protein
  misc_feature (1)..(27): NCBI GI NO: 37530886 NR Description: hypothetical protein
  misc_feature (1)..(141): NCBI GI NO: 34914942 NR Description: B1096D03.38
  misc_feature (1)..(11): NCBI GI NO: 37530888 NR Description: hypothetical protein
MGGDFAVCDPVSRRYLFLPRIPGHPAAQRCRRLEPFLVPASNEEPETSLRVVCVAERKPGQLVAFVFSSDTGRWGSLTVDVSVPPSCKFSWSSYGFGSCYWKVTGSNKLLGLDTRSMVFSSFDIPSGYGQQDSVVVEAAEGRFRMFTLHNSMISAASYLVHAVRVIREEGNNLWQVKRRVRLPSQYIFSFADATDKHLLLRGIPWNLHLEPSTPGADIGYFSVEFESMQVEKICGIRNLLYAKLYTGFPPSLSLPSI

SEQ ID NO: 24160 - DNA, 1468 bp, Zea mays subsp. mays
  misc_feature (1)..(1468): Ceres Seq. ID no. 12372661
gcacgagaccattacctagaacatcctaatcgaaaaatctcccaagttcccatcccagtccgtcagtcaagcgagcgaaatcgaatggctcccctcttcgccgcggcgtcccacgcgtccctcctccccctctcctccctcgaccgccccgccgccggccacctagtccgtggcaccctcaggccccgcacctcgagcctccgcctgcgccgccccccgggggcaaccgggcgcggccgcgggcgtggccgagggggcatcccagacgagtggggcgagcgctcgccgccggccaaccccgagccccccgcgcagcccgatcctcccatcgacgaagacgagtggggccgcgacgactctgccgacggcaactcacgccctatcgtcgtcgacgagtggggcgagcccggggtgcctgagcccgagccgccctccgccgcggacccgcctagcccctccgcagacgacgactggggaaaggagccggaggcgccggcgccggcccctgctccggcggcggaggaggacgagcaggaggtgaagagggaggagctcaagcggtgcctggtggacacggtgtacggctccgacctcggcttccgggcgtccacggaggtcagaggtgaggtcgtcgagctagtcacccagctcgaggcggttaaccctactactgctcccgtcgactcgccggatctcctcgacggcaactggatcctcatatatacagcatattccgagcttctgcctattctagctgctggggcaacacctttggtcaaagtaaagcagatatcccaagaaattgactccaaaatcatgacgatagtcaatgcttcgacccttacgactccattcgcttcattttcattcagcgcaaccgcctctttcgaggttcaaagcccatcaaggatagaggtccaatttaaggaggggagctttcagcctccggcaatatcatcatccgtggatctacctcaacaagttgatatatttgggcagaagatcagcctggggccagtccagcaggcactgaatccattgcagcaagcatttgctagcattgctgggtccatttctgggcagccacccctcaaggtaccaattcctggcaacaacagagctcgatcctggctcttgactacctacctggacaaagacttaaggatctcgagaggcgatggaggcttgtttattcttgccaaagaggggagccctttgctagatcaattgtaaatctgtaattggttgctaccggaaaggatatccagaactccacaggtaacctaacagaggacgcctcacattgtatttatcaatcaatattgttgttggcggcactgttacatgtatggggccatgaaatcttagaaatgaatatttagtcgataagaatcgagagctgaactgagactgatacaaacaaaacacttcaatgttcatctgaaaaaaaaaaaaaaaaaaaaaaaaa

SEQ ID NO: 24161 - protein, 410 aa, Zea mays subsp. mays
  peptide (1)..(410): Ceres Seq. ID no. 12372662
  misc_feature (183)..(399): Pfam Name: Pfam Description:  PAP_fibrillin
  misc_feature (31)..(410): NCBI GI NO: 37537108 NR Description: putative plastid-lipid associated protein
  misc_feature (29)..(408): NCBI GI NO: 15227428 NR Description: putative fibrillin; protein id: At2g35490
  misc_feature (113)..(408): NCBI GI NO: 14248552 NR Description: plastid-lipid associated protein PAP3
  misc_feature (113)..(408): NCBI GI NO: 14248558 NR Description: plastid-lipid associated protein PAP3
  misc_feature (29)..(408): NCBI GI NO: 14596235 NR Description: putative fibrillin [Arabidopsis thaliana]
  misc_feature (113)..(409): NCBI GI NO: 4105180 NR Description: plastoglobule associated protein PG1 precursor
  misc_feature (141)..(407): NCBI GI NO: 22261807 NR Description: Light-induced protein, chloroplast precursor
  misc_feature (155)..(407): NCBI GI NO: 7489179 NR Description: plastid-lipid-associated protein pap
  misc_feature (155)..(407): NCBI GI NO: 3928760 NR Description: homolog to plastid-lipid-associated protein
  misc_feature (141)..(407): NCBI GI NO: 1076575 NR Description: plant fibrillin precursor - pepper
ARDHYLEHPNRKISQVPIPVRQSSERNRMAPLFAAASHASLLPLSSLDRPAAGHLVRGTLRPRTSSLRLRRPPGATGRGRGRGRGGIPDEWGERSPPANPEPPAQPDPPIDEDEWGRDDSADGNSRPIVVDEWGEPGVPEPEPPSAADPPSPSADDDWGKEPEAPAPAPAPAAEEDEQEVKREELKRCLVDTVYGSDLGFRASTEVRGEVVELVTQLEAVNPTTAPVDSPDLLDGNWILIYTAYSELLPILAAGATPLVKVKQISQEIDSKIMTIVNASTLTTPFASFSFSATASFEVQSPSRIEVQFKEGSFQPPAISSSVDLPQQVDIFGQKISLGPVQQALNPLQQAFASIAGSISGQPPLKVPIPGNNRARSWLLTTYLDKDLRISRGDGGLFILAKEGSPLLDQL

SEQ ID NO: 24162 - protein, 382 aa, Zea mays subsp. mays
  peptide (1)..(382): Ceres Seq. ID no. 12372663
  misc_feature (155)..(371): Pfam Name: Pfam Description:  PAP_fibrillin
  misc_feature (3)..(382): NCBI GI NO: 37537108 NR Description: putative plastid-lipid associated protein
  misc_feature (1)..(380): NCBI GI NO: 15227428 NR Description: putative fibrillin; protein id: At2g35490
  misc_feature (85)..(380): NCBI GI NO: 14248552 NR Description: plastid-lipid associated protein PAP3
  misc_feature (85)..(380): NCBI GI NO: 14248558 NR Description: plastid-lipid associated protein PAP3
  misc_feature (1)..(380): NCBI GI NO: 14596235 NR Description: putative fibrillin [Arabidopsis thaliana]
  misc_feature (85)..(381): NCBI GI NO: 4105180 NR Description: plastoglobule associated protein PG1 precursor
  misc_feature (113)..(379): NCBI GI NO: 22261807 NR Description: Light-induced protein, chloroplast precursor
  misc_feature (127)..(379): NCBI GI NO: 7489179 NR Description: plastid-lipid-associated protein pap
  misc_feature (127)..(379): NCBI GI NO: 3928760 NR Description: homolog to plastid-lipid-associated protein
  misc_feature (113)..(379): NCBI GI NO: 1076575 NR Description: plant fibrillin precursor - pepper
MAPLFAAASHASLLPLSSLDRPAAGHLVRGTLRPRTSSLRLRRPPGATGRGRGRGRGGIPDEWGERSPPANPEPPAQPDPPIDEDEWGRDDSADGNSRPIVVDEWGEPGVPEPEPPSAADPPSPSADDDWGKEPEAPAPAPAPAAEEDEQEVKREELKRCLVDTVYGSDLGFRASTEVRGEVVELVTQLEAVNPTTAPVDSPDLLDGNWILIYTAYSELLPILAAGATPLVKVKQISQEIDSKIMTIVNASTLTTPFASFSFSATASFEVQSPSRIEVQFKEGSFQPPAISSSVDLPQQVDIFGQKISLGPVQQALNPLQQAFASIAGSISGQPPLKVPIPGNNRARSWLLTTYLDKDLRISRGDGGLFILAKEGSPLLDQL

SEQ ID NO: 24163 - DNA, 482 bp, Zea mays subsp. mays
  misc_feature (1)..(482): Ceres Seq. ID no. 1348034
ctcaggttcgtgcgcttcacccaccctcccgtgcttccgctgcatttctttctcgtgatcttggggggttctaggacagggacggccggacgggccttgatgtttttgttgtgccgccgcaggtggaagaagcgtgacaatggaggctccacccgtggcgctgttcgacaccctcaaggcagccaaaccgttcttcttgttggctggtcccaacgtgattgaatcggaggagcacgtcctgaagatggccaaacacatcaaagcaattacgaccaagcttggaattccactcgtgttcaagtccagctttgataaagcaaaccgtacatcatcaaaatcgttccgtggtcctggtcttgaagaaggtctaaagatccttcaaaaggtgaaagcaacatatgaccttccgatagtcactgatgtgcacgaaagccaccagtgtgaagctgttggaagagttgctgacatcatacagattccag

SEQ ID NO: 24164 - protein, 73 aa, Zea mays subsp. mays
  peptide (1)..(73): Ceres Seq. ID no. 1348035
LRFVRFTHPPVLPLHFFLVILGGSRTGTAGRALMFLLCRRRWKKRDNGGSTRGAVRHPQGSQTVLLVGWSQRD

SEQ ID NO: 24165 - protein, 114 aa, Zea mays subsp. mays
  peptide (1)..(114): Ceres Seq. ID no. 1348036
  misc_feature (1)..(113): NCBI GI NO: 29367487 NR Description: putative 2-dehydro-3-deoxyphosphooctonate aldolase
  misc_feature (8)..(113): NCBI GI NO: 13620976 NR Description: 2-dehydro-3-deoxyphosphooctonate aldolase
  misc_feature (8)..(113): NCBI GI NO: 15219400 NR Description: 2-dehydro-3-deoxyphosphooctonate aldolase,putative
  misc_feature (8)..(113): NCBI GI NO: 21360537 NR Description: AT5g09730/F17I14_80 [Arabidopsis thaliana]
  misc_feature (4)..(113): NCBI GI NO: 6647535 NR Description: 2-dehydro-3-deoxyphosphooctonate aldolase
  misc_feature (8)..(113): NCBI GI NO: 15219214 NR Description: putative 3-deoxy-D-manno-2-octulosonate-8-phosphatesynthase
  misc_feature (1)..(113): NCBI GI NO: 13509333 NR Description: 3-desoxy-D-manno octulosonic acid-8-phosphatesynthase
  misc_feature (1)..(113): NCBI GI NO: 25291179 NR Description: hypothetical protein F3O9.14
  misc_feature (4)..(78): NCBI GI NO: 9971145 NR Description: Kdo-8-phosphate synthase [Pisum sativum]
  misc_feature (16)..(113): NCBI GI NO: 24375317 NR Description: 2-dehydro-3-deoxyphosphooctonate aldolase
MEAPPVALFDTLKAAKPFFLLAGPNVIESEEHVLKMAKHIKAITTKLGIPLVFKSSFDKANRTSSKSFRGPGLEEGLKILQKVKATYDLPIVTDVHESHQCEAVGRVADIIQIP

SEQ ID NO: 24166 - protein, 79 aa, Zea mays subsp. mays
  peptide (1)..(79): Ceres Seq. ID no. 1348037
  misc_feature (1)..(78): NCBI GI NO: 29367487 NR Description: putative 2-dehydro-3-deoxyphosphooctonate aldolase
  misc_feature (1)..(78): NCBI GI NO: 13620976 NR Description: 2-dehydro-3-deoxyphosphooctonate aldolase
  misc_feature (1)..(78): NCBI GI NO: 21360537 NR Description: AT5g09730/F17I14_80 [Arabidopsis thaliana]
  misc_feature (1)..(78): NCBI GI NO: 15219400 NR Description: 2-dehydro-3-deoxyphosphooctonate aldolase,putative
  misc_feature (1)..(78): NCBI GI NO: 6647535 NR Description: 2-dehydro-3-deoxyphosphooctonate aldolase
  misc_feature (1)..(78): NCBI GI NO: 15219214 NR Description: putative 3-deoxy-D-manno-2-octulosonate-8-phosphatesynthase
  misc_feature (1)..(78): NCBI GI NO: 13509333 NR Description: 3-desoxy-D-manno octulosonic acid-8-phosphatesynthase
  misc_feature (1)..(78): NCBI GI NO: 25291179 NR Description: hypothetical protein F3O9.14
  misc_feature (1)..(43): NCBI GI NO: 9971145 NR Description: Kdo-8-phosphate synthase [Pisum sativum]
  misc_feature (1)..(78): NCBI GI NO: 24375317 NR Description: 2-dehydro-3-deoxyphosphooctonate aldolase
MAKHIKAITTKLGIPLVFKSSFDKANRTSSKSFRGPGLEEGLKILQKVKATYDLPIVTDVHESHQCEAVGRVADIIQIP

SEQ ID NO: 24167 - DNA, 1877 bp, Zea mays subsp. mays
  misc_feature (1)..(1877): Ceres Seq. ID no. 12408017
accctcccccaccgccattgctcagcagcagtagtaaagccacgcctgacagacagctggttcatttctggttgctgccttgctggtggtagccctcggcgcaggcagccaagaacagagagagcgagatggatgtgaacgacgtgctgctagtggtgctggcggcggcgctggctgccatgtggtggcgtcggtgctccaagaccggcggtgtcgacggccctcccgccggggcctccgggttggccggtggtggggaacctgttccaggtgatcctgcagcgacggcccttcatgtacgtggtgcgcgacctccgggagaagtacgggcccatcttcaccatgcggatggggcagcgcaccctcatcgtggtcacctcggcggagctcatccacgaggcgctggtgaagcagggccccatgttcgcgagccggcccgaggacagccccacccgcctcctcttcagcgtcggcaagtgcaccgtcaactcggcgccctacggccccctgtggcgtgctctgcgccgcaacttcgtcgccgagatcgtgtccccgcaccgcgtcaagggcttctcctggatccgggagtgggccgtggacgcgcacttgcgccgcctctgcgccgagctcgcggcggacggtgccgtgcgggtcatggccagctgccgcctcaccatctgcagcatcctcatctgcatctgcttcggcgccaagatccccgacgagctcatccgggagatcgaggaggtgctcaaggacgtgatgatgatgaccatgcccaagctcccggacttcctgcccctcctcacaccgctcttcaggaagcagctcaccgaggcccgcgccctgcgccgccgccagctcaactgcctcgtgccgctcgtccgcgcgcggagggacttcctccgcgacggcaccgcggcagcggcggacggcgtggagatgatgagcgggcctggggaagcgtacgtggactcgctcttcgacctggagccgcccggccgcgggaagcgcctcggcgaggaggagctcgtcacgctctgctccgaggtcatgagcgccggcacagacaccagcgccacagcgctggaatgggccatgatgcacctcgtcctcgaccccgccgcgcagtagcgcctctacgacgaggtcgtcgccaaggtgggcaagaccgcccggatcaccgaagccgacgtcgaggccatgccctacctccaggcggtggtgaaggagacgttccggcggcacccgccgagccacttcgtgctgtcgcacgcggcgacgcgggacacggagctgggcgggtaccgcgtgccggcggacgccagcgtggagttctacacggcgtgggtgacggagaacccggcgacgtggccggacccggacgcgtggcggccggagcgcttcctggaaggcggcgagggcttcgacaccgacatcaccggcacccgcgcgctgcgcatgatgcccttcggcgccggccgccgcatctgccccgccgccacgctcggcgtgctccacatccagctcatgctcgccaacatggtgcgcgagttccgctggctgccgcccgccggtgagggcccgccggaccccaccgagaccttcgcattcaccgtcgtcatgaagaacccgctccgggcagccttcgtcgagcgggccacgacggagacggcgacaaccgcgtgacgagtgacgacggaaagtaaaaaaaaagggagagagagagaagttactagtacaagttactctttcactgggctctggctgggtgggtaagttgctgcaacgtgcgtgtcgtgcggggttaattcggtcccgcactctgcggtataaattacagttattaattaattagtccacggggaaggtgcgtg

SEQ ID NO: 24168 - protein, 483 aa, Zea mays subsp. mays
  peptide (1)..(483): Ceres Seq. ID no. 12408018
MDVNDVLLVVLAAALAAMWWRRCSKTGGVDGPPAGASGLAGGGEPVPGDPAATALHVRGARPPGEVRAHLHHADGAAHPHRGHLGGAHPRGAGEAGPHVREPARGQPHPPPLQRRQVHRQLGALRPPVACSAPQLRRRDRVPAPRQGLLLDPGVGRGRALAPPLRRARGGRCRAGHGQLPPHHLQHPHLHLLRRQDPRRAHPGDRGGAQGRDDDDHAQAPGLPAPPHTALQEAAHRGPRPAPPPAQLPRAARPRAEGLPPRRHRGSGGRRGDDERAWGSVRGLALRPGAARPREAPRRGGARHALLRGHERRHRHQRHSAGMGHDAPRPRPRRAVAPLRRGRRQGGQDRPDHRSRRRGHALPPGGGEGDVPAAPAEPLRAVARGDAGHGAGRVPRAGGRQRGVLHGVGDGEPGDVAGPGRVAAGALPGRRRGLRHRHHRHPRAAHDALRRRPPHLPRRHARRAPHPAHARQHGARVPLAAARR

SEQ ID NO: 24169 - protein, 466 aa, Zea mays subsp. mays
  peptide (1)..(466): Ceres Seq. ID no. 12408019
MWWRRCSKTGGVDGPPAGASGLAGGGEPVPGDPAATALHVRGARPPGEVRAHLHHADGAAHPHRGHLGGAHPRGAGEAGPHVREPARGQPHPPPLQRRQVHRQLGALRPPVACSAPQLRRRDRVPAPRQGLLLDPGVGRGRALAPPLRRARGGRCRAGHGQLPPHHLQHPHLHLLRRQDPRRAHPGDRGGAQGRDDDDHAQAPGLPAPPHTALQEAAHRGPRPAPPPAQLPRAARPRAEGLPPRRHRGSGGRRGDDERAWGSVRGLALRPGAARPREAPRRGGARHALLRGHERRHRHQRHSAGMGHDAPRPRPRRAVAPLRRGRRQGGQDRPDHRSRRRGHALPPGGGEGDVPAAPAEPLRAVARGDAGHGAGRVPRAGGRQRGVLHGVGDGEPGDVAGPGRVAAGALPGRRRGLRHRHHRHPRAAHDALRRRPPHLPRRHARRAPHPAHARQHGARVPLAAARR

SEQ ID NO: 24170 - protein, 279 aa, Zea mays subsp. mays
  peptide (1)..(279): Ceres Seq. ID no. 12408020
  misc_feature (1)..(279): Pfam Name: Pfam Description:  Cytochrome P450
  misc_feature (1)..(279): NCBI GI NO: 15221065 NR Description: cytochrome p450, putative; protein id: At1g11600
  misc_feature (1)..(279): NCBI GI NO: 5915821 NR Description: Cytochrome P450 77A3
  misc_feature (1)..(279): NCBI GI NO: 584866 NR Description: Cytochrome P450 77A1 (CYPLXXVIIA1) (P-450EG6)
  misc_feature (1)..(279): NCBI GI NO: 542070 NR Description: cytochrome P450 77A1 - eggplant (fragment)
  misc_feature (1)..(279): NCBI GI NO: 15238249 NR Description: cytochrome p450, putative; protein id: At5g04660
  misc_feature (1)..(279): NCBI GI NO: 584867 NR Description: Cytochrome P450 77A2 (CYPLXXVIIA2) (P-450EG5)
  misc_feature (1)..(279): NCBI GI NO: 21595357 NR Description: cytochrom P450-like protein [Arabidopsis thaliana]
  misc_feature (1)..(279): NCBI GI NO: 38347596 NR Description: OSJNBa0042I15.9
  misc_feature (1)..(279): NCBI GI NO: 15228331 NR Description: cytochrome p450, putative; protein id: At3g10570.1
  misc_feature (1)..(279): NCBI GI NO: 28393336 NR Description: putative cytochrome p450 [Arabidopsis thaliana]
MYVVRDLREKYGPIFTMRMGQRTLIVVTSAELIHEALVKQGPMFASRPEDSPTRLLFSVGKCTVNSAPYGPLWRALRRNFVAEIVSPHRVKGFSWIREWAVDAHLRRLCAELAADGAVRVMASCRLTICSILICICFGAKIPDELIREIEEVLKDVMMMTMPKLPDFLPLLTPLFRKQLTEARALRRRQLNCLVPLVRARRDFLRDGTAAAADGVEMMSGPGEAYVDSLFDLEPPGRGKRLGEEELVTLCSEVMSAGTDTSATALEWAMMHLVLDPAAQ

SEQ ID NO: 24171 - DNA, 1591 bp, Zea mays subsp. mays
  misc_feature (1)..(1591): Ceres Seq. ID no. 12357866
aggcagagctctcacgcggacggcggacctggccacctggggggcgcggacggagccttcgcttttcccccctcccctccctttcgaacgactaccgaggaggcatccgaggtggccagccacgatgatggccgcggcggcgctgaggccgcacaagtcttcgccggcgcgcgtgcccacgcggtgcgtggccgcgctctgcgccgcctgcttcctcgtcggcgtcggcgtcgtcaacaggtactggcctgttcctgagcctcatcccggttgcccagacaaggctggccctgaccactcgagggccgtgttgaaccaagcgtcacagactcgcgaagtcgtcatggcgttggacaagacgatatccgacatcgagatgcgcctggctgcggctagagccgcccaggcgatgagccagggcatgtcaccgggcgactcggactcggagggcgaccagggaaccgcgcggcgtaggatgtcttttgtcatgggcgttttcaccactcttgctaaccggaagcggagagattcaataaggcagacgtggatgccacagggtgatcagttgcgaagattggaagacaagggcgttgttatccgttttgttgttggacgcagtgcaaatccaaacctggaaaatgaggtcgaccatgcaattgatatggaggatgaagaatacagtgatatcttgagaattaatcatgtggaaggctatggagggctccctatgaaggttcagatgttcctttcgactgctcttacaatgtgggacgctgatttctatgtaaaagccgacgataatgtccatgtcaacattggtatcaccagatcgattttggcgcgacacaggatgaaacctcgggtgtacattggctgcatgaaatctggacctgttgttgctaagaatgactccaagtattatgagccagaccattggaagtttgggactgagggtaacaactactttaggcatgcaacacgtcagttgtatgctgtaaccagggatttagcaacttacatatcagcaaaccggcatatcctgcacaagtattcaaatgaagatgtatcatttggctcttggttgatcgggttggaagttgagcatgttgatgagagaagcctttgctgtggtactcccccagactgcgaatggaaagggcaggccgggaacccatgtgcggcgtccttcgactggaactgcactggcatctgcaatccggtggagaggatgacagaggtacaccgacgatgttgggaaggccttggagccgaagggcacgcacagtctttgacttttgacagccaatagttggcgcttggcggatcattgtcgcaccattttcttcctcttctttagggccctgtaattaatatgcggagatgaacttgtatgcaatggctcggtttttcagatgtgcagcaatggcatcgtttcctggccagttcgcgtgcggaaactggggtagagaattaggagttcaatctgcaagtgagtctctaataactggagatgcctcactggacgtccgatgaaactggggtagactgtttgattctctgatgaaagaattagctgtctgtctgagttctc

SEQ ID NO: 24172 - protein, 435 aa, Zea mays subsp. mays
  peptide (1)..(435): Ceres Seq. ID no. 12357867
  misc_feature (173)..(372): Pfam Name: Pfam Description:  Galactosyltransferase
  misc_feature (49)..(427): NCBI GI NO: 15223337 NR Description: Avr9 elicitor response protein, putative
  misc_feature (49)..(423): NCBI GI NO: 34907342 NR Description: putative elicitor response protein
  misc_feature (90)..(420): NCBI GI NO: 15220440 NR Description: putative AVR9 elicitor response protein
  misc_feature (94)..(420): NCBI GI NO: 4138265 NR Description: Avr9 elicitor response protein [Nicotiana tabacum]
  misc_feature (100)..(420): NCBI GI NO: 15217544 NR Description: elicitor response protein, putative
  misc_feature (101)..(419): NCBI GI NO: 15225684 NR Description: unknown protein; protein id: At2g32430.1
  misc_feature (51)..(423): NCBI GI NO: 30699558 NR Description: Avr9 elicitor response protein -related
  misc_feature (91)..(420): NCBI GI NO: 7485336 NR Description: hypothetical protein F10M23
  misc_feature (100)..(420): NCBI GI NO: 18416895 NR Description: Avr9 elicitor response like protein
  misc_feature (51)..(423): NCBI GI NO: 12323294 NR Description: putative
GRALTRTADLATWGARTEPSLFPPPLPFERLPRRHPRWPATMMAAAALRPHKSSPARVPTRCVAALCAACFLVGVGVVNRYWPVPEPHPGCPDKAGPDHSRAVLNQASQTREVVMALDKTISDIEMRLAAARAAQAMSQGMSPGDSDSEGDQGTARRRMSFVMGVFTTLANRKRRDSIRQTWMPQGDQLRRLEDKGVVIRFVVGRSANPNLENEVDHAIDMEDEEYSDILRINHVEGYGGLPMKVQMFLSTALTMWDADFYVKADDNVHVNIGITRSILARHRMKPRVYIGCMKSGPVVAKNDSKYYEPDHWKFGTEGNNYFRHATRQLYAVTRDLATYISANRHILHKYSNEDVSFGSWLIGLEVEHVDERSLCCGTPPDCEWKGQAGNPCAASFDWNCTGICNPVERMTEVHRRCWEGLGAEGHAQSLTFDSQ

SEQ ID NO: 24173 - protein, 394 aa, Zea mays subsp. mays
  peptide (1)..(394): Ceres Seq. ID no. 12357868
  misc_feature (132)..(331): Pfam Name: Pfam Description:  Galactosyltransferase
  misc_feature (8)..(386): NCBI GI NO: 15223337 NR Description: Avr9 elicitor response protein, putative
  misc_feature (8)..(382): NCBI GI NO: 34907342 NR Description: putative elicitor response protein
  misc_feature (49)..(379): NCBI GI NO: 15220440 NR Description: putative AVR9 elicitor response protein
  misc_feature (53)..(379): NCBI GI NO: 4138265 NR Description: Avr9 elicitor response protein [Nicotiana tabacum]
  misc_feature (59)..(379): NCBI GI NO: 15217544 NR Description: elicitor response protein, putative
  misc_feature (60)..(378): NCBI GI NO: 15225684 NR Description: unknown protein; protein id: At2g32430.1
  misc_feature (10)..(382): NCBI GI NO: 30699558 NR Description: Avr9 elicitor response protein -related
  misc_feature (50)..(379): NCBI GI NO: 7485336 NR Description: hypothetical protein F10M23
  misc_feature (59)..(379): NCBI GI NO: 18416895 NR Description: Avr9 elicitor response like protein
  misc_feature (10)..(382): NCBI GI NO: 12323294 NR Description: putative
MMAAAALRPHKSSPARVPTRCVAALCAACFLVGVGVVNRYWPVPEPHPGCPDKAGPDHSRAVLNQASQTREVVMALDKTISDIEMRLAAARAAQAMSQGMSPGDSDSEGDQGTARRRMSFVMGVFTTLANRKRRDSIRQTWMPQGDQLRRLEDKGVVIRFVVGRSANPNLENEVDHAIDMEDEEYSDILRINHVEGYGGLPMKVQMFLSTALTMWDADFYVKADDNVHVNIGITRSILARHRMKPRVYIGCMKSGPVVAKNDSKYYEPDHWKFGTEGNNYFRHATRQLYAVTRDLATYISANRHILHKYSNEDVSFGSWLIGLEVEHVDERSLCCGTPPDCEWKGQAGNPCAASFDWNCTGICNPVERMTEVHRRCWEGLGAEGHAQSLTFDSQ

SEQ ID NO: 24174 - protein, 393 aa, Zea mays subsp. mays
  peptide (1)..(393): Ceres Seq. ID no. 12357869
  misc_feature (131)..(330): Pfam Name: Pfam Description:  Galactosyltransferase
  misc_feature (7)..(385): NCBI GI NO: 15223337 NR Description: Avr9 elicitor response protein, putative
  misc_feature (7)..(381): NCBI GI NO: 34907342 NR Description: putative elicitor response protein
  misc_feature (48)..(378): NCBI GI NO: 15220440 NR Description: putative AVR9 elicitor response protein
  misc_feature (52)..(378): NCBI GI NO: 4138265 NR Description: Avr9 elicitor response protein [Nicotiana tabacum]
  misc_feature (58)..(378): NCBI GI NO: 15217544 NR Description: elicitor response protein, putative
  misc_feature (59)..(377): NCBI GI NO: 15225684 NR Description: unknown protein; protein id: At2g32430.1
  misc_feature (9)..(381): NCBI GI NO: 30699558 NR Description: Avr9 elicitor response protein -related
  misc_feature (49)..(378): NCBI GI NO: 7485336 NR Description: hypothetical protein F10M23
  misc_feature (58)..(378): NCBI GI NO: 18416895 NR Description: Avr9 elicitor response like protein
  misc_feature (9)..(381): NCBI GI NO: 12323294 NR Description: putative
MAAAALRPHKSSPARVPTRCVAALCAACFLVGVGVVNRYWPVPEPHPGCPDKAGPDHSRAVLNQASQTREVVMALDKTISDIEMRLAAARAAQAMSQGMSPGDSDSEGDQGTARRRMSFVMGVFTTLANRKRRDSIRQTWMPQGDQLRRLEDKGVVIRFVVGRSANPNLENEVDHAIDMEDEEYSDILRINHVEGYGGLPMKVQMFLSTALTMWDADFYVKADDNVHVNIGITRSILARHRMKPRVYIGCMKSGPVVAKNDSKYYEPDHWKFGTEGNNYFRHATRQLYAVTRDLATYISANRHILHKYSNEDVSFGSWLIGLEVEHVDERSLCCGTPPDCEWKGQAGNPCAASFDWNCTGICNPVERMTEVHRRCWEGLGAEGHAQSLTFDSQ

SEQ ID NO: 24175 - DNA, 1777 bp, Zea mays subsp. mays
  misc_feature (1)..(1777): Ceres Seq. ID no. 12423983
  misc_feature (917)..(917): n is a, c, t, g, unknown, or other
gcacgagaccattacctagaacatcctaatcgaaaaattgctgttagctccacacaaaagagagaaccggcggcgagctaggagctagccatggacggacacggcgcggtctcgccgtggagcgtgctaggcggggcggcggctgtgctgttcctgtggttggcgtcgcaggtgctggagtgggcctggtgggcgccccggcgcgtgaaccgtgcgctgagggcgcagggcctgaggggcacccggtaccgcctcctctgcggcgacctcatcgaggagcagcgtctccgcgcggcggccctggcaaggcccgtccccgtggatcgaccacacgacttcctccctcgcgtcgcgcctttccttcaccgcgtcctccaagagcacggcaagctctcgtttacatggtttgggccgaccccaagagttctaatcaccgatcccgagcttgcccgggaagtgctgtcgaataagtgtggcgacttcgtgaagtcgctgctctctcccctgtcaacgctgctggttgctgggctcgtcgtccttgacggtgaaaagtgggtcaaacatcgaaggattctgaatccggcattccacgcggagaagctgaagggaatgctgccggcattcttagcatgttgcaacgaactggttgacagatgggagaaacagatctcctgcttccgctgaaccaactgagctggatgtctggccagagttccaaaacttatcgggagatgtgatttcaagagctgcattcggtgttagctatgaagaaggcagaagaattttcctacttcaggcggagcaagctgaacgccttgttcaatctttcaagacaaattacatccctggcttctctctcctgccaacagaaaacaacagaaggatgaatgaaatcgacagggaggtgaagacggtcntgaggggcataatagagaagagacagaaggcagccaagaacggtgaagcaaccaaggacgacctgctgggcttgctactggagtcgaacatgaattacagcgactcggacggcaaatccagcaaggggattacggtggaggaggtgatcggcgagtgcaaggtgttctacttcgcagggatggagaccaccgccgtgctgctcacatggacagtggccgtgctaagcatgcacccggagtggcaggaccgtgccagggaggaggtcctgcaggtctttggtgaaaacaagccggacttcaatggtgtggcacgcctaaaagtggtgaccatggtgctctacgaggtgctgcgtctgtaccctccggtggcggccatcaaccgccggacacgccagccgacaaagctcggaggcgtcacgtacccggcgggggtcatgcttatgacgcccgtcatgttcatccaccgggaccctgccctgtggggctccgacgccgacgagttcaacccggggaggttcgccgacggcgtgtccaaggcgtgcagggaccccggcgccttcgcccccttcagctggggcccgcgcgtctgcatcggccagaactttgcgctcctggaggccaagctggccgtcagcatgatcctgcagcgcttcgcgttcgaggtgtcgccggcgtacgtccacgcgccctacaccgtgctgacactgcacccgcagcacggcgctccggtcaggctgcgcaggctatgaatacacgatcggtgcttccgttaagcaatttctctccaatacccgaagactcttgtttattcatttcaaagttacgattacaaaacataatgcaaaatctcaaacttatat

SEQ ID NO: 24176 - protein, 260 aa, Zea mays subsp. mays
  peptide (1)..(260): Ceres Seq. ID no. 12423984
  misc_feature (1)..(260): NCBI GI NO: 34912880 NR Description: putative cytochrome P450
  misc_feature (1)..(260): NCBI GI NO: 21842133 NR Description: cytochrome P450 monooxygenase CYP72A16
  misc_feature (1)..(260): NCBI GI NO: 13661772 NR Description: putative cytochrome P450 [Lolium rigidum]
  misc_feature (1)..(260): NCBI GI NO: 13661774 NR Description: putative cytochrome P450 [Lolium rigidum]
  misc_feature (1)..(260): NCBI GI NO: 13661766 NR Description: putative cytochrome P450 [Lolium rigidum]
  misc_feature (1)..(260): NCBI GI NO: 34912882 NR Description: putative cytochrome P450
  misc_feature (1)..(260): NCBI GI NO: 13661770 NR Description: putative cytochrome P450 [Lolium rigidum]
  misc_feature (1)..(260): NCBI GI NO: 13661768 NR Description: putative cytochrome P450 [Lolium rigidum]
  misc_feature (1)..(260): NCBI GI NO: 34912894 NR Description: putative cytochrome P450
  misc_feature (1)..(260): NCBI GI NO: 19909879 NR Description: cytochrome P450 [Oryza sativa]
  misc_feature (12)..(12): Xaa is any aa, unknown or other
MNEIDREVKTVXRGIIEKRQKAAKNGEATKDDLLGLLLESNMNYSDSDGKSSKGITVEEVIGECKVFYFAGMETTAVLLTWTVAVLSMHPEWQDRAREEVLQVFGENKPDFNGVARLKVVTMVLYEVLRLYPPVAAINRRTRQPTKLGGVTYPAGVMLMTPVMFIHRDPALWGSDADEFNPGRFADGVSKACRDPGAFAPFSWGPRVCIGQNFALLEAKLAVSMILQRFAFEVSPAYVHAPYTVLTLHPQHGAPVRLRRL

SEQ ID NO: 24177 - protein, 219 aa, Zea mays subsp. mays
  peptide (1)..(219): Ceres Seq. ID no. 12423985
  misc_feature (1)..(219): NCBI GI NO: 34912880 NR Description: putative cytochrome P450
  misc_feature (1)..(219): NCBI GI NO: 21842133 NR Description: cytochrome P450 monooxygenase CYP72A16
  misc_feature (1)..(219): NCBI GI NO: 13661772 NR Description: putative cytochrome P450 [Lolium rigidum]
  misc_feature (1)..(219): NCBI GI NO: 13661774 NR Description: putative cytochrome P450 [Lolium rigidum]
  misc_feature (1)..(219): NCBI GI NO: 13661766 NR Description: putative cytochrome P450 [Lolium rigidum]
  misc_feature (1)..(219): NCBI GI NO: 34912882 NR Description: putative cytochrome P450
  misc_feature (1)..(219): NCBI GI NO: 13661770 NR Description: putative cytochrome P450 [Lolium rigidum]
  misc_feature (1)..(219): NCBI GI NO: 13661768 NR Description: putative cytochrome P450 [Lolium rigidum]
  misc_feature (1)..(219): NCBI GI NO: 34912894 NR Description: putative cytochrome P450
  misc_feature (1)..(219): NCBI GI NO: 19909879 NR Description: cytochrome P450 [Oryza sativa]
MNYSDSDGKSSKGITVEEVIGECKVFYFAGMETTAVLLTWTVAVLSMHPEWQDRAREEVLQVFGENKPDFNGVARLKVVTMVLYEVLRLYPPVAAINRRTRQPTKLGGVTYPAGVMLMTPVMFIHRDPALWGSDADEFNPGRFADGVSKACRDPGAFAPFSWGPRVCIGQNFALLEAKLAVSMILQRFAFEVSPAYVHAPYTVLTLHPQHGAPVRLRRL

SEQ ID NO: 24178 - protein, 197 aa, Zea mays subsp. mays
  peptide (1)..(197): Ceres Seq. ID no. 12423986
  misc_feature (5)..(194): NCBI GI NO: 34912880 NR Description: putative cytochrome P450
  misc_feature (8)..(194): NCBI GI NO: 21842133 NR Description: cytochrome P450 monooxygenase CYP72A16
  misc_feature (5)..(194): NCBI GI NO: 13661772 NR Description: putative cytochrome P450 [Lolium rigidum]
  misc_feature (5)..(194): NCBI GI NO: 13661774 NR Description: putative cytochrome P450 [Lolium rigidum]
  misc_feature (5)..(194): NCBI GI NO: 13661766 NR Description: putative cytochrome P450 [Lolium rigidum]
  misc_feature (5)..(194): NCBI GI NO: 34912882 NR Description: putative cytochrome P450
  misc_feature (8)..(194): NCBI GI NO: 13661770 NR Description: putative cytochrome P450 [Lolium rigidum]
  misc_feature (8)..(194): NCBI GI NO: 13661768 NR Description: putative cytochrome P450 [Lolium rigidum]
  misc_feature (9)..(193): NCBI GI NO: 34912894 NR Description: putative cytochrome P450
  misc_feature (9)..(193): NCBI GI NO: 19909879 NR Description: cytochrome P450 [Oryza sativa]
MDGHGAVSPWSVLGGAAAVLFLWLASQVLEWAWWAPRRVNRALRAQGLRGTRYRLLCGDLIEEQRLRAAALARPVPVDRPHDFLPRVAPFLHRVLQEHGKLSFTWFGPTPRVLITDPELAREVLSNKCGDFVKSLLSPLSTLLVAGLVVLDGEKWVKHRRILNPAFHAEKLKGMLPAFLACCNELVDRWEKQISCFR

SEQ ID NO: 24179 - DNA, 1163 bp, Zea mays subsp. mays
  misc_feature (1)..(1163): Ceres Seq. ID no. 12343976
agcttgtggtcgcgatgccgtacaccggatatcctctagcgccttcccacaatcgcgcttctgcggttctgccgccgacgtccgcgccgccgacgtccgcgcccgcgtccctcgctgctttgccctctccaccctccgccatcaccgccgcggcgtccttctgtaccggatccgtcgcagccaccactccgcagatccgctgggttgacgtccacggagctgctccggggatgtcgtcctccgcttccagcgtccagggcgacgccgccggagagttcacggaggtcgtaatcgtgcgtcacggcgagacgtcatggaacgcctcgcgcatcatacagggacacttggatgcagagcttaatgatattggaaggcagcaagctgttgcggttgctcatcgtctttctaaagaagtgaaaccagttgccatatactcttctgatctgaagcgagcagcagagactgcgcaaacaattgcaagaatttgcaatgtgccaaatgtcgtgttcgatccagcactgagagaaagacacattggagatctgcaaggcatgacgcttcaagatgctgctacagagaggccagaggcatacaaagcttttatgtcccacaagagaaatcaacaagttcctggtggtggagagagtcttgatcaactgtcggagcgatgtgtgtcttttctgtacgacattgttggtaaacacaaaggggagcgagttatcctggtttcacatggcggcaccatcagagagctctacagacacgtgagtcccacgaagccgctccacggcaaaatacacaacacgtcggtgagcgtcatcctcgtgtccgacgccaccggccggtgcatcgtcaagatgtgcggggacgtcagccacctccaggagacgggcgtcctggagaacgccttcggtggcgacaagacctccgcctgagattccaacattcatcacgcgccgagagctctcggcaattatcacgcgccgagtgagcgctcgtttcggccgtctttttttccactgtaccaatcatcctgttgctaccagtagtggtctagcggagaatgatgcacacttccccccgctgggaacgcggcgatttttgctggaacagttgaaggccgagccggggcgaatccttttggcctggccgtgcactgcttg

SEQ ID NO: 24180 - protein, 310 aa, Zea mays subsp. mays
  peptide (1)..(310): Ceres Seq. ID no. 12343977
  misc_feature (94)..(277): Pfam Name: Pfam Description:  Phosphoglycerate mutase family
  misc_feature (91)..(309): NCBI GI NO: 15229783 NR Description: putative protein; protein id: At3g50520
  misc_feature (91)..(306): NCBI GI NO: 9955567 NR Description: phosphoglycerate mutase-like protein
  misc_feature (91)..(306): NCBI GI NO: 15237633 NR Description: phosphoglycerate mutase - like protein
  misc_feature (91)..(293): NCBI GI NO: 17545218 NR Description: PUTATIVE PHOSPHOGLYCERATE MUTASE 2 PROTEIN
  misc_feature (158)..(306): NCBI GI NO: 26450240 NR Description: putative phosphoglycerate mutase
  misc_feature (82)..(294): NCBI GI NO: 22976134 NR Description: hypothetical protein [Ralstonia metallidurans]
  misc_feature (93)..(297): NCBI GI NO: 33592552 NR Description: probable phosphoglycerate mutase 2
  misc_feature (93)..(297): NCBI GI NO: 33596671 NR Description: probable phosphoglycerate mutase 2
  misc_feature (93)..(294): NCBI GI NO: 15806410 NR Description: phosphoglycerate mutase, putative
  misc_feature (93)..(294): NCBI GI NO: 23021451 NR Description: hypothetical protein
LVVAMPYTGYPLAPSHNRASAVLPPTSAPPTSAPASLAALPSPPSAITAAASFCTGSVAATTPQIRWVDVHGAAPGMSSSASSVQGDAAGEFTEVVIVRHGETSWNASRIIQGHLDAELNDIGRQQAVAVAHRLSKEVKPVAIYSSDLKRAAETAQTIARICNVPNVVFDPALRERHIGDLQGMTLQDAATERPEAYKAFMSHKRNQQVPGGGESLDQLSERCVSFLYDIVGKHKGERVILVSHGGTIRELYRHVSPTKPLHGKIHNTSVSVILVSDATGRCIVKMCGDVSHLQETGVLENAFGGDKTSA

SEQ ID NO: 24181 - protein, 306 aa, Zea mays subsp. mays
  peptide (1)..(306): Ceres Seq. ID no. 12343978
  misc_feature (90)..(273): Pfam Name: Pfam Description:  Phosphoglycerate mutase family
  misc_feature (87)..(305): NCBI GI NO: 15229783 NR Description: putative protein; protein id: At3g50520
  misc_feature (87)..(302): NCBI GI NO: 9955567 NR Description: phosphoglycerate mutase-like protein
  misc_feature (87)..(302): NCBI GI NO: 15237633 NR Description: phosphoglycerate mutase - like protein
  misc_feature (87)..(289): NCBI GI NO: 17545218 NR Description: PUTATIVE PHOSPHOGLYCERATE MUTASE 2 PROTEIN
  misc_feature (154)..(302): NCBI GI NO: 26450240 NR Description: putative phosphoglycerate mutase
  misc_feature (78)..(290): NCBI GI NO: 22976134 NR Description: hypothetical protein [Ralstonia metallidurans]
  misc_feature (89)..(293): NCBI GI NO: 33592552 NR Description: probable phosphoglycerate mutase 2
  misc_feature (89)..(293): NCBI GI NO: 33596671 NR Description: probable phosphoglycerate mutase 2
  misc_feature (89)..(290): NCBI GI NO: 15806410 NR Description: phosphoglycerate mutase, putative
  misc_feature (89)..(290): NCBI GI NO: 23021451 NR Description: hypothetical protein
MPYTGYPLAPSHNRASAVLPPTSAPPTSAPASLAALPSPPSAITAAASFCTGSVAATTPQIRWVDVHGAAPGMSSSASSVQGDAAGEFTEVVIVRHGETSWNASRIIQGHLDAELNDIGRQQAVAVAHRLSKEVKPVAIYSSDLKRAAETAQTIARICNVPNVVFDPALRERHIGDLQGMTLQDAATERPEAYKAFMSHKRNQQVPGGGESLDQLSERCVSFLYDIVGKHKGERVILVSHGGTIRELYRHVSPTKPLHGKIHNTSVSVILVSDATGRCIVKMCGDVSHLQETGVLENAFGGDKTSA

SEQ ID NO: 24182 - protein, 234 aa, Zea mays subsp. mays
  peptide (1)..(234): Ceres Seq. ID no. 12343979
  misc_feature (18)..(201): Pfam Name: Pfam Description:  Phosphoglycerate mutase family
  misc_feature (15)..(233): NCBI GI NO: 15229783 NR Description: putative protein; protein id: At3g50520
  misc_feature (15)..(230): NCBI GI NO: 9955567 NR Description: phosphoglycerate mutase-like protein
  misc_feature (15)..(230): NCBI GI NO: 15237633 NR Description: phosphoglycerate mutase - like protein
  misc_feature (15)..(217): NCBI GI NO: 17545218 NR Description: PUTATIVE PHOSPHOGLYCERATE MUTASE 2 PROTEIN
  misc_feature (82)..(230): NCBI GI NO: 26450240 NR Description: putative phosphoglycerate mutase
  misc_feature (6)..(218): NCBI GI NO: 22976134 NR Description: hypothetical protein [Ralstonia metallidurans]
  misc_feature (17)..(221): NCBI GI NO: 33592552 NR Description: probable phosphoglycerate mutase 2
  misc_feature (17)..(221): NCBI GI NO: 33596671 NR Description: probable phosphoglycerate mutase 2
  misc_feature (17)..(218): NCBI GI NO: 15806410 NR Description: phosphoglycerate mutase, putative
  misc_feature (17)..(218): NCBI GI NO: 23021451 NR Description: hypothetical protein
MSSSASSVQGDAAGEFTEVVIVRHGETSWNASRIIQGHLDAELNDIGRQQAVAVAHRLSKEVKPVAIYSSDLKRAAETAQTIARICNVPNVVFDPALRERHIGDLQGMTLQDAATERPEAYKAFMSHKRNQQVPGGGESLDQLSERCVSFLYDIVGKHKGERVILVSHGGTIRELYRHVSPTKPLHGKIHNTSVSVILVSDATGRCIVKMCGDVSHLQETGVLENAFGGDKTSA

SEQ ID NO: 24183 - DNA, 1415 bp, Zea mays subsp. mays
  misc_feature (1)..(1415): Ceres Seq. ID no. 12410718
gatcgatggatttctacggttcctgcctgtcaagtgtttgtcctcgtctcgtcttcggaaaacaccaaacgacaagtccaaggcagagcagatttagaccgaaatatacaaaaactggatcgaaaattgcatatcggactggaccgagaacgaaaaaagaaaccgagggaaagttcaagtgttcaaccttgaatggccatggccttcttttcgttttcggccctataaaactgatgatctgctgatgagacatcccactcgccggccgtccttgaagagcgagcagcaatggcgcaggagatcgagcacacccacctccccatccgcggcctcaacctccacgtcgcacaagtaggcacaggtgaactgggcacggtggtgttcctgcacggcttcccggagatatggtactcgtggcgccaccagatgcgggcccgtggccgcggcggggtaccgcgccatcgcgccggactgccgcgggtacggcctgtcggagcagccgccggagcacgaggaggtctctcctgacgacctcatcgccgacgtgctgggcatcctcgacgccctcagcgtcccgaaggcgttcttggtgggcaaggacttcggcgccatgccggcgtacgagttcgcgctgcagcacccgggccgcacctgcggcgtggtgtgcctgggcatccccttcaacccggcccccatatccttcgacgccatcatgcccgaaggattctacatcctgcgctggcgcgagccgggcagggcggaggccgacttcggccggttcgacgtgaggcgcgtggtgcgcaccatctacgtgctcttcgccggcgccgagatcccgattgccaaggaagggcaggagatcatggacctggccgacctgtccacgcccctcccggagtggttcaccgaggaggacctggacgcctacgccaagctctacgagaagtccggcttcgggtacccgctcaagatgccgtacagatctatgcacaagctcccgaaccggctggacgccaagttccaggtgccggtgttcatggtgatgggggagaaggactacgcgttcaagttcccggggttcgagaccgccatgcgcggcggggtcatggacaacttcatgccggacctcaagatcacctacatccctgaggggagccacttcgtgcaggagcagctcccagagcaggtcaacgacctgctcctcggcttcctcagggaccatccctccgccgcataagcagtgggtgagaccgtcagaataatggaatgcttcctgagcaacggtttctctactctattgccgttgcctggatccatgaccgtgttaattaattaattagtgcatatacttcctactcaaatcagatgtacgttttttttatctgcaataaaaatcatcgtcgctgcattactcg

SEQ ID NO: 24184 - protein, 208 aa, Zea mays subsp. mays
  peptide (1)..(208): Ceres Seq. ID no. 12410719
  misc_feature (1)..(199): Pfam Name: Pfam Description:  alpha/beta hydrolase fold
  misc_feature (1)..(208): NCBI GI NO: 37535724 NR Description: putative epoxide hydrolase
  misc_feature (1)..(205): NCBI GI NO: 37535728 NR Description: putative epoxide hydrolase
  misc_feature (1)..(205): NCBI GI NO: 37535732 NR Description: putative epoxide hydrolase
  misc_feature (1)..(204): NCBI GI NO: 37535722 NR Description: putative epoxide hydrolase
  misc_feature (1)..(202): NCBI GI NO: 1354849 NR Description: epoxide hydrolase [Nicotiana tabacum]
  misc_feature (46)..(207): NCBI GI NO: 37535730 NR Description: putative epoxide hydrolase
  misc_feature (1)..(201): NCBI GI NO: 15230367 NR Description: epoxide hydrolase-like protein
  misc_feature (1)..(202): NCBI GI NO: 18411917 NR Description: coded for by A
  misc_feature (1)..(138): NCBI GI NO: 29826681 NR Description: putative epoxide hydrolase
  misc_feature (1)..(201): NCBI GI NO: 10197684 NR Description: soluble epoxide hydrolase [Homo sapiens]
MPAYEFALQHPGRTCGVVCLGIPFNPAPISFDAIMPEGFYILRWREPGRAEADFGRFDVRRVVRTIYVLFAGAEIPIAKEGQEIMDLADLSTPLPEWFTEEDLDAYAKLYEKSGFGYPLKMPYRSMHKLPNRLDAKFQVPVFMVMGEKDYAFKFPGFETAMRGGVMDNFMPDLKITYIPEGSHFVQEQLPEQVNDLLLGFLRDHPSAA

SEQ ID NO: 24185 - protein, 174 aa, Zea mays subsp. mays
  peptide (1)..(174): Ceres Seq. ID no. 12410720
  misc_feature (1)..(165): Pfam Name: Pfam Description:  alpha/beta hydrolase fold
  misc_feature (1)..(174): NCBI GI NO: 37535724 NR Description: putative epoxide hydrolase
  misc_feature (1)..(171): NCBI GI NO: 37535728 NR Description: putative epoxide hydrolase
  misc_feature (1)..(171): NCBI GI NO: 37535732 NR Description: putative epoxide hydrolase
  misc_feature (1)..(170): NCBI GI NO: 37535722 NR Description: putative epoxide hydrolase
  misc_feature (1)..(168): NCBI GI NO: 1354849 NR Description: epoxide hydrolase [Nicotiana tabacum]
  misc_feature (12)..(173): NCBI GI NO: 37535730 NR Description: putative epoxide hydrolase
  misc_feature (1)..(167): NCBI GI NO: 15230367 NR Description: epoxide hydrolase-like protein
  misc_feature (1)..(168): NCBI GI NO: 18411917 NR Description: coded for by A
  misc_feature (1)..(104): NCBI GI NO: 29826681 NR Description: putative epoxide hydrolase
  misc_feature (1)..(167): NCBI GI NO: 10197684 NR Description: soluble epoxide hydrolase [Homo sapiens]
MPEGFYILRWREPGRAEADFGRFDVRRVVRTIYVLFAGAEIPIAKEGQEIMDLADLSTPLPEWFTEEDLDAYAKLYEKSGFGYPLKMPYRSMHKLPNRLDAKFQVPVFMVMGEKDYAFKFPGFETAMRGGVMDNFMPDLKITYIPEGSHFVQEQLPEQVNDLLLGFLRDHPSAA

SEQ ID NO: 24186 - protein, 127 aa, Zea mays subsp. mays
  peptide (1)..(127): Ceres Seq. ID no. 12410721
  misc_feature (7)..(127): Pfam Name: Pfam Description:  Equine herpesvirus glycoprotein gp2
  misc_feature (11)..(71): NCBI GI NO: 37535730 NR Description: putative epoxide hydrolase
  misc_feature (1)..(127): NCBI GI NO: 13592175 NR Description: ppg3 [Leishmania major]
  misc_feature (9)..(127): NCBI GI NO: 13592175 NR Description: ppg3 [Leishmania major]
  misc_feature (7)..(127): NCBI GI NO: 13592175 NR Description: ppg3 [Leishmania major]
  misc_feature (7)..(127): NCBI GI NO: 13592175 NR Description: ppg3 [Leishmania major]
  misc_feature (23)..(127): NCBI GI NO: 17384256 NR Description: mucin 5 [Homo sapiens]
  misc_feature (9)..(127): NCBI GI NO: 13592175 NR Description: ppg3 [Leishmania major]
  misc_feature (9)..(127): NCBI GI NO: 13592175 NR Description: ppg3 [Leishmania major]
  misc_feature (7)..(127): NCBI GI NO: 13592175 NR Description: ppg3 [Leishmania major]
  misc_feature (9)..(127): NCBI GI NO: 13592175 NR Description: ppg3 [Leishmania major]
MVLVAPPDAGPWPRRGTAPSRRTAAGTACRSSRRSTRRSLLTTSSPTCWASSTPSASRRRSWWARTSAPCRRTSSRCSTRAAPAAWCAWASPSTRPPYPSTPSCPKDSTSCAGASRAGRRPTSAGST

SEQ ID NO: 24187 - DNA, 1239 bp, Zea mays subsp. mays
  misc_feature (1)..(1239): Ceres Seq. ID no. 12410710
atcatccagaccaccattaccagagtgctctgctctcgctggaggccgtggttcattcacgttcatggaggccgccgccattcccaccagtgccccggaaaccaggattgccgttgtcaccggcggcaacaaagggatcgggctagaggtgtgccggcagctggccggcgccggcgccaccgtcgtcgtcttaacagccagggacgagacgaggggtgcagccgctgcacaagagctcagagaatctgggctctccgatgtcatcttccatcagctggacatcaccgacgctgcgagcgtcagtcggctggctgagttcctcaaggctcgttttggaaagctagatatcctggtaaataatgccgcagttggtgctgttgagtacgtccaagatcctgctgacagttcaacgagcgaggaagagctgagtggcatggatatggtccaaaggcttcagtgcatgcttaagagagtccgggagacctacgacgctgcgacagaaggcatcaagacaaactactatggcataaagcatgtgatcgaagccttgctgcctctgcttcaagcttcctccgatgggaggatcgttaacgtctcctctgacttcggactgctaaggctgatcaacaacgaggaagctaaggcaggagctaaacgacgtggagaagctcaccgaggagaggctggacgaggtgctggccgcgtacctgagagacttcgacgccggcgaggtgggggcgcgcgggtggccggtggacttctcggcctacaaggtggccaaggtggccatgaacgcgtacacgaggatcctagcgaggagccacccggggctgcgcgtcaactgcgcgcaccccggctacgtgagcaccgacatgaccgtccacaccgggcctctcacgcccgagcaaggcgcggccaacgtcgtgaaggtggcgctgctgccggagggcggcccgaccggcgcgtacttcgcgttgggagaggaggcgtcctttatgtgacgaaagcaccgtcgtcgttaagttcgtcgttgttcgccaactccctgttagtcgatttctaaatcgacgtacaatgaaatacatcatcgctgcaaactcacaaatgaaaacaagggaaccttgtagcaaaaaaaaaaaagaagtggacagaataatgaataagcatgtcaaatatctcttgagtatctatttgttcaagtatcaatgactttgtacaaatatcaaagattgtgagtgg

SEQ ID NO: 24188 - protein, 353 aa, Zea mays subsp. mays
  peptide (1)..(353): Ceres Seq. ID no. 12410711
  misc_feature (29)..(214): NCBI GI NO: 38346769 NR Description: OSJNBa0081C01.20
  misc_feature (22)..(214): NCBI GI NO: 38346774 NR Description: OSJNBa0081C01.25
  misc_feature (30)..(214): NCBI GI NO: 38346772 NR Description: OSJNBa0081C01.23
  misc_feature (29)..(214): NCBI GI NO: 38346768 NR Description: OSJNBa0081C01.19
  misc_feature (22)..(214): NCBI GI NO: 38346767 NR Description: OSJNBa0081C01.18
  misc_feature (32)..(214): NCBI GI NO: 33146492 NR Description: carbonyl reductase -like protein
  misc_feature (33)..(214): NCBI GI NO: 18378884 NR Description: carbonyl reductase, putative; protein id:At1g01800
  misc_feature (34)..(214): NCBI GI NO: 25518668 NR Description: hypothetical protein T1N6
  misc_feature (35)..(214): NCBI GI NO: 34559416 NR Description: (-)-isopiperitenone reductase [Mentha x piperita]
  misc_feature (31)..(214): NCBI GI NO: 15233062 NR Description: putative protein; protein id: At3g61220
SSRPPLPECSALAGGRGSFTFMEAAAIPTSAPETRIAVVTGGNKGIGLEVCRQLAGAGATVVVLTARDETRGAAAAQELRESGLSDVIFHQLDITDAASVSRLAEFLKARFGKLDILVNNAAVGAVEYVQDPADSSTSEEELSGMDMVQRLQCMLKRVRETYDAATEGIKTNYYGIKHVIEALLPLLQASSDGRIVNVSSDFGLLRLINNEEAKAGAKRRGEAHRGEAGRGAGRVPERLRRRRGGGARVAGGLLGLQGGQGGHERVHEDPSEEPPGAARQLRAPRLREHRHDRPHRASHARARRGQRREGGAAAGGRPDRRVLRVGRGGVLYVTKAPSSLSSSLFANSLLVDF

SEQ ID NO: 24189 - protein, 332 aa, Zea mays subsp. mays
  peptide (1)..(332): Ceres Seq. ID no. 12410712
  misc_feature (8)..(193): NCBI GI NO: 38346769 NR Description: OSJNBa0081C01.20
  misc_feature (1)..(193): NCBI GI NO: 38346774 NR Description: OSJNBa0081C01.25
  misc_feature (9)..(193): NCBI GI NO: 38346772 NR Description: OSJNBa0081C01.23
  misc_feature (8)..(193): NCBI GI NO: 38346768 NR Description: OSJNBa0081C01.19
  misc_feature (1)..(193): NCBI GI NO: 38346767 NR Description: OSJNBa0081C01.18
  misc_feature (11)..(193): NCBI GI NO: 33146492 NR Description: carbonyl reductase -like protein
  misc_feature (12)..(193): NCBI GI NO: 18378884 NR Description: carbonyl reductase, putative; protein id:At1g01800
  misc_feature (13)..(193): NCBI GI NO: 25518668 NR Description: hypothetical protein T1N6
  misc_feature (14)..(193): NCBI GI NO: 34559416 NR Description: (-)-isopiperitenone reductase [Mentha x piperita]
  misc_feature (10)..(193): NCBI GI NO: 15233062 NR Description: putative protein; protein id: At3g61220
MEAAAIPTSAPETRIAVVTGGNKGIGLEVCRQLAGAGATVVVLTARDETRGAAAAQELRESGLSDVIFHQLDITDAASVSRLAEFLKARFGKLDILVNNAAVGAVEYVQDPADSSTSEEELSGMDMVQRLQCMLKRVRETYDAATEGIKTNYYGIKHVIEALLPLLQASSDGRIVNVSSDFGLLRLINNEEAKAGAKRRGEAHRGEAGRGAGRVPERLRRRRGGGARVAGGLLGLQGGQGGHERVHEDPSEEPPGAARQLRAPRLREHRHDRPHRASHARARRGQRREGGAAAGGRPDRRVLRVGRGGVLYVTKAPSSLSSSLFANSLLVDF

SEQ ID NO: 24190 - protein, 209 aa, Zea mays subsp. mays
  peptide (1)..(209): Ceres Seq. ID no. 12410713
  misc_feature (1)..(70): NCBI GI NO: 38346769 NR Description: OSJNBa0081C01.20
  misc_feature (1)..(70): NCBI GI NO: 38346774 NR Description: OSJNBa0081C01.25
  misc_feature (1)..(70): NCBI GI NO: 38346772 NR Description: OSJNBa0081C01.23
  misc_feature (1)..(70): NCBI GI NO: 38346768 NR Description: OSJNBa0081C01.19
  misc_feature (1)..(70): NCBI GI NO: 38346767 NR Description: OSJNBa0081C01.18
  misc_feature (1)..(70): NCBI GI NO: 33146492 NR Description: carbonyl reductase -like protein
  misc_feature (1)..(70): NCBI GI NO: 18378884 NR Description: carbonyl reductase, putative; protein id:At1g01800
  misc_feature (1)..(70): NCBI GI NO: 25518668 NR Description: hypothetical protein T1N6
  misc_feature (1)..(70): NCBI GI NO: 34559416 NR Description: (-)-isopiperitenone reductase [Mentha x piperita]
  misc_feature (1)..(70): NCBI GI NO: 15233062 NR Description: putative protein; protein id: At3g61220
MDMVQRLQCMLKRVRETYDAATEGIKTNYYGIKHVIEALLPLLQASSDGRIVNVSSDFGLLRLINNEEAKAGAKRRGEAHRGEAGRGAGRVPERLRRRRGGGARVAGGLLGLQGGQGGHERVHEDPSEEPPGAARQLRAPRLREHRHDRPHRASHARARRGQRREGGAAAGGRPDRRVLRVGRGGVLYVTKAPSSLSSSLFANSLLVDF

SEQ ID NO: 24191 - DNA, 1175 bp, Zea mays subsp. mays
  misc_feature (1)..(1175): Ceres Seq. ID no. 13499108
acacccatctcctgagtcctgcctgcgctcgcctcagctcctttcttccccgccccttggcttttgcttggttgcatcgggccggtcgagccggagaggaaaagctagctactagctaccagctctcggccggcggtggtagtctgcctgcagctggggttagctgcaagggttgggagctagccatggggaggggtcgggtggagctcaagcggatcgagaacaagatcaaccgccaggtcaccttcgccaagcgccgcaacggcctgctcaagaaggcgtacgagctctccgtgctctgcgacgccgaagtcgcgctcatcatcttctccaaccgcggcaagctctacgagttctgcagcggacagagcatcaccaaaacacttgagaggtatgaaaaaaacagttatggaggaccagatactgctgtacagaacaaggagaacgagttagtccagagcagtcgtaatgagtacctcaagctgaaagcgagggtggataatttacagaggactcagaggaatttgcttggtgaagatctggggtcacttggtgtcaaagagcttgagcagcttgagaagcaacttgattcatccttaaggcacataagatccacaaggacacaacatatgcttgatcagctcactgatcttcagaggagggagcaaatgctgtgtgaagcaaataagtgccttagaagaaagctggaggagaccagcaaccaggtgcatggccaagtgtgggagcacggtgccaacttactcggctacgagaggcactctcctcaacagcaggccccatcacatgttggcaatggtttgttctttcatcccctggaagctgcagcagagccaaccctgcagatcgggttcgctcctgagcatatgaataacttcatgccaacatggctaccctgaagatggatcttgaggcaaaggaaataaataaagatgcggtggcagcatcatactctatgcaagctaagagtgacagctgtgtttcagtcacatatatgatctagtctgtgtgtcaatgtgtcgaaaaacatgtctgtgattttgttatatgaatgtaacgcgcaatgaaacatacatgactagctgcttgcttgacgatgcgtttgcgtgtatccgtataaattaaaggctataagccacatcgtatatgcgtactgc

SEQ ID NO: 24192 - protein, 304 aa, Zea mays subsp. mays
  peptide (1)..(304): Ceres Seq. ID no. 13499109
  misc_feature (136)..(237): Pfam Name: Pfam Description:  K-box region
  misc_feature (62)..(304): NCBI GI NO: 29372772 NR Description: putative MADS-domain transcription factor
  misc_feature (75)..(304): NCBI GI NO: 3851333 NR Description: putative MADS-domain transcription factor
  misc_feature (62)..(304): NCBI GI NO: 7446544 NR Description: MADS box protein - rice
  misc_feature (62)..(304): NCBI GI NO: 33333045 NR Description: MADS box protein [Triticum aestivum]
  misc_feature (73)..(304): NCBI GI NO: 2055376 NR Description: MADS box protein
  misc_feature (53)..(304): NCBI GI NO: 33304376 NR Description: MADS box protein [Oryza sativa]
  misc_feature (62)..(304): NCBI GI NO: 7446519 NR Description: MADS box protein - rice
  misc_feature (62)..(304): NCBI GI NO: 9367315 NR Description: MADS-box protein 9
  misc_feature (58)..(304): NCBI GI NO: 7446543 NR Description: MADS box protein - rice
  misc_feature (62)..(304): NCBI GI NO: 7446518 NR Description: M79 protein - rice
THLLSPACARLSSFLPRPLAFAWLHRAGRAGEEKLATSYQLSAGGGSLPAAGVSCKGWELAMGRGRVELKRIENKINRQVTFAKRRNGLLKKAYELSVLCDAEVALIIFSNRGKLYEFCSGQSITKTLERYEKNSYGGPDTAVQNKENELVQSSRNEYLKLKARVDNLQRTQRNLLGEDLGSLGVKELEQLEKQLDSSLRHIRSTRTQHMLDQLTDLQRREQMLCEANKCLRRKLEETSNQVHGQVWEHGANLLGYERHSPQQQAPSHVGNGLFFHPLEAAAEPTLQIGFAPEHMNNFMPTWLP

SEQ ID NO: 24193 - protein, 243 aa, Zea mays subsp. mays
  peptide (1)..(243): Ceres Seq. ID no. 13499110
  misc_feature (75)..(176): Pfam Name: Pfam Description:  K-box region
  misc_feature (1)..(243): NCBI GI NO: 29372772 NR Description: putative MADS-domain transcription factor
  misc_feature (14)..(243): NCBI GI NO: 3851333 NR Description: putative MADS-domain transcription factor
  misc_feature (1)..(243): NCBI GI NO: 7446544 NR Description: MADS box protein - rice
  misc_feature (1)..(243): NCBI GI NO: 33333045 NR Description: MADS box protein [Triticum aestivum]
  misc_feature (12)..(243): NCBI GI NO: 2055376 NR Description: MADS box protein
  misc_feature (1)..(243): NCBI GI NO: 33304376 NR Description: MADS box protein [Oryza sativa]
  misc_feature (1)..(243): NCBI GI NO: 7446519 NR Description: MADS box protein - rice
  misc_feature (1)..(243): NCBI GI NO: 9367315 NR Description: MADS-box protein 9
  misc_feature (1)..(243): NCBI GI NO: 7446543 NR Description: MADS box protein - rice
  misc_feature (1)..(243): NCBI GI NO: 7446518 NR Description: M79 protein - rice
MGRGRVELKRIENKINRQVTFAKRRNGLLKKAYELSVLCDAEVALIIFSNRGKLYEFCSGQSITKTLERYEKNSYGGPDTAVQNKENELVQSSRNEYLKLKARVDNLQRTQRNLLGEDLGSLGVKELEQLEKQLDSSLRHIRSTRTQHMLDQLTDLQRREQMLCEANKCLRRKLEETSNQVHGQVWEHGANLLGYERHSPQQQAPSHVGNGLFFHPLEAAAEPTLQIGFAPEHMNNFMPTWLP

SEQ ID NO: 24194 - DNA, 1168 bp, Zea mays subsp. mays
  misc_feature (1)..(1168): Ceres Seq. ID no. 12352064
atgcgcatatatctttctctcttttttttctgtccaagggaaagaaggaaggcttgtgtgtatctgccagttttcggtctgcgattctgtagcctaacctatggtcatgcgactatgcgagttagattaatcagcgatctgcagtgctacttggtttgcattatcatgatcccctaggcgttttcttcttatcttttgactgaaatgctagcagcacaatagtttattagatgcttgagcagctactctgcactttcatttcctctgtatgtatttcctagtgtggaatttggtacttactttgcaattgtagcagacttgggattgagggtatccatggagatgcttgtggatttgagcaatctaatttggggaaaaggggtagagatgaaccatgttcatctggcccaacatccaaagcttgtcgtgaaaaaatgaggagagacaagctgaatgacaggttcctggaattaagttcagttatgagtcatggtaaggaagcaaagttagataaagcaaatatattgagtgatgcagcccgtatggtggcacaacttagaggtgaggcagaaaagcttaaggaatcaaatgagaagctgcgggagaatatcaaggatctgaaggaggagaagaacgagctccgtgaagagaaagtgagactaaaggtagaaaaggataggctggagcagcaagtcaaagctatgagtgtagctcctacaggatatgtaccccatctccctcatccagcttcataccatcctgctgcgttcactccatttgcgccgcctccagccaacaaaagtgctccaatcccagcaccgttccctgggatggcgatgtggcagtggttgcctccgaccatcgtggacacaactcaagatccaaagctctggcccccaaatgcttaggggcagctaccttggaatgttgtctcattgtgccttttcatgcatctggtgggcaaatcagtgtcagttaggtccctggagactggagaggaatcaagttcgcaattcgcgccatgtttatgctgtaacagctggtttccagcactagttatgaacttactatgttctactgaagggtggtgcctgtaattaatatatggatctcaaccctctagttggcatgtatatcatttgttctattcgagagctgcattttaagg

SEQ ID NO: 24195 - protein, 157 aa, Zea mays subsp. mays
  peptide (1)..(157): Ceres Seq. ID no. 12352065
  misc_feature (1)..(42): Pfam Name: Pfam Description:  Helix-loop-helix DNA-binding domain
  misc_feature (1)..(157): NCBI GI NO: 15239706 NR Description: bHLH protein; protein id: At5g54680
  misc_feature (1)..(157): NCBI GI NO: 21592325 NR Description: bHLH transcription factor, putative
  misc_feature (1)..(157): NCBI GI NO: 38636768 NR Description: helix-loop-helix-like protein
  misc_feature (1)..(157): NCBI GI NO: 29367409 NR Description: helix-loop-helix-like protein
  misc_feature (1)..(157): NCBI GI NO: 15223710 NR Description: bHLH protein; protein id: At1g51070
  misc_feature (1)..(157): NCBI GI NO: 20127030 NR Description: putative bHLH transcription factor
  misc_feature (1)..(157): NCBI GI NO: 22331274 NR Description: bHLH protein; protein id: At3g23210
  misc_feature (1)..(157): NCBI GI NO: 18414212 NR Description: bHLH protein; protein id: At4g14410
  misc_feature (1)..(157): NCBI GI NO: 30682847 NR Description: bHLH protein [Arabidopsis thaliana]
  misc_feature (1)..(156): NCBI GI NO: 15230975 NR Description: bHLH protein; protein id: At3g19860
MRRDKLNDRFLELSSVMSHGKEAKLDKANILSDAARMVAQLRGEAEKLKESNEKLRENIKDLKEEKNELREEKVRLKVEKDRLEQQVKAMSVAPTGYVPHLPHPASYHPAAFTPFAPPPANKSAPIPAPFPGMAMWQWLPPTIVDTTQDPKLWPPNA

SEQ ID NO: 24196 - protein, 141 aa, Zea mays subsp. mays
  peptide (1)..(141): Ceres Seq. ID no. 12352066
  misc_feature (1)..(141): NCBI GI NO: 15239706 NR Description: bHLH protein; protein id: At5g54680
  misc_feature (1)..(141): NCBI GI NO: 21592325 NR Description: bHLH transcription factor, putative
  misc_feature (1)..(141): NCBI GI NO: 38636768 NR Description: helix-loop-helix-like protein
  misc_feature (1)..(141): NCBI GI NO: 29367409 NR Description: helix-loop-helix-like protein
  misc_feature (1)..(141): NCBI GI NO: 15223710 NR Description: bHLH protein; protein id: At1g51070
  misc_feature (1)..(141): NCBI GI NO: 20127030 NR Description: putative bHLH transcription factor
  misc_feature (1)..(141): NCBI GI NO: 22331274 NR Description: bHLH protein; protein id: At3g23210
  misc_feature (1)..(141): NCBI GI NO: 18414212 NR Description: bHLH protein; protein id: At4g14410
  misc_feature (1)..(141): NCBI GI NO: 30682847 NR Description: bHLH protein [Arabidopsis thaliana]
  misc_feature (1)..(140): NCBI GI NO: 15230975 NR Description: bHLH protein; protein id: At3g19860
MSHGKEAKLDKANILSDAARMVAQLRGEAEKLKESNEKLRENIKDLKEEKNELREEKVRLKVEKDRLEQQVKAMSVAPTGYVPHLPHPASYHPAAFTPFAPPPANKSAPIPAPFPGMAMWQWLPPTIVDTTQDPKLWPPNA

SEQ ID NO: 24197 - protein, 121 aa, Zea mays subsp. mays
  peptide (1)..(121): Ceres Seq. ID no. 12352067
  misc_feature (1)..(121): NCBI GI NO: 15239706 NR Description: bHLH protein; protein id: At5g54680
  misc_feature (1)..(121): NCBI GI NO: 21592325 NR Description: bHLH transcription factor, putative
  misc_feature (1)..(121): NCBI GI NO: 38636768 NR Description: helix-loop-helix-like protein
  misc_feature (1)..(121): NCBI GI NO: 29367409 NR Description: helix-loop-helix-like protein
  misc_feature (1)..(121): NCBI GI NO: 15223710 NR Description: bHLH protein; protein id: At1g51070
  misc_feature (1)..(121): NCBI GI NO: 20127030 NR Description: putative bHLH transcription factor
  misc_feature (1)..(121): NCBI GI NO: 22331274 NR Description: bHLH protein; protein id: At3g23210
  misc_feature (1)..(121): NCBI GI NO: 18414212 NR Description: bHLH protein; protein id: At4g14410
  misc_feature (1)..(121): NCBI GI NO: 30682847 NR Description: bHLH protein [Arabidopsis thaliana]
  misc_feature (1)..(120): NCBI GI NO: 15230975 NR Description: bHLH protein; protein id: At3g19860
MVAQLRGEAEKLKESNEKLRENIKDLKEEKNELREEKVRLKVEKDRLEQQVKAMSVAPTGYVPHLPHPASYHPAAFTPFAPPPANKSAPIPAPFPGMAMWQWLPPTIVDTTQDPKLWPPNA

SEQ ID NO: 24198 - DNA, 1421 bp, Zea mays subsp. mays
  misc_feature (1)..(1421): Ceres Seq. ID no. 12414261
agaaaaggctgagaggctgtaaagagtgttgaaggacgctcggttccttcaggtgcggcggcgaccttgtctaggattttacccgtggaacgtggcgaccacttccgacgggccactcgccgccgctcgcccgccctgctcttcaccccttctcccgggaccgggacaagcgatctcccgtccccgtagtccgcaggagagagatttttttctcggttgcaatgaagagttatccgtgggcgggggcccgccctcttgccgtcgtgcagctcctcctcttcctcgcccacctcgtcgaccgcggcggtgctgccggtggaggcagcaagggcagctcggtgtacccggcggctgtcgtctacccgcatcactcccgccagatctcctgcaaacccagggtgttcctgtatcagcacttcctcagcgacgacgaggctaaccacctgatctccctcgcgagagcggagctcaagaggtcagcggtcgccgataatatgtctggcaagagcacgctcagtgaggtccgcaccagctccggcaccttcctcaggaagggccaggatcctattgttgagggtatagaggacaaaattgctgcatggacattccttccaaaagagaatggtgaagatatccaagtcctaagatataagcatggggagaagtatgaaccacactatgattacttcactgacaatgttaacactgtccgtggtggtcatcgctacgctactgttcttttgtacttaactgatgtaccagaaggaggggaaacggttttccccttggctgaggagcccgatgatgctaaagatgcaaccttgtcagaatgtgctcagaaaggcattgcagtgagaccacggaaaggtgacgccctccttttcttcaaccttaacccagacggcaccaccgactcggtgagcctccatggtggttgcccggtcataaaaggcgagaaatggtcggctacgaagtggatccgtgtggcctcgttcgataaggtccatcacccacagggcaactgcaccgacgagaacgagagctgcgcgaaatgggcggccctaggggagtgcataaagaacccagagtacatggtgggaaccacagcgttgcctggttactgtcggaggagctgcaatgtgtgctagggtcaggacgtgagagtactagtatttgttagtgcataccacttgtatccatagtctgttgttggtctcctacatctcgcataaaagaaatactcctatgctataggttatgccgatggaggtgcatttagaataagcctagtatttgatctattgatttattagattgcttggttctgctagctcataatttgtaccggaaccttagaagatctttgattcgttgtcatctgtaacattttctcgatatatatatggtgtgcatttctgggc

SEQ ID NO: 24199 - protein, 308 aa, Zea mays subsp. mays
  peptide (1)..(308): Ceres Seq. ID no. 12414262
  misc_feature (134)..(255): Pfam Name: II Pfam Description: 2OG-Fe
  misc_feature (35)..(308): NCBI GI NO: 20260280 NR Description: unknown protein [Arabidopsis thaliana]
  misc_feature (35)..(308): NCBI GI NO: 15239594 NR Description: putative protein; protein id: At5g18900
  misc_feature (42)..(308): NCBI GI NO: 18397528 NR Description: expressed protein; protein id: At3g06300
  misc_feature (42)..(308): NCBI GI NO: 21618073 NR Description: prolyl 4-hydroxylase alpha subunit-like protein
  misc_feature (42)..(191): NCBI GI NO: 6437556 NR Description: unknown protein [Arabidopsis thaliana]
  misc_feature (209)..(308): NCBI GI NO: 6437556 NR Description: unknown protein [Arabidopsis thaliana]
  misc_feature (29)..(308): NCBI GI NO: 34393269 NR Description: prolyl 4-hydroxylase alpha-1 subunit precursor-likeprotein
  misc_feature (114)..(308): NCBI GI NO: 37534316 NR Description: unknown protein
  misc_feature (10)..(113): NCBI GI NO: 37534316 NR Description: unknown protein
  misc_feature (33)..(308): NCBI GI NO: 29150368 NR Description: putative oxidoreductase
MKSYPWAGARPLAVVQLLLFLAHLVDRGGAAGGGSKGSSVYPAAVVYPHHSRQISCKPRVFLYQHFLSDDEANHLISLARAELKRSAVADNMSGKSTLSEVRTSSGTFLRKGQDPIVEGIEDKIAAWTFLPKENGEDIQVLRYKHGEKYEPHYDYFTDNVNTVRGGHRYATVLLYLTDVPEGGETVFPLAEEPDDAKDATLSECAQKGIAVRPRKGDALLFFNLNPDGTTDSVSLHGGCPVIKGEKWSATKWIRVASFDKVHHPQGNCTDENESCAKWAALGECIKNPEYMVGTTALPGYCRRSCNVC

SEQ ID NO: 24200 - protein, 217 aa, Zea mays subsp. mays
  peptide (1)..(217): Ceres Seq. ID no. 12414263
  misc_feature (43)..(164): Pfam Name: II Pfam Description: 2OG-Fe
  misc_feature (1)..(217): NCBI GI NO: 20260280 NR Description: unknown protein [Arabidopsis thaliana]
  misc_feature (1)..(217): NCBI GI NO: 15239594 NR Description: putative protein; protein id: At5g18900
  misc_feature (1)..(217): NCBI GI NO: 18397528 NR Description: expressed protein; protein id: At3g06300
  misc_feature (1)..(217): NCBI GI NO: 21618073 NR Description: prolyl 4-hydroxylase alpha subunit-like protein
  misc_feature (1)..(100): NCBI GI NO: 6437556 NR Description: unknown protein [Arabidopsis thaliana]
  misc_feature (118)..(217): NCBI GI NO: 6437556 NR Description: unknown protein [Arabidopsis thaliana]
  misc_feature (1)..(217): NCBI GI NO: 34393269 NR Description: prolyl 4-hydroxylase alpha-1 subunit precursor-likeprotein
  misc_feature (23)..(217): NCBI GI NO: 37534316 NR Description: unknown protein
  misc_feature (1)..(22): NCBI GI NO: 37534316 NR Description: unknown protein
  misc_feature (1)..(217): NCBI GI NO: 29150368 NR Description: putative oxidoreductase
MSGKSTLSEVRTSSGTFLRKGQDPIVEGIEDKIAAWTFLPKENGEDIQVLRYKHGEKYEPHYDYFTDNVNTVRGGHRYATVLLYLTDVPEGGETVFPLAEEPDDAKDATLSECAQKGIAVRPRKGDALLFFNLNPDGTTDSVSLHGGCPVIKGEKWSATKWIRVASFDKVHHPQGNCTDENESCAKWAALGECIKNPEYMVGTTALPGYCRRSCNVC

SEQ ID NO: 24201 - DNA, 1522 bp, Zea mays subsp. mays
  misc_feature (1)..(1522): Ceres Seq. ID no. 12410682
ctgggcctttaggtttttctgcgtatgtgttggacgcacgccaccctcctctctcctctacggctcagccggccgccgccctcctctctcggtctctcctctcctccaacggctcagccggcgccaccgccctcctccctcctatcctccaacatctccggcgcgtctctcctcagccgcggaggcaaagccggccgccggccgtggaggcacagcagacctgcgccaccgctggccgcctaccccacagcagatctgcactcaagaccagcagccagccagccatcctctgcggctccactctgccagcgcccaagaccagcgctagcagccagccatcctccacctccactgctctccatttgatcatttgctttggtaattggtcgtatagtccctcatcatcggaatggtggggtcacttatctttcccacacctaatgtggatccgaaggcagagaatcctaatgagatggttacagctggtgtgctttcaagccttcagaatttcctacgcaagtgcctcatagctatcctctcatatggcccaatgccgaagcacattgcatttattatggatggcaatcgtcgatatgctaaattcagaagcatgcaagaaggagctggtcacaggatgggtttctctacccttattgcaagtctaatgtactgctatgaaatgggtgtgaagtacatcactgtctacgcattcagcatcgacaattttaaaagggacccaagtgaggtggaatccttgatgcagttaatggaggaaaaaatcaacgaactcttagagaaccgaagtgtaatcaacaagattaactgtaagatcaacttttggggtaacttggacttgttatatgagccggtgcggttggcggctgagaagctgatggcgagcacagctgggaacacagggctggtcttttctatctgcatgccatacaactcgacttctgagattgtcaatgctgtcagtgaagtctgtgcggaaaggatggaaatgtttcagagtgaacatattggcgactgcaatggtcatgctgcaaataacggtgtgcgttcagagatttcagtggcggatttggatcgccacatgtatagtgccggatgcccagatcctgatatcgtcatccggacttcgggcgagactcgattgagcaatttcctcctttggcagacaacgtttagtcacttgcagaatccagatcctctgtggcccgagttctcttttaggcaccttgtttgggctatcttgcagtatcagagagtttaccctgctctggagcataacagaaagttggctaagaagcagttgtgattccatgttacttgcaaggaggtatcatgaagggctattaacatcaaacttttccttctcaatttcctggtaatggtaaatgcaaagaagaacatactagcatataacattatgaatagatcaccatgtaacttaagtgtgattgctaccgtaaccatgtaacttatttgagctcgtacaaatgctgtgattcctatatat

SEQ ID NO: 24202 - protein, 303 aa, Zea mays subsp. mays
  peptide (1)..(303): Ceres Seq. ID no. 12410683
  misc_feature (55)..(293): Pfam Name: Pfam Description:  Putative undecaprenyl diphosphate synthase
  misc_feature (1)..(303): NCBI GI NO: 34898408 NR Description: ESTs C72761
  misc_feature (27)..(297): NCBI GI NO: 23491567 NR Description: cis-prenyltransferase [Periploca sepium]
  misc_feature (27)..(297): NCBI GI NO: 18398467 NR Description: undecaprenyl pyrophosphate synthetase
  misc_feature (27)..(297): NCBI GI NO: 20336659 NR Description: hypothetical protein [Arabidopsis thaliana]
  misc_feature (46)..(297): NCBI GI NO: 25314045 NR Description: hypothetical protein At2g17570
  misc_feature (27)..(300): NCBI GI NO: 16751461 NR Description: cis-prenyltransferase [Hevea brasiliensis]
  misc_feature (27)..(300): NCBI GI NO: 22213587 NR Description: cis-prenyltransferase 2 [Hevea brasiliensis]
  misc_feature (27)..(300): NCBI GI NO: 16751459 NR Description: cis-prenyltransferase [Hevea brasiliensis]
  misc_feature (27)..(300): NCBI GI NO: 22213585 NR Description: cis-prenyltransferase 1 [Hevea brasiliensis]
  misc_feature (27)..(300): NCBI GI NO: 18148934 NR Description: cis-prenyltransferase [Hevea brasiliensis]
MVGSLIFPTPNVDPKAENPNEMVTAGVLSSLQNFLRKCLIAILSYGPMPKHIAFIMDGNRRYAKFRSMQEGAGHRMGFSTLIASLMYCYEMGVKYITVYAFSIDNFKRDPSEVESLMQLMEEKINELLENRSVINKINCKINFWGNLDLLYEPVRLAAEKLMASTAGNTGLVFSICMPYNSTSEIVNAVSEVCAERMEMFQSEHIGDCNGHAANNGVRSEISVADLDRHMYSAGCPDPDIVIRTSGETRLSNFLLWQTTFSHLQNPDPLWPEFSFRHLVWAILQYQRVYPALEHNRKLAKKQL

SEQ ID NO: 24203 - protein, 282 aa, Zea mays subsp. mays
  peptide (1)..(282): Ceres Seq. ID no. 12410684
  misc_feature (34)..(272): Pfam Name: Pfam Description:  Putative undecaprenyl diphosphate synthase
  misc_feature (1)..(282): NCBI GI NO: 34898408 NR Description: ESTs C72761
  misc_feature (6)..(276): NCBI GI NO: 23491567 NR Description: cis-prenyltransferase [Periploca sepium]
  misc_feature (6)..(276): NCBI GI NO: 18398467 NR Description: undecaprenyl pyrophosphate synthetase
  misc_feature (6)..(276): NCBI GI NO: 20336659 NR Description: hypothetical protein [Arabidopsis thaliana]
  misc_feature (25)..(276): NCBI GI NO: 25314045 NR Description: hypothetical protein At2g17570
  misc_feature (6)..(279): NCBI GI NO: 16751461 NR Description: cis-prenyltransferase [Hevea brasiliensis]
  misc_feature (6)..(279): NCBI GI NO: 22213587 NR Description: cis-prenyltransferase 2 [Hevea brasiliensis]
  misc_feature (6)..(279): NCBI GI NO: 16751459 NR Description: cis-prenyltransferase [Hevea brasiliensis]
  misc_feature (6)..(279): NCBI GI NO: 22213585 NR Description: cis-prenyltransferase 1 [Hevea brasiliensis]
  misc_feature (6)..(279): NCBI GI NO: 18148934 NR Description: cis-prenyltransferase [Hevea brasiliensis]
MVTAGVLSSLQNFLRKCLIAILSYGPMPKHIAFIMDGNRRYAKFRSMQEGAGHRMGFSTLIASLMYCYEMGVKYITVYAFSIDNFKRDPSEVESLMQLMEEKINELLENRSVINKINCKINFWGNLDLLYEPVRLAAEKLMASTAGNTGLVFSICMPYNSTSEIVNAVSEVCAERMEMFQSEHIGDCNGHAANNGVRSEISVADLDRHMYSAGCPDPDIVIRTSGETRLSNFLLWQTTFSHLQNPDPLWPEFSFRHLVWAILQYQRVYPALEHNRKLAKKQL

SEQ ID NO: 24204 - protein, 256 aa, Zea mays subsp. mays
  peptide (1)..(256): Ceres Seq. ID no. 12410685
  misc_feature (8)..(246): Pfam Name: Pfam Description:  Putative undecaprenyl diphosphate synthase
  misc_feature (1)..(256): NCBI GI NO: 34898408 NR Description: ESTs C72761
  misc_feature (1)..(250): NCBI GI NO: 23491567 NR Description: cis-prenyltransferase [Periploca sepium]
  misc_feature (1)..(250): NCBI GI NO: 18398467 NR Description: undecaprenyl pyrophosphate synthetase
  misc_feature (1)..(250): NCBI GI NO: 20336659 NR Description: hypothetical protein [Arabidopsis thaliana]
  misc_feature (1)..(250): NCBI GI NO: 25314045 NR Description: hypothetical protein At2g17570
  misc_feature (1)..(253): NCBI GI NO: 16751461 NR Description: cis-prenyltransferase [Hevea brasiliensis]
  misc_feature (1)..(253): NCBI GI NO: 22213587 NR Description: cis-prenyltransferase 2 [Hevea brasiliensis]
  misc_feature (1)..(253): NCBI GI NO: 16751459 NR Description: cis-prenyltransferase [Hevea brasiliensis]
  misc_feature (1)..(253): NCBI GI NO: 22213585 NR Description: cis-prenyltransferase 1 [Hevea brasiliensis]
  misc_feature (1)..(253): NCBI GI NO: 18148934 NR Description: cis-prenyltransferase [Hevea brasiliensis]
MPKHIAFIMDGNRRYAKFRSMQEGAGHRMGFSTLIASLMYCYEMGVKYITVYAFSIDNFKRDPSEVESLMQLMEEKINELLENRSVINKINCKINFWGNLDLLYEPVRLAAEKLMASTAGNTGLVFSICMPYNSTSEIVNAVSEVCAERMEMFQSEHIGDCNGHAANNGVRSEISVADLDRHMYSAGCPDPDIVIRTSGETRLSNFLLWQTTFSHLQNPDPLWPEFSFRHLVWAILQYQRVYPALEHNRKLAKKQL

SEQ ID NO: 24205 - DNA, 1823 bp, Zea mays subsp. mays
  misc_feature (1)..(1823): Ceres Seq. ID no. 12344471
atcctttttatatcttgcctttcccctcccgttccgttcccgtctcgctctcgcatcggccaacaacgcttcacggcaaaatccttccacaggcgggggagtcgcctcacctcacttcaccccgttcatccccagcgaagaaggtaactaccgccatctcccggtaatgatcctcggtatcttccggccagaaaagatttgttttcggtacggatagggtttctgatcaagtgcgcgcgagcccaggagctaagaagaatcccagttctttgttcgccgactcgagtttgacattatgcaaaatacttagcacaccagtgatggcggctacttaccaaactggccttgtggccgagccacagttgctgaacactgaaattatcactcggagggccaccaactctgttgctgacactaacagaaaagacaaatgcgtcggctacttggatgtgtttgtacaccaagcacgcgacatccacaatgtttgtatctatcacaagcaggatgtgtatgcaaagctgtgcctcacgagcagccctgatgtttcgtgctcaaccaaggtgatcaacagtgctgggcgcaacccagtatttgaggaaagcctacgccttgatgtgcaaactgtggatgcttctctcaagtgcgagatatggatgttaagcagagtgaggaactacctggaggatcagctccttggctttgcccttgttcctctggtagacattgtaattggtaatggaaagctggtccaggagttctccttgacatctactgacctattccacacaccagctggatttgtgcacttgtccttgtcatatgctggttgttccccagatgttgtcctcatctcatcacccaataagtccccatcaacagtggatgattctggaaatgatcatgtggttcctgctcagcttgagaagattgtgttcccagacctaaatgtggagaaggaagacgagattatggtctcaaagtatctcgagatgacttcagactctgaaacccctataaaagttgagaacgtcatgtcactgcattctgcaaatgatgatgatgttccttctaaacttgaaaagatcaagttcatagattctgagagccgtgcgaaagctgaaaatggcaagatgctactatttggtgtagctgtgcctagtactgcaatttgtgcagataaggttgaggaacaccgcgatgaaagccctctaagttgtgtctcaaccacaggctcctccactaccctttctgcaacaacacaatcagtttctgagccttcggagaccagtgtcgaggcatcccctacaatgccatagggagaaaagccaagatgttacaggtggtgaggctaattcttctgaaacaccagcaaaggatgaagttatcaagcctgtgatctgcgttaaccttcagccagagcagtcagttgtccaacaggacatagttgacatgtacatgaagagcatgcaacagttcacagaatctcttgcaaaaatgaaacttccattggacgttgagaatactagtccctcaaacgatgattcatactccagtacaattgagaagacatccccatccccatcttcatctgcagcaaagggttctagggtcttttatggaagcagggccttcttttaagtttctaatgcaaagtagtacactagctcgttactatctcctacatacatatacatggttccaggtttatcagatatcttctggcatgtaatcacatactttctgtctccataatatgcttctaggactcactcctggtattgctattagtgttatgctttgttagaagataataatttcatctc

SEQ ID NO: 24206 - protein, 331 aa, Zea mays subsp. mays
  peptide (1)..(331): Ceres Seq. ID no. 12344472
  misc_feature (42)..(129): Pfam Name: Pfam Description:  C2 domain
  misc_feature (3)..(331): NCBI GI NO: 24414275 NR Description: Unknown protein
  misc_feature (34)..(325): NCBI GI NO: 9758185 NR Description: gene_id:MTE17
  misc_feature (34)..(325): NCBI GI NO: 30696612 NR Description: C2 domain-containing protein
  misc_feature (34)..(325): NCBI GI NO: 28393796 NR Description: unknown protein [Arabidopsis thaliana]
  misc_feature (1)..(264): NCBI GI NO: 25405379 NR Description: unknown protein [imported] - Arabidopsis thaliana
  misc_feature (26)..(264): NCBI GI NO: 18403117 NR Description: Expressed protein; protein id: At1g50570
  misc_feature (26)..(264): NCBI GI NO: 21593485 NR Description: unknown [Arabidopsis thaliana]
  misc_feature (39)..(323): NCBI GI NO: 34901084 NR Description: contains ESTsAU183957
  misc_feature (40)..(221): NCBI GI NO: 18416832 NR Description: putative protein; protein id: At5g12300.1
  misc_feature (31)..(222): NCBI GI NO: 34906644 NR Description: P0431G06.18
MAATYQTGLVAEPQLLNTEIITRRATNSVADTNRKDKCVGYLDVFVHQARDIHNVCIYHKQDVYAKLCLTSSPDVSCSTKVINSAGRNPVFEESLRLDVQTVDASLKCEIWMLSRVRNYLEDQLLGFALVPLVDIVIGNGKLVQEFSLTSTDLFHTPAGFVHLSLSYAGCSPDVVLISSPNKSPSTVDDSGNDHVVPAQLEKIVFPDLNVEKEDEIMVSKYLEMTSDSETPIKVENVMSLHSANDDDVPSKLEKIKFIDSESRAKAENGKMLLFGVAVPSTAICADKVEEHRDESPLSCVSTTGSSTTLSATTQSVSEPSETSVEASPTMP

SEQ ID NO: 24207 - protein, 220 aa, Zea mays subsp. mays
  peptide (1)..(220): Ceres Seq. ID no. 12344473
  misc_feature (1)..(220): NCBI GI NO: 24414275 NR Description: Unknown protein
  misc_feature (1)..(214): NCBI GI NO: 9758185 NR Description: gene_id:MTE17
  misc_feature (1)..(214): NCBI GI NO: 30696612 NR Description: C2 domain-containing protein
  misc_feature (1)..(214): NCBI GI NO: 28393796 NR Description: unknown protein [Arabidopsis thaliana]
  misc_feature (1)..(153): NCBI GI NO: 25405379 NR Description: unknown protein [imported] - Arabidopsis thaliana
  misc_feature (1)..(153): NCBI GI NO: 18403117 NR Description: Expressed protein; protein id: At1g50570
  misc_feature (1)..(153): NCBI GI NO: 21593485 NR Description: unknown [Arabidopsis thaliana]
  misc_feature (1)..(212): NCBI GI NO: 34901084 NR Description: contains ESTsAU183957
  misc_feature (1)..(110): NCBI GI NO: 18416832 NR Description: putative protein; protein id: At5g12300.1
  misc_feature (1)..(111): NCBI GI NO: 34906644 NR Description: P0431G06.18
MLSRVRNYLEDQLLGFALVPLVDIVIGNGKLVQEFSLTSTDLFHTPAGFVHLSLSYAGCSPDVVLISSPNKSPSTVDDSGNDHVVPAQLEKIVFPDLNVEKEDEIMVSKYLEMTSDSETPIKVENVMSLHSANDDDVPSKLEKIKFIDSESRAKAENGKMLLFGVAVPSTAICADKVEEHRDESPLSCVSTTGSSTTLSATTQSVSEPSETSVEASPTMP

SEQ ID NO: 24208 - DNA, 1549 bp, Zea mays subsp. mays
  misc_feature (1)..(1549): Ceres Seq. ID no. 12352684
tcaaaaaaaaaggaaaataaaaaaaaaatcgtagagagttcgattggcagttgctgagcccgagcgcgccctccggcgccgacaagccgggaccccacctccgccggcggcgatgggcaactcgcaggcttcgccggcgtccgcctccagctcccgcttcgtcatggcctcgagggccttcccgaaggcaggagctggacggcctccgcgagctattcgcctccctcgcagcgcagtcgcggaccggcggccgcgccatctcacgccccgtcttcctcgaatactatcaggtccgggggcgattaggagacaggctgttccagcttgtggcgaaggagagtggcgggagcgatggggtcacgttcgaggatttgatcatctccaaagcaacatatggaaggggaactcgtgatgaggtcgatgaattcatttatcaactatgtgatgtcacaggagatggcgccttaacaaggtctgatttggaatcagtcttggcgtctgttcatgaaactgtatttgcaataaagaaggaagttgtcgaagtttccaacaatagaccattcgaagaattcctcaactctgcagtgttttcaaaggatgttgaaggggtctcagggaagtctatgtcattgtcagactttaggaactggtgcactctcttgccatcattgaggaatttcttggaaatttgttgatgccccctgattcaggtagaccaggatttgaagtaccactgcttcatcatcctgaaaacatctgcactgatacgctgcttctaaacaaagagtatgcctggcatattggaggaggtttctcccaacatgaggtgcaagagtggaagcttttatatcatagttctcttcatggacaaagcttcaacactttcttgggcaaagtaacgaatggagatgctcagactgttctgattgttaaagatacagaaggatcaatttatggtggatatgcttcacagccttgggaaaggcacagtgatttttatggtgacatgaagacattcctcttcaaatgctatcctcaagcatccatttttcgtcctactggagcaaacaagaatttgcaatggtgtgctgtaaacttcagctctgagaacatacccaatggtattggatttggagggcagccacatcatttcggactctttttatcagcaaattttgaccaagggcactcatttacgtgtagcacatttaccagccctcccctttccaagacaaataggttcaggccagaagttattgaatgttggggtatacaaatgagaggagcacaagatgaaaaactggagttagtcaaggggacagtcctcgagagattcaaggaggaccggaacatgctgaagatggttggtttggcaaatgcaagtgattaagtgatagaggatcacaatgatgtacatgatggagagtctgtacagcacatgttcataaaaataatcaaatctgagaccatgtttctatattctactgttcatattttgtcactcaaaatattcatttgatccacactttgtaacaattgaccagtcgtt

SEQ ID NO: 24209 - protein, 231 aa, Zea mays subsp. mays
  peptide (1)..(231): Ceres Seq. ID no. 12352685
  misc_feature (1)..(231): NCBI GI NO: 15239986 NR Description: putative protein; protein id: At5g06260
  misc_feature (1)..(71): NCBI GI NO: 22329148 NR Description: putative protein; protein id: At4g34070.1
  misc_feature (1)..(71): NCBI GI NO: 17065420 NR Description: Unknown protein [Arabidopsis thaliana]
  misc_feature (42)..(231): NCBI GI NO: 28077021 NR Description: RIKEN cDNA 4632415K11 [Mus musculus]
  misc_feature (35)..(231): NCBI GI NO: 23270886 NR Description: Unknown (protein for MGC:25024) [Homo sapiens]
  misc_feature (35)..(231): NCBI GI NO: 10047293 NR Description: KIAA1609 protein [Homo sapiens]
  misc_feature (27)..(231): NCBI GI NO: 19920876 NR Description: CG5149-PA [Drosophila melanogaster]
  misc_feature (48)..(194): NCBI GI NO: 13278166 NR Description: Similar to oxidation resistance 1 [Mus musculus]
  misc_feature (48)..(194): NCBI GI NO: 13540302 NR Description: nucleolar protein C7C [Rattus norvegicus]
  misc_feature (48)..(191): NCBI GI NO: 21753815 NR Description: unnamed protein product [Homo sapiens]
MPPDSGRPGFEVPLLHHPENICTDTLLLNKEYAWHIGGGFSQHEVQEWKLLYHSSLHGQSFNTFLGKVTNGDAQTVLIVKDTEGSIYGGYASQPWERHSDFYGDMKTFLFKCYPQASIFRPTGANKNLQWCAVNFSSENIPNGIGFGGQPHHFGLFLSANFDQGHSFTCSTFTSPPLSKTNRFRPEVIECWGIQMRGAQDEKLELVKGTVLERFKEDRNMLKMVGLANASD

SEQ ID NO: 24210 - protein, 127 aa, Zea mays subsp. mays
  peptide (1)..(127): Ceres Seq. ID no. 12352686
  misc_feature (1)..(127): NCBI GI NO: 15239986 NR Description: putative protein; protein id: At5g06260
  misc_feature (1)..(127): NCBI GI NO: 28077021 NR Description: RIKEN cDNA 4632415K11 [Mus musculus]
  misc_feature (1)..(127): NCBI GI NO: 23270886 NR Description: Unknown (protein for MGC:25024) [Homo sapiens]
  misc_feature (1)..(127): NCBI GI NO: 10047293 NR Description: KIAA1609 protein [Homo sapiens]
  misc_feature (1)..(127): NCBI GI NO: 19920876 NR Description: CG5149-PA [Drosophila melanogaster]
  misc_feature (1)..(90): NCBI GI NO: 13278166 NR Description: Similar to oxidation resistance 1 [Mus musculus]
  misc_feature (1)..(90): NCBI GI NO: 13540302 NR Description: nucleolar protein C7C [Rattus norvegicus]
  misc_feature (1)..(87): NCBI GI NO: 21753815 NR Description: unnamed protein product [Homo sapiens]
  misc_feature (1)..(87): NCBI GI NO: 26329173 NR Description: unnamed protein product [Mus musculus]
  misc_feature (1)..(87): NCBI GI NO: 24644181 NR Description: CG32464-PI [Drosophila melanogaster]
MKTFLFKCYPQASIFRPTGANKNLQWCAVNFSSENIPNGIGFGGQPHHFGLFLSANFDQGHSFTCSTFTSPPLSKTNRFRPEVIECWGIQMRGAQDEKLELVKGTVLERFKEDRNMLKMVGLANASD

SEQ ID NO: 24211 - DNA, 1305 bp, Zea mays subsp. mays
  misc_feature (1)..(1305): Ceres Seq. ID no. 13498849
aaaaaaccgccccctcccttcctcttctcctagctctcttgcctgcgcaccactcgagtcgagactcgagaggcacctgatctttccttcccgtcttcctcccacacgtccccatcaccattgctgcgacgagagtgagcgggagagggtaggtggcgaggcggcggagatggggcgggggccggtgcagctgcgccggatcgagaacaagatcaaccgccaggtgaccttctccaagcgccggaacgggctgctgaagaaggcccacgagatctccgtgctctgcgacgcagaggtcgcgctcatcgtcttctccactaaggggaagctctacgagtactctagccattccagcatggaaggcattcttgagcgttaccagcgttactcatttgaagaaagggcagtacttaacccaagtattgaagaccaggcaaattggggagatgaatatgtccggttaaaatccaaacttgatgcacttcagaagagtcaaaggcagctgttaggagaacaattgagttcactgaccataaaagaactccagcaactggagcaacaactggacagttctttgaagcatattaggtcaagaaagaatcagctcatgttcgattcaatttccgcgcttcagaaaaaggagaaagcacttacagatcaaaacggtgtcctgcaaaagttcatggaggcagagaaggagaaaaacaaggctttgatgaacgcgcagctccgggagcagcaaaatggagcatcaacaagctccccatcactttcaccaccaatagttccagattccatgccaactctaaatatagggccatgtcaacatagaggggcagcagaatctgagtctgaaccgtctcctgctcctgcacaagcaaacaggggcaacctgccaccatggatgctccgcactgtcaagtaacaggtgaggtcttcccagtgtagttttgcagctgatctcgacagcaacacacctgtcaccgaaatgcttcggtgaccctagatatcaaccgatgcacgatccatctcgatcctgtgatcgaataccggcgtaggtactaccaataaagtcaggccccgtcaaatgctttacatggtgattgaagtctggagcttctcagcaccaccatatattgtgttcagttcctgtgtttattgccatagctaccctttttttctctgatctacgagctagacgtagctttgtgcttggagattccactactatgtttcctctgtcctgtgtatgctttaacggagatgcacgttgtacccgtggtaatatatataaatttgcgttgt

SEQ ID NO: 24212 - protein, 307 aa, Zea mays subsp. mays
  peptide (1)..(307): Ceres Seq. ID no. 13498850
  misc_feature (131)..(228): Pfam Name: Pfam Description:  K-box region
  misc_feature (57)..(307): NCBI GI NO: 29372774 NR Description: putative MADS-domain transcription factor
  misc_feature (57)..(305): NCBI GI NO: 6006607 NR Description: MADS box protein, MADS28
  misc_feature (57)..(305): NCBI GI NO: 6175371 NR Description: MADS box transcription factor MADS18
  misc_feature (57)..(306): NCBI GI NO: 9367307 NR Description: MADS-box protein 3
  misc_feature (68)..(305): NCBI GI NO: 7677036 NR Description: FDRMADS7 [Oryza sativa]
  misc_feature (57)..(251): NCBI GI NO: 28630957 NR Description: MADS3 [Lolium perenne]
  misc_feature (57)..(305): NCBI GI NO: 33355661 NR Description: putative Apetala1-like MADS-box transcriptionfactor
  misc_feature (57)..(303): NCBI GI NO: 6467974 NR Description: MADS box protein DOMADS2
  misc_feature (57)..(304): NCBI GI NO: 1483232 NR Description: MADS5 protein [Betula pendula]
  misc_feature (62)..(303): NCBI GI NO: 32478105 NR Description: FRUITFULL-like MADS-box [Tradescantia virginiana]
KNRPLPSSSPSSLACAPLESRLERHLIFPSRLPPTRPHHHCCDESERERVGGEAAEMGRGPVQLRRIENKINRQVTFSKRRNGLLKKAHEISVLCDAEVALIVFSTKGKLYEYSSHSSMEGILERYQRYSFEERAVLNPSIEDQANWGDEYVRLKSKLDALQKSQRQLLGEQLSSLTIKELQQLEQQLDSSLKHIRSRKNQLMFDSISALQKKEKALTDQNGVLQKFMEAEKEKNKALMNAQLREQQNGASTSSPSLSPPIVPDSMPTLNIGPCQHRGAAESESEPSPAPAQANRGNLPPWMLRTVK

SEQ ID NO: 24213 - protein, 251 aa, Zea mays subsp. mays
  peptide (1)..(251): Ceres Seq. ID no. 13498851
  misc_feature (75)..(172): Pfam Name: Pfam Description:  K-box region
  misc_feature (1)..(251): NCBI GI NO: 29372774 NR Description: putative MADS-domain transcription factor
  misc_feature (1)..(249): NCBI GI NO: 6006607 NR Description: MADS box protein, MADS28
  misc_feature (1)..(249): NCBI GI NO: 6175371 NR Description: MADS box transcription factor MADS18
  misc_feature (1)..(250): NCBI GI NO: 9367307 NR Description: MADS-box protein 3
  misc_feature (12)..(249): NCBI GI NO: 7677036 NR Description: FDRMADS7 [Oryza sativa]
  misc_feature (1)..(195): NCBI GI NO: 28630957 NR Description: MADS3 [Lolium perenne]
  misc_feature (1)..(249): NCBI GI NO: 33355661 NR Description: putative Apetala1-like MADS-box transcriptionfactor
  misc_feature (1)..(247): NCBI GI NO: 6467974 NR Description: MADS box protein DOMADS2
  misc_feature (1)..(248): NCBI GI NO: 1483232 NR Description: MADS5 protein [Betula pendula]
  misc_feature (6)..(247): NCBI GI NO: 32478105 NR Description: FRUITFULL-like MADS-box [Tradescantia virginiana]
MGRGPVQLRRIENKINRQVTFSKRRNGLLKKAHEISVLCDAEVALIVFSTKGKLYEYSSHSSMEGILERYQRYSFEERAVLNPSIEDQANWGDEYVRLKSKLDALQKSQRQLLGEQLSSLTIKELQQLEQQLDSSLKHIRSRKNQLMFDSISALQKKEKALTDQNGVLQKFMEAEKEKNKALMNAQLREQQNGASTSSPSLSPPIVPDSMPTLNIGPCQHRGAAESESEPSPAPAQANRGNLPPWMLRTVK

SEQ ID NO: 24214 - protein, 189 aa, Zea mays subsp. mays
  peptide (1)..(189): Ceres Seq. ID no. 13498852
  misc_feature (13)..(110): Pfam Name: Pfam Description:  K-box region
  misc_feature (1)..(189): NCBI GI NO: 29372774 NR Description: putative MADS-domain transcription factor
  misc_feature (1)..(187): NCBI GI NO: 6006607 NR Description: MADS box protein, MADS28
  misc_feature (1)..(187): NCBI GI NO: 6175371 NR Description: MADS box transcription factor MADS18
  misc_feature (1)..(188): NCBI GI NO: 9367307 NR Description: MADS-box protein 3
  misc_feature (1)..(187): NCBI GI NO: 7677036 NR Description: FDRMADS7 [Oryza sativa]
  misc_feature (1)..(133): NCBI GI NO: 28630957 NR Description: MADS3 [Lolium perenne]
  misc_feature (1)..(187): NCBI GI NO: 33355661 NR Description: putative Apetala1-like MADS-box transcriptionfactor
  misc_feature (1)..(185): NCBI GI NO: 6467974 NR Description: MADS box protein DOMADS2
  misc_feature (1)..(186): NCBI GI NO: 1483232 NR Description: MADS5 protein [Betula pendula]
  misc_feature (1)..(185): NCBI GI NO: 32478105 NR Description: FRUITFULL-like MADS-box [Tradescantia virginiana]
MEGILERYQRYSFEERAVLNPSIEDQANWGDEYVRLKSKLDALQKSQRQLLGEQLSSLTIKELQQLEQQLDSSLKHIRSRKNQLMFDSISALQKKEKALTDQNGVLQKFMEAEKEKNKALMNAQLREQQNGASTSSPSLSPPIVPDSMPTLNIGPCQHRGAAESESEPSPAPAQANRGNLPPWMLRTVK

SEQ ID NO: 24215 - DNA, 2830 bp, Zea mays subsp. mays
  misc_feature (1)..(2830): Ceres Seq. ID no. 12362942
gcacgagaccattacctagaacatcctaatcgaaaaagttcgccaccatcgtgctccgtacacgctccgctccggccatggccgccgccgcggcctccttttcggccctgccgttccttctacttttgctgctggtgccgtcgctcgacggcgcctccaatgtgacgtacgaccaccgctccctcatcatctccggccgccgccgcctcgtcatctccacctccatccactacccccgcagcgtccccgagatgtggcccaagctggtggctgaagccaaagacggcggcgccgactgcatcgagacctacgtcttctggaacggccatgagatcgccccaggccagtactacttcgaggaccggtttgacctggtgcggttcgtgaaggtcgttagagacgctgggctgctcttgatcctgcgcatcgggccctatgtcgccgccgagtggaattatggaggcgtgccggtgtggttgcactacgtgccaggaacggttttcaggacaaacaacgagccattcaagaaccatatgaagagtttcacgacatacatcgtggatatgatgaagaaagagcagctcttcgcttctcagggagggaacattatcctagctcagatagagaacgaatatggagattattatgaacaagcgtatggagctggcggcaaaccatacgccatgtgggcagctagtatggctcttgctcaaaacactggtgtcccttggattatgtgccaagagtctgatgcccctgatcccgtgataaactcttgcaacggtttctactgcgatggattccagccaaattcgccaaccaagccaaaaatttggactgagaattggccaggatggttccagacttttggtgaaagtaatccccacagaccacctgaagatgttgcattcgctgttgcacgttttttcgagaaaggtggcagtgttcaaaattactatgtgtatcatggtggcacaaattttggtcgcactactggggggccattcattacaactagctacgactatgatgcaccaattgatgaatatggacttcggagatttccgaagtgggcacatctgagggaacttcacaaatctataagattgtgtgagcacaccctgctttatggaaatacaacgtttctttctctgggtcctaaacaagaggctgatatttacagtgatcagtctggaggctgtgttgcattcctggcaaatattgattcagccaatgacaaagttgtcactttccgtaacaggcaatatgatcttcctgcttggtcagttagtattcttcctgactgcaggaatgtggtgttcaacactgcaaaggtgcaatctcaaacttcaatggtgaccatggttccagaaagtttgcaagcatcaaaacctgagcgatggagcattttcagggagagaactgggatttggggtaaaaatgactttgtccggaatggatttgtggaccatattaatacgacaaaggactccaccgactacctatggtacacaacaagttttagtgtggatggaagttactcctcaaaagggagccatgctgtccttaatatcgactccaatggccatggtgtccatgctttcttgaataatgtgctcataggtagtgcatatggtaatggctcacaatcaagattcagtgtcaaattgaccatcaacctgaggactggaaagaatgaacttgcccttctaagtatgactgttggtttacaaaatgcaggattcgcttatgaatggataggagcaggctttacaaatgtgaacatctctggtgtgagaactggaatcatagacttgtcttcaaataattgggcatacaagattggactggaaggggaatattataatttgttcaagcctgatcagacaaataaccaacggtggataccacaatccgagccaccaaaaaaccaacctttgacatggtataaggtaaatgttgatgttccacaaggagatgacccagttgggatagacatgcagtctatggggaaaggcttggcttggttgaatggaaatgccatcgggcggtattggccgaggaccagttctattaatgataggtgcactcccagttgtaactacaggggaacatttattccagacaagtgcaggacaggttgtggacagccaactcagagatggtaccatatcccacggtcatggtttcatccctcagggaacatcctcgtggtctttgaggagaagggtggggatcccacgaagatcacattctcaagaagagctgtgacgagcgtgtgctcctttgtgtcagagcacttcccttccatagacttggaatcctgggatgaaagtgccatgaacgaaggcacacccccagccaaagcacagctgtcttgccccgagggtaaaagtatatcttccgtgaagtttgcgagcttgggaaaccccagtggaacctgtagatcataccaaatggggcgctgccaccacccgaactccttatctgttgttgagaaggcctgtctgaacaccaacagctgtacagtctccctgacagacgagagctttgggaaggatttatgccatggagtcaccaaaacactcgccatcgaagcggactgttcttagcgacctacggagtacgaagtacctcggtgtgcatctaggttccactgcaagtatgcccgtcaaaattctaaaattgtagtgcttcttgcacggcaatgctattgtaacctggatttgaatgtatccatctgagataggttatgtttcaggagctttcttaaactaacgttgttgctgagcagcatggtttgaaatagcaggctatggcaaatgacggc

SEQ ID NO: 24216 - protein, 844 aa, Zea mays subsp. mays
  peptide (1)..(844): Ceres Seq. ID no. 12362943
  misc_feature (6)..(729): Pfam Name: Pfam Description:  Glycosyl hydrolases family 35
  misc_feature (25)..(844): NCBI GI NO: 7939621 NR Description: beta-galactosidase [Lycopersicon esculentum]
  misc_feature (6)..(734): NCBI GI NO: 15242897 NR Description: glycosyl hydrolase family 35
  misc_feature (6)..(734): NCBI GI NO: 6686892 NR Description: putative beta-galactosidase [Arabidopsis thaliana]
  misc_feature (1)..(844): NCBI GI NO: 6686888 NR Description: putative beta-galactosidase [Arabidopsis thaliana]
  misc_feature (14)..(844): NCBI GI NO: 25326167 NR Description: probable beta-galactosidase
  misc_feature (5)..(843): NCBI GI NO: 14970841 NR Description: beta-galactosidase [Fragaria x ananassa]
  misc_feature (26)..(844): NCBI GI NO: 7939623 NR Description: putative beta-galactosidase
  misc_feature (375)..(844): NCBI GI NO: 18403090 NR Description: glycosyl hydrolase family 35
  misc_feature (1)..(437): NCBI GI NO: 18403090 NR Description: glycosyl hydrolase family 35
  misc_feature (13)..(844): NCBI GI NO: 15081596 NR Description: putative beta-galactosidase BG1 [Vitis vinifera]
MAAAAASFSALPFLLLLLLVPSLDGASNVTYDHRSLIISGRRRLVISTSIHYPRSVPEMWPKLVAEAKDGGADCIETYVFWNGHEIAPGQYYFEDRFDLVRFVKVVRDAGLLLILRIGPYVAAEWNYGGVPVWLHYVPGTVFRTNNEPFKNHMKSFTTYIVDMMKKEQLFASQGGNIILAQIENEYGDYYEQAYGAGGKPYAMWAASMALAQNTGVPWIMCQESDAPDPVINSCNGFYCDGFQPNSPTKPKIWTENWPGWFQTFGESNPHRPPEDVAFAVARFFEKGGSVQNYYVYHGGTNFGRTTGGPFITTSYDYDAPIDEYGLRRFPKWAHLRELHKSIRLCEHTLLYGNTTFLSLGPKQEADIYSDQSGGCVAFLANIDSANDKVVTFRNRQYDLPAWSVSILPDCRNVVFNTAKVQSQTSMVTMVPESLQASKPERWSIFRERTGIWGKNDFVRNGFVDHINTTKDSTDYLWYTTSFSVDGSYSSKGSHAVLNIDSNGHGVHAFLNNVLIGSAYGNGSQSRFSVKLTINLRTGKNELALLSMTVGLQNAGFAYEWIGAGFTNVNISGVRTGIIDLSSNNWAYKIGLEGEYYNLFKPDQTNNQRWIPQSEPPKNQPLTWYKVNVDVPQGDDPVGIDMQSMGKGLAWLNGNAIGRYWPRTSSINDRCTPSCNYRGTFIPDKCRTGCGQPTQRWYHIPRSWFHPSGNILVVFEEKGGDPTKITFSRRAVTSVCSFVSEHFPSIDLESWDESAMNEGTPPAKAQLSCPEGKSISSVKFASLGNPSGTCRSYQMGRCHHPNSLSVVEKACLNTNSCTVSLTDESFGKDLCHGVTKTLAIEADCS

SEQ ID NO: 24217 - protein, 786 aa, Zea mays subsp. mays
  peptide (1)..(786): Ceres Seq. ID no. 12362944
  misc_feature (1)..(671): Pfam Name: Pfam Description:  Glycosyl hydrolases family 35
  misc_feature (1)..(786): NCBI GI NO: 7939621 NR Description: beta-galactosidase [Lycopersicon esculentum]
  misc_feature (1)..(676): NCBI GI NO: 15242897 NR Description: glycosyl hydrolase family 35
  misc_feature (1)..(676): NCBI GI NO: 6686892 NR Description: putative beta-galactosidase [Arabidopsis thaliana]
  misc_feature (1)..(786): NCBI GI NO: 6686888 NR Description: putative beta-galactosidase [Arabidopsis thaliana]
  misc_feature (1)..(786): NCBI GI NO: 25326167 NR Description: probable beta-galactosidase
  misc_feature (1)..(785): NCBI GI NO: 14970841 NR Description: beta-galactosidase [Fragaria x ananassa]
  misc_feature (1)..(786): NCBI GI NO: 7939623 NR Description: putative beta-galactosidase
  misc_feature (317)..(786): NCBI GI NO: 18403090 NR Description: glycosyl hydrolase family 35
  misc_feature (1)..(379): NCBI GI NO: 18403090 NR Description: glycosyl hydrolase family 35
  misc_feature (1)..(786): NCBI GI NO: 15081596 NR Description: putative beta-galactosidase BG1 [Vitis vinifera]
MWPKLVAEAKDGGADCIETYVFWNGHEIAPGQYYFEDRFDLVRFVKVVRDAGLLLILRIGPYVAAEWNYGGVPVWLHYVPGTVFRTNNEPFKNHMKSFTTYIVDMMKKEQLFASQGGNIILAQIENEYGDYYEQAYGAGGKPYAMWAASMALAQNTGVPWIMCQESDAPDPVINSCNGFYCDGFQPNSPTKPKIWTENWPGWFQTFGESNPHRPPEDVAFAVARFFEKGGSVQNYYVYHGGTNFGRTTGGPFITTSYDYDAPIDEYGLRRFPKWAHLRELHKSIRLCEHTLLYGNTTFLSLGPKQEADIYSDQSGGCVAFLANIDSANDKVVTFRNRQYDLPAWSVSILPDCRNVVFNTAKVQSQTSMVTMVPESLQASKPERWSIFRERTGIWGKNDFVRNGFVDHINTTKDSTDYLWYTTSFSVDGSYSSKGSHAVLNIDSNGHGVHAFLNNVLIGSAYGNGSQSRFSVKLTINLRTGKNELALLSMTVGLQNAGFAYEWIGAGFTNVNISGVRTGIIDLSSNNWAYKIGLEGEYYNLFKPDQTNNQRWIPQSEPPKNQPLTWYKVNVDVPQGDDPVGIDMQSMGKGLAWLNGNAIGRYWPRTSSINDRCTPSCNYRGTFIPDKCRTGCGQPTQRWYHIPRSWFHPSGNILVVFEEKGGDPTKITFSRRAVTSVCSFVSEHFPSIDLESWDESAMNEGTPPAKAQLSCPEGKSISSVKFASLGNPSGTCRSYQMGRCHHPNSLSVVEKACLNTNSCTVSLTDESFGKDLCHGVTKTLAIEADCS

SEQ ID NO: 24218 - protein, 692 aa, Zea mays subsp. mays
  peptide (1)..(692): Ceres Seq. ID no. 12362945
  misc_feature (1)..(577): Pfam Name: Pfam Description:  Glycosyl hydrolases family 35
  misc_feature (1)..(692): NCBI GI NO: 7939621 NR Description: beta-galactosidase [Lycopersicon esculentum]
  misc_feature (1)..(582): NCBI GI NO: 15242897 NR Description: glycosyl hydrolase family 35
  misc_feature (1)..(582): NCBI GI NO: 6686892 NR Description: putative beta-galactosidase [Arabidopsis thaliana]
  misc_feature (1)..(692): NCBI GI NO: 6686888 NR Description: putative beta-galactosidase [Arabidopsis thaliana]
  misc_feature (1)..(692): NCBI GI NO: 25326167 NR Description: probable beta-galactosidase
  misc_feature (1)..(691): NCBI GI NO: 14970841 NR Description: beta-galactosidase [Fragaria x ananassa]
  misc_feature (1)..(692): NCBI GI NO: 7939623 NR Description: putative beta-galactosidase
  misc_feature (223)..(692): NCBI GI NO: 18403090 NR Description: glycosyl hydrolase family 35
  misc_feature (1)..(285): NCBI GI NO: 18403090 NR Description: glycosyl hydrolase family 35
  misc_feature (1)..(692): NCBI GI NO: 15081596 NR Description: putative beta-galactosidase BG1 [Vitis vinifera]
MKSFTTYIVDMMKKEQLFASQGGNIILAQIENEYGDYYEQAYGAGGKPYAMWAASMALAQNTGVPWIMCQESDAPDPVINSCNGFYCDGFQPNSPTKPKIWTENWPGWFQTFGESNPHRPPEDVAFAVARFFEKGGSVQNYYVYHGGTNFGRTTGGPFITTSYDYDAPIDEYGLRRFPKWAHLRELHKSIRLCEHTLLYGNTTFLSLGPKQEADIYSDQSGGCVAFLANIDSANDKVVTFRNRQYDLPAWSVSILPDCRNVVFNTAKVQSQTSMVTMVPESLQASKPERWSIFRERTGIWGKNDFVRNGFVDHINTTKDSTDYLWYTTSFSVDGSYSSKGSHAVLNIDSNGHGVHAFLNNVLIGSAYGNGSQSRFSVKLTINLRTGKNELALLSMTVGLQNAGFAYEWIGAGFTNVNISGVRTGIIDLSSNNWAYKIGLEGEYYNLFKPDQTNNQRWIPQSEPPKNQPLTWYKVNVDVPQGDDPVGIDMQSMGKGLAWLNGNAIGRYWPRTSSINDRCTPSCNYRGTFIPDKCRTGCGQPTQRWYHIPRSWFHPSGNILVVFEEKGGDPTKITFSRRAVTSVCSFVSEHFPSIDLESWDESAMNEGTPPAKAQLSCPEGKSISSVKFASLGNPSGTCRSYQMGRCHHPNSLSVVEKACLNTNSCTVSLTDESFGKDLCHGVTKTLAIEADCS

SEQ ID NO: 24219 - DNA, 1431 bp, Zea mays subsp. mays
  misc_feature (1)..(1431): Ceres Seq. ID no. 12367901
atttccattttccagcgcgcacggacgactgttacctcccccgcccttcgccactccgctccctcctccacctgtcatctcccgcgcgggagacctgcccgctccatggcgccgtcgcgaccgctcatgcgggggatccgcccgccgcgcgtcttcccgacccgcggcggccgcgcctcgccgtacaccgtcgcgctcaccgcgctacttctcgtctccgccgccctcctcgcgctcatagccttcggcgtcttctcgctccccgtgtccgcgccaaatgctgccgccaccaccggcactgcagccggaggggagaccgagtcggccgacgtccgcccccgcgcccgccgcgacctgggggaggggctgggagagcgcggtgcgcagtggaccgaggtcatctcgtgggagcccagggcatttgtctaccacaacttcctctctaaggatgagtgtgaatacctaattggattggccaagcctcacatggtaaaatcaacagttgtcgacagcactaccggcaaaagcaaggacagcagggtccggacaagttcaggcatgtttcttcaaagaggaagagacaaggttattcgagcaattgaaaagaggatagcagactataccttcatacccgtagatcatggtgagggactccaagtgctgcattatgaagtcgggcagaagtatgagcctcactttgattattttcttgatgagtttaacacaaagaatggtggtcagaggatagctactcttctgatgtatctatcagatgttgaagaagggggcgagactattttccctgatgcaaatgtgaacgccagttctttaccatggtacaatgagcttttcagattgtgccaaaagaggcctttctgtcaaaccaaagatgggagatgcgcttcttttctggagcatgaaaccagatgccactttggacccattaagcttgcatgggggttgtcctgtgattaaaggaaataaatggtcatcaaccaagtggatgcacatccatgagtacaaagcttgaggcttggcgaatcaaatatatgctgttgaattgggtttgtaagatggatctttatgcatgtgacttagggatttctacgggattgacactcatgtatgctttacagacccactggagctgtattctttgcttctttgttggaggggagataatagggataagcaggggccttgctcgtccttgcagtttttttttttttttggctgatccttgctgacttggctttttttcacttttctttttcttccttgcagtaccccaactatagaggagttgtgtagtgcctatagagtttgagattttgtttttgtgtcatgcccctaatattagtacatgaatgttgtgttactatgatacttgtaagctttggtactaatgaatagtgaggtctagagctcaac

SEQ ID NO: 24220 - protein, 324 aa, Zea mays subsp. mays
  peptide (1)..(324): Ceres Seq. ID no. 12367902
  misc_feature (214)..(290): Pfam Name: II Pfam Description: 2OG-Fe
  misc_feature (60)..(290): NCBI GI NO: 18394842 NR Description: expressed protein; protein id: At1g20270
  misc_feature (60)..(290): NCBI GI NO: 21537370 NR Description: putative prolyl 4-hydroxylase, alpha subunit
  misc_feature (63)..(289): NCBI GI NO: 15227885 NR Description: putative prolyl 4-hydroxylase, alpha subunit
  misc_feature (63)..(289): NCBI GI NO: 21593091 NR Description: putative prolyl 4-hydroxylase, alpha subunit
  misc_feature (56)..(290): NCBI GI NO: 37535718 NR Description: putative prolyl 4-hydroxylase, alpha subunit
  misc_feature (49)..(289): NCBI GI NO: 15239240 NR Description: prolyl 4-hydroxylase, alpha subunit-like protein
  misc_feature (63)..(289): NCBI GI NO: 7488226 NR Description: procollagen-proline dioxygenase alpha chain homologA_TM017A05
  misc_feature (58)..(183): NCBI GI NO: 15233341 NR Description: putative protein; protein id: At4g35810.1
  misc_feature (180)..(289): NCBI GI NO: 15233341 NR Description: putative protein; protein id: At4g35810.1
  misc_feature (115)..(270): NCBI GI NO: 29150365 NR Description: putative oxidoreductase
ISIFQRARTTVTSPALRHSAPSSTCHLPRGRPARSMAPSRPLMRGIRPPRVFPTRGGRASPYTVALTALLLVSAALLALIAFGVFSLPVSAPNAAATTGTAAGGETESADVRPRARRDLGEGLGERGAQWTEVISWEPRAFVYHNFLSKDECEYLIGLAKPHMVKSTVVDSTTGKSKDSRVRTSSGMFLQRGRDKVIRAIEKRIADYTFIPVDHGEGLQVLHYEVGQKYEPHFDYFLDEFNTKNGGQRIATLLMYLSDVEEGGETIFPDANVNASSLPWYNELFRLCQKRPFCQTKDGRCASFLEHETRCHFGPIKLAWGLSCD

SEQ ID NO: 24221 - protein, 289 aa, Zea mays subsp. mays
  peptide (1)..(289): Ceres Seq. ID no. 12367903
  misc_feature (179)..(255): Pfam Name: II Pfam Description: 2OG-Fe
  misc_feature (25)..(255): NCBI GI NO: 18394842 NR Description: expressed protein; protein id: At1g20270
  misc_feature (25)..(255): NCBI GI NO: 21537370 NR Description: putative prolyl 4-hydroxylase, alpha subunit
  misc_feature (28)..(254): NCBI GI NO: 15227885 NR Description: putative prolyl 4-hydroxylase, alpha subunit
  misc_feature (28)..(254): NCBI GI NO: 21593091 NR Description: putative prolyl 4-hydroxylase, alpha subunit
  misc_feature (21)..(255): NCBI GI NO: 37535718 NR Description: putative prolyl 4-hydroxylase, alpha subunit
  misc_feature (14)..(254): NCBI GI NO: 15239240 NR Description: prolyl 4-hydroxylase, alpha subunit-like protein
  misc_feature (28)..(254): NCBI GI NO: 7488226 NR Description: procollagen-proline dioxygenase alpha chain homologA_TM017A05
  misc_feature (23)..(148): NCBI GI NO: 15233341 NR Description: putative protein; protein id: At4g35810.1
  misc_feature (145)..(254): NCBI GI NO: 15233341 NR Description: putative protein; protein id: At4g35810.1
  misc_feature (80)..(235): NCBI GI NO: 29150365 NR Description: putative oxidoreductase
MAPSRPLMRGIRPPRVFPTRGGRASPYTVALTALLLVSAALLALIAFGVFSLPVSAPNAAATTGTAAGGETESADVRPRARRDLGEGLGERGAQWTEVISWEPRAFVYHNFLSKDECEYLIGLAKPHMVKSTVVDSTTGKSKDSRVRTSSGMFLQRGRDKVIRAIEKRIADYTFIPVDHGEGLQVLHYEVGQKYEPHFDYFLDEFNTKNGGQRIATLLMYLSDVEEGGETIFPDANVNASSLPWYNELFRLCQKRPFCQTKDGRCASFLEHETRCHFGPIKLAWGLSCD

SEQ ID NO: 24222 - protein, 282 aa, Zea mays subsp. mays
  peptide (1)..(282): Ceres Seq. ID no. 12367904
  misc_feature (172)..(248): Pfam Name: II Pfam Description: 2OG-Fe
  misc_feature (18)..(248): NCBI GI NO: 18394842 NR Description: expressed protein; protein id: At1g20270
  misc_feature (18)..(248): NCBI GI NO: 21537370 NR Description: putative prolyl 4-hydroxylase, alpha subunit
  misc_feature (21)..(247): NCBI GI NO: 15227885 NR Description: putative prolyl 4-hydroxylase, alpha subunit
  misc_feature (21)..(247): NCBI GI NO: 21593091 NR Description: putative prolyl 4-hydroxylase, alpha subunit
  misc_feature (14)..(248): NCBI GI NO: 37535718 NR Description: putative prolyl 4-hydroxylase, alpha subunit
  misc_feature (7)..(247): NCBI GI NO: 15239240 NR Description: prolyl 4-hydroxylase, alpha subunit-like protein
  misc_feature (21)..(247): NCBI GI NO: 7488226 NR Description: procollagen-proline dioxygenase alpha chain homologA_TM017A05
  misc_feature (16)..(141): NCBI GI NO: 15233341 NR Description: putative protein; protein id: At4g35810.1
  misc_feature (138)..(247): NCBI GI NO: 15233341 NR Description: putative protein; protein id: At4g35810.1
  misc_feature (73)..(228): NCBI GI NO: 29150365 NR Description: putative oxidoreductase
MRGIRPPRVFPTRGGRASPYTVALTALLLVSAALLALIAFGVFSLPVSAPNAAATTGTAAGGETESADVRPRARRDLGEGLGERGAQWTEVISWEPRAFVYHNFLSKDECEYLIGLAKPHMVKSTVVDSTTGKSKDSRVRTSSGMFLQRGRDKVIRAIEKRIADYTFIPVDHGEGLQVLHYEVGQKYEPHFDYFLDEFNTKNGGQRIATLLMYLSDVEEGGETIFPDANVNASSLPWYNELFRLCQKRPFCQTKDGRCASFLEHETRCHFGPIKLAWGLSCD

SEQ ID NO: 24223 - DNA, 1263 bp, Zea mays subsp. mays
  misc_feature (1)..(1263): Ceres Seq. ID no. 12410662
atcctcaagtcatcagctagctagccttccctacagcaactgcatacatacaacacttccatctgcccgctcgtcttcgatcaattcccaagtcaaataatataacagcaatggtggttcccgtgatcgacttctccaagctggacggcgctgagagggccgaaaccctggcgcagatcgccaatggctgcgaggagtggggattcttccagctcgtgaaccacggcatcccgctggagctgctcgagcgcgtcaagaaggtgtgctccgacagctaccgcctccgggaggccgggttcaaggcgtcggagccggtgcgcacgctggaggcgctcgtcgacgcggagcggcgcggtgaggtggtggcgccggtggacgacctggactgggaggacatcttctacattcatgacggatgccagtggccgtccgacccgccggcgttcaaggagaccatgcgcgagtaccgcgccgagctgaggaagctcgccgagcgagtcatggaggccatggacgagaacctcggcctcgccaggggcaccatcaaggacgccttcaccggcggcagccggcacgagcccttcttcggcaccaaggtcagccactacccgccgtgcccacgcccggacctcatcacgggcctgcgcgcgcacaccgacgccggcggcgtcatcctcctgttccaggacgacaaggtcggtggcctggaggtgctcaaggacggcgagtgggccgacgtacagccgctcgagggcgccatcgtcgtcaacaccggcgaccagatcgaggtgctcagcaacgggcggtaccgcagcgcctggcaccgcgtgctgcccatgcgccgacggcaatcgccgctccatcgcatccttctacaacccggccaaccgaagccaccatctcgccggcggcggtgcaggtcagcggcggtgacgcgtatcccaagtacttgttcggcgattacatggacgtgtacgtcaagcagaagttccaggccaaggagcctaggttcgaagccgtcaagacgggggcgccaaagtcatctccagcggcataaataaatagggaaaacaattattgaatgcattattaaaagtagtaataagtttgttaaatataaactagctcgaccggattgcaccgtccgatctggacttcctctagttattggaagcttatatatatatatatatatagccagttgccagtgctttgactatggatctaaatatattatataaataggtattgtcatatttatcc

SEQ ID NO: 24224 - protein, 316 aa, Zea mays subsp. mays
  peptide (1)..(316): Ceres Seq. ID no. 12410663
  misc_feature (157)..(244): Pfam Name: II Pfam Description: 2OG-Fe
  misc_feature (1)..(244): NCBI GI NO: 7433217 NR Description: 1-aminocyclopropane-1-carboxylate oxidase (EC1
  misc_feature (1)..(241): NCBI GI NO: 12001828 NR Description: 1-aminocyclopropane-1-carboxylate oxidase
  misc_feature (1)..(241): NCBI GI NO: 25452792 NR Description: 1-aminocyclopropane-1-carboxylate oxidase
  misc_feature (1)..(241): NCBI GI NO: 28949891 NR Description: 1-aminocyclopropane-1-carboxylic acid oxidase
  misc_feature (1)..(248): NCBI GI NO: 27371996 NR Description: 1-aminocyclopropane-1-carboxylic acid oxidase
  misc_feature (1)..(241): NCBI GI NO: 18411485 NR Description: 1-aminocyclopropane-1-carboxylate oxidase,putative
  misc_feature (1)..(241): NCBI GI NO: 21555054 NR Description: 1-aminocyclopropane-1-carboxylate oxidase
  misc_feature (1)..(241): NCBI GI NO: 25285689 NR Description: hypothetical protein F2P24.4
  misc_feature (4)..(241): NCBI GI NO: 2385371 NR Description: ACC oxidase [Malus x domestica]
  misc_feature (4)..(241): NCBI GI NO: 232041 NR Description: 1-aminocyclopropane-1-carboxylate oxidase 1
MVVPVIDFSKLDGAERAETLAQIANGCEEWGFFQLVNHGIPLELLERVKKVCSDSYRLREAGFKASEPVRTLEALVDAERRGEVVAPVDDLDWEDIFYIHDGCQWPSDPPAFKETMREYRAELRKLAERVMEAMDENLGLARGTIKDAFTGGSRHEPFFGTKVSHYPPCPRPDLITGLRAHTDAGGVILLFQDDKVGGLEVLKDGEWADVQPLEGAIVVNTGDQIEVLSNGRYRSAWHRVLPMRRRQSPLHRILLQPGQPKPPSRRRRCRSAAVTRIPSTCSAITWTCTSSRSSRPRSLGSKPSRRGRQSHLQRHK

SEQ ID NO: 24225 - protein, 213 aa, Zea mays subsp. mays
  peptide (1)..(213): Ceres Seq. ID no. 12410664
  misc_feature (1)..(145): Pfam Name: Pfam Description:  HlyD family secretion protein
  misc_feature (124)..(213): NCBI GI NO: 7433217 NR Description: 1-aminocyclopropane-1-carboxylate oxidase (EC1
  misc_feature (145)..(203): NCBI GI NO: 12001828 NR Description: 1-aminocyclopropane-1-carboxylate oxidase
  misc_feature (145)..(203): NCBI GI NO: 25452792 NR Description: 1-aminocyclopropane-1-carboxylate oxidase
  misc_feature (157)..(203): NCBI GI NO: 28949891 NR Description: 1-aminocyclopropane-1-carboxylic acid oxidase
  misc_feature (159)..(203): NCBI GI NO: 27371996 NR Description: 1-aminocyclopropane-1-carboxylic acid oxidase
  misc_feature (159)..(204): NCBI GI NO: 18411485 NR Description: 1-aminocyclopropane-1-carboxylate oxidase,putative
  misc_feature (159)..(204): NCBI GI NO: 21555054 NR Description: 1-aminocyclopropane-1-carboxylate oxidase
  misc_feature (159)..(204): NCBI GI NO: 25285689 NR Description: hypothetical protein F2P24.4
  misc_feature (129)..(213): NCBI GI NO: 2385371 NR Description: ACC oxidase [Malus x domestica]
  misc_feature (163)..(213): NCBI GI NO: 232041 NR Description: 1-aminocyclopropane-1-carboxylate oxidase 1
MPVAVRPAGVQGDHARVPRRAEEARRASHGGHGREPRPRQGHHQGRLHRRQPARALLRHQGQPLPAVPTPGPHHGPARAHRRRRRHPPVPGRQGRWPGGAQGRRVGRRTAARGRHRRQHRRPDRGAQQRAVPQRLAPRAAHAPTAIAAPSHPSTTRPTEATISPAAVQVSGGDAYPKYLFGDYMDVYVKQKFQAKEPRFEAVKTGAPKSSPAA

SEQ ID NO: 24226 - protein, 201 aa, Zea mays subsp. mays
  peptide (1)..(201): Ceres Seq. ID no. 12410665
  misc_feature (42)..(129): Pfam Name: II Pfam Description: 2OG-Fe
  misc_feature (1)..(129): NCBI GI NO: 7433217 NR Description: 1-aminocyclopropane-1-carboxylate oxidase (EC1
  misc_feature (1)..(126): NCBI GI NO: 12001828 NR Description: 1-aminocyclopropane-1-carboxylate oxidase
  misc_feature (1)..(126): NCBI GI NO: 25452792 NR Description: 1-aminocyclopropane-1-carboxylate oxidase
  misc_feature (1)..(126): NCBI GI NO: 28949891 NR Description: 1-aminocyclopropane-1-carboxylic acid oxidase
  misc_feature (1)..(133): NCBI GI NO: 27371996 NR Description: 1-aminocyclopropane-1-carboxylic acid oxidase
  misc_feature (1)..(126): NCBI GI NO: 18411485 NR Description: 1-aminocyclopropane-1-carboxylate oxidase,putative
  misc_feature (1)..(126): NCBI GI NO: 21555054 NR Description: 1-aminocyclopropane-1-carboxylate oxidase
  misc_feature (1)..(126): NCBI GI NO: 25285689 NR Description: hypothetical protein F2P24.4
  misc_feature (1)..(126): NCBI GI NO: 2385371 NR Description: ACC oxidase [Malus x domestica]
  misc_feature (1)..(126): NCBI GI NO: 232041 NR Description: 1-aminocyclopropane-1-carboxylate oxidase 1
MREYRAELRKLAERVMEAMDENLGLARGTIKDAFTGGSRHEPFFGTKVSHYPPCPRPDLITGLRAHTDAGGVILLFQDDKVGGLEVLKDGEWADVQPLEGAIVVNTGDQIEVLSNGRYRSAWHRVLPMRRRQSPLHRILLQPGQPKPPSRRRRCRSAAVTRIPSTCSAITWTCTSSRSSRPRSLGSKPSRRGRQSHLQRHK

SEQ ID NO: 24227 - DNA, 1626 bp, Zea mays subsp. mays
  misc_feature (1)..(1626): Ceres Seq. ID no. 12407976
ggtcgcggctgcccgccgcttttcccttcttccgttgcggcctcgctataaaaaccgtccgtccagtccgcgccgcggccgcgcacggcgaacccgaatcccgagcacaggccgccgctcgctcgctcgctgcagctacgcacgcacgcgcctgctcctccccttagcttccacaaggctcgactcggccggcggcgatggcgcggaagaagatccgggagtacgactccaagcgcctcctccgggagcacctcaagcgcctcgccggcatcgacctccagatcctctccgcgcaggtcacacagtcaacggatttcactgagcttgcaaaccaggagccgtggctctcatctatgaagttggttgtgaaacctgacatgctctttgggaaacgtgggaagagtgggcttgtggccctcaacctagatcttgcccaagttcgccaatttgtcaaggagcggttgggagttgaggtcgagatgggtggctgcaaagctccaattacaaccttcatagttgaaccatttgtgccacatgaccaagagtactacctttcgattgtatctgaaaggcttggcaacaccattagtttctcagaatgtggaggtattgagatcgaggagaactgggacaaggttaagactatctttcttcccacagagaagcaaatgacacctgacgcatgtgctccattgattgccaccctgccattggaggtccgcacaaagataggtggtttcattagagctgtattttctgttttccaagacttggatttctcatttcttgagatgaacccattcaccttggtaaatggtgaaccgtatcctctggatatgagaggagaactagatgacacagctgctttcaaaaacttcaataagtggggcaatattgtgtttcccctaccatttggaagagttctcagtccctccgaaagttttatccatgaactggatgagaagacaagtgcttctctgaaattcacggtactgaacccaaaaggacgcatctggacaatggttgcaggtggtggtgctagtgtcatatacgcagacactgttggtgatttgggatatgcttcggagctaggaaattatgcagagtacagtggagctcccaaggaggaggaggttctgcagtatgctagagtgcttttggattgcgctacctctgatcctgatggccgtaagagagcccttctaatcggaggaggaatcgctaacttcacagatgttgcttctacatttagtggcatcattcgggctttaagagagaaggagtccaaattaaaggctgcaaggatgaacatttatgtccggagaggtggtccgaactaccaaactggactcgccaaaatgcgcaccctaggcgccgaacttggcgttccaattgaggtctatggaccagaggcgaccatgactgggatctgcaaagaagccattgattgcatcatggccgcgtaaatcacaaatgtggttgttccatttgaagtcacatccgttttgtactagacgttccttgtacgtgattgctctggtaaaacagagaacgatcattgtcatgagtaaactcggcctttgtaacacagttacgcaagtaataattaagatcttggtttggtgc

SEQ ID NO: 24228 - protein, 422 aa, Zea mays subsp. mays
  peptide (1)..(422): Ceres Seq. ID no. 12407977
  misc_feature (50)..(199): Pfam Name: Pfam Description:  ATP-grasp domain
  misc_feature (1)..(420): NCBI GI NO: 15217510 NR Description: unknown protein; protein id: At1g09430.1
  misc_feature (1)..(422): NCBI GI NO: 15919089 NR Description: ATP citrate lyase b-subunit [Lupinus albus]
  misc_feature (1)..(422): NCBI GI NO: 15220186 NR Description: ATP citrate-lyase, putative; protein id:At1g10670
  misc_feature (1)..(422): NCBI GI NO: 21593129 NR Description: ATP citrate-lyase, putative [Arabidopsis thaliana]
  misc_feature (1)..(422): NCBI GI NO: 15219818 NR Description: ATP citrate-lyase, putative; protein id:At1g60810
  misc_feature (1)..(422): NCBI GI NO: 19698853 NR Description: similar to ATP-citrate-lyase
  misc_feature (1)..(416): NCBI GI NO: 31235932 NR Description: ENSANGP00000012364 [Anopheles gambiae]
  misc_feature (1)..(416): NCBI GI NO: 29293809 NR Description: ATP citrate lyase [Mus musculus]
  misc_feature (1)..(411): NCBI GI NO: 8392839 NR Description: ATP citrate lyase [Rattus norvegicus]
  misc_feature (1)..(416): NCBI GI NO: 38569421 NR Description: ATP citrate lyase isoform 1 [Homo sapiens]
MARKKIREYDSKRLLREHLKRLAGIDLQILSAQVTQSTDFTELANQEPWLSSMKLVVKPDMLFGKRGKSGLVALNLDLAQVRQFVKERLGVEVEMGGCKAPITTFIVEPFVPHDQEYYLSIVSERLGNTISFSECGGIEIEENWDKVKTIFLPTEKQMTPDACAPLIATLPLEVRTKIGGFIRAVFSVFQDLDFSFLEMNPFTLVNGEPYPLDMRGELDDTAAFKNFNKWGNIVFPLPFGRVLSPSESFIHELDEKTSASLKFTVLNPKGRIWTMVAGGGASVIYADTVGDLGYASELGNYAEYSGAPKEEEVLQYARVLLDCATSDPDGRKRALLIGGGIANFTDVASTFSGIIRALREKESKLKAARMNIYVRRGGPNYQTGLAKMRTLGAELGVPIEVYGPEATMTGICKEAIDCIMAA

SEQ ID NO: 24229 - protein, 370 aa, Zea mays subsp. mays
  peptide (1)..(370): Ceres Seq. ID no. 12407978
  misc_feature (1)..(147): Pfam Name: Pfam Description:  ATP-grasp domain
  misc_feature (1)..(368): NCBI GI NO: 15217510 NR Description: unknown protein; protein id: At1g09430.1
  misc_feature (1)..(370): NCBI GI NO: 15919089 NR Description: ATP citrate lyase b-subunit [Lupinus albus]
  misc_feature (1)..(370): NCBI GI NO: 15220186 NR Description: ATP citrate-lyase, putative; protein id:At1g10670
  misc_feature (1)..(370): NCBI GI NO: 21593129 NR Description: ATP citrate-lyase, putative [Arabidopsis thaliana]
  misc_feature (1)..(370): NCBI GI NO: 15219818 NR Description: ATP citrate-lyase, putative; protein id:At1g60810
  misc_feature (1)..(370): NCBI GI NO: 19698853 NR Description: similar to ATP-citrate-lyase
  misc_feature (1)..(364): NCBI GI NO: 31235932 NR Description: ENSANGP00000012364 [Anopheles gambiae]
  misc_feature (1)..(364): NCBI GI NO: 29293809 NR Description: ATP citrate lyase [Mus musculus]
  misc_feature (1)..(359): NCBI GI NO: 8392839 NR Description: ATP citrate lyase [Rattus norvegicus]
  misc_feature (1)..(364): NCBI GI NO: 38569421 NR Description: ATP citrate lyase isoform 1 [Homo sapiens]
MKLVVKPDMLFGKRGKSGLVALNLDLAQVRQFVKERLGVEVEMGGCKAPITTFIVEPFVPHDQEYYLSIVSERLGNTISFSECGGIEIEENWDKVKTIFLPTEKQMTPDACAPLIATLPLEVRTKIGGFIRAVFSVFQDLDFSFLEMNPFTLVNGEPYPLDMRGELDDTAAFKNFNKWGNIVFPLPFGRVLSPSESFIHELDEKTSASLKFTVLNPKGRIWTMVAGGGASVIYADTVGDLGYASELGNYAEYSGAPKEEEVLQYARVLLDCATSDPDGRKRALLIGGGIANFTDVASTFSGIIRALREKESKLKAARMNIYVRRGGPNYQTGLAKMRTLGAELGVPIEVYGPEATMTGICKEAIDCIMAA

SEQ ID NO: 24230 - protein, 362 aa, Zea mays subsp. mays
  peptide (1)..(362): Ceres Seq. ID no. 12407979
  misc_feature (1)..(139): Pfam Name: Pfam Description:  ATP-grasp domain
  misc_feature (1)..(360): NCBI GI NO: 15217510 NR Description: unknown protein; protein id: At1g09430.1
  misc_feature (1)..(362): NCBI GI NO: 15919089 NR Description: ATP citrate lyase b-subunit [Lupinus albus]
  misc_feature (1)..(362): NCBI GI NO: 15220186 NR Description: ATP citrate-lyase, putative; protein id:At1g10670
  misc_feature (1)..(362): NCBI GI NO: 21593129 NR Description: ATP citrate-lyase, putative [Arabidopsis thaliana]
  misc_feature (1)..(362): NCBI GI NO: 15219818 NR Description: ATP citrate-lyase, putative; protein id:At1g60810
  misc_feature (1)..(362): NCBI GI NO: 19698853 NR Description: similar to ATP-citrate-lyase
  misc_feature (1)..(356): NCBI GI NO: 31235932 NR Description: ENSANGP00000012364 [Anopheles gambiae]
  misc_feature (1)..(356): NCBI GI NO: 29293809 NR Description: ATP citrate lyase [Mus musculus]
  misc_feature (1)..(351): NCBI GI NO: 8392839 NR Description: ATP citrate lyase [Rattus norvegicus]
  misc_feature (1)..(356): NCBI GI NO: 38569421 NR Description: ATP citrate lyase isoform 1 [Homo sapiens]
MLFGKRGKSGLVALNLDLAQVRQFVKERLGVEVEMGGCKAPITTFIVEPFVPHDQEYYLSIVSERLGNTISFSECGGIEIEENWDKVKTIFLPTEKQMTPDACAPLIATLPLEVRTKIGGFIRAVFSVFQDLDFSFLEMNPFTLVNGEPYPLDMRGELDDTAAFKNFNKWGNIVFPLPFGRVLSPSESFIHELDEKTSASLKFTVLNPKGRIWTMVAGGGASVIYADTVGDLGYASELGNYAEYSGAPKEEEVLQYARVLLDCATSDPDGRKRALLIGGGIANFTDVASTFSGIIRALREKESKLKAARMNIYVRRGGPNYQTGLAKMRTLGAELGVPIEVYGPEATMTGICKEAIDCIMAA

SEQ ID NO: 24231 - DNA, 1052 bp, Zea mays subsp. mays
  misc_feature (1)..(1052): Ceres Seq. ID no. 13499104
aaccagcaccagcgccagcaacagcaacagctgtggttttagcacaagaaggacgaggaagaagcgcagctgcgtttcttggacggtgagcgcggctactccggcggacatggcgaccaacagtgccctggcgaagctggcgccgctggaagccatcctgttcgacatcgacggcacgctctgcgactccgaccccatccacttctgcgccttccgagagctcctgcagcaggccggcttcaacggcggtgtccccatcacggaggagttctacagcgccaacatcagcgggggccacaacgacgacctcgccaggtcgctgttcccgggcatggatcaccagaaggcgatgcggttcatggatgataaagaagctatgttcagaaagttggcgcctgggcagctgaagcccgtggatgggctgcaggagctgtgcggatggatggaaggccgcgacatgaagcgcgcggcggtgacgaacgccccgagggcgaacgccgagctgatgctgtcgctgctggggctcaccgacttcttcccggtgctcgtcatcgggagcgagtgcgaccgggccaagccgttccctgacccgtacctcaaggcgctccagctcatcgacgcatcgcctcaacacaccttcatatttgaagactctgcatcgggggtccgggccggtgtggctgccggagtgcccgtggttggcctgacgacgaggaaccccgggaaggtgctgaaagacgcaggggccagcttgctggtcaaggattttcaggacccggagctgctgtccgtgcttcaacaggtggaggtcgaacccgcagcggagaatgcacaaggctgatgggtcgggcattgcggaaaatgtcatgctggacagactagccatcagcgattctttcacggagtggaatagctgtgtaactgcatcgtggaataaactaactccggtcggttcctcggcaggaacctggagccggtgcgcatggatgtgtgctgtgtgcaaaacctggcgcctactacactggttcttaacatgcaacaggcattttggc

SEQ ID NO: 24232 - protein, 279 aa, Zea mays subsp. mays
  peptide (1)..(279): Ceres Seq. ID no. 13499105
  misc_feature (49)..(238): Pfam Name: Pfam Description:  haloacid dehalogenase-like hydrolase
  misc_feature (35)..(274): NCBI GI NO: 37536998 NR Description: putative beta-phosphoglucomutase
  misc_feature (42)..(269): NCBI GI NO: 18404847 NR Description: haloacid dehalogenase-like hydrolase family
  misc_feature (115)..(274): NCBI GI NO: 37700485 NR Description: putative beta-phosphoglucomutase [Oryza sativa]
  misc_feature (42)..(278): NCBI GI NO: 34897820 NR Description: P0514G12.30
  misc_feature (66)..(269): NCBI GI NO: 25408616 NR Description: hypothetical protein At2g38740
  misc_feature (49)..(272): NCBI GI NO: 23127812 NR Description: hypothetical protein [Nostoc punctiforme]
  misc_feature (49)..(266): NCBI GI NO: 37521914 NR Description: hypothetical protein glr2345
  misc_feature (49)..(272): NCBI GI NO: 17228223 NR Description: hypothetical protein [Nostoc sp. PCC 7120]
  misc_feature (49)..(265): NCBI GI NO: 23042473 NR Description: hypothetical protein
  misc_feature (51)..(277): NCBI GI NO: 34496852 NR Description: probable beta-phosphoglucomutase
TSTSASNSNSCGFSTRRTRKKRSCVSWTVSAATPADMATNSALAKLAPLEAILFDIDGTLCDSDPIHFCAFRELLQQAGFNGGVPITEEFYSANISGGHNDDLARSLFPGMDHQKAMRFMDDKEAMFRKLAPGQLKPVDGLQELCGWMEGRDMKRAAVTNAPRANAELMLSLLGLTDFFPVLVIGSECDRAKPFPDPYLKALQLIDASPQHTFIFEDSASGVRAGVAAGVPVVGLTTRNPGKVLKDAGASLLVKDFQDPELLSVLQQVEVEPAAENAQG

SEQ ID NO: 24233 - protein, 243 aa, Zea mays subsp. mays
  peptide (1)..(243): Ceres Seq. ID no. 13499106
  misc_feature (13)..(202): Pfam Name: Pfam Description:  haloacid dehalogenase-like hydrolase
  misc_feature (1)..(238): NCBI GI NO: 37536998 NR Description: putative beta-phosphoglucomutase
  misc_feature (6)..(233): NCBI GI NO: 18404847 NR Description: haloacid dehalogenase-like hydrolase family
  misc_feature (79)..(238): NCBI GI NO: 37700485 NR Description: putative beta-phosphoglucomutase [Oryza sativa]
  misc_feature (6)..(242): NCBI GI NO: 34897820 NR Description: P0514G12.30
  misc_feature (30)..(233): NCBI GI NO: 25408616 NR Description: hypothetical protein At2g38740
  misc_feature (13)..(236): NCBI GI NO: 23127812 NR Description: hypothetical protein [Nostoc punctiforme]
  misc_feature (13)..(230): NCBI GI NO: 37521914 NR Description: hypothetical protein glr2345
  misc_feature (13)..(236): NCBI GI NO: 17228223 NR Description: hypothetical protein [Nostoc sp. PCC 7120]
  misc_feature (13)..(229): NCBI GI NO: 23042473 NR Description: hypothetical protein
  misc_feature (15)..(241): NCBI GI NO: 34496852 NR Description: probable beta-phosphoglucomutase
MATNSALAKLAPLEAILFDIDGTLCDSDPIHFCAFRELLQQAGFNGGVPITEEFYSANISGGHNDDLARSLFPGMDHQKAMRFMDDKEAMFRKLAPGQLKPVDGLQELCGWMEGRDMKRAAVTNAPRANAELMLSLLGLTDFFPVLVIGSECDRAKPFPDPYLKALQLIDASPQHTFIFEDSASGVRAGVAAGVPVVGLTTRNPGKVLKDAGASLLVKDFQDPELLSVLQQVEVEPAAENAQG

SEQ ID NO: 24234 - protein, 169 aa, Zea mays subsp. mays
  peptide (1)..(169): Ceres Seq. ID no. 13499107
  misc_feature (1)..(128): Pfam Name: Pfam Description:  haloacid dehalogenase-like hydrolase
  misc_feature (1)..(164): NCBI GI NO: 37536998 NR Description: putative beta-phosphoglucomutase
  misc_feature (1)..(159): NCBI GI NO: 18404847 NR Description: haloacid dehalogenase-like hydrolase family
  misc_feature (5)..(164): NCBI GI NO: 37700485 NR Description: putative beta-phosphoglucomutase [Oryza sativa]
  misc_feature (1)..(168): NCBI GI NO: 34897820 NR Description: P0514G12.30
  misc_feature (1)..(159): NCBI GI NO: 25408616 NR Description: hypothetical protein At2g38740
  misc_feature (1)..(162): NCBI GI NO: 23127812 NR Description: hypothetical protein [Nostoc punctiforme]
  misc_feature (1)..(156): NCBI GI NO: 37521914 NR Description: hypothetical protein glr2345
  misc_feature (1)..(162): NCBI GI NO: 17228223 NR Description: hypothetical protein [Nostoc sp. PCC 7120]
  misc_feature (1)..(155): NCBI GI NO: 23042473 NR Description: hypothetical protein
  misc_feature (1)..(167): NCBI GI NO: 34496852 NR Description: probable beta-phosphoglucomutase
MDHQKAMRFMDDKEAMFRKLAPGQLKPVDGLQELCGWMEGRDMKRAAVTNAPRANAELMLSLLGLTDFFPVLVIGSECDRAKPFPDPYLKALQLIDASPQHTFIFEDSASGVRAGVAAGVPVVGLTTRNPGKVLKDAGASLLVKDFQDPELLSVLQQVEVEPAAENAQG

SEQ ID NO: 24235 - DNA, 1452 bp, Zea mays subsp. mays
  misc_feature (1)..(1452): Ceres Seq. ID no. 12367355
gcaaccaccgtgcgcgcatcaactcggcacaaccggtgagtcttctgcatcttcgatggagaaccagggacccaaacccatccgatgcaaagcggccgtgtgcagggccgccggcgagccgctggccatcgaggaggtcgtcgttgacacgcccaaggcgcacgaggtcaggatacggatcatctgcacgtcgctctgccacagcgacgtcacgttctggcgcatgaaggatctccctgacaatatccccagaatatttggccacgaagccttcggggtggtggagagcgtgggtgaacaggtggacgagttcgcggcgggcgacgcggtggtgccgacgttcctggggcagtgcagcgagtgcgtggactgcaggtcggcgcggagcaacatgtgctccaagtaccggttcgcggtgcgcccggggatgccgcgcgacggcaccacccggttcaccgacggccaggggcgcccgctgcaccacttcttcggcgtgtccagcttcgccgagtacaccgtggtggacgtgaaccaggtcgtcaagctcaaccccgccgtgccgccggcactcgcctgcctgctcagctgcggcgcctccacgggggttggagccgcatggaagcaggcgaaagttgagcctggatcttcggtcgctatcttcggcctcggcgctgtaggattggcggtggctgaaggagccaggatttgtggggcgtcgaagataatcggcgtggatataaaccctgataaatgcgagcttggaaagaagttcggcgtgacacatttcatcaatcccaaagagctcggtgaggagaaacctgtccaccaggcgatcgccgagatgaccgacggtggcgcggactactgcttcgagtgcattggactggcggcgctgatgaacgacgcgttccggagctcccgagacgggtggggcaagacgatcattcttggggtggaaatgcacggtgcccccctctgcatctctcctcacgagatcctccacgggaagtctgtcatcgggtccatgttcggcggggtgaagcctaagcaggatatccccattctcgccgacaagtacatgaacaaggagctggagcttgacaagttcataacccatgaagttggcctcaaggacatcaaccaagcttttgacctcctgctgcaagggaagagtctcaggtgcaccatatggatggacaagtgatgcaataaccagagttacgcatcggaacctgaagatgctatgatgcttccacctcgtttcagtgaaaataattgtttcatcagctgccaaaagaaatgttatatgtatcttaaattcgagttttccattccttttcttcacgtcatcactcaaacatgttaaaatgtgcccatgttttgatttttactgctttcaaaagttgtgactatccttatcttattagtgatattttcggaatttatctggcg

SEQ ID NO: 24236 - protein, 400 aa, Zea mays subsp. mays
  peptide (1)..(400): Ceres Seq. ID no. 12367356
  misc_feature (25)..(400): NCBI GI NO: 7705214 NR Description: alcohol dehydrogenase ADH
  misc_feature (25)..(400): NCBI GI NO: 1076579 NR Description: probable alcohol dehydrogenase (EC 1
  misc_feature (19)..(399): NCBI GI NO: 34906828 NR Description: contains EST C99136
  misc_feature (17)..(400): NCBI GI NO: 7705215 NR Description: alcohol dehydrogenase  ADH
  misc_feature (17)..(400): NCBI GI NO: 1076580 NR Description: probable alcohol dehydrogenase (EC 1
  misc_feature (13)..(398): NCBI GI NO: 15238330 NR Description: alcohol dehydrogenase; protein id: At5g42250
  misc_feature (21)..(400): NCBI GI NO: 15219882 NR Description: alcohol dehydrogenase ADH, putative
  misc_feature (25)..(400): NCBI GI NO: 15219884 NR Description: alcohol dehydrogenase ADH, putative
  misc_feature (25)..(400): NCBI GI NO: 21618210 NR Description: alcohol dehydrogenase like protein
  misc_feature (25)..(400): NCBI GI NO: 18415840 NR Description: alcohol dehydrogenase like protein
QPPCAHQLGTTGESSASSMENQGPKPIRCKAAVCRAAGEPLAIEEVVVDTPKAHEVRIRIICTSLCHSDVTFWRMKDLPDNIPRIFGHEAFGVVESVGEQVDEFAAGDAVVPTFLGQCSECVDCRSARSNMCSKYRFAVRPGMPRDGTTRFTDGQGRPLHHFFGVSSFAEYTVVDVNQVVKLNPAVPPALACLLSCGASTGVGAAWKQAKVEPGSSVAIFGLGAVGLAVAEGARICGASKIIGVDINPDKCELGKKFGVTHFINPKELGEEKPVHQAIAEMTDGGADYCFECIGLAALMNDAFRSSRDGWGKTIILGVEMHGAPLCISPHEILHGKSVIGSMFGGVKPKQDIPILADKYMNKELELDKFITHEVGLKDINQAFDLLLQGKSLRCTIWMDK

SEQ ID NO: 24237 - protein, 382 aa, Zea mays subsp. mays
  peptide (1)..(382): Ceres Seq. ID no. 12367357
  misc_feature (7)..(382): NCBI GI NO: 7705214 NR Description: alcohol dehydrogenase ADH
  misc_feature (7)..(382): NCBI GI NO: 1076579 NR Description: probable alcohol dehydrogenase (EC 1
  misc_feature (1)..(381): NCBI GI NO: 34906828 NR Description: contains EST C99136
  misc_feature (1)..(382): NCBI GI NO: 7705215 NR Description: alcohol dehydrogenase  ADH
  misc_feature (1)..(382): NCBI GI NO: 1076580 NR Description: probable alcohol dehydrogenase (EC 1
  misc_feature (1)..(380): NCBI GI NO: 15238330 NR Description: alcohol dehydrogenase; protein id: At5g42250
  misc_feature (3)..(382): NCBI GI NO: 15219882 NR Description: alcohol dehydrogenase ADH, putative
  misc_feature (7)..(382): NCBI GI NO: 15219884 NR Description: alcohol dehydrogenase ADH, putative
  misc_feature (7)..(382): NCBI GI NO: 21618210 NR Description: alcohol dehydrogenase like protein
  misc_feature (7)..(382): NCBI GI NO: 18415840 NR Description: alcohol dehydrogenase like protein
MENQGPKPIRCKAAVCRAAGEPLAIEEVVVDTPKAHEVRIRIICTSLCHSDVTFWRMKDLPDNIPRIFGHEAFGVVESVGEQVDEFAAGDAVVPTFLGQCSECVDCRSARSNMCSKYRFAVRPGMPRDGTTRFTDGQGRPLHHFFGVSSFAEYTVVDVNQVVKLNPAVPPALACLLSCGASTGVGAAWKQAKVEPGSSVAIFGLGAVGLAVAEGARICGASKIIGVDINPDKCELGKKFGVTHFINPKELGEEKPVHQAIAEMTDGGADYCFECIGLAALMNDAFRSSRDGWGKTIILGVEMHGAPLCISPHEILHGKSVIGSMFGGVKPKQDIPILADKYMNKELELDKFITHEVGLKDINQAFDLLLQGKSLRCTIWMDK

SEQ ID NO: 24238 - protein, 326 aa, Zea mays subsp. mays
  peptide (1)..(326): Ceres Seq. ID no. 12367358
  misc_feature (1)..(326): NCBI GI NO: 7705214 NR Description: alcohol dehydrogenase ADH
  misc_feature (1)..(326): NCBI GI NO: 1076579 NR Description: probable alcohol dehydrogenase (EC 1
  misc_feature (1)..(325): NCBI GI NO: 34906828 NR Description: contains EST C99136
  misc_feature (1)..(326): NCBI GI NO: 7705215 NR Description: alcohol dehydrogenase  ADH
  misc_feature (1)..(326): NCBI GI NO: 1076580 NR Description: probable alcohol dehydrogenase (EC 1
  misc_feature (1)..(324): NCBI GI NO: 15238330 NR Description: alcohol dehydrogenase; protein id: At5g42250
  misc_feature (1)..(326): NCBI GI NO: 15219882 NR Description: alcohol dehydrogenase ADH, putative
  misc_feature (1)..(326): NCBI GI NO: 15219884 NR Description: alcohol dehydrogenase ADH, putative
  misc_feature (1)..(326): NCBI GI NO: 21618210 NR Description: alcohol dehydrogenase like protein
  misc_feature (1)..(326): NCBI GI NO: 18415840 NR Description: alcohol dehydrogenase like protein
MKDLPDNIPRIFGHEAFGVVESVGEQVDEFAAGDAVVPTFLGQCSECVDCRSARSNMCSKYRFAVRPGMPRDGTTRFTDGQGRPLHHFFGVSSFAEYTVVDVNQVVKLNPAVPPALACLLSCGASTGVGAAWKQAKVEPGSSVAIFGLGAVGLAVAEGARICGASKIIGVDINPDKCELGKKFGVTHFINPKELGEEKPVHQAIAEMTDGGADYCFECIGLAALMNDAFRSSRDGWGKTIILGVEMHGAPLCISPHEILHGKSVIGSMFGGVKPKQDIPILADKYMNKELELDKFITHEVGLKDINQAFDLLLQGKSLRCTIWMDK

SEQ ID NO: 24239 - DNA, 1234 bp, Zea mays subsp. mays
  misc_feature (1)..(1234): Ceres Seq. ID no. 12410659
atataatccgctctctctcccccggtttctcttgtcttcttgctgcggcgatggaccaagaaacctcacgggaaccccactccttgaggagccgtccagtgccgcattagtgggttccattcttctttggatcgctgctcgcgatcgcattgcccgcgtttcttttggccgtcttggttcgttcttgattcttggacgaggtgggatttggagagccgagagcggcgcggcagcggcgggtttctcggtcgggctagattgtttccatcgagatggtgggcggcggagggcattcgtcgatggaccacactggcgccaaggacctcgagcgcggcgagctgcgccgtggcgcgcctgagtttgcggacggcgacgatggagacggggaagaaagccagtacttctcggacgcggaggaccggtcgtggccgtcgcactcacgccacgactccaccgcctacgaggactacgtctcgccgtgcgtgtccgcccgcgcaagctccgtcgacgccgacgccgacgccgacgccgacggcgaggccgtcagacaacactgcaggaagtcgtcgtgcgtgtcagagggctcgctggacgacgttgacctggaggccggactgagcgagatcatcaaggccagccctgagaaggccgaacagaactgtcgcatttgccaccttggcctggagagcgcggcggccgagtccggtgccggcatcacgctcggctgctcctgcaagggggacttatcctacgcccacaagcagtgcgccgacacctggttcaagatcagaggcaacaaggtctgtgagatatgtagctcgactgcatccaacgtggtagtcttgggggatcccgagttcagcgaccagtggagtgaaacaaacagtgccgccgccgcggcgcaggcgccgccgccaccagccgaaccccggaggttctggcaggggcatcggttcctcaacttcctcctcgcctgcatggtgttcgccttcgtcatctcttggctcttccacttcaacgtccccggctaacaagttctttggcgcacatacatggcccccgaataaaaaaaaaagctccaaaaaagccatcactccggacgccgggtcggtaagttagcggatctggaagaacaggctggtgggtgctgggttggttgaagtaaaagctcgacatgggtgggggggccgggggacgatgatactgcattttttgtttatgatgaatgcctttg

SEQ ID NO: 24240 - protein, 252 aa, Zea mays subsp. mays
  peptide (1)..(252): Ceres Seq. ID no. 12410660
  misc_feature (130)..(181): Pfam Name: RING finger Pfam Description: Zinc finger, C3HC4 type
  misc_feature (27)..(252): NCBI GI NO: 34908318 NR Description: P0529H11.12
  misc_feature (64)..(251): NCBI GI NO: 15239254 NR Description: putative protein; protein id: At5g05830.1
  misc_feature (120)..(250): NCBI GI NO: 9759231 NR Description: gb|AAD32776
  misc_feature (96)..(250): NCBI GI NO: 15224415 NR Description: unknown protein; protein id: At2g37950.1
  misc_feature (145)..(250): NCBI GI NO: 15237796 NR Description: putative protein; protein id: At5g59000
  misc_feature (145)..(250): NCBI GI NO: 21537129 NR Description: unknown [Arabidopsis thaliana]
  misc_feature (54)..(176): NCBI GI NO: 15240886 NR Description: putative protein; protein id: At5g01070.1
  misc_feature (46)..(201): NCBI GI NO: 29725746 NR Description: hypothetical protein [Arabidopsis thaliana]
  misc_feature (101)..(190): NCBI GI NO: 13605863 NR Description: AT5g60580/muf9_230 [Arabidopsis thaliana]
  misc_feature (101)..(190): NCBI GI NO: 18424371 NR Description: putative protein; protein id: At5g60580
MVGGGGHSSMDHTGAKDLERGELRRGAPEFADGDDGDGEESQYFSDAEDRSWPSHSRHDSTAYEDYVSPCVSARASSVDADADADADGEAVRQHCRKSSCVSEGSLDDVDLEAGLSEIIKASPEKAEQNCRICHLGLESAAAESGAGITLGCSCKGDLSYAHKQCADTWFKIRGNKVCEICSSTASNVVVLGDPEFSDQWSETNSAAAAAQAPPPPAEPRRFWQGHRFLNFLLACMVFAFVISWLFHFNVPG

SEQ ID NO: 24241 - protein, 243 aa, Zea mays subsp. mays
  peptide (1)..(243): Ceres Seq. ID no. 12410661
  misc_feature (121)..(172): Pfam Name: RING finger Pfam Description: Zinc finger, C3HC4 type
  misc_feature (18)..(243): NCBI GI NO: 34908318 NR Description: P0529H11.12
  misc_feature (55)..(242): NCBI GI NO: 15239254 NR Description: putative protein; protein id: At5g05830.1
  misc_feature (111)..(241): NCBI GI NO: 9759231 NR Description: gb|AAD32776
  misc_feature (87)..(241): NCBI GI NO: 15224415 NR Description: unknown protein; protein id: At2g37950.1
  misc_feature (136)..(241): NCBI GI NO: 15237796 NR Description: putative protein; protein id: At5g59000
  misc_feature (136)..(241): NCBI GI NO: 21537129 NR Description: unknown [Arabidopsis thaliana]
  misc_feature (45)..(167): NCBI GI NO: 15240886 NR Description: putative protein; protein id: At5g01070.1
  misc_feature (37)..(192): NCBI GI NO: 29725746 NR Description: hypothetical protein [Arabidopsis thaliana]
  misc_feature (92)..(181): NCBI GI NO: 13605863 NR Description: AT5g60580/muf9_230 [Arabidopsis thaliana]
  misc_feature (92)..(181): NCBI GI NO: 18424371 NR Description: putative protein; protein id: At5g60580
MDHTGAKDLERGELRRGAPEFADGDDGDGEESQYFSDAEDRSWPSHSRHDSTAYEDYVSPCVSARASSVDADADADADGEAVRQHCRKSSCVSEGSLDDVDLEAGLSEIIKASPEKAEQNCRICHLGLESAAAESGAGITLGCSCKGDLSYAHKQCADTWFKIRGNKVCEICSSTASNVVVLGDPEFSDQWSETNSAAAAAQAPPPPAEPRRFWQGHRFLNFLLACMVFAFVISWLFHFNVPG

SEQ ID NO: 24242 - DNA, 1233 bp, Zea mays subsp. mays
  misc_feature (1)..(1233): Ceres Seq. ID no. 13564187
aacgcaacaaagccgaggtaaagcagggagcatcttgagtgttcgacagtgagccatggagaagacgtccgagagcgctataccgccggcggcatccccgctgatgctgttcgggtcgtgggcgagctcgtacacgcaccgcgtgcagctggcgctgcggctcaagggcctggagttcgactacgtggaggaggacctggggaacaagagcgacgagctgctgcgccacaaccccgtccacaagaaggtgcccgtgctcgtccacggcggccgcgcgctcccggagtccgtcattatcctccagtaccttgacgacgcctggccggagacccgcccgctgctccccgccgacgccttcgaccgcgcgctcgcgcggttctggtgccacttcgccgacgacaagctcgggccggcggtgggcgcggtgttcgcgtcgacgggggagggccaggaggcggcggtgcggcaggtgcacgagaacctggccctgatcgagtccgagctccgcgacggcgcgttccggggccgccgcttcttcggcggcgacgaggtgggcctgctggacgtcgtcctgggctgcggctcctactggctcgccgtgttcgaggaggtgaccggggtgcgcctcgtggacgccgacgccttcccgcgcttccacgcctggctgcgcgacttcgaggccctggacgaggtccgggagaccatccccgcggtggaccgcctgctcgagtacgcgcgcggcctccgccacatgctgctcggcctcgcgggggccggcgccggcgccggcgcggacgcgccctccaccgacgcccccgccgcaccgccggcctcggctgacatcgccgtcgacatttgaacgcagggcgtcgtcgcgccgggcgtctgccagcgccgtccggctagccatcagtagctagtacgtagtaccagtatagtttgcagagtcgattgcgccatgtgtggtggctgcgtgcctgtgcctgcctgccggcctggcctggagtgcggttctgctgccgccacagttaattggcccagtttgtctagctgtcgagttttttttttttcaactctctctgtctctctccgactcttcccttctttttgataaagttcgtccctgcagttaaatctctgtttgctgcgacttgttcttcttgtgtgtgagagtgggacgaaatctcgtgtgtttgtatgtggcagtttggctcgcttgttgaatgtaagcca

SEQ ID NO: 24243 - protein, 267 aa, Zea mays subsp. mays
  peptide (1)..(267): Ceres Seq. ID no. 13564188
  misc_feature (1)..(267): NCBI GI NO: 11385533 NR Description: glutathione S-transferase GST 41 [Zea mays]
  misc_feature (18)..(235): NCBI GI NO: 23978432 NR Description: glutathione S-transferase [Cucurbita maxima]
  misc_feature (12)..(235): NCBI GI NO: 11385523 NR Description: glutathione S-transferase GST 36 [Zea mays]
  misc_feature (20)..(235): NCBI GI NO: 11385497 NR Description: glutathione S-transferase GST 23 [Zea mays]
  misc_feature (18)..(235): NCBI GI NO: 15430731 NR Description: putative glutathione S-transferase OsGSTU17
  misc_feature (15)..(226): NCBI GI NO: 4468798 NR Description: GST7 protein [Zea mays]
  misc_feature (18)..(226): NCBI GI NO: 11385441 NR Description: glutathione S-transferase GST 13 [Glycine max]
  misc_feature (16)..(243): NCBI GI NO: 37536280 NR Description: putative glutathione S-transferase
  misc_feature (11)..(234): NCBI GI NO: 11177837 NR Description: putative glutathione S-transferase OsGSTU2
  misc_feature (12)..(234): NCBI GI NO: 37536338 NR Description: putative glutathione S-transferase
MEKTSESAIPPAASPLMLFGSWASSYTHRVQLALRLKGLEFDYVEEDLGNKSDELLRHNPVHKKVPVLVHGGRALPESVIILQYLDDAWPETRPLLPADAFDRALARFWCHFADDKLGPAVGAVFASTGEGQEAAVRQVHENLALIESELRDGAFRGRRFFGGDEVGLLDVVLGCGSYWLAVFEEVTGVRLVDADAFPRFHAWLRDFEALDEVRETIPAVDRLLEYARGLRHMLLGLAGAGAGAGADAPSTDAPAAPPASADIAVDI

SEQ ID NO: 24244 - protein, 251 aa, Zea mays subsp. mays
  peptide (1)..(251): Ceres Seq. ID no. 13564189
  misc_feature (1)..(251): NCBI GI NO: 11385533 NR Description: glutathione S-transferase GST 41 [Zea mays]
  misc_feature (2)..(219): NCBI GI NO: 23978432 NR Description: glutathione S-transferase [Cucurbita maxima]
  misc_feature (1)..(219): NCBI GI NO: 11385523 NR Description: glutathione S-transferase GST 36 [Zea mays]
  misc_feature (4)..(219): NCBI GI NO: 11385497 NR Description: glutathione S-transferase GST 23 [Zea mays]
  misc_feature (2)..(219): NCBI GI NO: 15430731 NR Description: putative glutathione S-transferase OsGSTU17
  misc_feature (1)..(210): NCBI GI NO: 4468798 NR Description: GST7 protein [Zea mays]
  misc_feature (2)..(210): NCBI GI NO: 11385441 NR Description: glutathione S-transferase GST 13 [Glycine max]
  misc_feature (1)..(227): NCBI GI NO: 37536280 NR Description: putative glutathione S-transferase
  misc_feature (1)..(218): NCBI GI NO: 11177837 NR Description: putative glutathione S-transferase OsGSTU2
  misc_feature (1)..(218): NCBI GI NO: 37536338 NR Description: putative glutathione S-transferase
MLFGSWASSYTHRVQLALRLKGLEFDYVEEDLGNKSDELLRHNPVHKKVPVLVHGGRALPESVIILQYLDDAWPETRPLLPADAFDRALARFWCHFADDKLGPAVGAVFASTGEGQEAAVRQVHENLALIESELRDGAFRGRRFFGGDEVGLLDVVLGCGSYWLAVFEEVTGVRLVDADAFPRFHAWLRDFEALDEVRETIPAVDRLLEYARGLRHMLLGLAGAGAGAGADAPSTDAPAAPPASADIAVDI

SEQ ID NO: 24245 - DNA, 1442 bp, Zea mays subsp. mays
  misc_feature (1)..(1442): Ceres Seq. ID no. 12414246
aagtgttctcttctctccaagcggacaaagcccgtccctctcctactcctcccccaaagttccgttcagttccctcccgcaggtcaaaaccctcaacctcccacgcggctcgctgggtgggtcggtcggccatggctccccccgcgctcggatctcaggtggccgccgcagcctcggttcccgtcggctcggactctctcgctaagggcgcggcgctcaagggtaacagcactctaaactttcggaccaaaccatgcatcggaatggcattagcatggaaaaacaggacccagcaaccacggcgtctgaacaaggtactctgcatgtctgttcaacaagcaagcaggagcaaggttgctgtcatgcccgtcgagttggagaaggcaaaggagccactgctccacctgtacaaaccaaaggagccttacacggccacgatcgtctctgtcgagaggcttgtaggacccagagctcctggcgaaacatgccacgttgtcattgatcatggcggcaatgttccgtactgggaaggacagagttacggcgtcattcctcctggagagaatccaaaaaaacctggatctcccaatactgttaggctctattcaattgcttctactaggtatggtgattcttttgatggaaagacagcaagcttatgtgttcgtcgtgctgtttattatgatcctgaaactggagaggaagacccatcaaagagaggtgtctgcagtaacttcctgtgtggctcaaaaccaggggacaaagttcagatcacaggcccctcgggcaaaataatgcttcttcccgaggatgatccaaatgcgactcatatcatgattgccacggggactggtgttgctccctaccgcggctacctacgtcgcatgttcatggaagatgtcccaactttcaaatttggtggtctggcttggctcttccttggtgttgcgaactctgacagccttctctatgatgaagagttcacaaactaccttcaacagtatccagacaatttcaggtacgacaaagcgctaagcagggagcagaagaacaagagcggcgggaagatgtacgtgcaggacaagatcgaggagtacagcgacgaaatcttcagactgctagatggcggtgcgcacatctacttctgtggtttgaaggggatgatgccggggatccaggacacgctcaagaaggtggctgagcaaagaggcgagagctgggaccagaagctgtcacagctgaaaaagaacaagcagtggcacgtcgaggtttactaggctataagatggcaaggattgtgattgtttagctactgagctgagaaactggacgtatgattgaacgactgtggctgcgatgtaatataacattgtagacttggattcataagcttctgctccaaatggtgaataaaatgaagcacgcggtctgtagctgctact

SEQ ID NO: 24246 - protein, 424 aa, Zea mays subsp. mays
  peptide (1)..(424): Ceres Seq. ID no. 12414247
  misc_feature (273)..(394): Pfam Name: Pfam Description:  Oxidoreductase NAD-binding domain
  misc_feature (48)..(424): NCBI GI NO: 3913653 NR Description: Ferredoxin--NADP reductase
  misc_feature (48)..(424): NCBI GI NO: 34897132 NR Description: ferredoxin-NADP+ reductase [Oryza sativa]
  misc_feature (103)..(424): NCBI GI NO: 1076803 NR Description: ferredoxin-NADP reductase (EC 1
  misc_feature (56)..(424): NCBI GI NO: 3913648 NR Description: Ferredoxin--NADP reductase
  misc_feature (56)..(424): NCBI GI NO: 7433380 NR Description: ferredoxin-NADP reductase (EC 1
  misc_feature (108)..(424): NCBI GI NO: 218163 NR Description: ferredoxin-NADP+ reductase enzyme
  misc_feature (109)..(424): NCBI GI NO: 14719468 NR Description: Chain A
  misc_feature (44)..(424): NCBI GI NO: 3913650 NR Description: Ferredoxin--NADP reductase
  misc_feature (54)..(424): NCBI GI NO: 30691910 NR Description: ferredoxin--NADP
  misc_feature (54)..(424): NCBI GI NO: 18397542 NR Description: ferrodoxin NADP oxidoreductase, putative
VFSSLQADKARPSPTPPPKFRSVPSRRSKPSTSHAARWVGRSAMAPPALGSQVAAAASVPVGSDSLAKGAALKGNSTLNFRTKPCIGMALAWKNRTQQPRRLNKVLCMSVQQASRSKVAVMPVELEKAKEPLLHLYKPKEPYTATIVSVERLVGPRAPGETCHVVIDHGGNVPYWEGQSYGVIPPGENPKKPGSPNTVRLYSIASTRYGDSFDGKTASLCVRRAVYYDPETGEEDPSKRGVCSNFLCGSKPGDKVQITGPSGKIMLLPEDDPNATHIMIATGTGVAPYRGYLRRMFMEDVPTFKFGGLAWLFLGVANSDSLLYDEEFTNYLQQYPDNFRYDKALSREQKNKSGGKMYVQDKIEEYSDEIFRLLDGGAHIYFCGLKGMMPGIQDTLKKVAEQRGESWDQKLSQLKKNKQWHVEVY

SEQ ID NO: 24247 - protein, 381 aa, Zea mays subsp. mays
  peptide (1)..(381): Ceres Seq. ID no. 12414248
  misc_feature (230)..(351): Pfam Name: Pfam Description:  Oxidoreductase NAD-binding domain
  misc_feature (5)..(381): NCBI GI NO: 3913653 NR Description: Ferredoxin--NADP reductase
  misc_feature (5)..(381): NCBI GI NO: 34897132 NR Description: ferredoxin-NADP+ reductase [Oryza sativa]
  misc_feature (60)..(381): NCBI GI NO: 1076803 NR Description: ferredoxin-NADP reductase (EC 1
  misc_feature (13)..(381): NCBI GI NO: 3913648 NR Description: Ferredoxin--NADP reductase
  misc_feature (13)..(381): NCBI GI NO: 7433380 NR Description: ferredoxin-NADP reductase (EC 1
  misc_feature (65)..(381): NCBI GI NO: 218163 NR Description: ferredoxin-NADP+ reductase enzyme
  misc_feature (66)..(381): NCBI GI NO: 14719468 NR Description: Chain A
  misc_feature (1)..(381): NCBI GI NO: 3913650 NR Description: Ferredoxin--NADP reductase
  misc_feature (11)..(381): NCBI GI NO: 30691910 NR Description: ferredoxin--NADP
  misc_feature (11)..(381): NCBI GI NO: 18397542 NR Description: ferrodoxin NADP oxidoreductase, putative
MAPPALGSQVAAAASVPVGSDSLAKGAALKGNSTLNFRTKPCIGMALAWKNRTQQPRRLNKVLCMSVQQASRSKVAVMPVELEKAKEPLLHLYKPKEPYTATIVSVERLVGPRAPGETCHVVIDHGGNVPYWEGQSYGVIPPGENPKKPGSPNTVRLYSIASTRYGDSFDGKTASLCVRRAVYYDPETGEEDPSKRGVCSNFLCGSKPGDKVQITGPSGKIMLLPEDDPNATHIMIATGTGVAPYRGYLRRMFMEDVPTFKFGGLAWLFLGVANSDSLLYDEEFTNYLQQYPDNFRYDKALSREQKNKSGGKMYVQDKIEEYSDEIFRLLDGGAHIYFCGLKGMMPGIQDTLKKVAEQRGESWDQKLSQLKKNKQWHVEVY

SEQ ID NO: 24248 - protein, 337 aa, Zea mays subsp. mays
  peptide (1)..(337): Ceres Seq. ID no. 12414249
  misc_feature (186)..(307): Pfam Name: Pfam Description:  Oxidoreductase NAD-binding domain
  misc_feature (1)..(337): NCBI GI NO: 3913653 NR Description: Ferredoxin--NADP reductase
  misc_feature (1)..(337): NCBI GI NO: 34897132 NR Description: ferredoxin-NADP+ reductase [Oryza sativa]
  misc_feature (16)..(337): NCBI GI NO: 1076803 NR Description: ferredoxin-NADP reductase (EC 1
  misc_feature (1)..(337): NCBI GI NO: 3913648 NR Description: Ferredoxin--NADP reductase
  misc_feature (1)..(337): NCBI GI NO: 7433380 NR Description: ferredoxin-NADP reductase (EC 1
  misc_feature (21)..(337): NCBI GI NO: 218163 NR Description: ferredoxin-NADP+ reductase enzyme
  misc_feature (22)..(337): NCBI GI NO: 14719468 NR Description: Chain A
  misc_feature (1)..(337): NCBI GI NO: 3913650 NR Description: Ferredoxin--NADP reductase
  misc_feature (1)..(337): NCBI GI NO: 30691910 NR Description: ferredoxin--NADP
  misc_feature (1)..(337): NCBI GI NO: 18397542 NR Description: ferrodoxin NADP oxidoreductase, putative
MALAWKNRTQQPRRLNKVLCMSVQQASRSKVAVMPVELEKAKEPLLHLYKPKEPYTATIVSVERLVGPRAPGETCHVVIDHGGNVPYWEGQSYGVIPPGENPKKPGSPNTVRLYSIASTRYGDSFDGKTASLCVRRAVYYDPETGEEDPSKRGVCSNFLCGSKPGDKVQITGPSGKIMLLPEDDPNATHIMIATGTGVAPYRGYLRRMFMEDVPTFKFGGLAWLFLGVANSDSLLYDEEFTNYLQQYPDNFRYDKALSREQKNKSGGKMYVQDKIEEYSDEIFRLLDGGAHIYFCGLKGMMPGIQDTLKKVAEQRGESWDQKLSQLKKNKQWHVEVY

SEQ ID NO: 24249 - DNA, 1401 bp, Zea mays subsp. mays
  misc_feature (1)..(1401): Ceres Seq. ID no. 12410655
aactttgggctgtcgccaccagaaagccctcacgagtcctttgcctcctcactccgtcaggctcgtcgccacagggttttgttcctaactttttagcttcaatttttgtcttgaatggcaacacctctggatgttccactggatgatttgattaagagcagagctgggaggggaacaggaagaggcaggggacaaggagggggtcgaggcagaggtgatggccaaaggttggctcgtggttcgtggcgtgggcgtggtactggcaacttccgtgaaaggggacttggggtgtcttcgcggaggccacttggtgttaatacttggtcctcatcatttgctattgccaagtcattcaataaagcaaaggattttgtgtggagacatgatctctttgaggatagcatggtagcagctgggctttctgggatagaatctggaacaaagctttacatttcaaatttgcactatggagtgacaagtgaagatctacaggagcttttttcagaaatgggtcatttgaagcactgtgctgttcattatgacagttatagacacccaactggttcggctgaggtgatattcaccaggagaagtgaagctctcgcagcactgaagcgatataataatatgcgccttgatgggaaggccatgaagattgaagtaataggagcagaattgggtctatcagctgctgccgtaccccagattagtgttgttcctggtgcaagcagaagagggcagagagaagttgttatgatgcctggtggaagtgggtttggacaaggtgcatctggcccatctagttcgcttcctgggtggaagcgtggaggctttgttcgaagaggacaagggcgtgttagttttcctcaaagagggcgagggcaagtgcgcagccgtggccgtggccgtggccgcagtagccttgttcagagccgtggacgtggctatgtgcgcaggggtaatgcagagaaatcagccaaacaattggacaatgaacttgacaactacaactctggtgcgatgaatgtcgactaagttaatccatcgtgacatcattcaatccaacctggaagttggaactatgttgaagctaagcttgttttctgtcggtattctgtcaaatgtgcacacttctgtcatgctctagtggcatcagttgaagattagatattccattattcctactgcaatagtcttgtgatatcagaatttgctgtaattgaatgatgaattatgttttcaaccgttgaaaggtttgctgtcaaaatttcaatattatcctagttattgtcagaattttcagtaggcattagccaaaaagattggtgctgactactggtatatcagaatttgctgtaattgaatgatgaattatgttttcaaccgttgaaaggtttggtg

SEQ ID NO: 24250 - protein, 306 aa, Zea mays subsp. mays
  peptide (1)..(306): Ceres Seq. ID no. 12410656
  misc_feature (111)..(181): Pfam Name: a.k.a. RRM, RBD, or RNP domain Pfam Description: RNA recognition motif.
  misc_feature (1)..(256): NCBI GI NO: 40644804 NR Description: putative DIP2 protein [Triticum aestivum]
  misc_feature (16)..(306): NCBI GI NO: 38175495 NR Description: putative transcriptional coactivator(DIP2)
  misc_feature (1)..(304): NCBI GI NO: 30693141 NR Description: RNA and export factor binding protein, putative
  misc_feature (1)..(304): NCBI GI NO: 9663025 NR Description: DIP2 protein [Arabidopsis thaliana]
  misc_feature (1)..(305): NCBI GI NO: 18408471 NR Description: RNA and export factor binding protein, putative
  misc_feature (1)..(305): NCBI GI NO: 9663023 NR Description: DIP1 protein [Arabidopsis thaliana]
  misc_feature (1)..(305): NCBI GI NO: 25404603 NR Description: hypothetical protein T6J19.1
  misc_feature (72)..(304): NCBI GI NO: 9757981 NR Description: gene_id:K12B20.19~unknown protein
  misc_feature (1)..(303): NCBI GI NO: 30679669 NR Description: RNA and export factor binding protein, putative
  misc_feature (1)..(303): NCBI GI NO: 11358209 NR Description: hypothetical protein T22P11
MATPLDVPLDDLIKSRAGRGTGRGRGQGGGRGRGDGQRLARGSWRGRGTGNFRERGLGVSSRRPLGVNTWSSSFAIAKSFNKAKDFVWRHDLFEDSMVAAGLSGIESGTKLYISNLHYGVTSEDLQELFSEMGHLKHCAVHYDSYRHPTGSAEVIFTRRSEALAALKRYNNMRLDGKAMKIEVIGAELGLSAAAVPQISVVPGASRRGQREVVMMPGGSGFGQGASGPSSSLPGWKRGGFVRRGQGRVSFPQRGRGQVRSRGRGRGRSSLVQSRGRGYVRRGNAEKSAKQLDNELDNYNSGAMNVD

SEQ ID NO: 24251 - protein, 210 aa, Zea mays subsp. mays
  peptide (1)..(210): Ceres Seq. ID no. 12410657
  misc_feature (15)..(85): Pfam Name: a.k.a. RRM, RBD, or RNP domain Pfam Description: RNA recognition motif.
  misc_feature (1)..(160): NCBI GI NO: 40644804 NR Description: putative DIP2 protein [Triticum aestivum]
  misc_feature (1)..(210): NCBI GI NO: 38175495 NR Description: putative transcriptional coactivator(DIP2)
  misc_feature (1)..(208): NCBI GI NO: 30693141 NR Description: RNA and export factor binding protein, putative
  misc_feature (1)..(208): NCBI GI NO: 9663025 NR Description: DIP2 protein [Arabidopsis thaliana]
  misc_feature (1)..(209): NCBI GI NO: 18408471 NR Description: RNA and export factor binding protein, putative
  misc_feature (1)..(209): NCBI GI NO: 9663023 NR Description: DIP1 protein [Arabidopsis thaliana]
  misc_feature (1)..(209): NCBI GI NO: 25404603 NR Description: hypothetical protein T6J19.1
  misc_feature (1)..(208): NCBI GI NO: 9757981 NR Description: gene_id:K12B20.19~unknown protein
  misc_feature (1)..(207): NCBI GI NO: 30679669 NR Description: RNA and export factor binding protein, putative
  misc_feature (1)..(207): NCBI GI NO: 11358209 NR Description: hypothetical protein T22P11
MVAAGLSGIESGTKLYISNLHYGVTSEDLQELFSEMGHLKHCAVHYDSYRHPTGSAEVIFTRRSEALAALKRYNNMRLDGKAMKIEVIGAELGLSAAAVPQISVVPGASRRGQREVVMMPGGSGFGQGASGPSSSLPGWKRGGFVRRGQGRVSFPQRGRGQVRSRGRGRGRSSLVQSRGRGYVRRGNAEKSAKQLDNELDNYNSGAMNVD

SEQ ID NO: 24252 - protein, 175 aa, Zea mays subsp. mays
  peptide (1)..(175): Ceres Seq. ID no. 12410658
  misc_feature (1)..(125): NCBI GI NO: 40644804 NR Description: putative DIP2 protein [Triticum aestivum]
  misc_feature (1)..(175): NCBI GI NO: 38175495 NR Description: putative transcriptional coactivator(DIP2)
  misc_feature (1)..(173): NCBI GI NO: 30693141 NR Description: RNA and export factor binding protein, putative
  misc_feature (1)..(173): NCBI GI NO: 9663025 NR Description: DIP2 protein [Arabidopsis thaliana]
  misc_feature (1)..(174): NCBI GI NO: 18408471 NR Description: RNA and export factor binding protein, putative
  misc_feature (1)..(174): NCBI GI NO: 9663023 NR Description: DIP1 protein [Arabidopsis thaliana]
  misc_feature (1)..(174): NCBI GI NO: 25404603 NR Description: hypothetical protein T6J19.1
  misc_feature (1)..(173): NCBI GI NO: 9757981 NR Description: gene_id:K12B20.19~unknown protein
  misc_feature (1)..(172): NCBI GI NO: 30679669 NR Description: RNA and export factor binding protein, putative
  misc_feature (1)..(172): NCBI GI NO: 11358209 NR Description: hypothetical protein T22P11
MGHLKHCAVHYDSYRHPTGSAEVIFTRRSEALAALKRYNNMRLDGKAMKIEVIGAELGLSAAAVPQISVVPGASRRGQREVVMMPGGSGFGQGASGPSSSLPGWKRGGFVRRGQGRVSFPQRGRGQVRSRGRGRGRSSLVQSRGRGYVRRGNAEKSAKQLDNELDNYNSGAMNVD

SEQ ID NO: 24253 - DNA, 1911 bp, Zea mays subsp. mays
  misc_feature (1)..(1911): Ceres Seq. ID no. 13492653
atcccacgccccctcggcgctgcgcctggacccggcacctacctcccccctccccacctcgccgccggcgggtggagtcgggctggagcagccgctctcctctgttacccccctaaccccctataaagaaaaaaaaaaaaaaacagagagagagagcgagcgaccggcggctcggcagccatggggcacggcgtcagctgcgcccgcaccggcgacgagcacgactacttccgcgcggcgcaggtcggggacctcgaggccctggacgcgctcctcgacgccgacccctctctcgcccgccgcgccacgctctacgaccgcctctccgcgctccacatcgccgccgcgaatggccgcctcgaggtgctgtcaatggtcttggatcacggggtgccgccggacgtggtgaatcggcacaagcagacgccgctgatgctcgcggcgatgcacggcaagactgactgcgtgctgaagctcctgcaggccggcgccaatatcctcatgttcgattcccagcacgggcggacctgcctgcaccacgcgtcctacttcggccacgtcggctgcctgcaggccatcctcacggcggcgcggaccacgccggtggccgactcatggggtttcgcccggttcgtcaacgtgagggacgaccacggcgccacgccgctccacctcgccgccaggcagggccgccccggctgcgtgcaggcgctgctggagaacggcgccatcgtctccgctttgaccggctcatacgggtttcctggtagcacagtcgctgcacctcgccgctcgcagcgggagcctggattgcacccggaagctgctcgcctggggagcggatcgtctccggagggattcagcagggaggatcccttacgccgtggcgctgaagcgcaaccacgaggcgtgcgcagcgctgctgaacccgtcggcggcggagcccatggtgtggccgtccccgctcaagttcatcagcgagctggagccggaggccaaggcgctcctggaagcggcgctgacggaagccaacagggagagggaggagaagatcctcaggggcaccaagcactctccgcctcctcccacctgggaccacgcgagcgacgccgccgacgccgacgccatcgacgacgcgtcctcagatgccagcgccagcgacgcggagctgtgctgcatctgcttcgaccaggcgtgcaccatggaggtgcaggactgcgggcaccagatgtgcgcgccgtgcacgctcgcgctgtgctgccacagcaagcccgacccggtgactctggcgctgccgtcgccagcctgcccgttctgccgcggcagcatctcgcggctgctcctggtggcccgggcaagcagcgacgacgcggacaccgagaagtcggcggcggcggcagcgggctgcctcctccccgcagctcgtccggcggcggtcccggcggtcgcacaacctcagcgacggcggcagcagcagcttcaaggggctgtcgtccgccgtggccggttccttctccaagatcgggcgcgggtcgagccggacgatggccgacagcgacggctgcggcgtggacaagcccgagcacgacccgtgatcggcattggatcctgcgcatgtggagccgagcgcggggccattgcggacatccaatcgaatccaagccaagcgtgactgcttgctgcgaaaataaccgcatccttttcttcttcttctccccatgtccctgtctgtcaatcctattcttgggcgtgccaggatttgttcacctggccattgccgtattccattgtcaccgaccggctatagtatatagtactagattccatttccaaaaaaaaaaaaaaaaaaaaaaaaaaaaaaaaaaaaaaagaaaaaaaaaaaaaaaaaacggcacgagaagccggcacgag

SEQ ID NO: 24254 - protein, 577 aa, Zea mays subsp. mays
  peptide (1)..(577): Ceres Seq. ID no. 13492654
  misc_feature (158)..(190): Pfam Name: Pfam Description:  Ankyrin repeat
  misc_feature (1)..(198): NCBI GI NO: 14279688 NR Description: receptor-like kinase Xa21-binding protein 3
  misc_feature (1)..(198): NCBI GI NO: 34906062 NR Description: putative receptor-like kinase Xa21-binding protein3
  misc_feature (1)..(198): NCBI GI NO: 30684032 NR Description: RING zinc finger ankyrin protein -related
  misc_feature (35)..(198): NCBI GI NO: 25408016 NR Description: probable RING zinc finger ankyrin protein
  misc_feature (12)..(183): NCBI GI NO: 25408016 NR Description: probable RING zinc finger ankyrin protein
  misc_feature (12)..(183): NCBI GI NO: 30684032 NR Description: RING zinc finger ankyrin protein -related
  misc_feature (1)..(198): NCBI GI NO: 16226319 NR Description: At2g28840/F8N16.13 [Arabidopsis thaliana]
  misc_feature (1)..(144): NCBI GI NO: 22122921 NR Description: hypothetical protein
  misc_feature (150)..(201): NCBI GI NO: 22122921 NR Description: hypothetical protein
  misc_feature (1)..(199): NCBI GI NO: 15240746 NR Description: expressed protein [Arabidopsis thaliana]
MGHGVSCARTGDEHDYFRAAQVGDLEALDALLDADPSLARRATLYDRLSALHIAAANGRLEVLSMVLDHGVPPDVVNRHKQTPLMLAAMHGKTDCVLKLLQAGANILMFDSQHGRTCLHHASYFGHVGCLQAILTAARTTPVADSWGFARFVNVRDDHGATPLHLAARQGRPGCVQALLENGAIVSALTGSYGFPGSTVAAPRRSQREPGLHPEAARLGSGSSPEGFSREDPLRRGAEAQPRGVRSAAEPVGGGAHGVAVPAQVHQRAGAGGQGAPGSGADGSQQGEGGEDPQGHQALSASSHLGPRERRRRRRRHRRRVLRCQRQRRGAVLHLLRPGVHHGGAGLRAPDVRAVHARAVLPQQARPGDSGAAVASLPVLPRQHLAAAPGGPGKQRRRGHREVGGGGSGLPPPRSSSGGGPGGRTTSATAAAAASRGCRPPWPVPSPRSGAGRAGRWPTATAAAWTSPSTTRDRHWILRMWSRARGHCGHPIESKPSVTACCENNRILFFFFSPCPCLSILFLGVPGFVHLAIAVFHCHRPAIVYSTRFHFQKKKKKKKKKKKKRKKKKKNGTRSRHE

SEQ ID NO: 24255 - protein, 513 aa, Zea mays subsp. mays
  peptide (1)..(513): Ceres Seq. ID no. 13492655
  misc_feature (94)..(126): Pfam Name: Pfam Description:  Ankyrin repeat
  misc_feature (1)..(134): NCBI GI NO: 14279688 NR Description: receptor-like kinase Xa21-binding protein 3
  misc_feature (1)..(134): NCBI GI NO: 34906062 NR Description: putative receptor-like kinase Xa21-binding protein3
  misc_feature (1)..(134): NCBI GI NO: 30684032 NR Description: RING zinc finger ankyrin protein -related
  misc_feature (1)..(134): NCBI GI NO: 25408016 NR Description: probable RING zinc finger ankyrin protein
  misc_feature (1)..(119): NCBI GI NO: 25408016 NR Description: probable RING zinc finger ankyrin protein
  misc_feature (1)..(119): NCBI GI NO: 30684032 NR Description: RING zinc finger ankyrin protein -related
  misc_feature (1)..(134): NCBI GI NO: 16226319 NR Description: At2g28840/F8N16.13 [Arabidopsis thaliana]
  misc_feature (1)..(80): NCBI GI NO: 22122921 NR Description: hypothetical protein
  misc_feature (86)..(137): NCBI GI NO: 22122921 NR Description: hypothetical protein
  misc_feature (1)..(135): NCBI GI NO: 15240746 NR Description: expressed protein [Arabidopsis thaliana]
MVLDHGVPPDVVNRHKQTPLMLAAMHGKTDCVLKLLQAGANILMFDSQHGRTCLHHASYFGHVGCLQAILTAARTTPVADSWGFARFVNVRDDHGATPLHLAARQGRPGCVQALLENGAIVSALTGSYGFPGSTVAAPRRSQREPGLHPEAARLGSGSSPEGFSREDPLRRGAEAQPRGVRSAAEPVGGGAHGVAVPAQVHQRAGAGGQGAPGSGADGSQQGEGGEDPQGHQALSASSHLGPRERRRRRRRHRRRVLRCQRQRRGAVLHLLRPGVHHGGAGLRAPDVRAVHARAVLPQQARPGDSGAAVASLPVLPRQHLAAAPGGPGKQRRRGHREVGGGGSGLPPPRSSSGGGPGGRTTSATAAAAASRGCRPPWPVPSPRSGAGRAGRWPTATAAAWTSPSTTRDRHWILRMWSRARGHCGHPIESKPSVTACCENNRILFFFFSPCPCLSILFLGVPGFVHLAIAVFHCHRPAIVYSTRFHFQKKKKKKKKKKKKRKKKKKNGTRSRHE

SEQ ID NO: 24256 - protein, 493 aa, Zea mays subsp. mays
  peptide (1)..(493): Ceres Seq. ID no. 13492656
  misc_feature (74)..(106): Pfam Name: Pfam Description:  Ankyrin repeat
  misc_feature (1)..(114): NCBI GI NO: 14279688 NR Description: receptor-like kinase Xa21-binding protein 3
  misc_feature (1)..(114): NCBI GI NO: 34906062 NR Description: putative receptor-like kinase Xa21-binding protein3
  misc_feature (1)..(114): NCBI GI NO: 30684032 NR Description: RING zinc finger ankyrin protein -related
  misc_feature (1)..(114): NCBI GI NO: 25408016 NR Description: probable RING zinc finger ankyrin protein
  misc_feature (1)..(99): NCBI GI NO: 25408016 NR Description: probable RING zinc finger ankyrin protein
  misc_feature (1)..(99): NCBI GI NO: 30684032 NR Description: RING zinc finger ankyrin protein -related
  misc_feature (1)..(114): NCBI GI NO: 16226319 NR Description: At2g28840/F8N16.13 [Arabidopsis thaliana]
  misc_feature (1)..(60): NCBI GI NO: 22122921 NR Description: hypothetical protein
  misc_feature (66)..(117): NCBI GI NO: 22122921 NR Description: hypothetical protein
  misc_feature (1)..(115): NCBI GI NO: 15240746 NR Description: expressed protein [Arabidopsis thaliana]
MLAAMHGKTDCVLKLLQAGANILMFDSQHGRTCLHHASYFGHVGCLQAILTAARTTPVADSWGFARFVNVRDDHGATPLHLAARQGRPGCVQALLENGAIVSALTGSYGFPGSTVAAPRRSQREPGLHPEAARLGSGSSPEGFSREDPLRRGAEAQPRGVRSAAEPVGGGAHGVAVPAQVHQRAGAGGQGAPGSGADGSQQGEGGEDPQGHQALSASSHLGPRERRRRRRRHRRRVLRCQRQRRGAVLHLLRPGVHHGGAGLRAPDVRAVHARAVLPQQARPGDSGAAVASLPVLPRQHLAAAPGGPGKQRRRGHREVGGGGSGLPPPRSSSGGGPGGRTTSATAAAAASRGCRPPWPVPSPRSGAGRAGRWPTATAAAWTSPSTTRDRHWILRMWSRARGHCGHPIESKPSVTACCENNRILFFFFSPCPCLSILFLGVPGFVHLAIAVFHCHRPAIVYSTRFHFQKKKKKKKKKKKKRKKKKKNGTRSRHE

SEQ ID NO: 24257 - DNA, 1570 bp, Zea mays subsp. mays
  misc_feature (1)..(1570): Ceres Seq. ID no. 12352072
aatcgaaaacctgaacacctctctctcgccacctcacctgaacacctgctcgccccacccattccctccgcatggctggcctccgccctcgcgccgccgtagcttcgaattgcctccgaccggcaattcggcgaggcgcccgtcacgcatcgggggcagcgtttggatactacacctgctggcagctacagggaaatattttgaattggagatctatatccgcaactaaaaagctctggagtacagtagctagtgcaaagcctgatgattctaaatttgaaagtgtggatgcaccacttgagccccaaacatgtgaaggcagcttcttgtgtggtctgttgaagaacctgccacacatttttctagctgcagcagagaagcagttgcaagaactgtcttaccaaagagaagagagcttaaaacgctgggagcatagtattggttctaaagaggattgccttcacaggaggattgctgaactcaaggaacacgagtgtcagagagctattgaggacatcatgtacatgttgattgtttataagttttttaagattgaagtaccaatggttcccaatctatcgaaactcatcagcaacagaaggttacagttatggccaccaagggagacagatcttgaatccattcatggacctgaggtgctagagctaattagggaacacttgaccagcattatcagatgggtgcacagaaatggtcccaagatcaatcgttcaacacttcgcattaaaagactgcaatttgttcggatatattctgcttcaataatgtacggatacttcctgaaatctgtcagcatcaggcatcgattggagctgacccttactcgctcagaaggagtgcctccgattcaatttctgaatgctcaactcacaaataaacaagagcaggaaggggccattggaggctctagtgaagcttcgtcttctttgagaccaagttctgtggtcaacccacacgacttgaggggctacataatgggattcgatccaaagaccttgcagctttgcgcgaagctgcgctcatctgaagcttctaatctcatcgagaggcacagctgggctctttttgggggcgacatggaactctcccaggagaatgatgaagcggttatacttgatccttcatccctgaaaagactactgcttgaagccattgcattcggttccttcctctgggacgtcgaggattatgtggacgagatcttcaagttatcggatagctgaagaaactgctacagaaagctcctacagcctttgtggttgtggatagatgaagccagctgaaaagaggagctgcagttcttttctctagatttgtatatatggctggctgttatgtacatgcatatacatcttcatctcaagtttgctttttggagggtacacaagtttttttttgtaagttatgtcatcttacactagtacacaatagcatcagcctatcaacgcagaggacgtgtgacataattttatggtcccaaaataactgggcattttgctaatctagaacgacattattttggaatgaaatgagttgtatcagcatttgt

SEQ ID NO: 24258 - protein, 390 aa, Zea mays subsp. mays
  peptide (1)..(390): Ceres Seq. ID no. 12352073
  misc_feature (67)..(262): Pfam Name: DUF760 Pfam Description: Protein of unknown function
  misc_feature (67)..(262): NCBI GI NO: 15239021 NR Description: putative protein; protein id: At5g48590
  misc_feature (304)..(390): NCBI GI NO: 15239021 NR Description: putative protein; protein id: At5g48590
  misc_feature (49)..(340): NCBI GI NO: 18397912 NR Description: expressed protein; protein id: At3g07310
  misc_feature (60)..(382): NCBI GI NO: 17064820 NR Description: Unknown protein [Arabidopsis thaliana]
  misc_feature (60)..(382): NCBI GI NO: 18401645 NR Description: expressed protein; protein id: At3g17800
  misc_feature (5)..(382): NCBI GI NO: 28301943 NR Description: unknown protein
  misc_feature (1)..(390): NCBI GI NO: 32489097 NR Description: OSJNBa0093F12.3
  misc_feature (58)..(382): NCBI GI NO: 18398302 NR Description: expressed protein; protein id: At1g32160
  misc_feature (60)..(340): NCBI GI NO: 15221185 NR Description: unknown protein; protein id: At1g48450
  misc_feature (146)..(382): NCBI GI NO: 13561930 NR Description: unknown [Brassica napus]
MAGLRPRAAVASNCLRPAIRRGARHASGAAFGYYTCWQLQGNILNWRSISATKKLWSTVASAKPDDSKFESVDAPLEPQTCEGSFLCGLLKNLPHIFLAAAEKQLQELSYQREESLKRWEHSIGSKEDCLHRRIAELKEHECQRAIEDIMYMLIVYKFFKIEVPMVPNLSKLISNRRLQLWPPRETDLESIHGPEVLELIREHLTSIIRWVHRNGPKINRSTLRIKRLQFVRIYSASIMYGYFLKSVSIRHRLELTLTRSEGVPPIQFLNAQLTNKQEQEGAIGGSSEASSSLRPSSVVNPHDLRGYIMGFDPKTLQLCAKLRSSEASNLIERHSWALFGGDMELSQENDEAVILDPSSLKRLLLEAIAFGSFLWDVEDYVDEIFKLSDS

SEQ ID NO: 24259 - protein, 241 aa, Zea mays subsp. mays
  peptide (1)..(241): Ceres Seq. ID no. 12352074
  misc_feature (1)..(113): Pfam Name: DUF760 Pfam Description: Protein of unknown function
  misc_feature (1)..(113): NCBI GI NO: 15239021 NR Description: putative protein; protein id: At5g48590
  misc_feature (155)..(241): NCBI GI NO: 15239021 NR Description: putative protein; protein id: At5g48590
  misc_feature (1)..(191): NCBI GI NO: 18397912 NR Description: expressed protein; protein id: At3g07310
  misc_feature (1)..(233): NCBI GI NO: 17064820 NR Description: Unknown protein [Arabidopsis thaliana]
  misc_feature (1)..(233): NCBI GI NO: 18401645 NR Description: expressed protein; protein id: At3g17800
  misc_feature (1)..(233): NCBI GI NO: 28301943 NR Description: unknown protein
  misc_feature (1)..(241): NCBI GI NO: 32489097 NR Description: OSJNBa0093F12.3
  misc_feature (1)..(233): NCBI GI NO: 18398302 NR Description: expressed protein; protein id: At1g32160
  misc_feature (1)..(191): NCBI GI NO: 15221185 NR Description: unknown protein; protein id: At1g48450
  misc_feature (1)..(233): NCBI GI NO: 13561930 NR Description: unknown [Brassica napus]
MYMLIVYKFFKIEVPMVPNLSKLISNRRLQLWPPRETDLESIHGPEVLELIREHLTSIIRWVHRNGPKINRSTLRIKRLQFVRIYSASIMYGYFLKSVSIRHRLELTLTRSEGVPPIQFLNAQLTNKQEQEGAIGGSSEASSSLRPSSVVNPHDLRGYIMGFDPKTLQLCAKLRSSEASNLIERHSWALFGGDMELSQENDEAVILDPSSLKRLLLEAIAFGSFLWDVEDYVDEIFKLSDS

SEQ ID NO: 24260 - protein, 239 aa, Zea mays subsp. mays
  peptide (1)..(239): Ceres Seq. ID no. 12352075
  misc_feature (1)..(111): Pfam Name: DUF760 Pfam Description: Protein of unknown function
  misc_feature (1)..(111): NCBI GI NO: 15239021 NR Description: putative protein; protein id: At5g48590
  misc_feature (153)..(239): NCBI GI NO: 15239021 NR Description: putative protein; protein id: At5g48590
  misc_feature (1)..(189): NCBI GI NO: 18397912 NR Description: expressed protein; protein id: At3g07310
  misc_feature (1)..(231): NCBI GI NO: 17064820 NR Description: Unknown protein [Arabidopsis thaliana]
  misc_feature (1)..(231): NCBI GI NO: 18401645 NR Description: expressed protein; protein id: At3g17800
  misc_feature (1)..(231): NCBI GI NO: 28301943 NR Description: unknown protein
  misc_feature (1)..(239): NCBI GI NO: 32489097 NR Description: OSJNBa0093F12.3
  misc_feature (1)..(231): NCBI GI NO: 18398302 NR Description: expressed protein; protein id: At1g32160
  misc_feature (1)..(189): NCBI GI NO: 15221185 NR Description: unknown protein; protein id: At1g48450
  misc_feature (1)..(231): NCBI GI NO: 13561930 NR Description: unknown [Brassica napus]
MLIVYKFFKIEVPMVPNLSKLISNRRLQLWPPRETDLESIHGPEVLELIREHLTSIIRWVHRNGPKINRSTLRIKRLQFVRIYSASIMYGYFLKSVSIRHRLELTLTRSEGVPPIQFLNAQLTNKQEQEGAIGGSSEASSSLRPSSVVNPHDLRGYIMGFDPKTLQLCAKLRSSEASNLIERHSWALFGGDMELSQENDEAVILDPSSLKRLLLEAIAFGSFLWDVEDYVDEIFKLSDS

SEQ ID NO: 24261 - DNA, 1084 bp, Zea mays subsp. mays
  misc_feature (1)..(1084): Ceres Seq. ID no. 12350953
gaaaagaaagcattagtatatttgcatttgcttcgttctccaccgccagcgaggtgctcgtgcggtgtgtatatatatatgcacggggttgcattgcacccagctgcagatgatatataccttaagccagcagaaaattaggtataggcgtagagactagagagcgagcgagctcagtccgtgttcagtcgagagagctcgtttagcttggccatcgacgagctagcagagcagtagctaggatagatccatggcgaacgcgggcatgaagccggtggccggactcctgctggtgctcaacttgtgcatgtacgtcatcgtggcggcggtgggcggctgggccatcaaccacgccatcaactacggcttcttcatcggcaccggcctgcacctcccggctcacttctccccgatcaacttccccatcgggaacgcggcgaccgggttcttcgtcatcttcgccgtgatcgccggggtggtcggcgcgggctcggcgctggcggggctcaaccacgtccgcgcctggagcaccgagagcctgccggcggcggcctccgccgggttcattgcgtggacgctcaccctgctcgccatggggttggcggtgaaggagattgaactgcacggcaggaatgccagactgatatgcatggagtccttcaccatcatcctgtcggcgacgcagctcttctacctgctcgccattcacggaggcttgagataaaatcgatcaccgtgttggccggaggcactgaggcagtgactgatgaatggagacttgtcgtcggttccgtacgtgtgtgtctgtcggattgagtgggcgtgcatcggattcacggggcagcgcgtgtactatatatgtgacttcattcggttcgctgtgtcgttgtgggctgggctgtcttccaagatgcatggagaggcagtacgtatgtacacgtacgtgtatctatctgttcgtgtgtgtgcgcccgctgctgcttgatttatcttgtgcgtccgattggttacgtcattccgtgtcattcattgattgtttcggagatggagagtcaatatgtctacacgtcatgatgacgtggtg

SEQ ID NO: 24262 - protein, 157 aa, Zea mays subsp. mays
  peptide (1)..(157): Ceres Seq. ID no. 12350954
  misc_feature (15)..(155): Pfam Name: Pfam Description:  AWPM-19-like family
  misc_feature (1)..(155): NCBI GI NO: 34911480 NR Description: putative plasma membrane associated protein
  misc_feature (1)..(154): NCBI GI NO: 15218953 NR Description: plasma membrane associated protein, putative
  misc_feature (6)..(140): NCBI GI NO: 34904644 NR Description: putative ABA-induced plasma membrane protein
  misc_feature (134)..(157): NCBI GI NO: 34904644 NR Description: putative ABA-induced plasma membrane protein
  misc_feature (43)..(154): NCBI GI NO: 15237455 NR Description: putative protein; protein id: At5g46530.1
  misc_feature (1)..(156): NCBI GI NO: 15239619 NR Description: plasma membrane associated protein -like
  misc_feature (1)..(156): NCBI GI NO: 6851373 NR Description: plasma membrane associated protein
  misc_feature (1)..(156): NCBI GI NO: 7489659 NR Description: ABA-induced plasma membrane protein PM 19 - wheat
  misc_feature (1)..(156): NCBI GI NO: 4097340 NR Description: hydrophobic LEA-like protein [Oryza sativa]
  misc_feature (1)..(155): NCBI GI NO: 18390408 NR Description: expressed protein; protein id: At1g04560
MANAGMKPVAGLLLVLNLCMYVIVAAVGGWAINHAINYGFFIGTGLHLPAHFSPINFPIGNAATGFFVIFAVIAGVVGAGSALAGLNHVRAWSTESLPAAASAGFIAWTLTLLAMGLAVKEIELHGRNARLICMESFTIILSATQLFYLLAIHGGLR

SEQ ID NO: 24263 - protein, 152 aa, Zea mays subsp. mays
  peptide (1)..(152): Ceres Seq. ID no. 12350955
  misc_feature (10)..(150): Pfam Name: Pfam Description:  AWPM-19-like family
  misc_feature (1)..(150): NCBI GI NO: 34911480 NR Description: putative plasma membrane associated protein
  misc_feature (1)..(149): NCBI GI NO: 15218953 NR Description: plasma membrane associated protein, putative
  misc_feature (1)..(135): NCBI GI NO: 34904644 NR Description: putative ABA-induced plasma membrane protein
  misc_feature (129)..(152): NCBI GI NO: 34904644 NR Description: putative ABA-induced plasma membrane protein
  misc_feature (38)..(149): NCBI GI NO: 15237455 NR Description: putative protein; protein id: At5g46530.1
  misc_feature (1)..(151): NCBI GI NO: 15239619 NR Description: plasma membrane associated protein -like
  misc_feature (1)..(151): NCBI GI NO: 6851373 NR Description: plasma membrane associated protein
  misc_feature (1)..(151): NCBI GI NO: 7489659 NR Description: ABA-induced plasma membrane protein PM 19 - wheat
  misc_feature (1)..(151): NCBI GI NO: 4097340 NR Description: hydrophobic LEA-like protein [Oryza sativa]
  misc_feature (1)..(150): NCBI GI NO: 18390408 NR Description: expressed protein; protein id: At1g04560
MKPVAGLLLVLNLCMYVIVAAVGGWAINHAINYGFFIGTGLHLPAHFSPINFPIGNAATGFFVIFAVIAGVVGAGSALAGLNHVRAWSTESLPAAASAGFIAWTLTLLAMGLAVKEIELHGRNARLICMESFTIILSATQLFYLLAIHGGLR

SEQ ID NO: 24264 - protein, 138 aa, Zea mays subsp. mays
  peptide (1)..(138): Ceres Seq. ID no. 12350956
  misc_feature (1)..(136): Pfam Name: Pfam Description:  AWPM-19-like family
  misc_feature (1)..(136): NCBI GI NO: 34911480 NR Description: putative plasma membrane associated protein
  misc_feature (1)..(135): NCBI GI NO: 15218953 NR Description: plasma membrane associated protein, putative
  misc_feature (1)..(121): NCBI GI NO: 34904644 NR Description: putative ABA-induced plasma membrane protein
  misc_feature (115)..(138): NCBI GI NO: 34904644 NR Description: putative ABA-induced plasma membrane protein
  misc_feature (24)..(135): NCBI GI NO: 15237455 NR Description: putative protein; protein id: At5g46530.1
  misc_feature (1)..(137): NCBI GI NO: 15239619 NR Description: plasma membrane associated protein -like
  misc_feature (1)..(137): NCBI GI NO: 6851373 NR Description: plasma membrane associated protein
  misc_feature (1)..(137): NCBI GI NO: 7489659 NR Description: ABA-induced plasma membrane protein PM 19 - wheat
  misc_feature (1)..(137): NCBI GI NO: 4097340 NR Description: hydrophobic LEA-like protein [Oryza sativa]
  misc_feature (1)..(136): NCBI GI NO: 18390408 NR Description: expressed protein; protein id: At1g04560
MYVIVAAVGGWAINHAINYGFFIGTGLHLPAHFSPINFPIGNAATGFFVIFAVIAGVVGAGSALAGLNHVRAWSTESLPAAASAGFIAWTLTLLAMGLAVKEIELHGRNARLICMESFTIILSATQLFYLLAIHGGLR

SEQ ID NO: 24265 - DNA, 1328 bp, Zea mays subsp. mays
  misc_feature (1)..(1328): Ceres Seq. ID no. 12410649
accaaagccctagctcggctcacttgctttcctggccgccgtctcctccgcggctcttaacgccgcatccactcgccggttcttaacgccgcccgccgcctcctccgcggctctgccctcccgccgctgccgccgcctacccaggaatcaggatgcgggtgaagaagcggtcgaagcaccgcaaagcggtcaagttctacgccacatgcttcggcttccgcgagccctataaagtcctcatcgacggcaccttcgtccaccacctcctcacccagcgcctcctcccggccgacgaggctctccgagacctcctctcggcctccaggacgccagccctcttcacctccaagtgcatcctcgcagagctcagacgtctcggcaagtcacatgccgaatcatttgacgccgcgcagcttctcaccacaaccaagtgtgagcatgacaaggtggtcggtgcagttaactgtgtccagtcactgataggtgataaaaatcctgaacatttcttcgttgccacccaggatcctggtctccgagaaaacttacgagagattcctggggttcctgtgatatatggtctgaagaactctttatgcatagaacggccctctatgcagcaacgcaagtttgctcaattggatgaggagaagcgtctcaatatggatatctctgaatacaagaagttactgaaggctgcatcagaaggaaagacaattgccagtgaaaatggaagtggcgaagaacaacatgagatgcctattagttctcttgtaaaaaatgcacttcatgttactgataaaaccaagtttaagaggaacaaagcaaagggtccaaacccactctcctgtaagaagaagaaaccaaagctccccacggctattcaaaagcaggcaggtacggctgatggcgaggcaaagaggaagagggttcggaagcggaagagaggccaaaaagataacaagcaattggaggctgcgaactagaaggatgggcttgcgtaggaagtttcagtgctcttgctagacatccatcctgactccggagcaagtcaactatggaggagttcctttctcccacacaggattcagtatgccatgccataccatgctcattatatgttgaagatgcttcttgcaacgtaacacttgattggttatggtgatcgtgaatccttctctagaggatgttattggatgtttcttttgtcgcaagatgcaactttaaatgttttttgaagcaaaagtttgatgccagtagctctaccaggttcttgcttgccctgctacatgtgtgatcccattcttcaattgtaagatgtgtttgttgag

SEQ ID NO: 24266 - protein, 276 aa, Zea mays subsp. mays
  peptide (1)..(276): Ceres Seq. ID no. 12410650
  misc_feature (62)..(152): Pfam Name: Pfam Description:  Protein of unknown function, DUF652
  misc_feature (1)..(267): NCBI GI NO: 30686117 NR Description: expressed protein [Arabidopsis thaliana]
  misc_feature (1)..(259): NCBI GI NO: 25408336 NR Description: hypothetical protein At2g34570
  misc_feature (1)..(263): NCBI GI NO: 19075891 NR Description: conserved protein
  misc_feature (6)..(238): NCBI GI NO: 21313442 NR Description: RIKEN cDNA D530033C11 [Mus musculus]
  misc_feature (6)..(238): NCBI GI NO: 26335161 NR Description: unnamed protein product [Mus musculus]
  misc_feature (6)..(218): NCBI GI NO: 14150118 NR Description: hypothetical protein MGC14595 [Homo sapiens]
  misc_feature (1)..(248): NCBI GI NO: 24580927 NR Description: CG17652-PA [Drosophila melanogaster]
  misc_feature (1)..(236): NCBI GI NO: 6324577 NR Description: Protein required for cell viability; Yor004wp
  misc_feature (1)..(226): NCBI GI NO: 17552478 NR Description: Protein required for cell viability like (26.3 kD)
  misc_feature (4)..(227): NCBI GI NO: 39586538 NR Description: Hypothetical protein CBG21174
MRVKKRSKHRKAVKFYATCFGFREPYKVLIDGTFVHHLLTQRLLPADEALRDLLSASRTPALFTSKCILAELRRLGKSHAESFDAAQLLTTTKCEHDKVVGAVNCVQSLIGDKNPEHFFVATQDPGLRENLREIPGVPVIYGLKNSLCIERPSMQQRKFAQLDEEKRLNMDISEYKKLLKAASEGKTIASENGSGEEQHEMPISSLVKNALHVTDKTKFKRNKAKGPNPLSCKKKKPKLPTAIQKQAGTADGEAKRKRVRKRKRGQKDNKQLEAAN

SEQ ID NO: 24267 - DNA, 1271 bp, Zea mays subsp. mays
  misc_feature (1)..(1271): Ceres Seq. ID no. 12369155
accgagttcgtcggtcgtcacctgatattttttccgacggacacacaagcatatatacatacacgccgacatagggatgatggcttcctctagtcctcagcgtgcagccggcgccgccgtcgccggcgtgctgctggtggcggctgccgccctgtgctcgtgcggcgccatggcgcagctgaccgcggactactacgactgcacatgccctgacgcctacaacatcgtgaagcaggtcctgatcgaggcgcacaagtccgacgtgcgcatctacgccagcctcacccgcctccacttccacgactgcttcgtccagggctgcgatggctcggtgctcctggacgccgttccgggggtggccaactccactgagaagctggcgccggccaacaacaactcggcgcgagggttcccggtggtggacaaagtgaaggcggcgctggaggacgcctgccccggcgtcgtctcctgcgccgacatcctcgccctcgccgcagagatctcggtcgaactgtccggaggaccaaagtgggcagtgcttcttgggaggctagacagcaagaaggccgacttcaagagcgcggagaacctgccgtcgccgttcgacaacctgacggtgctggagcagaagttcgcggccgtgggcctccacaccgtggacctggtggccctctcgggagctcacacgttcgggcgggtccagtgccagttcgtcacggggcggctgtacaacttcagcggcacgaaccggccggaccccacgctcaactccggctaccgggcgttcctggcccagaggtgcccccagaacggcagcccctcggccctcaacgacctggaccccacgacgccgaacctgttcgacaaccactactacaccaacctggaggtgaaccggggcttcctcggctcggaccaggagctcaagtcggcgccgcaggcgcagggcgtcaccgcgcccgtcgtcgaccagttcgccaccagccaggccgccttcttcagcagcttcgcgcagtccatgatcaacatgggcaacatccagccgctcaccgacccggccaagggagaggtccgctgcgactgccgggtggctaatgatgattaatccacgacgacgacgtgtgtagttagaaacggacgtgaatgcatgtgcatgtgcccggccgggtcgttagtacaccgacaagcaagagtgcactagcgctatggatcggactatatggtgcacaactgcacatgcatgcatataatatcagggcctcgtcgtttcg

SEQ ID NO: 24268 - protein, 342 aa, Zea mays subsp. mays
  peptide (1)..(342): Ceres Seq. ID no. 12369156
  misc_feature (51)..(303): Pfam Name: Pfam Description:  Peroxidase
  misc_feature (2)..(340): NCBI GI NO: 37530466 NR Description: putative peroxidase
  misc_feature (15)..(340): NCBI GI NO: 5002348 NR Description: peroxidase 5 precursor [Phaseolus vulgaris]
  misc_feature (1)..(342): NCBI GI NO: 21594792 NR Description: peroxidase [Arabidopsis thaliana]
  misc_feature (1)..(342): NCBI GI NO: 15240141 NR Description: peroxidase, putative; protein id: At5g06730
  misc_feature (31)..(342): NCBI GI NO: 2129513 NR Description: peroxidase (EC 1
  misc_feature (13)..(340): NCBI GI NO: 8546851 NR Description: peroxidase [Ipomoea batatas]
  misc_feature (31)..(341): NCBI GI NO: 1279654 NR Description: peroxidase
  misc_feature (10)..(340): NCBI GI NO: 20330758 NR Description: Putative peroxidase
  misc_feature (19)..(340): NCBI GI NO: 21593262 NR Description: peroxidase [Arabidopsis thaliana]
  misc_feature (34)..(337): NCBI GI NO: 1730490 NR Description: Peroxidase A2
MMASSSPQRAAGAAVAGVLLVAAAALCSCGAMAQLTADYYDCTCPDAYNIVKQVLIEAHKSDVRIYASLTRLHFHDCFVQGCDGSVLLDAVPGVANSTEKLAPANNNSARGFPVVDKVKAALEDACPGVVSCADILALAAEISVELSGGPKWAVLLGRLDSKKADFKSAENLPSPFDNLTVLEQKFAAVGLHTVDLVALSGAHTFGRVQCQFVTGRLYNFSGTNRPDPTLNSGYRAFLAQRCPQNGSPSALNDLDPTTPNLFDNHYYTNLEVNRGFLGSDQELKSAPQAQGVTAPVVDQFATSQAAFFSSFAQSMINMGNIQPLTDPAKGEVRCDCRVANDD

SEQ ID NO: 24269 - protein, 341 aa, Zea mays subsp. mays
  peptide (1)..(341): Ceres Seq. ID no. 12369157
  misc_feature (50)..(302): Pfam Name: Pfam Description:  Peroxidase
  misc_feature (1)..(339): NCBI GI NO: 37530466 NR Description: putative peroxidase
  misc_feature (14)..(339): NCBI GI NO: 5002348 NR Description: peroxidase 5 precursor [Phaseolus vulgaris]
  misc_feature (1)..(341): NCBI GI NO: 21594792 NR Description: peroxidase [Arabidopsis thaliana]
  misc_feature (1)..(341): NCBI GI NO: 15240141 NR Description: peroxidase, putative; protein id: At5g06730
  misc_feature (30)..(341): NCBI GI NO: 2129513 NR Description: peroxidase (EC 1
  misc_feature (12)..(339): NCBI GI NO: 8546851 NR Description: peroxidase [Ipomoea batatas]
  misc_feature (30)..(340): NCBI GI NO: 1279654 NR Description: peroxidase
  misc_feature (9)..(339): NCBI GI NO: 20330758 NR Description: Putative peroxidase
  misc_feature (18)..(339): NCBI GI NO: 21593262 NR Description: peroxidase [Arabidopsis thaliana]
  misc_feature (33)..(336): NCBI GI NO: 1730490 NR Description: Peroxidase A2
MASSSPQRAAGAAVAGVLLVAAAALCSCGAMAQLTADYYDCTCPDAYNIVKQVLIEAHKSDVRIYASLTRLHFHDCFVQGCDGSVLLDAVPGVANSTEKLAPANNNSARGFPVVDKVKAALEDACPGVVSCADILALAAEISVELSGGPKWAVLLGRLDSKKADFKSAENLPSPFDNLTVLEQKFAAVGLHTVDLVALSGAHTFGRVQCQFVTGRLYNFSGTNRPDPTLNSGYRAFLAQRCPQNGSPSALNDLDPTTPNLFDNHYYTNLEVNRGFLGSDQELKSAPQAQGVTAPVVDQFATSQAAFFSSFAQSMINMGNIQPLTDPAKGEVRCDCRVANDD

SEQ ID NO: 24270 - protein, 311 aa, Zea mays subsp. mays
  peptide (1)..(311): Ceres Seq. ID no. 12369158
  misc_feature (20)..(272): Pfam Name: Pfam Description:  Peroxidase
  misc_feature (1)..(309): NCBI GI NO: 37530466 NR Description: putative peroxidase
  misc_feature (1)..(309): NCBI GI NO: 5002348 NR Description: peroxidase 5 precursor [Phaseolus vulgaris]
  misc_feature (1)..(311): NCBI GI NO: 21594792 NR Description: peroxidase [Arabidopsis thaliana]
  misc_feature (1)..(311): NCBI GI NO: 15240141 NR Description: peroxidase, putative; protein id: At5g06730
  misc_feature (1)..(311): NCBI GI NO: 2129513 NR Description: peroxidase (EC 1
  misc_feature (1)..(309): NCBI GI NO: 8546851 NR Description: peroxidase [Ipomoea batatas]
  misc_feature (1)..(310): NCBI GI NO: 1279654 NR Description: peroxidase
  misc_feature (1)..(309): NCBI GI NO: 20330758 NR Description: Putative peroxidase
  misc_feature (1)..(309): NCBI GI NO: 21593262 NR Description: peroxidase [Arabidopsis thaliana]
  misc_feature (3)..(306): NCBI GI NO: 1730490 NR Description: Peroxidase A2
MAQLTADYYDCTCPDAYNIVKQVLIEAHKSDVRIYASLTRLHFHDCFVQGCDGSVLLDAVPGVANSTEKLAPANNNSARGFPVVDKVKAALEDACPGVVSCADILALAAEISVELSGGPKWAVLLGRLDSKKADFKSAENLPSPFDNLTVLEQKFAAVGLHTVDLVALSGAHTFGRVQCQFVTGRLYNFSGTNRPDPTLNSGYRAFLAQRCPQNGSPSALNDLDPTTPNLFDNHYYTNLEVNRGFLGSDQELKSAPQAQGVTAPVVDQFATSQAAFFSSFAQSMINMGNIQPLTDPAKGEVRCDCRVANDD

SEQ ID NO: 24271 - DNA, 1502 bp, Zea mays subsp. mays
  misc_feature (1)..(1502): Ceres Seq. ID no. 12357279
attatagccacggccggccggtggacgacagcaccacaccacctccaactacccgagaccatcgacgagcatcttcctgcatctgcaatggctgccgctaccgtgtccgtcccccgcatcaagctgggctcccaggggctagaggtctccgcgcagggcctcggctgcatgggcatgtccgccttctacggtccgcccaaacccgagcctgacatgatcaagctcatccaccacgccgtcgccgccggggtcaccctccttgacacctccgacatgtacggcccgcacaccaacgagatcctgctaggcaaggcgcttcaaggcggtgtaaaggagaaggtcgagctggccaccaagtttgccgtctccttcgccgacggcaagcgcgagatccgcggtgacccggcgtatgtacgggcagcctgcgaagccagcctcaagcggctcggcatcgactgcatcgacctctactaccagcaccgcatcgacaagaaggtgcccatcgaggtcacgattggtgaactcaagaagctagtggaagaaggaaaggttaagtacattgggttatccgaagcatctgcatcaacaatccgaagagctcacgcagtccatcctattactgcagtacagcttgaatggtcattatggtctagagatgcggaagaagatataattcccacttgcagagaacttggaattggaattgtagcttacagtccactaggcagagggtttttttgtagtggagcaaaactagttgactcactgtcagagcaggacttccgcaagcatatgcctagacttcaaccagagaatattgtcaagaatgctaagatattcgagcatgtgaatgcaatggcagctaaaaaaggatgcacaccatcacagctagcattggcatgggttcaccatcagggaaacgatgtttgccccatacctggaacaacaaaaatcgagaacttcaaccagaacgtgggggcgctttctgtgaagttgacaccagatgagatggccgaactcgagtcctgtgctgctgcaggtgaaatcttgggtgaccgttatcctcaaatggccaacacctggaaggactctgagaccccgccattgtcttcttggaaatctgagtagccaatctggtgtctcttcaattctgccaccgtcacattggtgtatctccaaattgtcggactgcagaagatactcaggtgcactttgcaaaagcgtccatatgatgtgcttgccttttgcaagctatgatgtttggtacttggtgtgtattgcatgcctcaatttgtatcaagagtatttacccatgagtatagcttgaaggttaaaaccactggttcgacgaataaccatatgcatttgtatcgagagtatttaccatgagtagcaaactgaattttgtaataatagtcaaaagtgtgattgtaaaatgtacttagggaatgtggtacgctatattagcgtgcaaacataagtatagccagttaagcccctcc

SEQ ID NO: 24272 - protein, 375 aa, Zea mays subsp. mays
  peptide (1)..(375): Ceres Seq. ID no. 12357280
  misc_feature (28)..(375): NCBI GI NO: 38344997 NR Description: OSJNBa0008A08.11
  misc_feature (32)..(374): NCBI GI NO: 18406861 NR Description: auxin-induced protein, putative
  misc_feature (32)..(374): NCBI GI NO: 6562980 NR Description: auxin-induced atb2 [Arabidopsis thaliana]
  misc_feature (30)..(283): NCBI GI NO: 1352461 NR Description: IN2-2 PROTEIN
  misc_feature (32)..(374): NCBI GI NO: 30696459 NR Description: aldo/keto reductase family [Arabidopsis thaliana]
  misc_feature (32)..(374): NCBI GI NO: 15219786 NR Description: auxin-induced protein, putative
  misc_feature (32)..(374): NCBI GI NO: 25316216 NR Description: hypothetical protein F8A5.24
  misc_feature (37)..(374): NCBI GI NO: 7447933 NR Description: auxin-induced protein - common sunflower
  misc_feature (30)..(374): NCBI GI NO: 15220214 NR Description: putative auxin-induced protein
  misc_feature (30)..(325): NCBI GI NO: 728744 NR Description: AUXIN-INDUCED PROTEIN PCNT115
IIATAGRWTTAPHHLQLPETIDEHLPASAMAAATVSVPRIKLGSQGLEVSAQGLGCMGMSAFYGPPKPEPDMIKLIHHAVAAGVTLLDTSDMYGPHTNEILLGKALQGGVKEKVELATKFAVSFADGKREIRGDPAYVRAACEASLKRLGIDCIDLYYQHRIDKKVPIEVTIGELKKLVEEGKVKYIGLSEASASTIRRAHAVHPITAVQLEWSLWSRDAEEDIIPTCRELGIGIVAYSPLGRGFFCSGAKLVDSLSEQDFRKHMPRLQPENIVKNAKIFEHVNAMAAKKGCTPSQLALAWVHHQGNDVCPIPGTTKIENFNQNVGALSVKLTPDEMAELESCAAAGEILGDRYPQMANTWKDSETPPLSSWKSE

SEQ ID NO: 24273 - protein, 346 aa, Zea mays subsp. mays
  peptide (1)..(346): Ceres Seq. ID no. 12357281
  misc_feature (1)..(346): NCBI GI NO: 38344997 NR Description: OSJNBa0008A08.11
  misc_feature (3)..(345): NCBI GI NO: 18406861 NR Description: auxin-induced protein, putative
  misc_feature (3)..(345): NCBI GI NO: 6562980 NR Description: auxin-induced atb2 [Arabidopsis thaliana]
  misc_feature (1)..(254): NCBI GI NO: 1352461 NR Description: IN2-2 PROTEIN
  misc_feature (3)..(345): NCBI GI NO: 30696459 NR Description: aldo/keto reductase family [Arabidopsis thaliana]
  misc_feature (3)..(345): NCBI GI NO: 15219786 NR Description: auxin-induced protein, putative
  misc_feature (3)..(345): NCBI GI NO: 25316216 NR Description: hypothetical protein F8A5.24
  misc_feature (8)..(345): NCBI GI NO: 7447933 NR Description: auxin-induced protein - common sunflower
  misc_feature (1)..(345): NCBI GI NO: 15220214 NR Description: putative auxin-induced protein
  misc_feature (1)..(296): NCBI GI NO: 728744 NR Description: AUXIN-INDUCED PROTEIN PCNT115
MAAATVSVPRIKLGSQGLEVSAQGLGCMGMSAFYGPPKPEPDMIKLIHHAVAAGVTLLDTSDMYGPHTNEILLGKALQGGVKEKVELATKFAVSFADGKREIRGDPAYVRAACEASLKRLGIDCIDLYYQHRIDKKVPIEVTIGELKKLVEEGKVKYIGLSEASASTIRRAHAVHPITAVQLEWSLWSRDAEEDIIPTCRELGIGIVAYSPLGRGFFCSGAKLVDSLSEQDFRKHMPRLQPENIVKNAKIFEHVNAMAAKKGCTPSQLALAWVHHQGNDVCPIPGTTKIENFNQNVGALSVKLTPDEMAELESCAAAGEILGDRYPQMANTWKDSETPPLSSWKSE

SEQ ID NO: 24274 - protein, 319 aa, Zea mays subsp. mays
  peptide (1)..(319): Ceres Seq. ID no. 12357282
  misc_feature (1)..(319): NCBI GI NO: 38344997 NR Description: OSJNBa0008A08.11
  misc_feature (1)..(318): NCBI GI NO: 18406861 NR Description: auxin-induced protein, putative
  misc_feature (1)..(318): NCBI GI NO: 6562980 NR Description: auxin-induced atb2 [Arabidopsis thaliana]
  misc_feature (1)..(227): NCBI GI NO: 1352461 NR Description: IN2-2 PROTEIN
  misc_feature (1)..(318): NCBI GI NO: 30696459 NR Description: aldo/keto reductase family [Arabidopsis thaliana]
  misc_feature (1)..(318): NCBI GI NO: 15219786 NR Description: auxin-induced protein, putative
  misc_feature (1)..(318): NCBI GI NO: 25316216 NR Description: hypothetical protein F8A5.24
  misc_feature (1)..(318): NCBI GI NO: 7447933 NR Description: auxin-induced protein - common sunflower
  misc_feature (1)..(318): NCBI GI NO: 15220214 NR Description: putative auxin-induced protein
  misc_feature (1)..(269): NCBI GI NO: 728744 NR Description: AUXIN-INDUCED PROTEIN PCNT115
MGMSAFYGPPKPEPDMIKLIHHAVAAGVTLLDTSDMYGPHTNEILLGKALQGGVKEKVELATKFAVSFADGKREIRGDPAYVRAACEASLKRLGIDCIDLYYQHRIDKKVPIEVTIGELKKLVEEGKVKYIGLSEASASTIRRAHAVHPITAVQLEWSLWSRDAEEDIIPTCRELGIGIVAYSPLGRGFFCSGAKLVDSLSEQDFRKHMPRLQPENIVKNAKIFEHVNAMAAKKGCTPSQLALAWVHHQGNDVCPIPGTTKIENFNQNVGALSVKLTPDEMAELESCAAAGEILGDRYPQMANTWKDSETPPLSSWKSE

SEQ ID NO: 24275 - DNA, 1461 bp, Zea mays subsp. mays
  misc_feature (1)..(1461): Ceres Seq. ID no. 12414242
aaaaggggatctcagggtcagagcgcatcagcacacagacagcgcggtgctctccagtccccaccaattaagctcagggtctagtgagcagccagagagcctcgtcccgttcccacccccattgcttgctctgactgctccgccgtgcgtgcgtcacccgcgctcgggaggtgagtggtttggttgcgcagccaactgccggcccggcaccgtaccgcttgttcgcttctgaggttgtgcggagtggttgctggcctggccgtggccggcataccgataaaggcgagagacaaggcgttgtctcactctcatccgtcgtccgtctcgtctcggctttctcgcctcctcgggcggcagcggtgttccactcccatcgcgtcgggacatagaaagggggagcgcgggcgacacgcgagcgttagttgccatggacgcgcccttcttccacgagctcaggcggcaggcctcctcctacctcaccggcaagatccgctccgcgcggctggcgctcaccgacgtcaccccgacgcagctcatgacggaggaggcgacgaacggggacgcgtcgccgccgaacgtcaagacgatgggcctcatagcccggcaggcgttcgaggtcgacgagtacgtcaggatcacggacatcctgcacaggcgcttcgcgagcttcgaccccaggcaggggcaggggcagtggcagtggcgggaggcgtacaaggcgctgctcctcctggaccacctcctcacgcacgggccccgcagcgtcgcggtcgagttccagaaggacagggaggccatcgagcggatggccaccttccaacacatcgacgagagaggcttcaactggggacggacggtgacgagcaagtcggagcgcgtgctcaagctgctggagcgcggcccgttcctggaggaggagcgcgagcgggcacgcaagatcgcgcgcgagatcaagggcttcggcagcttcaacctcagcagcgcctcccacgccgcgccacagccaccaccaggtgacgagggaagccgcggctacggccggagcaactcgcagttcgagcagcggtggaggcacaaggacggcgacgacagcgacaaggagaatctgatccagagcccggagccagcacgggtcgcgcgggaagtcgaggccgagccggaggagccgcaccaccacccgttccacgggctcgggcaaaaacagcggccggaggcgatgctgctcctgagccagtgacgggatcagtcggttcgtgtcatggtgatatgaaaaagaaccgtgtgctctgctcgactcaactagcttttctccattcctcaaggctgcaggggtcggaggcagtgatgggatcagtcagtactttactgacactgcttggtgcaccatgcatgagaactttgatgtctcatgtagtagtcatgtctgcttcgccttgtaaataattctatgcttcagttcgc

SEQ ID NO: 24276 - protein, 269 aa, Zea mays subsp. mays
  peptide (1)..(269): Ceres Seq. ID no. 12414243
  misc_feature (31)..(137): Pfam Name: Pfam Description:  ENTH domain
  misc_feature (1)..(137): NCBI GI NO: 34908158 NR Description: P0408C03.22
  misc_feature (138)..(269): NCBI GI NO: 34908158 NR Description: P0408C03.22
  misc_feature (1)..(262): NCBI GI NO: 15231451 NR Description: putative protein; protein id: At3g46540
  misc_feature (1)..(262): NCBI GI NO: 21536910 NR Description: unknown [Arabidopsis thaliana]
  misc_feature (1)..(187): NCBI GI NO: 11994320 NR Description: gene_id:MLM24.8~unknown protein
  misc_feature (1)..(200): NCBI GI NO: 22329424 NR Description: hypothetical protein; protein id: At1g08670
  misc_feature (91)..(200): NCBI GI NO: 7485982 NR Description: hypothetical protein F22O13
  misc_feature (1)..(37): NCBI GI NO: 7485982 NR Description: hypothetical protein F22O13
  misc_feature (1)..(78): NCBI GI NO: 15229428 NR Description: hypothetical protein; protein id: At3g23350.1
  misc_feature (21)..(262): NCBI GI NO: 6323235 NR Description: epsin N-terminal homology-containing protein
MDAPFFHELRRQASSYLTGKIRSARLALTDVTPTQLMTEEATNGDASPPNVKTMGLIARQAFEVDEYVRITDILHRRFASFDPRQGQGQWQWREAYKALLLLDHLLTHGPRSVAVEFQKDREAIERMATFQHIDERGFNWGRTVTSKSERVLKLLERGPFLEEERERARKIAREIKGFGSFNLSSASHAAPQPPPGDEGSRGYGRSNSQFEQRWRHKDGDDSDKENLIQSPEPARVAREVEAEPEEPHHHPFHGLGQKQRPEAMLLLSQ

SEQ ID NO: 24277 - protein, 233 aa, Zea mays subsp. mays
  peptide (1)..(233): Ceres Seq. ID no. 12414244
  misc_feature (1)..(101): Pfam Name: Pfam Description:  ENTH domain
  misc_feature (1)..(101): NCBI GI NO: 34908158 NR Description: P0408C03.22
  misc_feature (102)..(233): NCBI GI NO: 34908158 NR Description: P0408C03.22
  misc_feature (1)..(226): NCBI GI NO: 15231451 NR Description: putative protein; protein id: At3g46540
  misc_feature (1)..(226): NCBI GI NO: 21536910 NR Description: unknown [Arabidopsis thaliana]
  misc_feature (1)..(151): NCBI GI NO: 11994320 NR Description: gene_id:MLM24.8~unknown protein
  misc_feature (1)..(164): NCBI GI NO: 22329424 NR Description: hypothetical protein; protein id: At1g08670
  misc_feature (55)..(164): NCBI GI NO: 7485982 NR Description: hypothetical protein F22O13
  misc_feature (1)..(42): NCBI GI NO: 15229428 NR Description: hypothetical protein; protein id: At3g23350.1
  misc_feature (1)..(226): NCBI GI NO: 6323235 NR Description: epsin N-terminal homology-containing protein
  misc_feature (1)..(210): NCBI GI NO: 6322585 NR Description: epsin N-terminal homology-containing protein
MTEEATNGDASPPNVKTMGLIARQAFEVDEYVRITDILHRRFASFDPRQGQGQWQWREAYKALLLLDHLLTHGPRSVAVEFQKDREAIERMATFQHIDERGFNWGRTVTSKSERVLKLLERGPFLEEERERARKIAREIKGFGSFNLSSASHAAPQPPPGDEGSRGYGRSNSQFEQRWRHKDGDDSDKENLIQSPEPARVAREVEAEPEEPHHHPFHGLGQKQRPEAMLLLSQ

SEQ ID NO: 24278 - protein, 216 aa, Zea mays subsp. mays
  peptide (1)..(216): Ceres Seq. ID no. 12414245
  misc_feature (1)..(84): Pfam Name: Pfam Description:  ENTH domain
  misc_feature (1)..(84): NCBI GI NO: 34908158 NR Description: P0408C03.22
  misc_feature (85)..(216): NCBI GI NO: 34908158 NR Description: P0408C03.22
  misc_feature (1)..(209): NCBI GI NO: 15231451 NR Description: putative protein; protein id: At3g46540
  misc_feature (1)..(209): NCBI GI NO: 21536910 NR Description: unknown [Arabidopsis thaliana]
  misc_feature (1)..(134): NCBI GI NO: 11994320 NR Description: gene_id:MLM24.8~unknown protein
  misc_feature (1)..(147): NCBI GI NO: 22329424 NR Description: hypothetical protein; protein id: At1g08670
  misc_feature (38)..(147): NCBI GI NO: 7485982 NR Description: hypothetical protein F22O13
  misc_feature (1)..(25): NCBI GI NO: 15229428 NR Description: hypothetical protein; protein id: At3g23350.1
  misc_feature (1)..(209): NCBI GI NO: 6323235 NR Description: epsin N-terminal homology-containing protein
  misc_feature (1)..(193): NCBI GI NO: 6322585 NR Description: epsin N-terminal homology-containing protein
MGLIARQAFEVDEYVRITDILHRRFASFDPRQGQGQWQWREAYKALLLLDHLLTHGPRSVAVEFQKDREAIERMATFQHIDERGFNWGRTVTSKSERVLKLLERGPFLEEERERARKIAREIKGFGSFNLSSASHAAPQPPPGDEGSRGYGRSNSQFEQRWRHKDGDDSDKENLIQSPEPARVAREVEAEPEEPHHHPFHGLGQKQRPEAMLLLSQ

SEQ ID NO: 24279 - DNA, 902 bp, Zea mays subsp. mays
  misc_feature (1)..(902): Ceres Seq. ID no. 12387230
atacacagcaaagcctcaaaacctgatcatcagagaaacgaaaaggaagaggagcgtgggagaaaaaacaaaagaaaggaaaagagatatagccctgagaagaatgtcccttacaactgatgaactcaaggccaaggccgaggtatactacggtgacgagatctgccatctgtgtacccagctcctgctcagggaagcaggcctccccaatggcctgcttccattgaaggacctaatcgagtgcggctatgtccaggaaactggattcgtgtggctgaagcaaagcaacagggttgaccacatcttccatagtctaggaaggctggtctcttacggcacggagatcaccggctatgccgagaagggcaggatcaggaaggtcaaagggataaagaccagggagctcatgctgtgggtcccggtggaggagattgctcttgatgatgatccagcgactgggaagcttgtctgcaagagcattgctgggattaccaaaaccttccctgcatcggctttccatatcccggagaaggagaacaatgtgaaggcgaactgtgctgcactgaagccggtggtcctcatggagagagctccacgagttgttaaaaacagctgatccgccttcaattctgcatccactggtatttggagttgacgtacggccgccatatcagcccttaatcctacgtatttaaataatggttgaactagtgtcctttactattttccgttcatgtacttgggaaatgataacacaaagttcttccgcctatatatatactgcggttgtacgattgccctggcatctatataatattgtcctgtaaggtaaccacccaacttcctttcatgtactacgtagctctatattactaatacaaagcatgttgtggacttctatg

SEQ ID NO: 24280 - protein, 204 aa, Zea mays subsp. mays
  peptide (1)..(204): Ceres Seq. ID no. 12387231
  misc_feature (37)..(178): Pfam Name: Pfam Description:  Protein of unknown function, DUF538
  misc_feature (35)..(178): NCBI GI NO: 18405887 NR Description: expressed protein; protein id: At1g56580
  misc_feature (35)..(177): NCBI GI NO: 18391006 NR Description: expressed protein; protein id: At1g09310
  misc_feature (52)..(172): NCBI GI NO: 34911878 NR Description: OSJNBb0032K15.16
  misc_feature (35)..(172): NCBI GI NO: 34915378 NR Description: hypothetical protein~similar to Oryza sativachromosome 7
  misc_feature (35)..(172): NCBI GI NO: 34915416 NR Description: hypothetical protein~similar to Arabidopsisthaliana chromosome1
  misc_feature (46)..(180): NCBI GI NO: 15233705 NR Description: putative protein; protein id: At4g24130.1
  misc_feature (35)..(176): NCBI GI NO: 34915376 NR Description: hypothetical protein~similar to Oryza sativachromosome 7
  misc_feature (35)..(176): NCBI GI NO: 33146557 NR Description: unknown protein
  misc_feature (43)..(176): NCBI GI NO: 34915410 NR Description: hypothetical protein~similar to Arabidopsisthaliana chromosome1
  misc_feature (35)..(172): NCBI GI NO: 34915418 NR Description: hypothetical protein~similar to Arabidopsisthaliana chromosome1
YTAKPQNLIIRETKRKRSVGEKTKERKRDIALRRMSLTTDELKAKAEVYYGDEICHLCTQLLLREAGLPNGLLPLKDLIECGYVQETGFVWLKQSNRVDHIFHSLGRLVSYGTEITGYAEKGRIRKVKGIKTRELMLWVPVEEIALDDDPATGKLVCKSIAGITKTFPASAFHIPEKENNVKANCAALKPVVLMERAPRVVKNS

SEQ ID NO: 24281 - protein, 170 aa, Zea mays subsp. mays
  peptide (1)..(170): Ceres Seq. ID no. 12387232
  misc_feature (3)..(144): Pfam Name: Pfam Description:  Protein of unknown function, DUF538
  misc_feature (1)..(144): NCBI GI NO: 18405887 NR Description: expressed protein; protein id: At1g56580
  misc_feature (1)..(143): NCBI GI NO: 18391006 NR Description: expressed protein; protein id: At1g09310
  misc_feature (18)..(138): NCBI GI NO: 34911878 NR Description: OSJNBb0032K15.16
  misc_feature (1)..(138): NCBI GI NO: 34915378 NR Description: hypothetical protein~similar to Oryza sativachromosome 7
  misc_feature (1)..(138): NCBI GI NO: 34915416 NR Description: hypothetical protein~similar to Arabidopsisthaliana chromosome1
  misc_feature (12)..(146): NCBI GI NO: 15233705 NR Description: putative protein; protein id: At4g24130.1
  misc_feature (1)..(142): NCBI GI NO: 34915376 NR Description: hypothetical protein~similar to Oryza sativachromosome 7
  misc_feature (1)..(142): NCBI GI NO: 33146557 NR Description: unknown protein
  misc_feature (9)..(142): NCBI GI NO: 34915410 NR Description: hypothetical protein~similar to Arabidopsisthaliana chromosome1
  misc_feature (1)..(138): NCBI GI NO: 34915418 NR Description: hypothetical protein~similar to Arabidopsisthaliana chromosome1
MSLTTDELKAKAEVYYGDEICHLCTQLLLREAGLPNGLLPLKDLIECGYVQETGFVWLKQSNRVDHIFHSLGRLVSYGTEITGYAEKGRIRKVKGIKTRELMLWVPVEEIALDDDPATGKLVCKSIAGITKTFPASAFHIPEKENNVKANCAALKPVVLMERAPRVVKNS

SEQ ID NO: 24282 - DNA, 1843 bp, Zea mays subsp. mays
  misc_feature (1)..(1843): Ceres Seq. ID no. 12410645
aggaagccatccgctccctctcgaacattggatcctatgctctcctctccctgctcgcagtcagggcacagggactgcctccggagaccggagcaggccgcaagcgtccaggttcgagacgccagcacgctctcgcagtacagcagcattatcagggagcgtgccgtgggagtgggaggttgcctcaggtgcggagcagtcgccggcggcgaccatcggtgtctgagatgaaggagagaggcggctccagggcggcagtggacgagcgctacgcgcagtggaagtcgctcatccccgttctctacgactggtttgccaaccacaacctcgtttggccatccctctcctgccggtgggggccacagtttgagaaagctacctacaagaatcgtcaacgcctttacctatctgaacagaccgatgggagtgtgcctaatactctggttatcgcaaactgtgaagttgtgaaaccaagggttgcagctgctgaacatatctcgcagtttaacgaggaagcacgatcaccttttgtaaagaagtacaagactatagttcatcctggtgaagttaacagaatcagggagcttccacagaacagtaagatcatagccacacacactgacagtccagatgtacttgtttgggatgttgaagcacaaccaaatagacatgctgtcttaggagcttctgaatctcgtcctgatctgatattaacgggacaccaggaaaatgcagaatttgcgcttgccatgtgtccagcagaaccatatgtcctgtcaggaggaaaggacaaatttgttgtcttgtggagcatccaagaccacatatctgcccttggggattcctcgtcttctcccggagcatctggcagcaagcagtctggcaaaattgcaaatgaaaaggagagtcctaaagttgatcctagaggtatattccatggccatgacagtactgttgaagatgttcagttctgcccttccagtgcgcaggagttttgtagtgtgggtgatgatgcttgtcttattctgtgggatgctcgaactggcactgacccagctgttaaggttgagaaagctcacagtggagatgttcattgtgttgattggaatccccttgatgttaactatatcttaactggttctgccgataactctgtccgaatgtgggatcgtcgcaatctgggttcgggaggagctggttctccaattcacaaatttgagggccataaagctgctgttctttgtgttcagtggtcacctgacagagcatctgtttttggaagttctgcagaagatggtttcttaaatgtttgggaccatgagaaggttgggaagaagaaaaattctaatgtcccagctgggcttttctttcagcatgctggtcatagggataagatcgtagacttccactggaattcgtcagatccttggacaattgtcagtgtctcagatgatggtgagagcactggtggaggtggaacactgcagatatggcgaatgagtgatttgatctaccgcccagaggatgaagttcttacagagctggagaatttcaaggctcacctggccagttgcgctccgaggaattgagtcatgtgaaaactctgagtaggttatgtagtttcctggccctaagtagtttcctggccataagtatggccccaattgacattggatctgtcttctcatgctcctagagctgtacccttcgaggtgcttgtgcctttgtgagcttgtgttgaaccatgttgtatgactaaatagtccgcaaacgagtcagctggatggctaatctgtaggccaactattgggatattgttggatattatcaacaaccggttcag

SEQ ID NO: 24283 - protein, 528 aa, Zea mays subsp. mays
  peptide (1)..(528): Ceres Seq. ID no. 12410646
  misc_feature (76)..(528): NCBI GI NO: 21898564 NR Description: nucleosome/chromatin assembly factor group C
  misc_feature (76)..(528): NCBI GI NO: 9716495 NR Description: WD-repeat protein RBAP1 [Zea mays]
  misc_feature (76)..(528): NCBI GI NO: 14550114 NR Description: nucleosome/chromatin assembly factor C [Zea mays]
  misc_feature (76)..(528): NCBI GI NO: 34910476 NR Description: putative WD-repeat protein RBAP1
  misc_feature (58)..(527): NCBI GI NO: 30680701 NR Description: WD-40 repeat protein (MSI4) [Arabidopsis thaliana]
  misc_feature (76)..(527): NCBI GI NO: 20197482 NR Description: putative WD-40 repeat protein, MSI4
  misc_feature (76)..(527): NCBI GI NO: 2599092 NR Description: WD-40 repeat protein MSI4 [Arabidopsis thaliana]
  misc_feature (77)..(526): NCBI GI NO: 5701955 NR Description: X1 protein [Silene latifolia]
  misc_feature (77)..(526): NCBI GI NO: 17902570 NR Description: putative WD-repeat protein [Silene latifolia]
  misc_feature (77)..(526): NCBI GI NO: 5701951 NR Description: Y1 protein [Silene latifolia]
EAIRSLSNIGSYALLSLLAVRAQGLPPETGAGRKRPGSRRQHALAVQQHYQGACRGSGRLPQVRSSRRRRPSVSEMKERGGSRAAVDERYAQWKSLIPVLYDWFANHNLVWPSLSCRWGPQFEKATYKNRQRLYLSEQTDGSVPNTLVIANCEVVKPRVAAAEHISQFNEEARSPFVKKYKTIVHPGEVNRIRELPQNSKIIATHTDSPDVLVWDVEAQPNRHAVLGASESRPDLILTGHQENAEFALAMCPAEPYVLSGGKDKFVVLWSIQDHISALGDSSSSPGASGSKQSGKIANEKESPKVDPRGIFHGHDSTVEDVQFCPSSAQEFCSVGDDACLILWDARTGTDPAVKVEKAHSGDVHCVDWNPLDVNYILTGSADNSVRMWDRRNLGSGGAGSPIHKFEGHKAAVLCVQWSPDRASVFGSSAEDGFLNVWDHEKVGKKKNSNVPAGLFFQHAGHRDKIVDFHWNSSDPWTIVSVSDDGESTGGGGTLQIWRMSDLIYRPEDEVLTELENFKAHLASCAPRN

SEQ ID NO: 24284 - protein, 453 aa, Zea mays subsp. mays
  peptide (1)..(453): Ceres Seq. ID no. 12410647
  misc_feature (1)..(453): NCBI GI NO: 21898564 NR Description: nucleosome/chromatin assembly factor group C
  misc_feature (1)..(453): NCBI GI NO: 9716495 NR Description: WD-repeat protein RBAP1 [Zea mays]
  misc_feature (1)..(453): NCBI GI NO: 14550114 NR Description: nucleosome/chromatin assembly factor C [Zea mays]
  misc_feature (1)..(453): NCBI GI NO: 34910476 NR Description: putative WD-repeat protein RBAP1
  misc_feature (1)..(452): NCBI GI NO: 30680701 NR Description: WD-40 repeat protein (MSI4) [Arabidopsis thaliana]
  misc_feature (1)..(452): NCBI GI NO: 20197482 NR Description: putative WD-40 repeat protein, MSI4
  misc_feature (1)..(452): NCBI GI NO: 2599092 NR Description: WD-40 repeat protein MSI4 [Arabidopsis thaliana]
  misc_feature (2)..(451): NCBI GI NO: 5701955 NR Description: X1 protein [Silene latifolia]
  misc_feature (2)..(451): NCBI GI NO: 17902570 NR Description: putative WD-repeat protein [Silene latifolia]
  misc_feature (2)..(451): NCBI GI NO: 5701951 NR Description: Y1 protein [Silene latifolia]
MKERGGSRAAVDERYAQWKSLIPVLYDWFANHNLVWPSLSCRWGPQFEKATYKNRQRLYLSEQTDGSVPNTLVIANCEVVKPRVAAAEHISQFNEEARSPFVKKYKTIVHPGEVNRIRELPQNSKIIATHTDSPDVLVWDVEAQPNRHAVLGASESRPDLILTGHQENAEFALAMCPAEPYVLSGGKDKFVVLWSIQDHISALGDSSSSPGASGSKQSGKIANEKESPKVDPRGIFHGHDSTVEDVQFCPSSAQEFCSVGDDACLILWDARTGTDPAVKVEKAHSGDVHCVDWNPLDVNYILTGSADNSVRMWDRRNLGSGGAGSPIHKFEGHKAAVLCVQWSPDRASVFGSSAEDGFLNVWDHEKVGKKKNSNVPAGLFFQHAGHRDKIVDFHWNSSDPWTIVSVSDDGESTGGGGTLQIWRMSDLIYRPEDEVLTELENFKAHLASCAPRN

SEQ ID NO: 24285 - protein, 279 aa, Zea mays subsp. mays
  peptide (1)..(279): Ceres Seq. ID no. 12410648
  misc_feature (1)..(279): NCBI GI NO: 21898564 NR Description: nucleosome/chromatin assembly factor group C
  misc_feature (1)..(279): NCBI GI NO: 9716495 NR Description: WD-repeat protein RBAP1 [Zea mays]
  misc_feature (1)..(279): NCBI GI NO: 14550114 NR Description: nucleosome/chromatin assembly factor C [Zea mays]
  misc_feature (1)..(279): NCBI GI NO: 34910476 NR Description: putative WD-repeat protein RBAP1
  misc_feature (1)..(278): NCBI GI NO: 30680701 NR Description: WD-40 repeat protein (MSI4) [Arabidopsis thaliana]
  misc_feature (1)..(278): NCBI GI NO: 20197482 NR Description: putative WD-40 repeat protein, MSI4
  misc_feature (1)..(278): NCBI GI NO: 2599092 NR Description: WD-40 repeat protein MSI4 [Arabidopsis thaliana]
  misc_feature (1)..(277): NCBI GI NO: 5701955 NR Description: X1 protein [Silene latifolia]
  misc_feature (1)..(277): NCBI GI NO: 17902570 NR Description: putative WD-repeat protein [Silene latifolia]
  misc_feature (1)..(277): NCBI GI NO: 5701951 NR Description: Y1 protein [Silene latifolia]
MCPAEPYVLSGGKDKFVVLWSIQDHISALGDSSSSPGASGSKQSGKIANEKESPKVDPRGIFHGHDSTVEDVQFCPSSAQEFCSVGDDACLILWDARTGTDPAVKVEKAHSGDVHCVDWNPLDVNYILTGSADNSVRMWDRRNLGSGGAGSPIHKFEGHKAAVLCVQWSPDRASVFGSSAEDGFLNVWDHEKVGKKKNSNVPAGLFFQHAGHRDKIVDFHWNSSDPWTIVSVSDDGESTGGGGTLQIWRMSDLIYRPEDEVLTELENFKAHLASCAPRN

SEQ ID NO: 24286 - DNA, 670 bp, Zea mays subsp. mays
  misc_feature (1)..(670): Ceres Seq. ID no. 12482970
gtttctgttcggacttccgccgcgcttcgccctctcgctccagccgcttcacagcgccgccgctcgcctctccgaccgccgcgagaatgccgttcaagaggttcgtggagatcgggcgcgtggccctggtgaactacggcaaagactatggccgcctcgtcgtcatcgtcgatgtggtcgaccagaacagggcacttgtggacgcggcggcggtgggtacggtggtggccgtggaggcggcggctacggcggtggcgggcgccgtgatggcggtggcggctacggcggtggcggcggctacggtggcggcggcggctacggtggtggtggcggcggctaccgcggtggcaaccgtggcggcggctacggcaactccgacgggaactggaggaactgagcggtggggcccgcgcggccaagttatcctgttcgctaccgtgatgtttaccctagtccagagggtttatcttcgttcgtgtcgtgtttgttgttgcccatctgtgtttttgattgcaaggtcgctctgtgtcagttgttagtgctgtgttcatcctcggtttcagcagacccatgcatcaaacagcatggactgcggatcgatggatgctgttacccccgtcaggctttattctaagttaatcttaaggaaaaaatggtgcttcttggtgct

SEQ ID NO: 24287 - protein, 178 aa, Zea mays subsp. mays
  peptide (1)..(178): Ceres Seq. ID no. 12482971
  misc_feature (35)..(67): Pfam Name: Pfam Description:  KOW motif
  misc_feature (92)..(162): NCBI GI NO: 18103931 NR Description: glycine rich RNA binding protein [Oryza sativa]
  misc_feature (10)..(68): NCBI GI NO: 7488810 NR Description: hydroxyproline-rich glycoprotein 1 - garden pea
FCSDFRRASPSRSSRFTAPPLASPTAARMPFKRFVEIGRVALVNYGKDYGRLVVIVDVVDQNRALVDAAAVGTVVAVEAAATAVAGAVMAVAATAVAAATVAAAATVVVAAATAVATVAAATATPTGTGGTERWGPRGQVILFATVMFTLVQRVYLRSCRVCCCPSVFLIARSLCVSC

SEQ ID NO: 24288 - protein, 150 aa, Zea mays subsp. mays
  peptide (1)..(150): Ceres Seq. ID no. 12482972
  misc_feature (7)..(39): Pfam Name: Pfam Description:  KOW motif
  misc_feature (64)..(134): NCBI GI NO: 18103931 NR Description: glycine rich RNA binding protein [Oryza sativa]
  misc_feature (1)..(40): NCBI GI NO: 7488810 NR Description: hydroxyproline-rich glycoprotein 1 - garden pea
MPFKRFVEIGRVALVNYGKDYGRLVVIVDVVDQNRALVDAAAVGTVVAVEAAATAVAGAVMAVAATAVAAATVAAAATVVVAAATAVATVAAATATPTGTGGTERWGPRGQVILFATVMFTLVQRVYLRSCRVCCCPSVFLIARSLCVSC

SEQ ID NO: 24289 - protein, 131 aa, Zea mays subsp. mays
  peptide (1)..(131): Ceres Seq. ID no. 12482973
  misc_feature (64)..(131): Pfam Name: LMP1 Pfam Description: Herpesvirus latent membrane protein 1
  misc_feature (63)..(131): NCBI GI NO: 82696 NR Description: glycine-rich protein - maize
  misc_feature (64)..(131): NCBI GI NO: 544421 NR Description: Glycine-rich RNA-binding protein 1
  misc_feature (75)..(131): NCBI GI NO: 20257675 NR Description: glycine-rich RNA binding protein [Zea mays]
  misc_feature (75)..(131): NCBI GI NO: 20257699 NR Description: glycine-rich RNA binding protein [Zea mays]
  misc_feature (75)..(131): NCBI GI NO: 20257709 NR Description: glycine-rich RNA binding protein [Zea mays]
  misc_feature (75)..(131): NCBI GI NO: 20257693 NR Description: glycine-rich RNA binding protein [Zea mays]
  misc_feature (75)..(131): NCBI GI NO: 20257683 NR Description: glycine-rich RNA binding protein [Zea mays]
  misc_feature (75)..(131): NCBI GI NO: 20257687 NR Description: glycine-rich RNA binding protein [Zea mays]
  misc_feature (75)..(131): NCBI GI NO: 20257691 NR Description: glycine-rich RNA binding protein [Zea mays]
  misc_feature (64)..(131): NCBI GI NO: 2331131 NR Description: glycine-rich protein [Oryza sativa]
FLFGLPPRFALSLQPLHSAAARLSDRRENAVQEVRGDRARGPGELRQRLWPPRRHRRCGRPEQGTCGRGGGGYGGGRGGGGYGGGGRRDGGGGYGGGGGYGGGGGYGGGGGGYRGGNRGGGYGNSDGNWRN

SEQ ID NO: 24290 - DNA, 1400 bp, Zea mays subsp. mays
  misc_feature (1)..(1400): Ceres Seq. ID no. 13589375
  misc_feature (84)..(84): n is a, c, t, g, unknown, or other
tcttccttgctcactctcctcaccactacctgacctgctcccaagctccctctgcctgcctttataaatcaccggggcagagcnactcactgacacacgccgctgctccaagaaaccaccgccgagcccaaccgcacaagcgcgcgaggcaggagagagagagaggcggggagcaaaacaatggaggggaaagaggaggacgtgcgcctgggcgccaacaagttctcggagcgccagcccatcgggacggcggcgcagggcgccgctgacgacaaggactacaaggagcccccgccggcgccgctgttcgagcccggggagctcaagtcctggtccttctaccgcgcgggcatcgccgagttcgtcgccaccttcctcttcctctacatcaccatcctcaccgtcatgggcgtctccaagtccacctccaagtgcgccaccgtcggcatccagggcatcgcctggtccttcggaggaatgatcttcgcgctcgtctactgcaccgccggcatctccggaggacacatcaacccagctgtgactttcgggctgttcttagccaggaagctgtccctgactagggccctcttctacatcatcatgcaatgcctgggtgccgtctgtggagctggagtggtgaagggcttccagcagggactttacatgggcaacggtggtggcgccaatgttgtcgcacctggctacaccaagggtgatggccttggcgctgagattgttggcaccttcatcctagtctacaccgtcttctcagccaccgatgccaagaggaatgccagggactcccatgttcctatccttgccccactgccaattgggttcgcggtgttcctggtccaccttgccaccatccccattactggcactggcatcaacccagctaggagccttggcgctgccatcatctacaacagggatcacgcctggaacgaccattggatcttctgggtcggccccttcattggcgctgccctggctgccatctaccaccaggtgatcatcagagccatcccgttcaagagcaggtcttaagctgccgtggccgtgccgagacatgccagtccgaagaacgggcgtcttcctgtgatgtcttcttgtctgcccacgcctagtttctctgtcgattcctattcgtcgtctcttcagggctggtgctcactgctgcgccgttctgttaaccgaaacaagaactctgtgtattcctgtaccgagctgtgcatgttttttttttctttccattgtggagaatttaagttattatccatttgctgcaaggtttgccgtctcattttatgcgttgggatgttggcaagaaagggcagatgtcatgtgagaatttaagttaagtgaaatcgattcagggttttcttgatttcagtttc

SEQ ID NO: 24291 - protein, 289 aa, Zea mays subsp. mays
  peptide (1)..(289): Ceres Seq. ID no. 13589376
  misc_feature (47)..(276): Pfam Name: Pfam Description:  Major intrinsic protein
  misc_feature (1)..(289): NCBI GI NO: 4768911 NR Description: plasma membrane MIP protein [Zea mays]
  misc_feature (1)..(289): NCBI GI NO: 13447793 NR Description: plasma membrane integral protein ZmPIP1-3
  misc_feature (1)..(289): NCBI GI NO: 2894534 NR Description: aquaporin [Oryza sativa]
  misc_feature (1)..(289): NCBI GI NO: 2696804 NR Description: water channel protein
  misc_feature (1)..(289): NCBI GI NO: 29650725 NR Description: plasma membrane intrinsic protein [Zea mays]
  misc_feature (1)..(289): NCBI GI NO: 6692753 NR Description: bpw3 [Hordeum vulgare subsp. vulgare]
  misc_feature (1)..(289): NCBI GI NO: 4388774 NR Description: transmembrane protein
  misc_feature (1)..(289): NCBI GI NO: 7441250 NR Description: transmembrane protein - rice
  misc_feature (1)..(289): NCBI GI NO: 542126 NR Description: transmembrane protein - barley
  misc_feature (1)..(288): NCBI GI NO: 13235338 NR Description: plasma membrane intrinsic protein [Zea mays]
MEGKEEDVRLGANKFSERQPIGTAAQGAADDKDYKEPPPAPLFEPGELKSWSFYRAGIAEFVATFLFLYITILTVMGVSKSTSKCATVGIQGIAWSFGGMIFALVYCTAGISGGHINPAVTFGLFLARKLSLTRALFYIIMQCLGAVCGAGVVKGFQQGLYMGNGGGANVVAPGYTKGDGLGAEIVGTFILVYTVFSATDAKRNARDSHVPILAPLPIGFAVFLVHLATIPITGTGINPARSLGAAIIYNRDHAWNDHWIFWVGPFIGAALAAIYHQVIIRAIPFKSRS

SEQ ID NO: 24292 - protein, 214 aa, Zea mays subsp. mays
  peptide (1)..(214): Ceres Seq. ID no. 13589377
  misc_feature (1)..(201): Pfam Name: Pfam Description:  Major intrinsic protein
  misc_feature (1)..(214): NCBI GI NO: 4768911 NR Description: plasma membrane MIP protein [Zea mays]
  misc_feature (1)..(214): NCBI GI NO: 13447793 NR Description: plasma membrane integral protein ZmPIP1-3
  misc_feature (1)..(214): NCBI GI NO: 2894534 NR Description: aquaporin [Oryza sativa]
  misc_feature (1)..(214): NCBI GI NO: 2696804 NR Description: water channel protein
  misc_feature (1)..(214): NCBI GI NO: 29650725 NR Description: plasma membrane intrinsic protein [Zea mays]
  misc_feature (1)..(214): NCBI GI NO: 6692753 NR Description: bpw3 [Hordeum vulgare subsp. vulgare]
  misc_feature (1)..(214): NCBI GI NO: 4388774 NR Description: transmembrane protein
  misc_feature (1)..(214): NCBI GI NO: 7441250 NR Description: transmembrane protein - rice
  misc_feature (1)..(214): NCBI GI NO: 542126 NR Description: transmembrane protein - barley
  misc_feature (1)..(213): NCBI GI NO: 13235338 NR Description: plasma membrane intrinsic protein [Zea mays]
MGVSKSTSKCATVGIQGIAWSFGGMIFALVYCTAGISGGHINPAVTFGLFLARKLSLTRALFYIIMQCLGAVCGAGVVKGFQQGLYMGNGGGANVVAPGYTKGDGLGAEIVGTFILVYTVFSATDAKRNARDSHVPILAPLPIGFAVFLVHLATIPITGTGINPARSLGAAIIYNRDHAWNDHWIFWVGPFIGAALAAIYHQVIIRAIPFKSRS

SEQ ID NO: 24293 - protein, 190 aa, Zea mays subsp. mays
  peptide (1)..(190): Ceres Seq. ID no. 13589378
  misc_feature (1)..(177): Pfam Name: Pfam Description:  Major intrinsic protein
  misc_feature (1)..(190): NCBI GI NO: 4768911 NR Description: plasma membrane MIP protein [Zea mays]
  misc_feature (1)..(190): NCBI GI NO: 13447793 NR Description: plasma membrane integral protein ZmPIP1-3
  misc_feature (1)..(190): NCBI GI NO: 2894534 NR Description: aquaporin [Oryza sativa]
  misc_feature (1)..(190): NCBI GI NO: 2696804 NR Description: water channel protein
  misc_feature (1)..(190): NCBI GI NO: 29650725 NR Description: plasma membrane intrinsic protein [Zea mays]
  misc_feature (1)..(190): NCBI GI NO: 6692753 NR Description: bpw3 [Hordeum vulgare subsp. vulgare]
  misc_feature (1)..(190): NCBI GI NO: 4388774 NR Description: transmembrane protein
  misc_feature (1)..(190): NCBI GI NO: 7441250 NR Description: transmembrane protein - rice
  misc_feature (1)..(190): NCBI GI NO: 542126 NR Description: transmembrane protein - barley
  misc_feature (1)..(189): NCBI GI NO: 13235338 NR Description: plasma membrane intrinsic protein [Zea mays]
MIFALVYCTAGISGGHINPAVTFGLFLARKLSLTRALFYIIMQCLGAVCGAGVVKGFQQGLYMGNGGGANVVAPGYTKGDGLGAEIVGTFILVYTVFSATDAKRNARDSHVPILAPLPIGFAVFLVHLATIPITGTGINPARSLGAAIIYNRDHAWNDHWIFWVGPFIGAALAAIYHQVIIRAIPFKSRS

SEQ ID NO: 24294 - DNA, 1839 bp, Zea mays subsp. mays
  misc_feature (1)..(1839): Ceres Seq. ID no. 12362107
gactggtcactgtgccattgccgccgtccgtcctaggctcctagctagctagctagcaagctccgccgacgacggtacgtcaatcgagctagccctgcccatccactacactaccgcagcggcaagcaatggcgtgcggctctgctaccgccgctcgaccagcagcccgcctctggctgctggcggcggtggtggtggcgacctccttcctcgccgtcgcggcgccgccgggcgcgctggtgacgagcgtcccggggttcggcaacaagcagcagctgccgtcgaagcactacgccgggtacgtgacggtggacgagcggcacggcaggcggctgttctactacctggtggagtcggagcgcgacccggcccgggaccccgtcgtgctctggctcaacggcgggcccggctgctccagcttcgacggcttcgtctacgagcacgggccattcagctttgagccatcaggagggtcagctgggagcctgccaaagcttcatctcaacccttatagctggtctaaggtgtcgagtgtgatatacttggactcccctgccggcgtcgggctttcctactcaaacaacgtttcggactacgagactggcgacttcaagaccgccgccgattcgcacactttcctgctcaagtggttccagctctaccctgagttcttggcaaatccgttctacatagccggagagtcgtacgctggcgtttatgtccctaccctttcaagcgaagtcgtcaaaggaatccacaaaggagtgaagccagttataaactttaagggctacatggtcggcaatggtgtgtgcgacaccgtctttgatggtaatgctcttgtgccgtttgcgcacgggatggctctcatttcagagagtatatacaaggaagccagcactgcatgtcaagggaattactggaactctagcagtgcaaaatgcgacgaggcgctgtcaaaagtcgagacagaaatcgacggattaaatatctacgacatccttgagccatgttaccacgccccagctgataccaaacaagcagcagtgaccccacaggcacagagtactagcgagctgcctcagagtttcaaagacctcggcgtgaccagcaacaagcctctccctgtaaggacaagaatgcacggacgggcgtggcctttgagagctccggtaagagacggccgcgttccgtcgtggcaggagctggcggctgatgtagcttcgacttccagtggagttccgtgtatgagcgatgaggttgcgacagcgtggctaaacaacaatagcgtcagatccgctatccatgccgaaccagtcagttcaatcggaccctgggaattatgcacggataaactggattttgatcatgatgccggcagcatgatcatctatcacaagaacctcacgagtcagggctaccgtgctttcatctacagcggcgaccatgacatgtgtgtaccttacaccgggactgaagcatggactgcgtctttaggctacgccgtcgttgatccgtggcgacagtggattgtcgacgaacaagttgccgggtacacccaaggatatgaaaagggccttacttttgccactattaagggtgctgggcacacagttcctgagtacaaaccacaggaagcactagctttctacagccgttggcttgccggtgctaaactgtgaggaggcctattttgtgtgcaaaggtcatgcagtactgaatcaaacagaagttggataaagcatgcagcaataaggcagtcgaaggatcaaagtatccaacgcgccaactacaatgttgcattcattttcacatgttataccaatgcagttgctaatt

SEQ ID NO: 24295 - protein, 517 aa, Zea mays subsp. mays
  peptide (1)..(517): Ceres Seq. ID no. 12362108
  misc_feature (42)..(514): Pfam Name: Pfam Description:  Serine carboxypeptidase
  misc_feature (31)..(517): NCBI GI NO: 584892 NR Description: Serine carboxypeptidase I precursor
  misc_feature (3)..(517): NCBI GI NO: 2815493 NR Description: Serine carboxypeptidase I precursor
  misc_feature (91)..(517): NCBI GI NO: 167012 NR Description: carboxypeptidase I precursor
  misc_feature (17)..(517): NCBI GI NO: 7271957 NR Description: wound-inducible carboxypeptidase
  misc_feature (15)..(517): NCBI GI NO: 22531054 NR Description: serine carboxypeptidase 1 precursor-like protein
  misc_feature (5)..(517): NCBI GI NO: 38346978 NR Description: OSJNBb0062H02.3
  misc_feature (15)..(498): NCBI GI NO: 30682276 NR Description: serine carboxypeptidase -related
  misc_feature (17)..(517): NCBI GI NO: 15230836 NR Description: serine carboxypeptidase, putative
  misc_feature (17)..(517): NCBI GI NO: 9279723 NR Description: serine carboxypeptidase I [Arabidopsis thaliana]
  misc_feature (15)..(266): NCBI GI NO: 25289790 NR Description: hypothetical protein AT4g12910
MACGSATAARPAARLWLLAAVVVATSFLAVAAPPGALVTSVPGFGNKQQLPSKHYAGYVTVDERHGRRLFYYLVESERDPARDPVVLWLNGGPGCSSFDGFVYEHGPFSFEPSGGSAGSLPKLHLNPYSWSKVSSVIYLDSPAGVGLSYSNNVSDYETGDFKTAADSHTFLLKWFQLYPEFLANPFYIAGESYAGVYVPTLSSEVVKGIHKGVKPVINFKGYMVGNGVCDTVFDGNALVPFAHGMALISESIYKEASTACQGNYWNSSSAKCDEALSKVETEIDGLNIYDILEPCYHAPADTKQAAVTPQAQSTSELPQSFKDLGVTSNKPLPVRTRMHGRAWPLRAPVRDGRVPSWQELAADVASTSSGVPCMSDEVATAWLNNNSVRSAIHAEPVSSIGPWELCTDKLDFDHDAGSMIIYHKNLTSQGYRAFIYSGDHDMCVPYTGTEAWTASLGYAVVDPWRQWIVDEQVAGYTQGYEKGLTFATIKGAGHTVPEYKPQEALAFYSRWLAGAKL

SEQ ID NO: 24296 - protein, 295 aa, Zea mays subsp. mays
  peptide (1)..(295): Ceres Seq. ID no. 12362109
  misc_feature (1)..(292): Pfam Name: Pfam Description:  Serine carboxypeptidase
  misc_feature (1)..(295): NCBI GI NO: 584892 NR Description: Serine carboxypeptidase I precursor
  misc_feature (1)..(295): NCBI GI NO: 2815493 NR Description: Serine carboxypeptidase I precursor
  misc_feature (1)..(295): NCBI GI NO: 167012 NR Description: carboxypeptidase I precursor
  misc_feature (1)..(295): NCBI GI NO: 7271957 NR Description: wound-inducible carboxypeptidase
  misc_feature (1)..(295): NCBI GI NO: 22531054 NR Description: serine carboxypeptidase 1 precursor-like protein
  misc_feature (1)..(295): NCBI GI NO: 38346978 NR Description: OSJNBb0062H02.3
  misc_feature (1)..(276): NCBI GI NO: 30682276 NR Description: serine carboxypeptidase -related
  misc_feature (1)..(295): NCBI GI NO: 15230836 NR Description: serine carboxypeptidase, putative
  misc_feature (1)..(295): NCBI GI NO: 9279723 NR Description: serine carboxypeptidase I [Arabidopsis thaliana]
  misc_feature (1)..(44): NCBI GI NO: 25289790 NR Description: hypothetical protein AT4g12910
MVGNGVCDTVFDGNALVPFAHGMALISESIYKEASTACQGNYWNSSSAKCDEALSKVETEIDGLNIYDILEPCYHAPADTKQAAVTPQAQSTSELPQSFKDLGVTSNKPLPVRTRMHGRAWPLRAPVRDGRVPSWQELAADVASTSSGVPCMSDEVATAWLNNNSVRSAIHAEPVSSIGPWELCTDKLDFDHDAGSMIIYHKNLTSQGYRAFIYSGDHDMCVPYTGTEAWTASLGYAVVDPWRQWIVDEQVAGYTQGYEKGLTFATIKGAGHTVPEYKPQEALAFYSRWLAGAKL

SEQ ID NO: 24297 - protein, 273 aa, Zea mays subsp. mays
  peptide (1)..(273): Ceres Seq. ID no. 12362110
  misc_feature (1)..(270): Pfam Name: Pfam Description:  Serine carboxypeptidase
  misc_feature (1)..(273): NCBI GI NO: 584892 NR Description: Serine carboxypeptidase I precursor
  misc_feature (1)..(273): NCBI GI NO: 2815493 NR Description: Serine carboxypeptidase I precursor
  misc_feature (1)..(273): NCBI GI NO: 167012 NR Description: carboxypeptidase I precursor
  misc_feature (1)..(273): NCBI GI NO: 7271957 NR Description: wound-inducible carboxypeptidase
  misc_feature (1)..(273): NCBI GI NO: 22531054 NR Description: serine carboxypeptidase 1 precursor-like protein
  misc_feature (1)..(273): NCBI GI NO: 38346978 NR Description: OSJNBb0062H02.3
  misc_feature (1)..(254): NCBI GI NO: 30682276 NR Description: serine carboxypeptidase -related
  misc_feature (1)..(273): NCBI GI NO: 15230836 NR Description: serine carboxypeptidase, putative
  misc_feature (1)..(273): NCBI GI NO: 9279723 NR Description: serine carboxypeptidase I [Arabidopsis thaliana]
  misc_feature (1)..(22): NCBI GI NO: 25289790 NR Description: hypothetical protein AT4g12910
MALISESIYKEASTACQGNYWNSSSAKCDEALSKVETEIDGLNIYDILEPCYHAPADTKQAAVTPQAQSTSELPQSFKDLGVTSNKPLPVRTRMHGRAWPLRAPVRDGRVPSWQELAADVASTSSGVPCMSDEVATAWLNNNSVRSAIHAEPVSSIGPWELCTDKLDFDHDAGSMIIYHKNLTSQGYRAFIYSGDHDMCVPYTGTEAWTASLGYAVVDPWRQWIVDEQVAGYTQGYEKGLTFATIKGAGHTVPEYKPQEALAFYSRWLAGAKL

SEQ ID NO: 24298 - DNA, 1706 bp, Zea mays subsp. mays
  misc_feature (1)..(1706): Ceres Seq. ID no. 12408837
gcacgagaccattacctagaacatcctaatcgaaaaacaaacccttcttatcctatcgtcgcgcgcgcctgcctctcccacacactccacagcgcccgcgcaggctcgctgcaagcgcaaagcagccacagcaccccctgcacctgcagactgcaaccgcaatgtcggctctcgggacgctctccggcggcgctgccggtgtctccggcctcctccgcctccgccgccgggccgccccagcccccgcgatcgcggcgccgtcgcacctccccgctgggaccgtcaagtgcgcggccgccgtgcccgatgccgccccgatcgtctggggccgtcagctccgcccggcgctcctcctacccgcggcgctgctcccttcgttgcagcccgccaggaggcacacgctgcagccgcccgccgcagccgccgagtccgcaggggaggccaagtctgtgggtttcctggagaagtacccggccctggtcaccggcttcttcttcttcatgtggtacttcctcaacgtcatattcaacatcctcaacaagaagatctacaactacttcccatacccatactttgtgtccttgatccatctagtagtgggtgtcgtatactgcctcatcagctggagtgtcggtctccccaagcgagcgcctatcaatggcacgctcctcaagcttctctttccagtcgccctgtgccatggtattggtcacatcactagcaatgtgtccttcgctgctgttgcagtctcatttgctcacactatcaaagctctggagcccttcttcagcgcagcggctactcagtttatccttggacagcaagttcccttctctctgtggctttctcttgcccctgtggtcattggtgtttcaatggcatcccttactgagctttcattcaactggactggcttcatcaatgccatgatatcaaacatctcattcacttacaggagcatttattccaagaaagctatgactgacatggatagcaccaacgtgtatgcttacatctcaataatcgctctaattgtttgcattccacctgcattgatctttgaagggcccaagctaatgcagcatggatttagtgatgccattgcaaaagtaggtttgacaaagtttgtcagtgacctattcttggttggactgttctaccatctgtataaccagattgctacaaacaccttggagcgagtggctcctctgacacatgctgtcggcaatgtgttgaaacgtgtttttgtcatcggtttctcaatcattgtttttggtaacaaaattagcacacaaactggaattggcacgtccattgccatagctggtgttgctatgtactcttacattaaggctaagattgaagaggagaaaaggaaaaagagcgcatgactgctgtgaataatattatcggaccttcctcggacacaacatcgtcgacaatcacgacctacttctataccttgttttgttttcatcttgagtcagtcggtccattgtttgttcccagtctggtgattaaaagtctgcaaattctgtttgtggaattggcagcgatacaaatttggcttctttaagtaaatccggttggcggtacacagcggtattaattcacctgtaactgaatggaataccgtaatgcaaagggcacaacactctgcctgactaaaataaaatggtgaaggttcacccttgttgtggttgctg

SEQ ID NO: 24299 - protein, 409 aa, Zea mays subsp. mays
  peptide (1)..(409): Ceres Seq. ID no. 12408838
  misc_feature (1)..(409): NCBI GI NO: 1352200 NR Description: TRIOSE PHOSPHATE/PHOSPHATE TRANSLOCATOR
  misc_feature (1)..(409): NCBI GI NO: 13195734 NR Description: triose phosphate translocator [Triticum aestivum]
  misc_feature (1)..(409): NCBI GI NO: 13518113 NR Description: triose phosphate/phosphate translocator
  misc_feature (11)..(409): NCBI GI NO: 9295273 NR Description: triose phosphate/phosphate translocator precursor
  misc_feature (10)..(409): NCBI GI NO: 629694 NR Description: phosphate translocator
  misc_feature (7)..(409): NCBI GI NO: 1352199 NR Description: Triose phosphate/phosphate translocator
  misc_feature (12)..(406): NCBI GI NO: 117291 NR Description: TRIOSE PHOSPHATE/PHOSPHATE TRANSLOCATOR
  misc_feature (12)..(406): NCBI GI NO: 21593093 NR Description: phosphate/triose-phosphate translocator precursor
  misc_feature (12)..(408): NCBI GI NO: 9757731 NR Description: phosphate/triose-phosphate translocator precursor
  misc_feature (79)..(397): NCBI GI NO: 18423670 NR Description: glucose-6-phosphate/phosphate translocator
MSALGTLSGGAAGVSGLLRLRRRAAPAPAIAAPSHLPAGTVKCAAAVPDAAPIVWGRQLRPALLLPAALLPSLQPARRHTLQPPAAAAESAGEAKSVGFLEKYPALVTGFFFFMWYFLNVIFNILNKKIYNYFPYPYFVSLIHLVVGVVYCLISWSVGLPKRAPINGTLLKLLFPVALCHGIGHITSNVSFAAVAVSFAHTIKALEPFFSAAATQFILGQQVPFSLWLSLAPVVIGVSMASLTELSFNWTGFINAMISNISFTYRSIYSKKAMTDMDSTNVYAYISIIALIVCIPPALIFEGPKLMQHGFSDAIAKVGLTKFVSDLFLVGLFYHLYNQIATNTLERVAPLTHAVGNVLKRVFVIGFSIIVFGNKISTQTGIGTSIAIAGVAMYSYIKAKIEEEKRKKSA

SEQ ID NO: 24300 - protein, 296 aa, Zea mays subsp. mays
  peptide (1)..(296): Ceres Seq. ID no. 12408839
  misc_feature (1)..(296): NCBI GI NO: 1352200 NR Description: TRIOSE PHOSPHATE/PHOSPHATE TRANSLOCATOR
  misc_feature (1)..(296): NCBI GI NO: 13195734 NR Description: triose phosphate translocator [Triticum aestivum]
  misc_feature (1)..(296): NCBI GI NO: 13518113 NR Description: triose phosphate/phosphate translocator
  misc_feature (1)..(296): NCBI GI NO: 9295273 NR Description: triose phosphate/phosphate translocator precursor
  misc_feature (1)..(296): NCBI GI NO: 629694 NR Description: phosphate translocator
  misc_feature (1)..(296): NCBI GI NO: 1352199 NR Description: Triose phosphate/phosphate translocator
  misc_feature (1)..(293): NCBI GI NO: 117291 NR Description: TRIOSE PHOSPHATE/PHOSPHATE TRANSLOCATOR
  misc_feature (1)..(293): NCBI GI NO: 21593093 NR Description: phosphate/triose-phosphate translocator precursor
  misc_feature (1)..(295): NCBI GI NO: 9757731 NR Description: phosphate/triose-phosphate translocator precursor
  misc_feature (1)..(284): NCBI GI NO: 18423670 NR Description: glucose-6-phosphate/phosphate translocator
MWYFLNVIFNILNKKIYNYFPYPYFVSLIHLVVGVVYCLISWSVGLPKRAPINGTLLKLLFPVALCHGIGHITSNVSFAAVAVSFAHTIKALEPFFSAAATQFILGQQVPFSLWLSLAPVVIGVSMASLTELSFNWTGFINAMISNISFTYRSIYSKKAMTDMDSTNVYAYISIIALIVCIPPALIFEGPKLMQHGFSDAIAKVGLTKFVSDLFLVGLFYHLYNQIATNTLERVAPLTHAVGNVLKRVFVIGFSIIVFGNKISTQTGIGTSIAIAGVAMYSYIKAKIEEEKRKKSA

SEQ ID NO: 24301 - DNA, 1266 bp, Zea mays subsp. mays
  misc_feature (1)..(1266): Ceres Seq. ID no. 12366644
acacactcgctctgctactagctactagcagtagagcagtagaggagagagcatctacctagcgccgtcggacggatcggagctacctcaccgccgaccgcgcgcgaagagatcgatggctcatgctgctacgctcgctgctgcagccgcggtcgtcgtcctcatcgtcgtctgctgctgctcctcttcggaggccgccagccacagcgccaacgcgaggcagccgccgctggcgcccggcctgtccttggacttctacaagcggagctgcgcccagggcggagtccgtcgtgcggaggttcgtgcaggacgccgtgcgcagggacgccggcctcgccgccggcctcctccgcctccacttccacgactgcttcgtccagggctgcgacgcgtccgtgctcctggacggctcagccaccggccccgggcgagcagcaggcgccgcccaacctcacgctgcgccccaccgcgttcaaggccatcaacgacatccacgaccgcctccagaaggagtgcggtggcgcagtcgtgtcctgctccgacgtcctcgcgctcgccgccagggactcagtcgtcgtgtccggaggtcccagctacaaggtgccgctgggtcggcgcgacagcgcgagcttcgcgacgcgagaggacgtcctgagcgggctcccgccgccgacggccgccgtgccggcgcttctcgccgtgctgtcaacctggacgcgacggacctggtggcgctgtcgggcggccacaccatcgggctgggccactgcgcgtccttcgagagccgcctgttcccgcgccaggacccgacgctgaacgccaccttcgccggccacctgcgccggacctgcccggccaagggcaccgaccgccggacgccgctggacgtgcgcacgcccgacgcgttcgacaacaagtactacgtcaacctggtgaaccgtgaggggctcttcacctccgaccaggacctcttcagcaaccccggcaccaggcccctcgtcgagaagttcgcgcgcagccagagagacttcttcgaccagttcgccttctccgtggtgaagatggggcagatcaaggtgctcacgggcgcgcaggggcagatccgcaggaactgctccgcccgcaacgcaggcatgacgtggtccgtcgtcgacgaggctgcacagcagagcttcgtgttctagactttgtacgtactagctggctactgtgtgggcggcggtgtcctgtcaacagaacagatagctagcagtagcactggacggc

SEQ ID NO: 24302 - protein, 353 aa, Zea mays subsp. mays
  peptide (1)..(353): Ceres Seq. ID no. 12366645
  misc_feature (195)..(348): NCBI GI NO: 34905834 NR Description: putative peroxidase
  misc_feature (49)..(99): NCBI GI NO: 34905834 NR Description: putative peroxidase
  misc_feature (196)..(350): NCBI GI NO: 1402914 NR Description: peroxidase [Arabidopsis thaliana]
  misc_feature (196)..(350): NCBI GI NO: 15217539 NR Description: peroxidase, putative; protein id: At1g71695
  misc_feature (43)..(102): NCBI GI NO: 1402914 NR Description: peroxidase [Arabidopsis thaliana]
  misc_feature (43)..(102): NCBI GI NO: 15217539 NR Description: peroxidase, putative; protein id: At1g71695
  misc_feature (196)..(336): NCBI GI NO: 14031049 NR Description: peroxidase [Nicotiana tabacum]
  misc_feature (43)..(101): NCBI GI NO: 14031049 NR Description: peroxidase [Nicotiana tabacum]
  misc_feature (196)..(349): NCBI GI NO: 478409 NR Description: peroxidase (EC 1.11.1.7), cationic - adzuki bean
  misc_feature (43)..(101): NCBI GI NO: 478409 NR Description: peroxidase (EC 1.11.1.7), cationic - adzuki bean
MLLRSLLQPRSSSSSSSAAAPLRRPPATAPTRGSRRWRPACPWTSTSGAAPRAESVVRRFVQDAVRRDAGLAAGLLRLHFHDCFVQGCDASVLLDGSATGPGRAAGAAQPHAAPHRVQGHQRHPRPPPEGVRWRSRVLLRRPRARRQGLSRRVRRSQLQGAAGSARQRELRDARGRPERAPAADGRRAGASRRAVNLDATDLVALSGGHTIGLGHCASFESRLFPRQDPTLNATFAGHLRRTCPAKGTDRRTPLDVRTPDAFDNKYYVNLVNREGLFTSDQDLFSNPGTRPLVEKFARSQRDFFDQFAFSVVKMGQIKVLTGAQGQIRRNCSARNAGMTWSVVDEAAQQSFVF

SEQ ID NO: 24303 - protein, 179 aa, Zea mays subsp. mays
  peptide (1)..(179): Ceres Seq. ID no. 12366646
  misc_feature (1)..(54): NCBI GI NO: 34905834 NR Description: putative peroxidase
  misc_feature (7)..(54): NCBI GI NO: 34905826 NR Description: putative peroxidase
  misc_feature (5)..(70): NCBI GI NO: 82410 NR Description: peroxidase (EC 1.11.1.7) BP1 precursor - barley
  misc_feature (7)..(59): NCBI GI NO: 34905838 NR Description: putative peroxidase
  misc_feature (11)..(73): NCBI GI NO: 34905830 NR Description: putative peroxidase
  misc_feature (95)..(156): NCBI GI NO: 11359723 NR Description: proteophosphoglycan, membrane-associated
  misc_feature (60)..(179): NCBI GI NO: 25143299 NR Description: pre-mRNA splicing SR protein related RSR-1 (68
  misc_feature (88)..(156): NCBI GI NO: 11359723 NR Description: proteophosphoglycan, membrane-associated
  misc_feature (25)..(179): NCBI GI NO: 6649242 NR Description: splicing coactivator subunit SRm300 [Homo sapiens]
  misc_feature (25)..(179): NCBI GI NO: 19923466 NR Description: splicing coactivator subunit SRm300
MAHAATLAAAAAVVVLIVVCCCSSSEAASHSANARQPPLAPGLSLDFYKRSCAQGGVRRAEVRAGRRAQGRRPRRRPPPPPLPRLLRPGLRRVRAPGRLSHRPRASSRRRPTSRCAPPRSRPSTTSTTASRRSAVAQSCPAPTSSRSPPGTQSSCPEVPATRCRWVGATARASRRERTS

SEQ ID NO: 24304 - DNA, 1075 bp, Zea mays subsp. mays
  misc_feature (1)..(1075): Ceres Seq. ID no. 12365239
aatcagctaagatagctgcaaaacaagcgagttacttacaaccaaacagaagggtagaaaccacctgaagccatgtgcattgctgcatggatttggcaggctcaccctgtgcaccaactcctcctgcttctcaacagagatgagttccacagcaggcctacaaaagcagtaggatggtggggtgaaggctcaaagaagatccttggtggcagggatgtgcttggtggaggaacatggatggggtgcaccaaggatggaaggcttgccttcctgaccaatgtgcttgaaccagatgccatgcccggtgcacggactaggggagatctgcctctcaaattcctgcagagcaacaagagcccactcgaagttgcaactgaagtggcagaagaagctgatgaatacaatggcttcaacctcatactagctgatctaacaacaaatatcatggtttatgtgtcaaaccggcctaagggtcagcctgcaacaattcaactcgtgtcaccaggactccatgtgctgtccaatgcaaggctagatagcccttggcagaaggcaattctcctcggtaaaaacttcagggagcttcttagggagcatggtgctgatgaggttgaagtgaaggatatagttgagaggctaatgactgacaccacaaaggctgacaaagatagactgccaaacactggttgtgatcccaactgggagcatggtctgagctccatcttcattgaggtgcaaactgaccaagggccctatgggacacggagcacagccgttttatcagtgaactatgatggcgaagctagcttgtacgagaagtatcttgagagtggtatatggaaggatcacacagtgagttaccagatagagtagtaggcattgcacaggaaaagttggcgacctcaaataaatagaaatatgaagcagacacaattgtgaatttcattatttccctgatctctagtcatcttcgtgattatctaagatcctaccataatgccaattacattattcactgtaagcagatttttcacttgacgataaaatgtcaaccaaaactttggttttcttcgtc

SEQ ID NO: 24305 - protein, 266 aa, Zea mays subsp. mays
  peptide (1)..(266): Ceres Seq. ID no. 12365240
  misc_feature (35)..(263): Pfam Name: DUF833 Pfam Description: Protein of unknown function
  misc_feature (14)..(266): NCBI GI NO: 38345399 NR Description: OSJNBa0017B10.5
  misc_feature (1)..(265): NCBI GI NO: 18420207 NR Description: putative protein; protein id: At4g38260
  misc_feature (35)..(265): NCBI GI NO: 15451202 NR Description: putative protein [Arabidopsis thaliana]
  misc_feature (30)..(243): NCBI GI NO: 7485957 NR Description: hypothetical protein F22I13
  misc_feature (1)..(266): NCBI GI NO: 39995898 NR Description: conserved hypothetical protein
  misc_feature (1)..(253): NCBI GI NO: 17546499 NR Description: PUTATIVE SIGNAL PEPTIDE PROTEIN
  misc_feature (1)..(260): NCBI GI NO: 21230190 NR Description: conserved hypothetical protein
  misc_feature (1)..(264): NCBI GI NO: 22977012 NR Description: hypothetical protein [Ralstonia metallidurans]
  misc_feature (1)..(266): NCBI GI NO: 34869782 NR Description: similar to Ser/Thr-rich protein T10 in DGCR region
  misc_feature (1)..(266): NCBI GI NO: 20070388 NR Description: DNA segment, Chr 16, human D22S680E, expressed
MCIAAWIWQAHPVHQLLLLLNRDEFHSRPTKAVGWWGEGSKKILGGRDVLGGGTWMGCTKDGRLAFLTNVLEPDAMPGARTRGDLPLKFLQSNKSPLEVATEVAEEADEYNGFNLILADLTTNIMVYVSNRPKGQPATIQLVSPGLHVLSNARLDSPWQKAILLGKNFRELLREHGADEVEVKDIVERLMTDTTKADKDRLPNTGCDPNWEHGLSSIFIEVQTDQGPYGTRSTAVLSVNYDGEASLYEKYLESGIWKDHTVSYQIE

SEQ ID NO: 24306 - protein, 211 aa, Zea mays subsp. mays
  peptide (1)..(211): Ceres Seq. ID no. 12365241
  misc_feature (1)..(208): Pfam Name: DUF833 Pfam Description: Protein of unknown function
  misc_feature (1)..(211): NCBI GI NO: 38345399 NR Description: OSJNBa0017B10.5
  misc_feature (1)..(210): NCBI GI NO: 18420207 NR Description: putative protein; protein id: At4g38260
  misc_feature (1)..(210): NCBI GI NO: 15451202 NR Description: putative protein [Arabidopsis thaliana]
  misc_feature (1)..(188): NCBI GI NO: 7485957 NR Description: hypothetical protein F22I13
  misc_feature (1)..(211): NCBI GI NO: 39995898 NR Description: conserved hypothetical protein
  misc_feature (1)..(198): NCBI GI NO: 17546499 NR Description: PUTATIVE SIGNAL PEPTIDE PROTEIN
  misc_feature (1)..(205): NCBI GI NO: 21230190 NR Description: conserved hypothetical protein
  misc_feature (1)..(209): NCBI GI NO: 22977012 NR Description: hypothetical protein [Ralstonia metallidurans]
  misc_feature (1)..(211): NCBI GI NO: 34869782 NR Description: similar to Ser/Thr-rich protein T10 in DGCR region
  misc_feature (1)..(211): NCBI GI NO: 20070388 NR Description: DNA segment, Chr 16, human D22S680E, expressed
MGCTKDGRLAFLTNVLEPDAMPGARTRGDLPLKFLQSNKSPLEVATEVAEEADEYNGFNLILADLTTNIMVYVSNRPKGQPATIQLVSPGLHVLSNARLDSPWQKAILLGKNFRELLREHGADEVEVKDIVERLMTDTTKADKDRLPNTGCDPNWEHGLSSIFIEVQTDQGPYGTRSTAVLSVNYDGEASLYEKYLESGIWKDHTVSYQIE

SEQ ID NO: 24307 - protein, 191 aa, Zea mays subsp. mays
  peptide (1)..(191): Ceres Seq. ID no. 12365242
  misc_feature (1)..(188): Pfam Name: DUF833 Pfam Description: Protein of unknown function
  misc_feature (1)..(191): NCBI GI NO: 38345399 NR Description: OSJNBa0017B10.5
  misc_feature (1)..(190): NCBI GI NO: 18420207 NR Description: putative protein; protein id: At4g38260
  misc_feature (1)..(190): NCBI GI NO: 15451202 NR Description: putative protein [Arabidopsis thaliana]
  misc_feature (1)..(168): NCBI GI NO: 7485957 NR Description: hypothetical protein F22I13
  misc_feature (1)..(191): NCBI GI NO: 39995898 NR Description: conserved hypothetical protein
  misc_feature (1)..(178): NCBI GI NO: 17546499 NR Description: PUTATIVE SIGNAL PEPTIDE PROTEIN
  misc_feature (1)..(185): NCBI GI NO: 21230190 NR Description: conserved hypothetical protein
  misc_feature (1)..(189): NCBI GI NO: 22977012 NR Description: hypothetical protein [Ralstonia metallidurans]
  misc_feature (1)..(191): NCBI GI NO: 34869782 NR Description: similar to Ser/Thr-rich protein T10 in DGCR region
  misc_feature (1)..(191): NCBI GI NO: 20070388 NR Description: DNA segment, Chr 16, human D22S680E, expressed
MPGARTRGDLPLKFLQSNKSPLEVATEVAEEADEYNGFNLILADLTTNIMVYVSNRPKGQPATIQLVSPGLHVLSNARLDSPWQKAILLGKNFRELLREHGADEVEVKDIVERLMTDTTKADKDRLPNTGCDPNWEHGLSSIFIEVQTDQGPYGTRSTAVLSVNYDGEASLYEKYLESGIWKDHTVSYQIE

SEQ ID NO: 24308 - DNA, 1174 bp, Zea mays subsp. mays
  misc_feature (1)..(1174): Ceres Seq. ID no. 12414814
  misc_feature (63)..(63): n is a, c, t, g, unknown, or other
gactctatcccgttcccttccgtccctcgtcacgctcacgaagcacgctgtcgtcttgcgggntctcgcccgtcgccccccgagccccgaaaccaaagccgagccgagagcccgagccccgccccggacctcatcttctcctcgtcggtttcacccctccaccacctccatggggtcgtcggaggccgacgaggaccagctcctcaagagcttcctcgcggaggtcagcgaggccgagcgggacaacgaagtgctgaggatacttggttgcttcaagttaaaccccttcgagcatcttaagttgtcttttgattcatcaccagatgaggtgaaaaagcaatataggaagttgtcattgctggtccatcctgataaatgcaagcatcctcaggcacaagaagcttttgcagctctggcgaaagcacaacagctcctgcttgatccacaggaaagaggctacattcttgaccaagttactgctgcaaaagaagaattgagggcaaaacggaaaaaggagctgaagaaagacagtgcgtccaagataaaatctcttgtagatgagggaaaatatgaagagcagtttgaacgatcggatggatttcagcagcaattaataattaaagtacgtgaaattttgaccgacaaagaatggcgtaggagaaaaatgcaaatgaggatatcagaggaagaaggaagacttaagaaggatgaggaggaaacaaaagagatgtggaagaggaagagagagcatgaagagaagtgggaggagaccagagacaagcgggtctccagctggagggatttcatgaagacaggaaagaagggacggaaaggtgaaatcaagcccccaaaactgaagactgaagatccgaacaaatcttatgtgcaaaggccagtaaagcgaaactgagtggaatgtcagcaatcaaagaacatccggtagcggcctttcatctcaccagattagagctgcaacccttcaatgttgtacttgtcctgaatgtggtaaggttcaattacgcccgctggggaaacagaacggaacagagcagattttacccgtattgctagctagagtgatttggtttgatgtactcatcatccgtctgaagattttactgggaaaaaaagtacaaacttttccgttggaaaagaacctaatgaagtgaatgtt

SEQ ID NO: 24309 - protein, 302 aa, Zea mays subsp. mays
  peptide (1)..(302): Ceres Seq. ID no. 12414815
  misc_feature (94)..(157): Pfam Name: Pfam Description:  DnaJ domain
  misc_feature (57)..(301): NCBI GI NO: 22326960 NR Description: unknown protein; protein id: At5g22080.1
  misc_feature (53)..(288): NCBI GI NO: 7657611 NR Description: DnaJ
  misc_feature (53)..(288): NCBI GI NO: 21620116 NR Description: similar to DnaJ
  misc_feature (58)..(288): NCBI GI NO: 34784000 NR Description: Unknown (protein for IMAGE:5148567) [Mus musculus]
  misc_feature (58)..(277): NCBI GI NO: 27369493 NR Description: DnaJ
  misc_feature (66)..(288): NCBI GI NO: 17510535 NR Description: DNaJ domain
  misc_feature (66)..(288): NCBI GI NO: 39595457 NR Description: Hypothetical protein CBG04113
  misc_feature (74)..(277): NCBI GI NO: 23619009 NR Description: DNAJ protein, putative [Plasmodium falciparum 3D7]
  misc_feature (58)..(255): NCBI GI NO: 34871854 NR Description: similar to DnaJ homolog subfamily C member 8
  misc_feature (62)..(277): NCBI GI NO: 40747533 NR Description: conserved hypothetical protein
  misc_feature (21)..(21): Xaa is any aa, unknown or other
TLSRSLPSLVTLTKHAVVLRXLARRPPSPETKAEPRARAPPRTSSSPRRFHPSTTSMGSSEADEDQLLKSFLAEVSEAERDNEVLRILGCFKLNPFEHLKLSFDSSPDEVKKQYRKLSLLVHPDKCKHPQAQEAFAALAKAQQLLLDPQERGYILDQVTAAKEELRAKRKKELKKDSASKIKSLVDEGKYEEQFERSDGFQQQLIIKVREILTDKEWRRRKMQMRISEEEGRLKKDEEETKEMWKRKREHEEKWEETRDKRVSSWRDFMKTGKKGRKGEIKPPKLKTEDPNKSYVQRPVKRN

SEQ ID NO: 24310 - protein, 246 aa, Zea mays subsp. mays
  peptide (1)..(246): Ceres Seq. ID no. 12414816
  misc_feature (38)..(101): Pfam Name: Pfam Description:  DnaJ domain
  misc_feature (1)..(245): NCBI GI NO: 22326960 NR Description: unknown protein; protein id: At5g22080.1
  misc_feature (1)..(232): NCBI GI NO: 7657611 NR Description: DnaJ
  misc_feature (1)..(232): NCBI GI NO: 21620116 NR Description: similar to DnaJ
  misc_feature (2)..(232): NCBI GI NO: 34784000 NR Description: Unknown (protein for IMAGE:5148567) [Mus musculus]
  misc_feature (2)..(221): NCBI GI NO: 27369493 NR Description: DnaJ
  misc_feature (10)..(232): NCBI GI NO: 17510535 NR Description: DNaJ domain
  misc_feature (10)..(232): NCBI GI NO: 39595457 NR Description: Hypothetical protein CBG04113
  misc_feature (18)..(221): NCBI GI NO: 23619009 NR Description: DNAJ protein, putative [Plasmodium falciparum 3D7]
  misc_feature (2)..(199): NCBI GI NO: 34871854 NR Description: similar to DnaJ homolog subfamily C member 8
  misc_feature (6)..(221): NCBI GI NO: 40747533 NR Description: conserved hypothetical protein
MGSSEADEDQLLKSFLAEVSEAERDNEVLRILGCFKLNPFEHLKLSFDSSPDEVKKQYRKLSLLVHPDKCKHPQAQEAFAALAKAQQLLLDPQERGYILDQVTAAKEELRAKRKKELKKDSASKIKSLVDEGKYEEQFERSDGFQQQLIIKVREILTDKEWRRRKMQMRISEEEGRLKKDEEETKEMWKRKREHEEKWEETRDKRVSSWRDFMKTGKKGRKGEIKPPKLKTEDPNKSYVQRPVKRN

SEQ ID NO: 24311 - DNA, 903 bp, Zea mays subsp. mays
  misc_feature (1)..(903): Ceres Seq. ID no. 12343059
acagcggcgtcgggtctatccgggtctatccgcgaacacgtgagaactctccagaaactgctttctcctccacttcatctctctcgctttccctctataaaaagaccccttctaggaattgagggagacagcaagcagcgatccgaagctcaatcaattcactcaaacctcttccccaaatcttcgattagattctcgttgacaagaagactagaaccgaacctgaccatgtcgctgatccgccgcagcaacgtgttcgatcccttctccctcgacctctgggacccctttgagggcttccccttcggctccggcaacagcagcagtctcttcccctcgttcccgcggaccagctcggagaccgcggccttcgctggcgcgcggatcgactggaaggagactccagaggcgcacgtgttcaaggccgacgtaccggggctgaagaaggaggaggtcaaggtggaggtcgaggacggcaacgtccttcagatcagcggcgagcgcaacaaggagcaggaggagaagacggacaccctggcaccgcgtggagcggagcagcgggaggttcctgcgcaggttccgactgcccgagaacgccaagacggagcagatcacggccgccatggagaacggcgtgcttacagtcactgtgccgaaggaggacgccaagaagcctgaagtgaagtccattcagatctccggctagacctcggtctgcggtcgtcgtacctgcgtggtttgaggaacggcagttcgcctcggtcgttctgtgaaataaaattgggttacaagaattatggcgtttgtcaatatggtcgtaatgtcgtaggatggtggaatgtggtcacaaactttgcgtatgttgggtctacttgtggtgtctgaatctatgtatggatgtcg

SEQ ID NO: 24312 - protein, 225 aa, Zea mays subsp. mays
  peptide (1)..(225): Ceres Seq. ID no. 12343060
  misc_feature (77)..(178): NCBI GI NO: 7441293 NR Description: heat shock protein 17.9 - pearl millet
  misc_feature (77)..(177): NCBI GI NO: 34902016 NR Description: putative class I low-molecular-weight heat shockprotein
  misc_feature (77)..(177): NCBI GI NO: 34902026 NR Description: unknown protein
  misc_feature (77)..(177): NCBI GI NO: 2119194 NR Description: low-molecular-weight heat-shock protein - rice
  misc_feature (77)..(177): NCBI GI NO: 1213073 NR Description: heat shock protein 17.8 [Oryza sativa]
  misc_feature (77)..(177): NCBI GI NO: 34902024 NR Description: unknown protein
  misc_feature (77)..(177): NCBI GI NO: 399937 NR Description: 17.4 KD CLASS I HEAT SHOCK PROTEIN
  misc_feature (77)..(177): NCBI GI NO: 34902028 NR Description: shock protein, low molecular weight
  misc_feature (77)..(177): NCBI GI NO: 422000 NR Description: heat shock protein, low molecular weight
  misc_feature (77)..(178): NCBI GI NO: 25044839 NR Description: class-1 LMW heat shock protein [Ananas comosus]
TAASGLSGSIREHVRTLQKLLSPPLHLSRFPSIKRPLLGIEGDSKQRSEAQSIHSNLFPKSSIRFSLTRRLEPNLTMSLIRRSNVFDPFSLDLWDPFEGFPFGSGNSSSLFPSFPRTSSETAAFAGARIDWKETPEAHVFKADVPGLKKEEVKVEVEDGNVLQISGERNKEQEEKTDTLAPRGAEQREVPAQVPTARERQDGADHGRHGERRAYSHCAEGGRQEA

SEQ ID NO: 24313 - protein, 149 aa, Zea mays subsp. mays
  peptide (1)..(149): Ceres Seq. ID no. 12343061
  misc_feature (1)..(102): NCBI GI NO: 7441293 NR Description: heat shock protein 17.9 - pearl millet
  misc_feature (1)..(101): NCBI GI NO: 34902016 NR Description: putative class I low-molecular-weight heat shockprotein
  misc_feature (1)..(101): NCBI GI NO: 34902026 NR Description: unknown protein
  misc_feature (1)..(101): NCBI GI NO: 2119194 NR Description: low-molecular-weight heat-shock protein - rice
  misc_feature (1)..(101): NCBI GI NO: 1213073 NR Description: heat shock protein 17.8 [Oryza sativa]
  misc_feature (1)..(101): NCBI GI NO: 34902024 NR Description: unknown protein
  misc_feature (1)..(101): NCBI GI NO: 399937 NR Description: 17.4 KD CLASS I HEAT SHOCK PROTEIN
  misc_feature (1)..(101): NCBI GI NO: 34902028 NR Description: shock protein, low molecular weight
  misc_feature (1)..(101): NCBI GI NO: 422000 NR Description: heat shock protein, low molecular weight
  misc_feature (1)..(102): NCBI GI NO: 25044839 NR Description: class-1 LMW heat shock protein [Ananas comosus]
MSLIRRSNVFDPFSLDLWDPFEGFPFGSGNSSSLFPSFPRTSSETAAFAGARIDWKETPEAHVFKADVPGLKKEEVKVEVEDGNVLQISGERNKEQEEKTDTLAPRGAEQREVPAQVPTARERQDGADHGRHGERRAYSHCAEGGRQEA

SEQ ID NO: 24314 - DNA, 1341 bp, Zea mays subsp. mays
  misc_feature (1)..(1341): Ceres Seq. ID no. 12352079
actgcaactctgcgagtgccagaaaaaaaatactgccacccaccaccgcgccgccgcgccatggcttccccatccccttcctcgcccctccacccgcaccagcacccacctcctccgaatgttcaccaccaattccaatccctaccgccttcgatgccgccaccgccgccgtcaacggcgctgccaaaggcgctcgaccttgaggttaccgtcgtctgcgggaagcacctgaagaatgtcaactggcgccgtggcgacctccgtgcctacgtcgtggtgtaccttgacccctcccgccgcgccgctacccgccccgacgacggcggcgggtgcaaaccaacctggaacgagcgcctcgtcctcccgcttccgccccacctctccccgcacgacccctccatcctcctgtccctcgacgttttccactctaagccctccgattcgcccaagccgctcgtcggatccgcccgctctcctctccgcgacctcctcttccccgcaaaccctaaccctagccacgatcccgcagcctccgctctcgtcagcctgccactcctccgcccttccggccgcccacaggggaagatccggatccgcgtcgccatccgcgagcgctcgccgccgcctccggagccgcaataccctccgccttccagctccccgtactactttccaccgcctcctcccgcctactcggccccgcctcagtacggatctgaccagtactatcgccctagtggatactactctgcacctgcacctccaccacatccgtatgagtacaccggagggccctctgcaccggtggactacaacaggcaatatgagcagagagggaggactggggcccgctggtagtggcagtgggaacggaaggtatggagcaggcactgggcttgcggtgggtgctgtggctggagccctcgggggtctagcaattgatgaagcggtgaagtacaaggaggataagggtgcagaacgggtggaagagaaggtggtacctgctgggagggatgattacagcgagtatcgtggcgactattgaaccgaagtttgtgtgagtgtggaagaaagcgctgtgagttgattcttcttccatgcctatgtgggaataaatccagtgttagtctatggctttccccatgtatgtatatatatttgtgatgttgtgaattattctgatacctataaactactccttcggttcttgtttatttgtcgctgtttagttcaaaaatgaactagcgggcgacaaatattcgagaacggaggtagtacaatgttttatgatgacagatttggtgtgtaacataaatatctcatggcttgctttgatggtgc

SEQ ID NO: 24315 - protein, 285 aa, Zea mays subsp. mays
  peptide (1)..(285): Ceres Seq. ID no. 12352080
  misc_feature (67)..(157): Pfam Name: Pfam Description:  C2 domain
  misc_feature (21)..(283): NCBI GI NO: 34908388 NR Description: P0529E05.20
  misc_feature (65)..(282): NCBI GI NO: 18390752 NR Description: extensin-related; protein id: At1g07310
  misc_feature (66)..(222): NCBI GI NO: 10176862 NR Description: emb|CAB80929
  misc_feature (66)..(222): NCBI GI NO: 30689212 NR Description: C2 domain-containing protein
  misc_feature (122)..(265): NCBI GI NO: 7488673 NR Description: extensin homolog - soybean (fragment)
  misc_feature (7)..(57): NCBI GI NO: 7488673 NR Description: extensin homolog - soybean (fragment)
  misc_feature (205)..(265): NCBI GI NO: 11121504 NR Description: extensin [Nicotiana sylvestris]
  misc_feature (7)..(57): NCBI GI NO: 11121504 NR Description: extensin [Nicotiana sylvestris]
  misc_feature (122)..(269): NCBI GI NO: 7488673 NR Description: extensin homolog - soybean (fragment)
  misc_feature (16)..(57): NCBI GI NO: 7488673 NR Description: extensin homolog - soybean (fragment)
TATLRVPEKKYCHPPPRRRAMASPSPSSPLHPHQHPPPPNVHHQFQSLPPSMPPPPPSTALPKALDLEVTVVCGKHLKNVNWRRGDLRAYVVVYLDPSRRAATRPDDGGGCKPTWNERLVLPLPPHLSPHDPSILLSLDVFHSKPSDSPKPLVGSARSPLRDLLFPANPNPSHDPAASALVSLPLLRPSGRPQGKIRIRVAIRERSPPPPEPQYPPPSSSPYYFPPPPPAYSAPPQYGSDQYYRPSGYYSAPAPPPHPYEYTGGPSAPVDYNRQYEQRGRTGARW

SEQ ID NO: 24316 - protein, 269 aa, Zea mays subsp. mays
  peptide (1)..(269): Ceres Seq. ID no. 12352081
  misc_feature (1)..(127): Pfam Name: Pfam Description:  Equine herpesvirus glycoprotein gp2
  misc_feature (205)..(261): NCBI GI NO: 10176862 NR Description: emb|CAB80929
  misc_feature (205)..(261): NCBI GI NO: 30689212 NR Description: C2 domain-containing protein
  misc_feature (54)..(266): NCBI GI NO: 34908388 NR Description: P0529E05.20
  misc_feature (2)..(112): NCBI GI NO: 15233976 NR Description: extensin-like protein; protein id: At4g18670.1
  misc_feature (20)..(112): NCBI GI NO: 15233976 NR Description: extensin-like protein; protein id: At4g18670.1
  misc_feature (18)..(126): NCBI GI NO: 15230108 NR Description: protein kinase, putative; protein id: At3g24400.1
  misc_feature (16)..(155): NCBI GI NO: 15230108 NR Description: protein kinase, putative; protein id: At3g24400.1
  misc_feature (5)..(104): NCBI GI NO: 15230108 NR Description: protein kinase, putative; protein id: At3g24400.1
  misc_feature (1)..(171): NCBI GI NO: 17221114 NR Description: glycoprotein gp2 [Equine herpesvirus 1]
  misc_feature (1)..(170): NCBI GI NO: 17221112 NR Description: glycoprotein gp2 [Equine herpesvirus 1]
MSTGAVATSVPTSWCTLTPPAAPLPAPTTAAGANQPGTSASSSRFRPTSPRTTPPSSCPSTFSTLSPPIRPSRSSDPPALLSATSSSPQTLTLATIPQPPLSSACHSSALPAAHRGRSGSASPSASARRRLRSRNTLRLPAPRTTFHRLLPPTRPRLSTDLTSTIALVDTTLHLHLHHIRMSTPEGPLHRWTTTGNMSREGGLGPAGSGSGNGRYGAGTGLAVGAVAGALGGLAIDEAVKYKEDKGAERVEEKVVPAGRDDYSEYRGDY

SEQ ID NO: 24317 - protein, 265 aa, Zea mays subsp. mays
  peptide (1)..(265): Ceres Seq. ID no. 12352082
  misc_feature (47)..(137): Pfam Name: Pfam Description:  C2 domain
  misc_feature (1)..(263): NCBI GI NO: 34908388 NR Description: P0529E05.20
  misc_feature (45)..(262): NCBI GI NO: 18390752 NR Description: extensin-related; protein id: At1g07310
  misc_feature (46)..(202): NCBI GI NO: 10176862 NR Description: emb|CAB80929
  misc_feature (46)..(202): NCBI GI NO: 30689212 NR Description: C2 domain-containing protein
  misc_feature (102)..(245): NCBI GI NO: 7488673 NR Description: extensin homolog - soybean (fragment)
  misc_feature (1)..(37): NCBI GI NO: 7488673 NR Description: extensin homolog - soybean (fragment)
  misc_feature (185)..(245): NCBI GI NO: 11121504 NR Description: extensin [Nicotiana sylvestris]
  misc_feature (1)..(37): NCBI GI NO: 11121504 NR Description: extensin [Nicotiana sylvestris]
  misc_feature (102)..(249): NCBI GI NO: 7488673 NR Description: extensin homolog - soybean (fragment)
  misc_feature (1)..(37): NCBI GI NO: 7488673 NR Description: extensin homolog - soybean (fragment)
MASPSPSSPLHPHQHPPPPNVHHQFQSLPPSMPPPPPSTALPKALDLEVTVVCGKHLKNVNWRRGDLRAYVVVYLDPSRRAATRPDDGGGCKPTWNERLVLPLPPHLSPHDPSILLSLDVFHSKPSDSPKPLVGSARSPLRDLLFPANPNPSHDPAASALVSLPLLRPSGRPQGKIRIRVAIRERSPPPPEPQYPPPSSSPYYFPPPPPAYSAPPQYGSDQYYRPSGYYSAPAPPPHPYEYTGGPSAPVDYNRQYEQRGRTGARW

SEQ ID NO: 24318 - DNA, 1571 bp, Zea mays subsp. mays
  misc_feature (1)..(1571): Ceres Seq. ID no. 12345899
aacacatcacaagagagccaagggctagccgatcaacaacaccactagcctctcctatcctagctagctagcttccaccggccggaagaaaaaaaaatggtggcgagcaaggccgccccgttcgacgaggtgtcctcggtggaggcgggggcctacgggggccgcgacgacgacgggcggccgcgccggacgggcacggtgtggacggccagcgcccacattatcacggccgtcatcggctccggggtgctctcgctggcgtgggccatcgcgcagctgggctgggccgcgggccccgccgtcatgctgctcttcgccgtcgtcatctactacacctccacgctgctcgccgagtgctaccgctccggcgacccagtggcggggaagcgcaactacacctacatggacgccgtccgcgcaagcctcggcggcgccaagcgccatcaagagggcggactgcttccacgccaagggccacaagcacgcgtgccgcagctccagcaacccctacatgatcctcttcggcgtcgccgaggtcgtcttctcgcagataccggacttcgaccagatttggtggctctccatcgtcgccgccgtcatgtccttcacctacgccaccatcggcctcgtcctcggcatcatgcagaccgtcgccaacgggggcttccagggcagcctcaccgggatcagcatcggcgccggcgtcaccccgacggagaaggtctggcggagcctgcaggccttcggcaacatcgccttcgcctattcctactccatcatcctcatcgagatccaggacacggtcaaggcgccgccgccatccgaggccaaggtgatgaagagggcgaccatggtgagcgtggccaccacaacggtgttctacatgctgtgcgggtgcatgggctacgccgccttcggcgacgccgcgccggacaacctcctcaccggcttcggcttctacgagcccttctggctgctggacatcgccaacgtcgccatcgtcgtgcacctcgtcggcgcctaccaggtcttctgccagccgctcttcgccttcgtcgagaagtgggcagcggccacgtggcccgacagcgccttcatcgcccgggagttccgcgtgggccccttcgcgctcagcctgttccgcctcacctggcgcacggcgttcgtgtgcctcaccaccgtcgccgccatgctgctccccttcttcggcgacgtcgtcggcctgctcggcgccgtctccttctggccgctcaccgtctacttccccatcgagatgtacgtcgtgcagcgcgccgtgcgcaggtggagcacgcactggatctgcctccagatgctcagcgctgcgtgcctcctcgtgtccgtcgccgccgcagcgggctccatcgccgacgtcatcggcgcgctcaaggtgtaccgcccgttcagcggctagttcagataggggcccaacgaggcgtgtgccgtgcacatgagtagtgccagtggtatctctactggtcggggtgctacattgactgtggggtcccgggttgttgtaacttgtaagatatagccaaatgaaaaacaaagct

SEQ ID NO: 24319 - protein, 459 aa, Zea mays subsp. mays
  peptide (1)..(459): Ceres Seq. ID no. 12345900
  misc_feature (135)..(203): Pfam Name: Pfam Description:  Sperm histone P2
  misc_feature (6)..(114): NCBI GI NO: 20161442 NR Description: putative amino acid transport protein
  misc_feature (9)..(114): NCBI GI NO: 7442735 NR Description: amino acid transport protein AAP1 - castor bean
  misc_feature (12)..(114): NCBI GI NO: 21553710 NR Description: amino acid carrier, putative
  misc_feature (12)..(114): NCBI GI NO: 15223930 NR Description: amino acid carrier, putative; protein id:At1g77380
  misc_feature (24)..(112): NCBI GI NO: 27447657 NR Description: amino acid transporter [Lycopersicon esculentum]
  misc_feature (24)..(114): NCBI GI NO: 15242347 NR Description: amino acid transport protein AAP2
  misc_feature (24)..(114): NCBI GI NO: 21536895 NR Description: amino acid transport protein AAP2
  misc_feature (24)..(112): NCBI GI NO: 20260650 NR Description: amino acid transporter AAP4 [Arabidopsis thaliana]
  misc_feature (24)..(112): NCBI GI NO: 15237539 NR Description: amino acid transporter AAP4
  misc_feature (24)..(112): NCBI GI NO: 608671 NR Description: amino acid transporter [Arabidopsis thaliana]
MVASKAAPFDEVSSVEAGAYGGRDDDGRPRRTGTVWTASAHIITAVIGSGVLSLAWAIAQLGWAAGPAVMLLFAVVIYYTSTLLAECYRSGDPVAGKRNYTYMDAVRASLGGAKRHQEGGLLPRQGPQARVPQLQQPLHDPLRRRRGRLLADTGLRPDLVALHRRRRHVLHLRHHRPRPRHHADRRQRGLPGQPHRDQHRRRRHPDGEGLAEPAGLRQHRLRLFLLHHPHRDPGHGQGAAAIRGQGDEEGDHGERGHHNGVLHAVRVHGLRRLRRRRAGQPPHRLRLLRALLAAGHRQRRHRRAPRRRLPGLLPAALRLRREVGSGHVARQRLHRPGVPRGPLRAQPVPPHLAHGVRVPHHRRRHAAPLLRRRRRPARRRLLLAAHRLLPHRDVRRAARRAQVEHALDLPPDAQRCVPPRVRRRRSGLHRRRHRRAQGVPPVQRLVQIGAQRGVCRAHE

SEQ ID NO: 24320 - protein, 390 aa, Zea mays subsp. mays
  peptide (1)..(390): Ceres Seq. ID no. 12345901
  misc_feature (66)..(134): Pfam Name: Pfam Description:  Sperm histone P2
  misc_feature (1)..(45): NCBI GI NO: 20161442 NR Description: putative amino acid transport protein
  misc_feature (1)..(45): NCBI GI NO: 7442735 NR Description: amino acid transport protein AAP1 - castor bean
  misc_feature (1)..(45): NCBI GI NO: 21553710 NR Description: amino acid carrier, putative
  misc_feature (1)..(45): NCBI GI NO: 15223930 NR Description: amino acid carrier, putative; protein id:At1g77380
  misc_feature (1)..(43): NCBI GI NO: 27447657 NR Description: amino acid transporter [Lycopersicon esculentum]
  misc_feature (1)..(45): NCBI GI NO: 15242347 NR Description: amino acid transport protein AAP2
  misc_feature (1)..(45): NCBI GI NO: 21536895 NR Description: amino acid transport protein AAP2
  misc_feature (1)..(43): NCBI GI NO: 20260650 NR Description: amino acid transporter AAP4 [Arabidopsis thaliana]
  misc_feature (1)..(43): NCBI GI NO: 15237539 NR Description: amino acid transporter AAP4
  misc_feature (1)..(43): NCBI GI NO: 608671 NR Description: amino acid transporter [Arabidopsis thaliana]
MLLFAVVIYYTSTLLAECYRSGDPVAGKRNYTYMDAVRASLGGAKRHQEGGLLPRQGPQARVPQLQQPLHDPLRRRRGRLLADTGLRPDLVALHRRRRHVLHLRHHRPRPRHHADRRQRGLPGQPHRDQHRRRRHPDGEGLAEPAGLRQHRLRLFLLHHPHRDPGHGQGAAAIRGQGDEEGDHGERGHHNGVLHAVRVHGLRRLRRRRAGQPPHRLRLLRALLAAGHRQRRHRRAPRRRLPGLLPAALRLRREVGSGHVARQRLHRPGVPRGPLRAQPVPPHLAHGVRVPHHRRRHAAPLLRRRRRPARRRLLLAAHRLLPHRDVRRAARRAQVEHALDLPPDAQRCVPPRVRRRRSGLHRRRHRRAQGVPPVQRLVQIGAQRGVCRAHE

SEQ ID NO: 24321 - protein, 357 aa, Zea mays subsp. mays
  peptide (1)..(357): Ceres Seq. ID no. 12345902
  misc_feature (33)..(101): Pfam Name: Pfam Description:  Sperm histone P2
  misc_feature (1)..(12): NCBI GI NO: 20161442 NR Description: putative amino acid transport protein
  misc_feature (1)..(12): NCBI GI NO: 7442735 NR Description: amino acid transport protein AAP1 - castor bean
  misc_feature (1)..(12): NCBI GI NO: 21553710 NR Description: amino acid carrier, putative
  misc_feature (1)..(12): NCBI GI NO: 15223930 NR Description: amino acid carrier, putative; protein id:At1g77380
  misc_feature (1)..(12): NCBI GI NO: 15242347 NR Description: amino acid transport protein AAP2
  misc_feature (1)..(12): NCBI GI NO: 21536895 NR Description: amino acid transport protein AAP2
  misc_feature (1)..(12): NCBI GI NO: 608673 NR Description: amino acid permease [Arabidopsis thaliana]
  misc_feature (1)..(12): NCBI GI NO: 15240523 NR Description: amino acid permease 6 (emb CAA65051
  misc_feature (251)..(271): NCBI GI NO: 34912696 NR Description: P0686E09.18
MDAVRASLGGAKRHQEGGLLPRQGPQARVPQLQQPLHDPLRRRRGRLLADTGLRPDLVALHRRRRHVLHLRHHRPRPRHHADRRQRGLPGQPHRDQHRRRRHPDGEGLAEPAGLRQHRLRLFLLHHPHRDPGHGQGAAAIRGQGDEEGDHGERGHHNGVLHAVRVHGLRRLRRRRAGQPPHRLRLLRALLAAGHRQRRHRRAPRRRLPGLLPAALRLRREVGSGHVARQRLHRPGVPRGPLRAQPVPPHLAHGVRVPHHRRRHAAPLLRRRRRPARRRLLLAAHRLLPHRDVRRAARRAQVEHALDLPPDAQRCVPPRVRRRRSGLHRRRHRRAQGVPPVQRLVQIGAQRGVCRAHE

SEQ ID NO: 24322 - protein, 306 aa, Zea mays subsp. mays
  peptide (1)..(306): Ceres Seq. ID no. 12345903
  misc_feature (1)..(306): NCBI GI NO: 20161442 NR Description: putative amino acid transport protein
  misc_feature (1)..(304): NCBI GI NO: 7442735 NR Description: amino acid transport protein AAP1 - castor bean
  misc_feature (1)..(304): NCBI GI NO: 21553710 NR Description: amino acid carrier, putative
  misc_feature (1)..(304): NCBI GI NO: 15223930 NR Description: amino acid carrier, putative; protein id:At1g77380
  misc_feature (1)..(304): NCBI GI NO: 27447657 NR Description: amino acid transporter [Lycopersicon esculentum]
  misc_feature (1)..(304): NCBI GI NO: 15242347 NR Description: amino acid transport protein AAP2
  misc_feature (1)..(304): NCBI GI NO: 21536895 NR Description: amino acid transport protein AAP2
  misc_feature (1)..(304): NCBI GI NO: 20260650 NR Description: amino acid transporter AAP4 [Arabidopsis thaliana]
  misc_feature (1)..(304): NCBI GI NO: 15237539 NR Description: amino acid transporter AAP4
  misc_feature (1)..(304): NCBI GI NO: 608671 NR Description: amino acid transporter [Arabidopsis thaliana]
MILFGVAEVVFSQIPDFDQIWWLSIVAAVMSFTYATIGLVLGIMQTVANGGFQGSLTGISIGAGVTPTEKVWRSLQAFGNIAFAYSYSIILIEIQDTVKAPPPSEAKVMKRATMVSVATTTVFYMLCGCMGYAAFGDAAPDNLLTGFGFYEPFWLLDIANVAIVVHLVGAYQVFCQPLFAFVEKWAAATWPDSAFIAREFRVGPFALSLFRLTWRTAFVCLTTVAAMLLPFFGDVVGLLGAVSFWPLTVYFPIEMYVVQRAVRRWSTHWICLQMLSAACLLVSVAAAAGSIADVIGALKVYRPFSG

SEQ ID NO: 24323 - DNA, 1601 bp, Zea mays subsp. mays
  misc_feature (1)..(1601): Ceres Seq. ID no. 12358266
atccacttcgcccgcccgcccgctgcctgactgccattattgcctcccggtcttcgctgtccatccgaccgtccgtggcttctccctccggtccccgctacccgccccgccccgccgagaagcttcgggctagctagcaagctagctagccacctacccgtgctttggttcggttggttggcgccatagccattgccgaggagcgagggagcagccgggcgggcagtcaggaggcggtgagtaagcatgctgggagcgagccccaggggcaggaaggccgccgcgccgccggtgaagctggggtcggcgaaggaggcgccggcggccggtggagctggaggagggagcggcggcaaggtgctggcggaggaggtgtgggaggtgcggcccggcgggatgctggtgcagaagaggggcggcggcgacgacgagccgtcgcccaacgtgaagcccgtgcccaccatccgggtcaaggtcaagcacgccggcgtcacgcacgagatctacatcagttccgaggcctccttcggggagctgaagaagctggtggccgccaagacggggctgcaccccgacgaccagaaggtgctgtacaaggacagggagcgtgactccaaggcgttcctggacacggccggcgtcagggaccgctccaaggtggtggtgctggaggaccccgaggcccgcgcgcgccgcctcatcggggagcgccgcagcggccacctccagaaggccgccagggccgtcgccgcggtcaccgccgaggtcgacaagctggcacccaaggtggcggcgttggacgcgtcggtgcgcaggggggagaaggtcgcggagaaggatgtggtgcaggtgacggagctgctaatgaacgagctgctcaggctcgacgccgtggtcgcggacggcgacgtcaaggcgcagaggcggatgcaggtgaagcgcgtccagaagtacgtggagacgctggacgcggtggcggccaagaacgccgccctcgtcggcaagtccggcgagaaggccgcggccaagccggcgccggcgccggcgccggccccggccccgccgccgcggcagcagggacaggggcagacgcggtgggagatgttcgacctgctgtcgtcgctgccgtccacgtcctcggcctcgtcaacgacgaccgtgagctccacggcgtcctccggcgcgccgccgccgagccgcccggactggatgctcttctgacgagggagggacggcggccccgcaccggccggccaccggcgcgaaagcgaaaggcgagtgcttgatgcggtgcgatgcttgtgtgccaaaaattgcaccccaaatctggtagctcgtcgagtgtcctgatgaggccatgattgggcaggcggggggctatctagctttgggccacacagctgcattgcgttgggctgcatggtaccgtaccagccaattcgagttcatcaatcatgtggtgtgagagtattttttttcttcttcacctctcctttttctttccttccttttgagtttttttttccttctcctcctcctcctcttcttcttcttgttcatggaaggtttgggattcttttggagtgcatactatactattc

SEQ ID NO: 24324 - protein, 324 aa, Zea mays subsp. mays
  peptide (1)..(324): Ceres Seq. ID no. 12358267
  misc_feature (163)..(243): Pfam Name: Pfam Description:  BAG domain
  misc_feature (1)..(324): NCBI GI NO: 25553557 NR Description: OSJNBa0038F22.4
  misc_feature (10)..(324): NCBI GI NO: 34898024 NR Description: ESTs AU082174
  misc_feature (29)..(261): NCBI GI NO: 15242267 NR Description: putative protein; protein id: At5g52060.1
  misc_feature (31)..(318): NCBI GI NO: 21537107 NR Description: unknown [Arabidopsis thaliana]
  misc_feature (31)..(318): NCBI GI NO: 15240726 NR Description: putative protein; protein id: At5g07220
  misc_feature (45)..(298): NCBI GI NO: 30697630 NR Description: BAG domain containing protein
  misc_feature (23)..(250): NCBI GI NO: 38344334 NR Description: OSJNBa0058K23.16
  misc_feature (23)..(250): NCBI GI NO: 6624711 NR Description: hypothetical protein
  misc_feature (45)..(248): NCBI GI NO: 21553443 NR Description: unknown [Arabidopsis thaliana]
  misc_feature (45)..(248): NCBI GI NO: 30697627 NR Description: BAG domain containing protein
MLGASPRGRKAAAPPVKLGSAKEAPAAGGAGGGSGGKVLAEEVWEVRPGGMLVQKRGGGDDEPSPNVKPVPTIRVKVKHAGVTHEIYISSEASFGELKKLVAAKTGLHPDDQKVLYKDRERDSKAFLDTAGVRDRSKVVVLEDPEARARRLIGERRSGHLQKAARAVAAVTAEVDKLAPKVAALDASVRRGEKVAEKDVVQVTELLMNELLRLDAVVADGDVKAQRRMQVKRVQKYVETLDAVAAKNAALVGKSGEKAAAKPAPAPAPAPAPPPRQQGQGQTRWEMFDLLSSLPSTSSASSTTTVSSTASSGAPPPSRPDWMLF

SEQ ID NO: 24325 - protein, 274 aa, Zea mays subsp. mays
  peptide (1)..(274): Ceres Seq. ID no. 12358268
  misc_feature (113)..(193): Pfam Name: Pfam Description:  BAG domain
  misc_feature (1)..(274): NCBI GI NO: 25553557 NR Description: OSJNBa0038F22.4
  misc_feature (1)..(274): NCBI GI NO: 34898024 NR Description: ESTs AU082174
  misc_feature (1)..(211): NCBI GI NO: 15242267 NR Description: putative protein; protein id: At5g52060.1
  misc_feature (1)..(268): NCBI GI NO: 21537107 NR Description: unknown [Arabidopsis thaliana]
  misc_feature (1)..(268): NCBI GI NO: 15240726 NR Description: putative protein; protein id: At5g07220
  misc_feature (1)..(248): NCBI GI NO: 30697630 NR Description: BAG domain containing protein
  misc_feature (1)..(200): NCBI GI NO: 38344334 NR Description: OSJNBa0058K23.16
  misc_feature (1)..(200): NCBI GI NO: 6624711 NR Description: hypothetical protein
  misc_feature (1)..(198): NCBI GI NO: 21553443 NR Description: unknown [Arabidopsis thaliana]
  misc_feature (1)..(198): NCBI GI NO: 30697627 NR Description: BAG domain containing protein
MLVQKRGGGDDEPSPNVKPVPTIRVKVKHAGVTHEIYISSEASFGELKKLVAAKTGLHPDDQKVLYKDRERDSKAFLDTAGVRDRSKVVVLEDPEARARRLIGERRSGHLQKAARAVAAVTAEVDKLAPKVAALDASVRRGEKVAEKDVVQVTELLMNELLRLDAVVADGDVKAQRRMQVKRVQKYVETLDAVAAKNAALVGKSGEKAAAKPAPAPAPAPAPPPRQQGQGQTRWEMFDLLSSLPSTSSASSTTTVSSTASSGAPPPSRPDWMLF

SEQ ID NO: 24326 - DNA, 1325 bp, Zea mays subsp. mays
  misc_feature (1)..(1325): Ceres Seq. ID no. 12410620
actacaccagggcacgacgagcgttgcgtcgtgagtgtttgtgtttcagagctgagactgagagagagagagagaggtggtgatggctctgcaggcgcaggggacgcgggtgccgctggtcctggcgctcttcctcctcctggccggttgtggcagcgaggcgcagccgctggtgccggcgctgtttacgttcggtgactcgtcggtggacgtcgggaacaacgactacctccacaccatcatcaaggccaacttcccgccctacggcagggacttcgccaaccacgtcgccaccgggaggttctgcaacggcaagctggcgaccgacatcaccgccgacacgctggggttcactacctatcctgccgtgtacctcagcccacaggcgtcggggcagaacctcctcatcggcgccaacttcgcgtccgcggggtctgggtactacgaccacacggcacttatgtatcacgcgatcccgctgtcccagcagctggagtacttcagggagtaccagacgaagctggcggcggtggccggcgcggggcaggcgcgctccatcctcagcggcgcgctgtacatcgtcagcgccggcgccagcgacttcgtgcagaactactacataaacccgctgctgttcaagacgcagacggccgaccagttctccgaccgcctcgtggccatcttcggccgcaccgtgcaggagctctacggcatgggggcgcgccgcgtcggcgtcacgtcgctgccgccgctgggctgcctgccggcgtccatcacgctgttcgggcacggcgccgccgggtgcgtgtccaggctcaacagcgacgcgcagagcttcaaccggaagatgaacgccaccgtggacgcgctggcgcggcggtacccggacctcaagatcgccgtcttcgacatctacacgccgctgtacgacctggccacggacccccagtcgcagggcttcgcggaggcccggcggggatgctgcgggacgggcacggtggagaccaccgtgctcctctgcaaccccaagtccgtcgggacgtgccccaacgccacgtcctacgtcttctgggacgccgtccacccgtccgaggcggccaaccaggtcatcgctgactcgctcatcaccgagggcctcatcctcgtcacgtaatcatgcttttgttttggcttcaaatcgatcagactacacaaaagtcgtcgttcctaaacgtatactatgcctgtaaatttattcctcttgtttttcttatttgcgttgattaatgttttcggaagtataagcaacaacatgaatgaatgaatgaatgaatgaatggactcct

SEQ ID NO: 24327 - protein, 356 aa, Zea mays subsp. mays
  peptide (1)..(356): Ceres Seq. ID no. 12410621
  misc_feature (34)..(347): Pfam Name: Pfam Description:  GDSL-like Lipase/Acylhydrolase
  misc_feature (25)..(355): NCBI GI NO: 15228189 NR Description: putative APG protein; protein id: At3g16370
  misc_feature (36)..(355): NCBI GI NO: 2062167 NR Description: Proline-rich protein APG isolog
  misc_feature (8)..(355): NCBI GI NO: 10638955 NR Description: putative proline-rich protein APG isolog
  misc_feature (26)..(356): NCBI GI NO: 15237137 NR Description: GDSL-motif lipase/hydrolase-like protein
  misc_feature (3)..(356): NCBI GI NO: 13174242 NR Description: putative proline-rich protein [Oryza sativa]
  misc_feature (13)..(356): NCBI GI NO: 15237531 NR Description: putative protein; protein id: At5g03820.1
  misc_feature (13)..(356): NCBI GI NO: 9758010 NR Description: proline-rich protein APG-like
  misc_feature (38)..(356): NCBI GI NO: 15237528 NR Description: putative protein; protein id: At5g03810.1
  misc_feature (32)..(348): NCBI GI NO: 18394825 NR Description: anter-specific proline-rich protein APG precursor
  misc_feature (32)..(348): NCBI GI NO: 21592372 NR Description: anter-specific proline-rich protein APG precursor
MALQAQGTRVPLVLALFLLLAGCGSEAQPLVPALFTFGDSSVDVGNNDYLHTIIKANFPPYGRDFANHVATGRFCNGKLATDITADTLGFTTYPAVYLSPQASGQNLLIGANFASAGSGYYDHTALMYHAIPLSQQLEYFREYQTKLAAVAGAGQARSILSGALYIVSAGASDFVQNYYINPLLFKTQTADQFSDRLVAIFGRTVQELYGMGARRVGVTSLPPLGCLPASITLFGHGAAGCVSRLNSDAQSFNRKMNATVDALARRYPDLKIAVFDIYTPLYDLATDPQSQGFAEARRGCCGTGTVETTVLLCNPKSVGTCPNATSYVFWDAVHPSEAANQVIADSLITEGLILVT

SEQ ID NO: 24328 - protein, 230 aa, Zea mays subsp. mays
  peptide (1)..(230): Ceres Seq. ID no. 12410622
  misc_feature (1)..(221): Pfam Name: Pfam Description:  GDSL-like Lipase/Acylhydrolase
  misc_feature (1)..(229): NCBI GI NO: 15228189 NR Description: putative APG protein; protein id: At3g16370
  misc_feature (1)..(229): NCBI GI NO: 2062167 NR Description: Proline-rich protein APG isolog
  misc_feature (1)..(229): NCBI GI NO: 10638955 NR Description: putative proline-rich protein APG isolog
  misc_feature (1)..(230): NCBI GI NO: 15237137 NR Description: GDSL-motif lipase/hydrolase-like protein
  misc_feature (1)..(230): NCBI GI NO: 13174242 NR Description: putative proline-rich protein [Oryza sativa]
  misc_feature (1)..(230): NCBI GI NO: 15237531 NR Description: putative protein; protein id: At5g03820.1
  misc_feature (1)..(230): NCBI GI NO: 9758010 NR Description: proline-rich protein APG-like
  misc_feature (1)..(230): NCBI GI NO: 15237528 NR Description: putative protein; protein id: At5g03810.1
  misc_feature (1)..(222): NCBI GI NO: 18394825 NR Description: anter-specific proline-rich protein APG precursor
  misc_feature (1)..(222): NCBI GI NO: 21592372 NR Description: anter-specific proline-rich protein APG precursor
MYHAIPLSQQLEYFREYQTKLAAVAGAGQARSILSGALYIVSAGASDFVQNYYINPLLFKTQTADQFSDRLVAIFGRTVQELYGMGARRVGVTSLPPLGCLPASITLFGHGAAGCVSRLNSDAQSFNRKMNATVDALARRYPDLKIAVFDIYTPLYDLATDPQSQGFAEARRGCCGTGTVETTVLLCNPKSVGTCPNATSYVFWDAVHPSEAANQVIADSLITEGLILVT

SEQ ID NO: 24329 - DNA, 1360 bp, Zea mays subsp. mays
  misc_feature (1)..(1360): Ceres Seq. ID no. 12410616
aattactgtgcctttatcttcaacccaaaccatccattaccatattcctaagctatcatggtgcaccggacttccatagccgatgtgcatgtgatgtgcatggatctaagcccaaagaaacccaacaaggccagcgccagcgacggcggagcctactacgactggtcccccgccgatctgcccatgctcggcgttgcctccattggtgccgccaagctctgcctcaccgccggaggtcttgccctacccagctactccgactctgccaagatcgcctacgtcctccaaggcaaaggtatattcggcgtggttctcccggaggcgaccaaggagaaggtcatctccgtcaaggaaggcgacgcgctggcgctccccttcggcgtcgtcacctggtggcacaacaacgccgacgccgctatctccgacctcgtggtgctcttcctcggcgacacctccacgggccacaagccgggccagttcacaaacttccagctcaccggctccacgggcatcttcacgggcttctccacagagttcgttgcccgcgcatgggacctcacccaggacgacgccgccaagctcgtctccacccagcccggatccggcattgtcagggtcaaggacgggcacaagatgcccgaggcgcgcgacgaggacaggcagggcctggtcctcaactgcctagaggcgccgcttgacgtcgacatcaagaacggagggcgcgtcgtggtcctcaacacccagaacctgccgctcgtcaaggaggtcgggctcggtgctgaccttgtcaggatcgacgcccactccatgtgctcgcccggcttctcctgcgactccgcctaccaggtcacctacatcgtgcgcggcagtggccgcgtccaggttgttgggatcgacggcacgcgagtgctcgagactcgcgccgagggaggctgcctcttcatcgtgccaaggttcttcgttgtctcaaagatcgccgacgaaaccggcatggagtggttctccatcatcaccacccccaacccaatctttagccacttggcgggccggacatcggtgtggaaggcaatatctccggcggtcttgcagtcgtcgttcaacaccacgccggagatggagaagctgttccgtagcaagaggcttgactcggagatcttctttgcgccttcaaactgattcattcgccggtggaaattggtccatccatctcgagtaaacttggtgtcctgggtgtgttcttagcagcttcagtttagaataatcatgttatgtcttcatcatcagttttttagatcgcttcatgtaataataaacttgagatggtacacatgtttcttaattagttctcttggtatttttt

SEQ ID NO: 24330 - protein, 372 aa, Zea mays subsp. mays
  peptide (1)..(372): Ceres Seq. ID no. 12410617
  misc_feature (206)..(354): Pfam Name: Pfam Description:  Cupin
  misc_feature (1)..(372): NCBI GI NO: 37730876 NR Description: legumin-like protein [Zea mays]
  misc_feature (1)..(372): NCBI GI NO: 34906084 NR Description: putative legumin-like protein
  misc_feature (15)..(372): NCBI GI NO: 28950668 NR Description: legumin-like protein [Zea mays]
  misc_feature (15)..(370): NCBI GI NO: 28950670 NR Description: legumin-like protein [Zea mays]
  misc_feature (13)..(372): NCBI GI NO: 15226926 NR Description: legumin-like protein; protein id: At2g28680.1
  misc_feature (13)..(372): NCBI GI NO: 21593610 NR Description: globulin-like protein [Arabidopsis thaliana]
  misc_feature (13)..(372): NCBI GI NO: 15223000 NR Description: globulin-like protein; protein id: At1g07750
  misc_feature (13)..(195): NCBI GI NO: 7595348 NR Description: globulin-like protein [Cucumis melo]
  misc_feature (212)..(367): NCBI GI NO: 29839254 NR Description: 13S globulin seed storage protein 1 precursor
  misc_feature (11)..(87): NCBI GI NO: 29839254 NR Description: 13S globulin seed storage protein 1 precursor
MVHRTSIADVHVMCMDLSPKKPNKASASDGGAYYDWSPADLPMLGVASIGAAKLCLTAGGLALPSYSDSAKIAYVLQGKGIFGVVLPEATKEKVISVKEGDALALPFGVVTWWHNNADAAISDLVVLFLGDTSTGHKPGQFTNFQLTGSTGIFTGFSTEFVARAWDLTQDDAAKLVSTQPGSGIVRVKDGHKMPEARDEDRQGLVLNCLEAPLDVDIKNGGRVVVLNTQNLPLVKEVGLGADLVRIDAHSMCSPGFSCDSAYQVTYIVRGSGRVQVVGIDGTRVLETRAEGGCLFIVPRFFVVSKIADETGMEWFSIITTPNPIFSHLAGRTSVWKAISPAVLQSSFNTTPEMEKLFRSKRLDSEIFFAPSN

SEQ ID NO: 24331 - protein, 360 aa, Zea mays subsp. mays
  peptide (1)..(360): Ceres Seq. ID no. 12410618
  misc_feature (194)..(342): Pfam Name: Pfam Description:  Cupin
  misc_feature (1)..(360): NCBI GI NO: 37730876 NR Description: legumin-like protein [Zea mays]
  misc_feature (1)..(360): NCBI GI NO: 34906084 NR Description: putative legumin-like protein
  misc_feature (3)..(360): NCBI GI NO: 28950668 NR Description: legumin-like protein [Zea mays]
  misc_feature (3)..(358): NCBI GI NO: 28950670 NR Description: legumin-like protein [Zea mays]
  misc_feature (1)..(360): NCBI GI NO: 15226926 NR Description: legumin-like protein; protein id: At2g28680.1
  misc_feature (1)..(360): NCBI GI NO: 21593610 NR Description: globulin-like protein [Arabidopsis thaliana]
  misc_feature (1)..(360): NCBI GI NO: 15223000 NR Description: globulin-like protein; protein id: At1g07750
  misc_feature (1)..(183): NCBI GI NO: 7595348 NR Description: globulin-like protein [Cucumis melo]
  misc_feature (200)..(355): NCBI GI NO: 29839254 NR Description: 13S globulin seed storage protein 1 precursor
  misc_feature (1)..(75): NCBI GI NO: 29839254 NR Description: 13S globulin seed storage protein 1 precursor
MCMDLSPKKPNKASASDGGAYYDWSPADLPMLGVASIGAAKLCLTAGGLALPSYSDSAKIAYVLQGKGIFGVVLPEATKEKVISVKEGDALALPFGVVTWWHNNADAAISDLVVLFLGDTSTGHKPGQFTNFQLTGSTGIFTGFSTEFVARAWDLTQDDAAKLVSTQPGSGIVRVKDGHKMPEARDEDRQGLVLNCLEAPLDVDIKNGGRVVVLNTQNLPLVKEVGLGADLVRIDAHSMCSPGFSCDSAYQVTYIVRGSGRVQVVGIDGTRVLETRAEGGCLFIVPRFFVVSKIADETGMEWFSIITTPNPIFSHLAGRTSVWKAISPAVLQSSFNTTPEMEKLFRSKRLDSEIFFAPSN

SEQ ID NO: 24332 - protein, 358 aa, Zea mays subsp. mays
  peptide (1)..(358): Ceres Seq. ID no. 12410619
  misc_feature (192)..(340): Pfam Name: Pfam Description:  Cupin
  misc_feature (1)..(358): NCBI GI NO: 37730876 NR Description: legumin-like protein [Zea mays]
  misc_feature (1)..(358): NCBI GI NO: 34906084 NR Description: putative legumin-like protein
  misc_feature (1)..(358): NCBI GI NO: 28950668 NR Description: legumin-like protein [Zea mays]
  misc_feature (1)..(356): NCBI GI NO: 28950670 NR Description: legumin-like protein [Zea mays]
  misc_feature (1)..(358): NCBI GI NO: 15226926 NR Description: legumin-like protein; protein id: At2g28680.1
  misc_feature (1)..(358): NCBI GI NO: 21593610 NR Description: globulin-like protein [Arabidopsis thaliana]
  misc_feature (1)..(358): NCBI GI NO: 15223000 NR Description: globulin-like protein; protein id: At1g07750
  misc_feature (1)..(181): NCBI GI NO: 7595348 NR Description: globulin-like protein [Cucumis melo]
  misc_feature (198)..(353): NCBI GI NO: 29839254 NR Description: 13S globulin seed storage protein 1 precursor
  misc_feature (1)..(73): NCBI GI NO: 29839254 NR Description: 13S globulin seed storage protein 1 precursor
MDLSPKKPNKASASDGGAYYDWSPADLPMLGVASIGAAKLCLTAGGLALPSYSDSAKIAYVLQGKGIFGVVLPEATKEKVISVKEGDALALPFGVVTWWHNNADAAISDLVVLFLGDTSTGHKPGQFTNFQLTGSTGIFTGFSTEFVARAWDLTQDDAAKLVSTQPGSGIVRVKDGHKMPEARDEDRQGLVLNCLEAPLDVDIKNGGRVVVLNTQNLPLVKEVGLGADLVRIDAHSMCSPGFSCDSAYQVTYIVRGSGRVQVVGIDGTRVLETRAEGGCLFIVPRFFVVSKIADETGMEWFSIITTPNPIFSHLAGRTSVWKAISPAVLQSSFNTTPEMEKLFRSKRLDSEIFFAPSN

SEQ ID NO: 24333 - DNA, 1626 bp, Zea mays subsp. mays
  misc_feature (1)..(1626): Ceres Seq. ID no. 12358604
acccaaaatttccccatctccgacctcccccttcctctccccctgccgctccccgcgccgagaaggagaaccccagccgccgcgcagcgcgccgcccatggcctcctcgtcggagaacgcggctgtgccgccggaggaggagccccaggccccgccgccgccggacacagagcctaccgaggcggcgcccggcgaggcggaggatgagccgcaaaccctagagcgggcgcagaagctcttcgacaggggttccaaggccatcgaggatgaggacttcgtcgacgccgtagactgtctcagccgagcgctcgagatcagggcttcacattatggagagctcgcaccggagtgtgccagcacatacttcaaatatggatgtgccctgctatacaaagctcaggaggagagtgatgttttgggaaatgttcccaagagcttgccaaatgaagactcagtgaagagtacagctactaaagatgacagtggaacctcaaaggtctctggtaccgatgcggaggatgctgcgtcatcagaaaaagttgatgctgaagaaggtcacaactcaaatggcaaaaatcaggagaatgggaatggtgaagttgagaaagatgatgacgacgtcgacgatgatgagaagatgggagatgaagaggataatgatttggatctttcttggaaaatgttggacattgctagggcaatagttgagaagagccaagataacactatggagaaagtaaaaatatattctgctcttgctgaagtggcaacggaaagagaggacatggacaactcactcagtgactatatgaaagctttatccatgttggagcatttggttgagcctgaccatcgtcgagttgtggaattaaacttccgcatttgtttggtttatgaactagtttccaagatcggagaagcaatttcatactgtgcaaaagcaatttcgctatgcaagtcacgcatacagagcctgaaaagttccaaggatgctttgttggctggtatagatggtgatgcatctgctgctgaagctgaaggaggctcagaaaaatctgccattgaaaaagagctagagcagcttactagcatattgcctgatcttgagaagaagcttgaggacctgtctgaagcaaacccaagcgctgacatggatgagatggtgaaggcaatcgtgtccagggtaactgatgtgatgccaaaagctgcatcttttacttcttcccagatggcaacctcaagcaatggattcgactcctcggttatgtctacggcagcgacaaccggaagctctggaagcaccgtgactgaccttggggttgtaggcagaggcgtcaaacgagctagcatcaagccgatctctgctgaacctgctgctaagaaacctgcacttgattcaccatctcaacaaggtgacagcagcatcaactctgaggttgttcctgcaacgcagactggagacgagtcagtatctaagtaaattacaatttcattagccctactgtaatgttaacttgctggaacatattagctgctatgtaaacgcttaagaagggactgctggggccatagactcatcgtgagctgaccattgaaatgttaaattgctgagatcatcatggcggt

SEQ ID NO: 24334 - protein, 492 aa, Zea mays subsp. mays
  peptide (1)..(492): Ceres Seq. ID no. 12358605
  misc_feature (76)..(109): Pfam Name: Pfam Description:  TPR Domain
  misc_feature (33)..(492): NCBI GI NO: 38175649 NR Description: tetratricopeptide repeat-containing protein-like
  misc_feature (141)..(492): NCBI GI NO: 32352192 NR Description: hypothetical protein
  misc_feature (55)..(433): NCBI GI NO: 18419996 NR Description: putative protein; protein id: At4g37210.1
  misc_feature (55)..(376): NCBI GI NO: 25407799 NR Description: hypothetical protein AT4g37210
  misc_feature (62)..(331): NCBI GI NO: 4104353 NR Description: nuclear autoantigenic sperm protein autosomalvariant
  misc_feature (60)..(137): NCBI GI NO: 18129310 NR Description: hypothetical protein [Pinus pinaster]
  misc_feature (33)..(331): NCBI GI NO: 13435642 NR Description: Unknown (protein for MGC:5829) [Mus musculus]
  misc_feature (62)..(331): NCBI GI NO: 27262630 NR Description: nuclear autoantigenic sperm protein isoform 3
  misc_feature (62)..(331): NCBI GI NO: 30584691 NR Description: Homo sapiens nuclear autoantigenic sperm protein
  misc_feature (53)..(483): NCBI GI NO: 123127 NR Description: HISTONE-BINDING PROTEIN N1/N2
PKISPSPTSPFLSPCRSPRREGEPQPPRSAPPMASSSENAAVPPEEEPQAPPPPDTEPTEAAPGEAEDEPQTLERAQKLFDRGSKAIEDEDFVDAVDCLSRALEIRASHYGELAPECASTYFKYGCALLYKAQEESDVLGNVPKSLPNEDSVKSTATKDDSGTSKVSGTDAEDAASSEKVDAEEGHNSNGKNQENGNGEVEKDDDDVDDDEKMGDEEDNDLDLSWKMLDIARAIVEKSQDNTMEKVKIYSALAEVATEREDMDNSLSDYMKALSMLEHLVEPDHRRVVELNFRICLVYELVSKIGEAISYCAKAISLCKSRIQSLKSSKDALLAGIDGDASAAEAEGGSEKSAIEKELEQLTSILPDLEKKLEDLSEANPSADMDEMVKAIVSRVTDVMPKAASFTSSQMATSSNGFDSSVMSTAATTGSSGSTVTDLGVVGRGVKRASIKPISAEPAAKKPALDSPSQQGDSSINSEVVPATQTGDESVSK

SEQ ID NO: 24335 - protein, 460 aa, Zea mays subsp. mays
  peptide (1)..(460): Ceres Seq. ID no. 12358606
  misc_feature (44)..(77): Pfam Name: Pfam Description:  TPR Domain
  misc_feature (1)..(460): NCBI GI NO: 38175649 NR Description: tetratricopeptide repeat-containing protein-like
  misc_feature (109)..(460): NCBI GI NO: 32352192 NR Description: hypothetical protein
  misc_feature (23)..(401): NCBI GI NO: 18419996 NR Description: putative protein; protein id: At4g37210.1
  misc_feature (23)..(344): NCBI GI NO: 25407799 NR Description: hypothetical protein AT4g37210
  misc_feature (30)..(299): NCBI GI NO: 4104353 NR Description: nuclear autoantigenic sperm protein autosomalvariant
  misc_feature (28)..(105): NCBI GI NO: 18129310 NR Description: hypothetical protein [Pinus pinaster]
  misc_feature (1)..(299): NCBI GI NO: 13435642 NR Description: Unknown (protein for MGC:5829) [Mus musculus]
  misc_feature (30)..(299): NCBI GI NO: 27262630 NR Description: nuclear autoantigenic sperm protein isoform 3
  misc_feature (30)..(299): NCBI GI NO: 30584691 NR Description: Homo sapiens nuclear autoantigenic sperm protein
  misc_feature (21)..(451): NCBI GI NO: 123127 NR Description: HISTONE-BINDING PROTEIN N1/N2
MASSSENAAVPPEEEPQAPPPPDTEPTEAAPGEAEDEPQTLERAQKLFDRGSKAIEDEDFVDAVDCLSRALEIRASHYGELAPECASTYFKYGCALLYKAQEESDVLGNVPKSLPNEDSVKSTATKDDSGTSKVSGTDAEDAASSEKVDAEEGHNSNGKNQENGNGEVEKDDDDVDDDEKMGDEEDNDLDLSWKMLDIARAIVEKSQDNTMEKVKIYSALAEVATEREDMDNSLSDYMKALSMLEHLVEPDHRRVVELNFRICLVYELVSKIGEAISYCAKAISLCKSRIQSLKSSKDALLAGIDGDASAAEAEGGSEKSAIEKELEQLTSILPDLEKKLEDLSEANPSADMDEMVKAIVSRVTDVMPKAASFTSSQMATSSNGFDSSVMSTAATTGSSGSTVTDLGVVGRGVKRASIKPISAEPAAKKPALDSPSQQGDSSINSEVVPATQTGDESVSK

SEQ ID NO: 24336 - protein, 280 aa, Zea mays subsp. mays
  peptide (1)..(280): Ceres Seq. ID no. 12358607
  misc_feature (1)..(280): NCBI GI NO: 38175649 NR Description: tetratricopeptide repeat-containing protein-like
  misc_feature (1)..(280): NCBI GI NO: 32352192 NR Description: hypothetical protein
  misc_feature (1)..(221): NCBI GI NO: 18419996 NR Description: putative protein; protein id: At4g37210.1
  misc_feature (1)..(164): NCBI GI NO: 25407799 NR Description: hypothetical protein AT4g37210
  misc_feature (1)..(119): NCBI GI NO: 4104353 NR Description: nuclear autoantigenic sperm protein autosomalvariant
  misc_feature (1)..(119): NCBI GI NO: 13435642 NR Description: Unknown (protein for MGC:5829) [Mus musculus]
  misc_feature (1)..(119): NCBI GI NO: 27262630 NR Description: nuclear autoantigenic sperm protein isoform 3
  misc_feature (1)..(119): NCBI GI NO: 30584691 NR Description: Homo sapiens nuclear autoantigenic sperm protein
  misc_feature (1)..(271): NCBI GI NO: 123127 NR Description: HISTONE-BINDING PROTEIN N1/N2
  misc_feature (1)..(268): NCBI GI NO: 28277791 NR Description: Unknown (protein for MGC:56007) [Danio rerio]
MGDEEDNDLDLSWKMLDIARAIVEKSQDNTMEKVKIYSALAEVATEREDMDNSLSDYMKALSMLEHLVEPDHRRVVELNFRICLVYELVSKIGEAISYCAKAISLCKSRIQSLKSSKDALLAGIDGDASAAEAEGGSEKSAIEKELEQLTSILPDLEKKLEDLSEANPSADMDEMVKAIVSRVTDVMPKAASFTSSQMATSSNGFDSSVMSTAATTGSSGSTVTDLGVVGRGVKRASIKPISAEPAAKKPALDSPSQQGDSSINSEVVPATQTGDESVSK

SEQ ID NO: 24337 - DNA, 1271 bp, Zea mays subsp. mays
  misc_feature (1)..(1271): Ceres Seq. ID no. 12343984
atccaaacaaaagtactacactgaactcaatcatcctcagcggaggaaagcagagcacggcacagcgagtcgcagagggatagatccgagcacaagcaggccccgatggcgacgacggcgacgaaccggcgggtgatcctcaaggagtacgtggagggatacccacgcgaggagcacatggagctgctccggggcgccgaggttcccctccgcctgacgggcgccgagccggccgggtccgtcctcgtcaggaacctctacctctcctgcgacccctacatgcggcccaagatgtcgcgcccgctgcgggagtcctacacggccgccttcgtcccgggcgacaccatcacgggctacggcgtcgcgcgcgtggtcgactcctccgacccgcgcctcgcgcccggggacctcgtctggggcatcaccggctgggaggactacagcgtcgtgacgccgcccgccaccaggctcctctccaagatctcccaccacggggccggggagggggcgggcgtgccgctgtcctactacaccggcatcctcggcatgccggggctcaccgcgtacgtgggcttccacgagatctgcgcgccgaagaagggcgagaccgtgttcgtgtccgccgcgtccggcgccgtcggccagctggtgggccagttcgccaggctcgccggctgccacgtcgtcggcagcgccgggtcccgggagaaggtggagctgctcaagaccaggttcggcttccacgacgccttcaactacaaggaggagcccgacctcggcgccgcgctcaagcgctgcttccccgacggcatcgacatctacttcgagaacgtcggcggcgccatgctcgacgccgtcctgctcaacatgcgcgtgcacggacggatcgccgtctgcgggctcatctcgcagtacaacctggcggacggggagaaggacgccgtgcgcaacctcgccgccgtcatctccaagcgcctccgcctgcaggggttcatcgagcccgaccacaagcacctctacccgcagtacgaggcgtgggtgctgccgtacatcagggacggcacgctcgcctacgtcgaggacgtcgccgaggggctcgagagcgcgcccaaggcgctcataggactcttccacggtcgcaacgtcggaaagcagctcgtccgcgtcgccgacgacgagtgagacgcgcctcacttcgattggaccagacgatccatgtgtcgctgttgctatgtttcgattccccattttcatgaataattaattgtgcc

SEQ ID NO: 24338 - protein, 358 aa, Zea mays subsp. mays
  peptide (1)..(358): Ceres Seq. ID no. 12343985
  misc_feature (100)..(354): Pfam Name: Pfam Description:  Zinc-binding dehydrogenase
  misc_feature (1)..(355): NCBI GI NO: 6692816 NR Description: allyl alcohol dehydrogenase [Nicotiana tabacum]
  misc_feature (5)..(355): NCBI GI NO: 38345384 NR Description: OSJNBa0067K08.13
  misc_feature (4)..(355): NCBI GI NO: 22326861 NR Description: quinone oxidoreductase - like protein
  misc_feature (4)..(355): NCBI GI NO: 17529140 NR Description: putative quinone oxidoreductase
  misc_feature (4)..(355): NCBI GI NO: 15237888 NR Description: quinone oxidoreductase -like protein
  misc_feature (6)..(355): NCBI GI NO: 15237890 NR Description: quinone oxidoreductase - like protein
  misc_feature (4)..(355): NCBI GI NO: 21539447 NR Description: quinone oxidoreductase-like protein
  misc_feature (6)..(355): NCBI GI NO: 21554121 NR Description: quinone oxidoreductase-like protein
  misc_feature (4)..(355): NCBI GI NO: 15228456 NR Description: putative NADP-dependent oxidoreductase
  misc_feature (6)..(355): NCBI GI NO: 1362014 NR Description: probable NADPH2:quinone reductase (EC 1
MATTATNRRVILKEYVEGYPREEHMELLRGAEVPLRLTGAEPAGSVLVRNLYLSCDPYMRPKMSRPLRESYTAAFVPGDTITGYGVARVVDSSDPRLAPGDLVWGITGWEDYSVVTPPATRLLSKISHHGAGEGAGVPLSYYTGILGMPGLTAYVGFHEICAPKKGETVFVSAASGAVGQLVGQFARLAGCHVVGSAGSREKVELLKTRFGFHDAFNYKEEPDLGAALKRCFPDGIDIYFENVGGAMLDAVLLNMRVHGRIAVCGLISQYNLADGEKDAVRNLAAVISKRLRLQGFIEPDHKHLYPQYEAWVLPYIRDGTLAYVEDVAEGLESAPKALIGLFHGRNVGKQLVRVADDE

SEQ ID NO: 24339 - protein, 334 aa, Zea mays subsp. mays
  peptide (1)..(334): Ceres Seq. ID no. 12343986
  misc_feature (76)..(330): Pfam Name: Pfam Description:  Zinc-binding dehydrogenase
  misc_feature (1)..(331): NCBI GI NO: 6692816 NR Description: allyl alcohol dehydrogenase [Nicotiana tabacum]
  misc_feature (1)..(331): NCBI GI NO: 38345384 NR Description: OSJNBa0067K08.13
  misc_feature (1)..(331): NCBI GI NO: 22326861 NR Description: quinone oxidoreductase - like protein
  misc_feature (1)..(331): NCBI GI NO: 17529140 NR Description: putative quinone oxidoreductase
  misc_feature (1)..(331): NCBI GI NO: 15237888 NR Description: quinone oxidoreductase -like protein
  misc_feature (1)..(331): NCBI GI NO: 15237890 NR Description: quinone oxidoreductase - like protein
  misc_feature (1)..(331): NCBI GI NO: 21539447 NR Description: quinone oxidoreductase-like protein
  misc_feature (1)..(331): NCBI GI NO: 21554121 NR Description: quinone oxidoreductase-like protein
  misc_feature (1)..(331): NCBI GI NO: 15228456 NR Description: putative NADP-dependent oxidoreductase
  misc_feature (1)..(331): NCBI GI NO: 1362014 NR Description: probable NADPH2:quinone reductase (EC 1
MELLRGAEVPLRLTGAEPAGSVLVRNLYLSCDPYMRPKMSRPLRESYTAAFVPGDTITGYGVARVVDSSDPRLAPGDLVWGITGWEDYSVVTPPATRLLSKISHHGAGEGAGVPLSYYTGILGMPGLTAYVGFHEICAPKKGETVFVSAASGAVGQLVGQFARLAGCHVVGSAGSREKVELLKTRFGFHDAFNYKEEPDLGAALKRCFPDGIDIYFENVGGAMLDAVLLNMRVHGRIAVCGLISQYNLADGEKDAVRNLAAVISKRLRLQGFIEPDHKHLYPQYEAWVLPYIRDGTLAYVEDVAEGLESAPKALIGLFHGRNVGKQLVRVADDE

SEQ ID NO: 24340 - protein, 300 aa, Zea mays subsp. mays
  peptide (1)..(300): Ceres Seq. ID no. 12343987
  misc_feature (42)..(296): Pfam Name: Pfam Description:  Zinc-binding dehydrogenase
  misc_feature (1)..(297): NCBI GI NO: 6692816 NR Description: allyl alcohol dehydrogenase [Nicotiana tabacum]
  misc_feature (1)..(297): NCBI GI NO: 38345384 NR Description: OSJNBa0067K08.13
  misc_feature (1)..(297): NCBI GI NO: 22326861 NR Description: quinone oxidoreductase - like protein
  misc_feature (1)..(297): NCBI GI NO: 17529140 NR Description: putative quinone oxidoreductase
  misc_feature (1)..(297): NCBI GI NO: 15237888 NR Description: quinone oxidoreductase -like protein
  misc_feature (1)..(297): NCBI GI NO: 15237890 NR Description: quinone oxidoreductase - like protein
  misc_feature (1)..(297): NCBI GI NO: 21539447 NR Description: quinone oxidoreductase-like protein
  misc_feature (1)..(297): NCBI GI NO: 21554121 NR Description: quinone oxidoreductase-like protein
  misc_feature (1)..(297): NCBI GI NO: 15228456 NR Description: putative NADP-dependent oxidoreductase
  misc_feature (1)..(297): NCBI GI NO: 1362014 NR Description: probable NADPH2:quinone reductase (EC 1
MRPKMSRPLRESYTAAFVPGDTITGYGVARVVDSSDPRLAPGDLVWGITGWEDYSVVTPPATRLLSKISHHGAGEGAGVPLSYYTGILGMPGLTAYVGFHEICAPKKGETVFVSAASGAVGQLVGQFARLAGCHVVGSAGSREKVELLKTRFGFHDAFNYKEEPDLGAALKRCFPDGIDIYFENVGGAMLDAVLLNMRVHGRIAVCGLISQYNLADGEKDAVRNLAAVISKRLRLQGFIEPDHKHLYPQYEAWVLPYIRDGTLAYVEDVAEGLESAPKALIGLFHGRNVGKQLVRVADDE

SEQ ID NO: 24341 - DNA, 1411 bp, Zea mays subsp. mays
  misc_feature (1)..(1411): Ceres Seq. ID no. 12406802
gaagcatccgactaaaaagggccagggccagggccttcgcttgcttactactcctgcttaccacactctaccttgtctcttcacgtgcacacgacgcctcccccaatggctgcggtggcggaggaggaggtgatcgtcgtcggcgcggggcagtcggggctagcggtggcggcgtgcctgtccctgcgcggcgtgcgggcgctggtcctggagcgcgacgactgcgtggggtcgctgtggcggaagcgcgcctacgaccgcctccacctccacctcaccaagaagtactgcgcgctgccgcacgcgccgcacccggccgaggcccccgcgtacctgcaccgcgacgacttcgcgcggtacctggacgggtacgccgcgcggttcgccgtccgcccgcgcctccgccgcgaggtccggtcggcgcggtacgaccccgcgagcgcgcggtgggaggtggaggccgtggacctcggcacgggccaggccgagcggtacgcggcgaggttcctggtggtcgcgtccggggagaacgccgagaagttcctgccggaggtgcctgggctggaggcgttccccggccaggtgatgcacgcagtggagtaccggtcggccgaggggatgcgcgggaaggccgtgctcgtcgtggggtcgggcaactccggcatggagatcgcctacgacctcgccgccgccggcgccgtcacctccatcgtcgtccgaggcgagctccacctggtgaccaaggagatctggaacgtggcgatgacgctgtacccgtacctgcccgtgtgggttcatagacaagctggtgctgctcatgtgcgccgtggtgttcggcgacacgtcccggcacggcctccgccgccccgccatcgggcccttcaccatgaagctcaccaccccgggctaccccgtcgtggacgtcggcacctacgccaagatcaggagcggcgagatccgggtgctccccgccgccgtcaagagcgtccgcgggaacgtcgtcgagttcggggacggcagccgccaccctttcgacgccatcgtcttcgccaccggctaccggagcactgtcaggcggtggctcaagagcgaggacgggctggtcggtgacgacgggatggcggcgcggagctacccggagcactggaagggggaccacgggctgtactgcgcggggatggtgcggaggggcatctacggcagctgcgaggacgcggagctcatcgccgccgacatcagcaagctgctgcaccccaagcaggagcagggcaacggcgtctagctgcagctagcatttcgctttgttggttgcgatggaaacaagctctattgttgttgggttggttgataataatggttgcgtgaataattaaacgtgcttaattgagatggcctggcccagcctattcgt

SEQ ID NO: 24342 - protein, 334 aa, Zea mays subsp. mays
  peptide (1)..(334): Ceres Seq. ID no. 12406803
  misc_feature (10)..(242): Pfam Name: Pfam Description:  Pyridine nucleotide-disulphide oxidoreductase
  misc_feature (1)..(230): NCBI GI NO: 6539579 NR Description: unnamed protein product
  misc_feature (6)..(229): NCBI GI NO: 6539582 NR Description: unnamed protein product
  misc_feature (1)..(230): NCBI GI NO: 6979340 NR Description: hypothetical protein
  misc_feature (6)..(228): NCBI GI NO: 15221995 NR Description: flavin-containing monooxygenase, putative
  misc_feature (1)..(222): NCBI GI NO: 6979339 NR Description: hypothetical protein
  misc_feature (9)..(228): NCBI GI NO: 15218988 NR Description: flavin-containing monooxygenases, putative
  misc_feature (10)..(230): NCBI GI NO: 15219671 NR Description: putative dimethylaniline monooxygenase
  misc_feature (10)..(230): NCBI GI NO: 15240026 NR Description: dimethylaniline monooxygenase-like
  misc_feature (10)..(230): NCBI GI NO: 15219767 NR Description: putative dimethylaniline monooxygenase
  misc_feature (1)..(228): NCBI GI NO: 22327064 NR Description: putative protein; protein id: At5g25620
MAAVAEEEVIVVGAGQSGLAVAACLSLRGVRALVLERDDCVGSLWRKRAYDRLHLHLTKKYCALPHAPHPAEAPAYLHRDDFARYLDGYAARFAVRPRLRREVRSARYDPASARWEVEAVDLGTGQAERYAARFLVVASGENAEKFLPEVPGLEAFPGQVMHAVEYRSAEGMRGKAVLVVGSGNSGMEIAYDLAAAGAVTSIVVRGELHLVTKEIWNVAMTLYPYLPVWVHRQAGAAHVRRGVRRHVPARPPPPRHRALHHEAHHPGLPRRGRRHLRQDQERRDPGAPRRRQERPRERRRVRGRQPPPFRRHRLRHRLPEHCQAVAQERGRAGR

SEQ ID NO: 24343 - protein, 265 aa, Zea mays subsp. mays
  peptide (1)..(265): Ceres Seq. ID no. 12406804
  misc_feature (32)..(265): NCBI GI NO: 9629269 NR Description: RL2 [Human herpesvirus 2]
SIRLKRARARAFACLLLLLTTLYLVSSRAHDASPNGCGGGGGGDRRRRGAVGASGGGVPVPARRAGAGPGARRLRGVAVAEARLRPPPPPPHQEVLRAAARAAPGRGPRVPAPRRLRAVPGRVRRAVRRPPAPPPRGPVGAVRPRERAVGGGGRGPRHGPGRAVRGEVPGGRVRGERREVPAGGAWAGGVPRPGDARSGVPVGRGDAREGRARRGVGQLRHGDRLRPRRRRRRHLHRRPRRAPPGDQGDLERGDDAVPVPARVGS

SEQ ID NO: 24344 - protein, 174 aa, Zea mays subsp. mays
  peptide (1)..(174): Ceres Seq. ID no. 12406805
  misc_feature (1)..(82): Pfam Name: Pfam Description:  Pyridine nucleotide-disulphide oxidoreductase
  misc_feature (1)..(70): NCBI GI NO: 6539579 NR Description: unnamed protein product
  misc_feature (1)..(69): NCBI GI NO: 6539582 NR Description: unnamed protein product
  misc_feature (1)..(70): NCBI GI NO: 6979340 NR Description: hypothetical protein
  misc_feature (1)..(68): NCBI GI NO: 15221995 NR Description: flavin-containing monooxygenase, putative
  misc_feature (1)..(62): NCBI GI NO: 6979339 NR Description: hypothetical protein
  misc_feature (1)..(68): NCBI GI NO: 15218988 NR Description: flavin-containing monooxygenases, putative
  misc_feature (1)..(70): NCBI GI NO: 15219671 NR Description: putative dimethylaniline monooxygenase
  misc_feature (1)..(70): NCBI GI NO: 15240026 NR Description: dimethylaniline monooxygenase-like
  misc_feature (1)..(70): NCBI GI NO: 15219767 NR Description: putative dimethylaniline monooxygenase
  misc_feature (1)..(68): NCBI GI NO: 22327064 NR Description: putative protein; protein id: At5g25620
MHAVEYRSAEGMRGKAVLVVGSGNSGMEIAYDLAAAGAVTSIVVRGELHLVTKEIWNVAMTLYPYLPVWVHRQAGAAHVRRGVRRHVPARPPPPRHRALHHEAHHPGLPRRGRRHLRQDQERRDPGAPRRRQERPRERRRVRGRQPPPFRRHRLRHRLPEHCQAVAQERGRAGR

SEQ ID NO: 24345 - DNA, 1734 bp, Zea mays subsp. mays
  misc_feature (1)..(1734): Ceres Seq. ID no. 12410608
atagaagaagagcaggcaggagctataagtaccccgcccccttccaccctctccttccacctccctcccttgctgcctcatccattccagagctgcgaagacagacagacagagagaaagagggatcgacggagcaaggcggggccgtgtccggtcacacacgagcgagccctctcggccgcgcgtttgtgaatggtgaacggcgagcggcgggcggacgcggagtgcacgcgggcgtcgctgctggggaggtatgagatcgggcggaccctcggcgagggcaacttcggcaaggtgaagtacgcgcgccacatcgccagcggcggccacttcgccatcaagatcctcgaccgcagcaagatcctctccctccgcatcgacgaccagatcaggagggagatcgggacgctcaagctgctcaagcacccgaatgtcgtccgcttgcacgaggttgctgccagtaaaacgaagatctacatggtgcttgagtttgtcaacggcggcgagctcttcgacaagatcgctatcaaggggaaactgtccgaacacgagggcaggaggctcttccagcagctaatcgacggcgtcagctattgccatgacagaggtgtctaccaccgagacctcaagccagagaatgtccttgttgatcggaagggcaccatcaagatctctgacttcggcctcagcgctctacctcaacatctcgggagtgacggacttctgcacacaacatgtggcagccccaactacatagctcctgaggttctgcaaaacagaggctatgacggctccttgtcagatctctggtcgtgtggggtgatcctctacgtgatgcttgttggctgccttcccctcgacgacaggaacctcgtcgttctttatcagaagattttcaagggagactgtcagatccccaagtggctttcgcctgccgcgcaggaccttctcaagaggatcctccaaccgaatccgatgaagaggatcaacgtcgcggggatcagggagcacgagtggttcaagaaggactacgtgcctgctgttccgcacgatgatgacgaagacgtccttcctagtccagctccctcgataaagccaatcgatgagccggcgcaagagaagtgttctcctatcaacgcttttcagttgatcgggatggcctcttcccttgacctttctggtttcttcgaggaagaggatgcagcgcaaagaaagattcggttcacttcgacgcacccacccaaggatctatttgacaagatcgagagcgttgtcatggagatgggattcaaagtccataggggggcaggcaagctcaaggtcttgaagaatagcaagtgttccaggaacccgtcatcattgttggtgtgcaccgaggtgtttgagctcggtccatcattatatgtcgtagagcttaggaaatcccacggagactctacgttgtatagacagctgtgcgaaaggctctccgatgagctaggtgcctgcaagacagaccagatcgcgaggactgaatcatcgagtgacgacctctcgagcgtcgatggcgaagcgttccctctatctgggttctgatcatattgctttccctgtgttgttttgggaacaggggatgaggaacatgctcgttcctgatgcaattctagattaggatcatgaatatagtgtacaaagccagcggcggcggcggtgcaaattagccaccgggttgaatataaataatatatatatatg

SEQ ID NO: 24346 - protein, 460 aa, Zea mays subsp. mays
  peptide (1)..(460): Ceres Seq. ID no. 12410609
  misc_feature (21)..(276): Pfam Name: Pfam Description:  Protein kinase domain
  misc_feature (1)..(460): NCBI GI NO: 34894358 NR Description: unnamed protein product
  misc_feature (18)..(447): NCBI GI NO: 23237825 NR Description: putative serine/threonine kinase
  misc_feature (6)..(436): NCBI GI NO: 18401539 NR Description: expressed protein; protein id: At3g17510
  misc_feature (6)..(436): NCBI GI NO: 11066952 NR Description: CBL-interacting protein kinase 1
  misc_feature (6)..(436): NCBI GI NO: 20260556 NR Description: unknown protein [Arabidopsis thaliana]
  misc_feature (6)..(422): NCBI GI NO: 9294138 NR Description: serine/threonine kinase [Arabidopsis thaliana]
  misc_feature (18)..(431): NCBI GI NO: 15221136 NR Description: serine threonine kinase, putative
  misc_feature (18)..(421): NCBI GI NO: 25387053 NR Description: hypothetical protein F11A17.18
  misc_feature (109)..(431): NCBI GI NO: 8778506 NR Description: F21D18.2 [Arabidopsis thaliana]
  misc_feature (18)..(110): NCBI GI NO: 8778506 NR Description: F21D18.2 [Arabidopsis thaliana]
MVNGERRADAECTRASLLGRYEIGRTLGEGNFGKVKYARHIASGGHFAIKILDRSKILSLRIDDQIRREIGTLKLLKHPNVVRLHEVAASKTKIYMVLEFVNGGELFDKIAIKGKLSEHEGRRLFQQLIDGVSYCHDRGVYHRDLKPENVLVDRKGTIKISDFGLSALPQHLGSDGLLHTTCGSPNYIAPEVLQNRGYDGSLSDLWSCGVILYVMLVGCLPLDDRNLVVLYQKIFKGDCQIPKWLSPAAQDLLKRILQPNPMKRINVAGIREHEWFKKDYVPAVPHDDDEDVLPSPAPSIKPIDEPAQEKCSPINAFQLIGMASSLDLSGFFEEEDAAQRKIRFTSTHPPKDLFDKIESVVMEMGFKVHRGAGKLKVLKNSKCSRNPSSLLVCTEVFELGPSLYVVELRKSHGDSTLYRQLCERLSDELGACKTDQIARTESSSDDLSSVDGEAFPLSGF

SEQ ID NO: 24347 - protein, 365 aa, Zea mays subsp. mays
  peptide (1)..(365): Ceres Seq. ID no. 12410610
  misc_feature (1)..(181): Pfam Name: Pfam Description:  Protein kinase domain
  misc_feature (1)..(365): NCBI GI NO: 34894358 NR Description: unnamed protein product
  misc_feature (1)..(352): NCBI GI NO: 23237825 NR Description: putative serine/threonine kinase
  misc_feature (1)..(341): NCBI GI NO: 18401539 NR Description: expressed protein; protein id: At3g17510
  misc_feature (1)..(341): NCBI GI NO: 11066952 NR Description: CBL-interacting protein kinase 1
  misc_feature (1)..(341): NCBI GI NO: 20260556 NR Description: unknown protein [Arabidopsis thaliana]
  misc_feature (1)..(327): NCBI GI NO: 9294138 NR Description: serine/threonine kinase [Arabidopsis thaliana]
  misc_feature (1)..(336): NCBI GI NO: 15221136 NR Description: serine threonine kinase, putative
  misc_feature (1)..(326): NCBI GI NO: 25387053 NR Description: hypothetical protein F11A17.18
  misc_feature (14)..(336): NCBI GI NO: 8778506 NR Description: F21D18.2 [Arabidopsis thaliana]
  misc_feature (1)..(15): NCBI GI NO: 8778506 NR Description: F21D18.2 [Arabidopsis thaliana]
MVLEFVNGGELFDKIAIKGKLSEHEGRRLFQQLIDGVSYCHDRGVYHRDLKPENVLVDRKGTIKISDFGLSALPQHLGSDGLLHTTCGSPNYIAPEVLQNRGYDGSLSDLWSCGVILYVMLVGCLPLDDRNLVVLYQKIFKGDCQIPKWLSPAAQDLLKRILQPNPMKRINVAGIREHEWFKKDYVPAVPHDDDEDVLPSPAPSIKPIDEPAQEKCSPINAFQLIGMASSLDLSGFFEEEDAAQRKIRFTSTHPPKDLFDKIESVVMEMGFKVHRGAGKLKVLKNSKCSRNPSSLLVCTEVFELGPSLYVVELRKSHGDSTLYRQLCERLSDELGACKTDQIARTESSSDDLSSVDGEAFPLSGF

SEQ ID NO: 24348 - protein, 246 aa, Zea mays subsp. mays
  peptide (1)..(246): Ceres Seq. ID no. 12410611
  misc_feature (1)..(62): Pfam Name: Pfam Description:  Protein kinase domain
  misc_feature (1)..(246): NCBI GI NO: 34894358 NR Description: unnamed protein product
  misc_feature (1)..(233): NCBI GI NO: 23237825 NR Description: putative serine/threonine kinase
  misc_feature (1)..(222): NCBI GI NO: 18401539 NR Description: expressed protein; protein id: At3g17510
  misc_feature (1)..(222): NCBI GI NO: 11066952 NR Description: CBL-interacting protein kinase 1
  misc_feature (1)..(222): NCBI GI NO: 20260556 NR Description: unknown protein [Arabidopsis thaliana]
  misc_feature (1)..(208): NCBI GI NO: 9294138 NR Description: serine/threonine kinase [Arabidopsis thaliana]
  misc_feature (1)..(217): NCBI GI NO: 15221136 NR Description: serine threonine kinase, putative
  misc_feature (1)..(207): NCBI GI NO: 25387053 NR Description: hypothetical protein F11A17.18
  misc_feature (1)..(217): NCBI GI NO: 8778506 NR Description: F21D18.2 [Arabidopsis thaliana]
  misc_feature (1)..(232): NCBI GI NO: 30677901 NR Description: CBL-interacting protein kinase 9
MLVGCLPLDDRNLVVLYQKIFKGDCQIPKWLSPAAQDLLKRILQPNPMKRINVAGIREHEWFKKDYVPAVPHDDDEDVLPSPAPSIKPIDEPAQEKCSPINAFQLIGMASSLDLSGFFEEEDAAQRKIRFTSTHPPKDLFDKIESVVMEMGFKVHRGAGKLKVLKNSKCSRNPSSLLVCTEVFELGPSLYVVELRKSHGDSTLYRQLCERLSDELGACKTDQIARTESSSDDLSSVDGEAFPLSGF

SEQ ID NO: 24349 - DNA, 1366 bp, Zea mays subsp. mays
  misc_feature (1)..(1366): Ceres Seq. ID no. 12342621
ctgatgtcacctgctgcctctctccaattctttcttcttctctccatgtaaaattatgtccaaacccaccctactcccgcgagcgcatttataaaataaagggcactgatgcctgctgtcttgttctgcccccctgttttccttttattctgctccgctctgttctcctgcgggcctggctgcgccggggaggcaaatgcttagcacaggacttggccttctggaatcccccgctaaaccataggcgtgttctattggaagttggaacaaaaccatggagagtgaaatcatggcctcctatgaaacaaagcagaattgcgaaattagggtatttgagagttcagacgagatggcaacagatctggcagagtttatttcacaagcttcagaaatttcagttaaggaaagaggatgctttgctattgccctttctggaggtcctcttgttagacatatgcggaagctctgtgaagcaccatacaacaagacccttgattggtctaaatggtacatcttctgggctgaagaacgtgcagttgcaaagaaccatgcagagagtaactacaaattaacaaaggaagaatttctctccaaggtgcctatccttaacggccacgtctactccatcaacgacaacgcgacggtggaagaggcagcgagcgactacgagttcgtgatgcggcagctggtgaaggtccggacggtgggagtctcggagagcaacgactgccccagattcgacctggtccttctgaacatcgggcctgacgggcacgtagcctcgctgttccccaaccacccagcgctggagctgaaaggcgactgggtgacctacatcaccgactccccggagcctccgcccgagaggatcaccttcacccttcccgtcataaactcggcgtccagcgtcgccattgttgccaccggagaggacagggcgagagccgtgtccttctccgtctctgcctgccaggaccaggaggaggaaggcccagcagacgacgacgctggaacgacgatgataccgccggctagcatggttcagccaaccgatgggaagttggtatggttcctggacgaggcggctgcttcgtctcttgaggcttcgaatggcgcttgcgagcatcaagaagggtactgagaacagactggatgctacctctgcgaacgccgcctacagtactctctggtttcttcagagtcgaaagtttgcatgcagttggatgtgggcaattaagagtgaagcggtttgtgtgtttttatgtcaagacctcacgcatatcgcgcggagtagctaagctcgaccgtatattggttgcgacgtatgatccttgttttatttaagtgtgttggcggttttatcctg

SEQ ID NO: 24350 - protein, 288 aa, Zea mays subsp. mays
  peptide (1)..(288): Ceres Seq. ID no. 12342622
  misc_feature (33)..(276): Pfam Name: Pfam Description:  Glucosamine-6-phosphate isomerases/ 6-phosphogluconolactonase
  misc_feature (1)..(286): NCBI GI NO: 34394567 NR Description: putative 6-phosphogluconolactonase
  misc_feature (12)..(276): NCBI GI NO: 15222922 NR Description: unknown protein; protein id: At1g13700.1
  misc_feature (16)..(275): NCBI GI NO: 28140256 NR Description: putative 6-phosphogluconolactonase
  misc_feature (1)..(275): NCBI GI NO: 21554291 NR Description: 6-phosphogluconolactonase-like protein
  misc_feature (1)..(275): NCBI GI NO: 18420789 NR Description: 6-phosphogluconolactonase-like protein
  misc_feature (10)..(275): NCBI GI NO: 10177901 NR Description: 6-phosphogluconolactonase-like protein
  misc_feature (18)..(282): NCBI GI NO: 15229127 NR Description: 6-phosphogluconolactonase - like protein
  misc_feature (18)..(282): NCBI GI NO: 21536675 NR Description: 6-phosphogluconolactonase-like protein
  misc_feature (19)..(208): NCBI GI NO: 21537412 NR Description: 6-phosphogluconolactonase-like protein
  misc_feature (19)..(275): NCBI GI NO: 14009294 NR Description: putative 6-phosphogluconolactonase
MESEIMASYETKQNCEIRVFESSDEMATDLAEFISQASEISVKERGCFAIALSGGPLVRHMRKLCEAPYNKTLDWSKWYIFWAEERAVAKNHAESNYKLTKEEFLSKVPILNGHVYSINDNATVEEAASDYEFVMRQLVKVRTVGVSESNDCPRFDLVLLNIGPDGHVASLFPNHPALELKGDWVTYITDSPEPPPERITFTLPVINSASSVAIVATGEDRARAVSFSVSACQDQEEEGPADDDAGTTMIPPASMVQPTDGKLVWFLDEAAASSLEASNGACEHQEGY

SEQ ID NO: 24351 - protein, 283 aa, Zea mays subsp. mays
  peptide (1)..(283): Ceres Seq. ID no. 12342623
  misc_feature (28)..(271): Pfam Name: Pfam Description:  Glucosamine-6-phosphate isomerases/ 6-phosphogluconolactonase
  misc_feature (1)..(281): NCBI GI NO: 34394567 NR Description: putative 6-phosphogluconolactonase
  misc_feature (7)..(271): NCBI GI NO: 15222922 NR Description: unknown protein; protein id: At1g13700.1
  misc_feature (11)..(270): NCBI GI NO: 28140256 NR Description: putative 6-phosphogluconolactonase
  misc_feature (1)..(270): NCBI GI NO: 21554291 NR Description: 6-phosphogluconolactonase-like protein
  misc_feature (1)..(270): NCBI GI NO: 18420789 NR Description: 6-phosphogluconolactonase-like protein
  misc_feature (5)..(270): NCBI GI NO: 10177901 NR Description: 6-phosphogluconolactonase-like protein
  misc_feature (13)..(277): NCBI GI NO: 15229127 NR Description: 6-phosphogluconolactonase - like protein
  misc_feature (13)..(277): NCBI GI NO: 21536675 NR Description: 6-phosphogluconolactonase-like protein
  misc_feature (14)..(203): NCBI GI NO: 21537412 NR Description: 6-phosphogluconolactonase-like protein
  misc_feature (14)..(270): NCBI GI NO: 14009294 NR Description: putative 6-phosphogluconolactonase
MASYETKQNCEIRVFESSDEMATDLAEFISQASEISVKERGCFAIALSGGPLVRHMRKLCEAPYNKTLDWSKWYIFWAEERAVAKNHAESNYKLTKEEFLSKVPILNGHVYSINDNATVEEAASDYEFVMRQLVKVRTVGVSESNDCPRFDLVLLNIGPDGHVASLFPNHPALELKGDWVTYITDSPEPPPERITFTLPVINSASSVAIVATGEDRARAVSFSVSACQDQEEEGPADDDAGTTMIPPASMVQPTDGKLVWFLDEAAASSLEASNGACEHQEGY

SEQ ID NO: 24352 - protein, 263 aa, Zea mays subsp. mays
  peptide (1)..(263): Ceres Seq. ID no. 12342624
  misc_feature (8)..(251): Pfam Name: Pfam Description:  Glucosamine-6-phosphate isomerases/ 6-phosphogluconolactonase
  misc_feature (1)..(261): NCBI GI NO: 34394567 NR Description: putative 6-phosphogluconolactonase
  misc_feature (1)..(251): NCBI GI NO: 15222922 NR Description: unknown protein; protein id: At1g13700.1
  misc_feature (1)..(250): NCBI GI NO: 28140256 NR Description: putative 6-phosphogluconolactonase
  misc_feature (1)..(250): NCBI GI NO: 21554291 NR Description: 6-phosphogluconolactonase-like protein
  misc_feature (1)..(250): NCBI GI NO: 18420789 NR Description: 6-phosphogluconolactonase-like protein
  misc_feature (1)..(250): NCBI GI NO: 10177901 NR Description: 6-phosphogluconolactonase-like protein
  misc_feature (1)..(257): NCBI GI NO: 15229127 NR Description: 6-phosphogluconolactonase - like protein
  misc_feature (1)..(257): NCBI GI NO: 21536675 NR Description: 6-phosphogluconolactonase-like protein
  misc_feature (1)..(183): NCBI GI NO: 21537412 NR Description: 6-phosphogluconolactonase-like protein
  misc_feature (1)..(250): NCBI GI NO: 14009294 NR Description: putative 6-phosphogluconolactonase
MATDLAEFISQASEISVKERGCFAIALSGGPLVRHMRKLCEAPYNKTLDWSKWYIFWAEERAVAKNHAESNYKLTKEEFLSKVPILNGHVYSINDNATVEEAASDYEFVMRQLVKVRTVGVSESNDCPRFDLVLLNIGPDGHVASLFPNHPALELKGDWVTYITDSPEPPPERITFTLPVINSASSVAIVATGEDRARAVSFSVSACQDQEEEGPADDDAGTTMIPPASMVQPTDGKLVWFLDEAAASSLEASNGACEHQEGY

SEQ ID NO: 24353 - DNA, 1212 bp, Zea mays subsp. mays
  misc_feature (1)..(1212): Ceres Seq. ID no. 12352091
gttgacatcggttcaccgtccgcccaggtaccttccgtacgtacaagaggcggtcgcgacgctctagcttgcattgcaccagcgcgcagagcggaaggaggtggaaagcgcccagagagatctcgagagagaggctggtcggcacagactagttcattccgtttggatagagacgcacgcaacgcaggccaccacaacgtgaggagcgggaggagggagagggaggatgcaggcgcatcaccgtcagtcgtactacgcggtgctcggcgtgcagccgggcgccaccgctgccgagatccgcgcctcctaccaccgcctcgccatgaggtggcacccggacaagatcgccagcggcggcggcgccggcgccgatccggcgcgcgcggaggaggccaagagcaggttccagcagatacacgaggcgtaccaagtgctgtcggatgacaagaggagggcgctgtacgacgccggcatgtacgacccgctggacgacgacgacgaccaggaggacgtcgagggattccacgacttcgtgcaggagatggtctcgctcatggccagagaggagcccgtgtacagcttggccgagctgcaatccatgctggacgggatgatcaaggatttcaccgcgccacagccttggcctagcggcttcttctacactggtggtggcggtggcggtggcggtggggcgtcgtcgccgtcgccgctcggcaaaccaagcagccaagagcagagtacggcttcgtcacgcttgcatccctacgggttcggggacgcgccgtgcttcagccgcacggcgttctcacaatgatggcgatgatgaataaattgatacatggatcgagcttttattcttctggcagcaatgggggtttcctcgctcgtgctcgtggaggtggagggatagtaggaacccgtgaccgtgaaagccatcgtccgccagggccagactctgattggcagttgcaattgctttggactgtggggatgaaagaaggtgaggtgggaagatagaccacaaggagagcacgtagtcgcctagaatcgccacccatcagcaaaagaaggggtgtttgtttgtttgtactgtttggtttggtttggttttcgtctcttgcctgccatggtagagatgagttatgccagagcatttgtatacaagggtatgccatcaagaataagttacgtcaatacaatttgtacataaat

SEQ ID NO: 24354 - protein, 195 aa, Zea mays subsp. mays
  peptide (1)..(195): Ceres Seq. ID no. 12352092
  misc_feature (8)..(83): Pfam Name: Pfam Description:  DnaJ domain
  misc_feature (1)..(194): NCBI GI NO: 34912486 NR Description: heat shock protein-like
  misc_feature (6)..(130): NCBI GI NO: 21554587 NR Description: DnaJ protein, putative [Arabidopsis thaliana]
  misc_feature (6)..(130): NCBI GI NO: 18405757 NR Description: DnaJ protein, putative; protein id: At1g56300
  misc_feature (9)..(130): NCBI GI NO: 23428796 NR Description: DnaJ-like protein [Glycine max]
  misc_feature (8)..(132): NCBI GI NO: 7484474 NR Description: probable heat shock protein EMB1 - white spruce
  misc_feature (1)..(146): NCBI GI NO: 15223307 NR Description: heat shock protein DnaJ, putative
  misc_feature (6)..(92): NCBI GI NO: 25404111 NR Description: probable DnaJ protein
  misc_feature (7)..(138): NCBI GI NO: 15231803 NR Description: hypothetical protein; protein id: At3g14200
  misc_feature (8)..(82): NCBI GI NO: 9910416 NR Description: DnaJ
  misc_feature (8)..(82): NCBI GI NO: 23503241 NR Description: hypothetical protein MGC33884 [Homo sapiens]
MQAHHRQSYYAVLGVQPGATAAEIRASYHRLAMRWHPDKIASGGGAGADPARAEEAKSRFQQIHEAYQVLSDDKRRALYDAGMYDPLDDDDDQEDVEGFHDFVQEMVSLMAREEPVYSLAELQSMLDGMIKDFTAPQPWPSGFFYTGGGGGGGGGASSPSPLGKPSSQEQSTASSRLHPYGFGDAPCFSRTAFSQ

SEQ ID NO: 24355 - protein, 163 aa, Zea mays subsp. mays
  peptide (1)..(163): Ceres Seq. ID no. 12352093
  misc_feature (1)..(51): Pfam Name: Pfam Description:  DnaJ domain
  misc_feature (1)..(162): NCBI GI NO: 34912486 NR Description: heat shock protein-like
  misc_feature (1)..(98): NCBI GI NO: 21554587 NR Description: DnaJ protein, putative [Arabidopsis thaliana]
  misc_feature (1)..(98): NCBI GI NO: 18405757 NR Description: DnaJ protein, putative; protein id: At1g56300
  misc_feature (1)..(98): NCBI GI NO: 23428796 NR Description: DnaJ-like protein [Glycine max]
  misc_feature (1)..(100): NCBI GI NO: 7484474 NR Description: probable heat shock protein EMB1 - white spruce
  misc_feature (1)..(114): NCBI GI NO: 15223307 NR Description: heat shock protein DnaJ, putative
  misc_feature (1)..(60): NCBI GI NO: 25404111 NR Description: probable DnaJ protein
  misc_feature (1)..(106): NCBI GI NO: 15231803 NR Description: hypothetical protein; protein id: At3g14200
  misc_feature (1)..(50): NCBI GI NO: 9910416 NR Description: DnaJ
  misc_feature (1)..(50): NCBI GI NO: 23503241 NR Description: hypothetical protein MGC33884 [Homo sapiens]
MRWHPDKIASGGGAGADPARAEEAKSRFQQIHEAYQVLSDDKRRALYDAGMYDPLDDDDDQEDVEGFHDFVQEMVSLMAREEPVYSLAELQSMLDGMIKDFTAPQPWPSGFFYTGGGGGGGGGASSPSPLGKPSSQEQSTASSRLHPYGFGDAPCFSRTAFSQ

SEQ ID NO: 24356 - protein, 147 aa, Zea mays subsp. mays
  peptide (1)..(147): Ceres Seq. ID no. 12352094
VDIGSPSAQVPSVRTRGGRDALACIAPARRAEGGGKRPERSRERGWSAQTSSFRLDRDARNAGHHNVRSGRREREDAGASPSVVLRGARRAAGRHRCRDPRLLPPPRHEVAPGQDRQRRRRRRRSGARGGGQEQVPADTRGVPSAVG

SEQ ID NO: 24357 - DNA, 1594 bp, Zea mays subsp. mays
  misc_feature (1)..(1594): Ceres Seq. ID no. 12387222
agatctggatccaaacggcggctctgtttcgtgcgctgtcccgtctccctccgtctcgtcagcttcgtgccgtgcccgtgcgagccgctgccaacccgctccagctttgcccgttgccttggccgtcccgtccggccgtccctagaaaaggccgcgtcccacgttgccttggttcccccaccctgctgtctccctccctccttccttccttccccgccactgcgcagcgcgagtgcggcgacagccagtcacacactcacactccctcgaccgctctcggccccgtccgcgtcgccgcagggcgaggaggcaatggcggcaggcgggaatggcgccggcggggacaccagggcggccttcgcgcggatctacaagacgctcaaggaggagctgctcaccgacccggccttcgagttcaccgaggagtcacgccagtggatcgaccgcatggttgactacaatgtactcggaggcaagtgtaaccgtgggctctctgtggtcgacagctacaagctgctcaagggcgctgatgctctgggcgaggaggaaacgttccttgcttgcaccctcggctggtgcattgaatggcttcaggctttctttcttgtgcttgatgatatcatggatgactctcacactcgtcgcggccagccttgctggttcagggtgcctcaggttggcttaattgctgcgaatgacgggatcatccttcgcaaccatatctcacggatccttcggcgccactttaagggcaaaccttactatgctgatctccttgatttgttcaatgaggttgagttcaagacagcttcaggtcagctgctggaccttatcactacccatgagggagaaaaagatctaacaaagtataacataacagttcacggtcgaattgttcaatacaagacagcctattattcattttatctgccggttgcatgtgccctgctgctctctggcgagaatttggacaattatggtgatgtagagaacatccttgttgaaatgggaacatactttcaagtccaggatgactatctggattgttacggtgatcctgaatttatcggcaagattggaacggacattgaagattacaagtgctcatggctagttgtgcaagcccttgagcgtgctgatgagagccaaaagcgcattctatttgaaaattatggcaagaaagatccagcctgtgtggcaaaagtgaagaacctctacaaagaacttgacctagaggcggtatttcaggagtacgagaatgagagctacaagaagctgattgcagacattgaagcccagccaagcattgcggttcagaaagtgctgaaatccttcttgcacaagatctacaagaggcagaagtagggtgctcttggataaacgagctcaggagtcgttactccttcgcatgcttgacataaccggacttcctcacctggttgctctagtatgatgtggagcgtctagttaaaaaaatcgatgtagtatgaagcaccttgctgctctgaatattaacaggcaattaaggcaaggtgctgtttcggtttggtggaccgcatgttgcagataataaattagttgttttgtcatgcgg

SEQ ID NO: 24358 - protein, 454 aa, Zea mays subsp. mays
  peptide (1)..(454): Ceres Seq. ID no. 12387223
  misc_feature (146)..(417): Pfam Name: Pfam Description:  Polyprenyl synthetase
  misc_feature (105)..(454): NCBI GI NO: 1346033 NR Description: Farnesyl pyrophosphate synthetase
  misc_feature (104)..(454): NCBI GI NO: 34911542 NR Description: putative farnesyl-pyrophosphate synthetase
  misc_feature (158)..(454): NCBI GI NO: 25458583 NR Description: probable farnesyl pyrophosphate synthase
  misc_feature (21)..(151): NCBI GI NO: 25458583 NR Description: probable farnesyl pyrophosphate synthase
  misc_feature (106)..(454): NCBI GI NO: 18958450 NR Description: farnesyl pyrophosphare synthase [Musa acuminata]
  misc_feature (115)..(454): NCBI GI NO: 1346028 NR Description: Farnesyl pyrophosphate synthetase 1
  misc_feature (115)..(454): NCBI GI NO: 7433992 NR Description: farnesyl-pyrophosphate synthetase
  misc_feature (115)..(454): NCBI GI NO: 1346029 NR Description: Farnesyl pyrophosphate synthetase 2
  misc_feature (117)..(454): NCBI GI NO: 13537421 NR Description: farnesyl pyrophosphate synthase [Humulus lupulus]
  misc_feature (115)..(454): NCBI GI NO: 25452945 NR Description: Farnesyl pyrophosphate synthetase 1
RSGSKRRLCFVRCPVSLRLVSFVPCPCEPLPTRSSFARCLGRPVRPSLEKAASHVALVPPPCCLPPSFLPSPPLRSASAATASHTLTLPRPLSAPSASPQGEEAMAAGGNGAGGDTRAAFARIYKTLKEELLTDPAFEFTEESRQWIDRMVDYNVLGGKCNRGLSVVDSYKLLKGADALGEEETFLACTLGWCIEWLQAFFLVLDDIMDDSHTRRGQPCWFRVPQVGLIAANDGIILRNHISRILRRHFKGKPYYADLLDLFNEVEFKTASGQLLDLITTHEGEKDLTKYNITVHGRIVQYKTAYYSFYLPVACALLLSGENLDNYGDVENILVEMGTYFQVQDDYLDCYGDPEFIGKIGTDIEDYKCSWLVVQALERADESQKRILFENYGKKDPACVAKVKNLYKELDLEAVFQEYENESYKKLIADIEAQPSIAVQKVLKSFLHKIYKRQK

SEQ ID NO: 24359 - protein, 350 aa, Zea mays subsp. mays
  peptide (1)..(350): Ceres Seq. ID no. 12387224
  misc_feature (42)..(313): Pfam Name: Pfam Description:  Polyprenyl synthetase
  misc_feature (1)..(350): NCBI GI NO: 1346033 NR Description: Farnesyl pyrophosphate synthetase
  misc_feature (1)..(350): NCBI GI NO: 34911542 NR Description: putative farnesyl-pyrophosphate synthetase
  misc_feature (54)..(350): NCBI GI NO: 25458583 NR Description: probable farnesyl pyrophosphate synthase
  misc_feature (1)..(47): NCBI GI NO: 25458583 NR Description: probable farnesyl pyrophosphate synthase
  misc_feature (2)..(350): NCBI GI NO: 18958450 NR Description: farnesyl pyrophosphare synthase [Musa acuminata]
  misc_feature (11)..(350): NCBI GI NO: 1346028 NR Description: Farnesyl pyrophosphate synthetase 1
  misc_feature (11)..(350): NCBI GI NO: 7433992 NR Description: farnesyl-pyrophosphate synthetase
  misc_feature (11)..(350): NCBI GI NO: 1346029 NR Description: Farnesyl pyrophosphate synthetase 2
  misc_feature (13)..(350): NCBI GI NO: 13537421 NR Description: farnesyl pyrophosphate synthase [Humulus lupulus]
  misc_feature (11)..(350): NCBI GI NO: 25452945 NR Description: Farnesyl pyrophosphate synthetase 1
MAAGGNGAGGDTRAAFARIYKTLKEELLTDPAFEFTEESRQWIDRMVDYNVLGGKCNRGLSVVDSYKLLKGADALGEEETFLACTLGWCIEWLQAFFLVLDDIMDDSHTRRGQPCWFRVPQVGLIAANDGIILRNHISRILRRHFKGKPYYADLLDLFNEVEFKTASGQLLDLITTHEGEKDLTKYNITVHGRIVQYKTAYYSFYLPVACALLLSGENLDNYGDVENILVEMGTYFQVQDDYLDCYGDPEFIGKIGTDIEDYKCSWLVVQALERADESQKRILFENYGKKDPACVAKVKNLYKELDLEAVFQEYENESYKKLIADIEAQPSIAVQKVLKSFLHKIYKRQK

SEQ ID NO: 24360 - protein, 305 aa, Zea mays subsp. mays
  peptide (1)..(305): Ceres Seq. ID no. 12387225
  misc_feature (1)..(268): Pfam Name: Pfam Description:  Polyprenyl synthetase
  misc_feature (1)..(305): NCBI GI NO: 1346033 NR Description: Farnesyl pyrophosphate synthetase
  misc_feature (1)..(305): NCBI GI NO: 34911542 NR Description: putative farnesyl-pyrophosphate synthetase
  misc_feature (9)..(305): NCBI GI NO: 25458583 NR Description: probable farnesyl pyrophosphate synthase
  misc_feature (1)..(305): NCBI GI NO: 18958450 NR Description: farnesyl pyrophosphare synthase [Musa acuminata]
  misc_feature (1)..(305): NCBI GI NO: 1346028 NR Description: Farnesyl pyrophosphate synthetase 1
  misc_feature (1)..(305): NCBI GI NO: 7433992 NR Description: farnesyl-pyrophosphate synthetase
  misc_feature (1)..(305): NCBI GI NO: 1346029 NR Description: Farnesyl pyrophosphate synthetase 2
  misc_feature (1)..(305): NCBI GI NO: 13537421 NR Description: farnesyl pyrophosphate synthase [Humulus lupulus]
  misc_feature (1)..(305): NCBI GI NO: 25452945 NR Description: Farnesyl pyrophosphate synthetase 1
  misc_feature (1)..(305): NCBI GI NO: 14279425 NR Description: farnesyl pyrophosphate synthase [Humulus lupulus]
MVDYNVLGGKCNRGLSVVDSYKLLKGADALGEEETFLACTLGWCIEWLQAFFLVLDDIMDDSHTRRGQPCWFRVPQVGLIAANDGIILRNHISRILRRHFKGKPYYADLLDLFNEVEFKTASGQLLDLITTHEGEKDLTKYNITVHGRIVQYKTAYYSFYLPVACALLLSGENLDNYGDVENILVEMGTYFQVQDDYLDCYGDPEFIGKIGTDIEDYKCSWLVVQALERADESQKRILFENYGKKDPACVAKVKNLYKELDLEAVFQEYENESYKKLIADIEAQPSIAVQKVLKSFLHKIYKRQK

SEQ ID NO: 24361 - DNA, 1614 bp, Zea mays subsp. mays; identical to SEQ ID NO: 23495
  misc_feature (1)..(1614): Ceres Seq. ID no. 12410981
  misc_feature (607)..(607): n is a, c, t, g, unknown, or other
  misc_feature (609)..(609): n is a, c, t, g, unknown, or other
  misc_feature (608)..(608): n is a, c, t, g, unknown, or other

SEQ ID NO: 24362 - protein, 352 aa, Zea mays subsp. mays; identical to SEQ ID NO: 23496
  peptide (1)..(352): Ceres Seq. ID no. 12410982
  misc_feature (1)..(119): Pfam Name: Pfam Description:  Cupin
  misc_feature (16)..(352): NCBI GI NO: 29247944 NR Description: GLP_26_54603_52153 [Giardia lamblia ATCC 50803]
  misc_feature (34)..(352): NCBI GI NO: 29247944 NR Description: GLP_26_54603_52153 [Giardia lamblia ATCC 50803]
  misc_feature (55)..(352): NCBI GI NO: 23104258 NR Description: hypothetical protein [Azotobacter vinelandii]
  misc_feature (108)..(108): Xaa is any aa, unknown or other
  misc_feature (109)..(109): Xaa is any aa, unknown or other

SEQ ID NO: 24363 - protein, 344 aa, Zea mays subsp. mays; identical to SEQ ID NO: 23497
  peptide (1)..(344): Ceres Seq. ID no. 12410983
  misc_feature (79)..(135): Pfam Name: Pfam Description:  Carboxylesterase
  misc_feature (3)..(331): NCBI GI NO: 34904770 NR Description: similar to carboxylesterase
  misc_feature (1)..(334): NCBI GI NO: 34904760 NR Description: similar to carboxylesterase
  misc_feature (1)..(332): NCBI GI NO: 34393714 NR Description: putative esterase
  misc_feature (1)..(332): NCBI GI NO: 34904774 NR Description: similar to carboxylesterase
  misc_feature (15)..(327): NCBI GI NO: 34904772 NR Description: similar to carboxylesterase
  misc_feature (1)..(328): NCBI GI NO: 15237783 NR Description: putative protein; protein id: At5g23530
  misc_feature (1)..(328): NCBI GI NO: 21618039 NR Description: unknown [Arabidopsis thaliana]
  misc_feature (1)..(332): NCBI GI NO: 15240483 NR Description: putative protein; protein id: At5g27320
  misc_feature (2)..(334): NCBI GI NO: 34904758 NR Description: hypothetical protein~predicted by GeneMark
  misc_feature (34)..(339): NCBI GI NO: 15229371 NR Description: putative protein; protein id: At3g63010.1
  misc_feature (77)..(77): Xaa is any aa, unknown or other
  misc_feature (78)..(78): Xaa is any aa, unknown or other

SEQ ID NO: 24364 - DNA, 1242 bp, Zea mays subsp. mays
  misc_feature (1)..(1242): Ceres Seq. ID no. 12410601
aaccctgaactgggccggccgtcgctgcattcccccttccgctgcccaacgacccttcccgtccgctggcaaccctcgcctccgcgtggcactccagggctccagaccccgccgccgccctaagccagacgctgaggcttgtggtctcttcgccggagacgagcaccaaccaggatgcaatgtttggtccggaatgtctgccgagccggaagccgtggagcggcggcgaggctcctggagcttgccgcggctggtccgggtgcgacgcagccatccgtggccgtcaaactcctcaggccgccttacgagttcacacgtccgatcggggtagttcaacccgtacgtgtgcagagccgggccgtttcgcgtgatggcctcgttcctgccgcggccacctccggttttggtctctgcgcacaagttatcgtcgcgatgaggggtctgtcgacggtggggagtgcggccgaggtcgtttctgattcggacgattccacctcccctgcggttgagcaccccccgcgcatcaagttcaagaggcccgacaagaccgccaggcacattatgaatatcctaaacaaagaggcggtcgaaaaggtccgctcggaaagggagattcctgatgtgcagcctggatgcatcattcagatgagattgcaagttcctgagaacaaacggcgtgagtcgacgctgaaggggattgtgataggaaggcgcaacgccgggatcaatacaaccttcagattgcgtagattagtggctggtgtcggagtcgagtctgtctttccactttactcgccaaacatcaaagaaatcaaggtattggacaggaagaaagtcaggagagctaagctgtattacctgagggacaggatgaacgcacttagaaaatgagtctttcagcttgtttcaaggaatttcgccgtgcggatcagcacggtttctgaagtgcaacggttgcagccctgagaattgcattgtctggttccacatcgttgcaaagccatagcctgtagttgtcgattgccatgcttggttttgagctgcaagtgctagcagatatatgttttccgacacaataaaaaattgcggttattcccttttcgatttacgacactgtagcttcatagcacaaaataacgtgctcagatctattacttccctccgcacctttactatctaggatgtatgtgttttttgacataagcaagctggaaagtgaaaactcttatgtgatgcttcctg

SEQ ID NO: 24365 - protein, 238 aa, Zea mays subsp. mays
  peptide (1)..(238): Ceres Seq. ID no. 12410602
  misc_feature (130)..(235): Pfam Name: Pfam Description:  Ribosomal protein L19
  misc_feature (60)..(238): NCBI GI NO: 15234249 NR Description: putative protein; protein id: At4g11630
  misc_feature (86)..(238): NCBI GI NO: 15239778 NR Description: putative protein; protein id: At5g11750
  misc_feature (68)..(238): NCBI GI NO: 18395422 NR Description: expressed protein; protein id: At1g24240
  misc_feature (58)..(236): NCBI GI NO: 18414915 NR Description: putative protein; protein id: At4g17560
  misc_feature (105)..(236): NCBI GI NO: 7582403 NR Description: plastid ribosomal protein L19 precursor
  misc_feature (33)..(236): NCBI GI NO: 18422764 NR Description: putative protein; protein id: At5g47190
  misc_feature (33)..(236): NCBI GI NO: 21592584 NR Description: contains similarity to plastid ribosomal proteinL19
  misc_feature (91)..(236): NCBI GI NO: 8809601 NR Description: contains similarity to plastid ribosomal proteinL19~gene_id:MQL5
  misc_feature (94)..(233): NCBI GI NO: 14140122 NR Description: putative plastid ribosomal protein L19 precursor
  misc_feature (128)..(232): NCBI GI NO: 23014871 NR Description: hypothetical protein
MQCLVRNVCRAGSRGAAARLLELAAAGPGATQPSVAVKLLRPPYEFTRPIGVVQPVRVQSRAVSRDGLVPAAATSGFGLCAQVIVAMRGLSTVGSAAEVVSDSDDSTSPAVEHPPRIKFKRPDKTARHIMNILNKEAVEKVRSEREIPDVQPGCIIQMRLQVPENKRRESTLKGIVIGRRNAGINTTFRLRRLVAGVGVESVFPLYSPNIKEIKVLDRKKVRRAKLYYLRDRMNALRK

SEQ ID NO: 24366 - protein, 152 aa, Zea mays subsp. mays
  peptide (1)..(152): Ceres Seq. ID no. 12410603
  misc_feature (44)..(149): Pfam Name: Pfam Description:  Ribosomal protein L19
  misc_feature (1)..(152): NCBI GI NO: 15234249 NR Description: putative protein; protein id: At4g11630
  misc_feature (1)..(152): NCBI GI NO: 15239778 NR Description: putative protein; protein id: At5g11750
  misc_feature (1)..(152): NCBI GI NO: 18395422 NR Description: expressed protein; protein id: At1g24240
  misc_feature (1)..(150): NCBI GI NO: 18414915 NR Description: putative protein; protein id: At4g17560
  misc_feature (19)..(150): NCBI GI NO: 7582403 NR Description: plastid ribosomal protein L19 precursor
  misc_feature (1)..(150): NCBI GI NO: 18422764 NR Description: putative protein; protein id: At5g47190
  misc_feature (1)..(150): NCBI GI NO: 21592584 NR Description: contains similarity to plastid ribosomal proteinL19
  misc_feature (5)..(150): NCBI GI NO: 8809601 NR Description: contains similarity to plastid ribosomal proteinL19~gene_id:MQL5
  misc_feature (8)..(147): NCBI GI NO: 14140122 NR Description: putative plastid ribosomal protein L19 precursor
  misc_feature (42)..(146): NCBI GI NO: 23014871 NR Description: hypothetical protein
MRGLSTVGSAAEVVSDSDDSTSPAVEHPPRIKFKRPDKTARHIMNILNKEAVEKVRSEREIPDVQPGCIIQMRLQVPENKRRESTLKGIVIGRRNAGINTTFRLRRLVAGVGVESVFPLYSPNIKEIKVLDRKKVRRAKLYYLRDRMNALRK

SEQ ID NO: 24367 - DNA, 1435 bp, Zea mays subsp. mays
  misc_feature (1)..(1435): Ceres Seq. ID no. 12352690
accaaacccactcgcaacaacggataacgctctcttccttcggctcctcccctctcgctcctatcctctcccctccaatggcgaccgccatttcctctctagtaactcctccgaccctccaccgccgctgcctgggccctgcctgcgtctccgtctccgtgtgcacccctatccgcatctccttccggcccgccgccgcgcctcaggtgtcgcgccggggctcggcgctgcgggtgtccgcctcctcggcggtgctcgaggcgccagaggcggtggcggcgcggaagctctacgtggggaatatccccaggaccgttacaaacgacgagctccgcgacatgttcgctgcgcacggcaccgtcgagcgggccgaggttatgtacgacaagtatacgaatcgcagccggcggtttgggtttgtcacgatgagcacagcggaagaggccaatgctgcagttgaggctctcaatgggactgaggttggtgatagaaaaattaaagtgaacgtcacagagagcttcttaccgaacattgaccgatcagcaccagaaccagaggctctgtttgtagatagtcagtacaaggtttatgttggtaatcttgcgaagactgtaacaaccgaagttcttaaaaacttcttctccgaaaaggggaatatcctcagtgcaacagtctcccacattccggggacctccaagtcaaaggggtatggctttgtcacattctcttctgaggaagaagttgaagctgctgttgctactttcaataacgcggtaagcttctcttgcaaattttatgcatttctgccatttctttccaacctcataaaatagtagtcaccatttggctattgccaaacaaaagaaaaacgttgtgctacaatcttctatgttatcatttaggtgtcaaatagatggaaatatggaattaacatattgactgttaattgtacagatgagttagaattacatcatctcaactacgtcaactggtgccatattgttctgacatatcattcccacagaaacttatttgctgatattaataacattgcccgttcttcaaccgtacttcagcacacatcaagaccataatctcctatatttgctattcaaaagatttctgaagccttgaaagttggcatgcttttgatatcaaactttggaacataacctgtcgctaatgttttatattgttctacaattaaatgtggtgtcaggaattggaaggacaactcattcgtgtgaatagagcttagattagcagaaatttgcaggggcaccggaggagggggaatatcttggcgaatacatgtagtaggagggatgttttgaggctagattttgataacaaagtgatcaagaccttcaatgtgatttcgatatgtcatacaatttttgtaccataacagtatatttttcttaacggcacttct

SEQ ID NO: 24368 - protein, 276 aa, Zea mays subsp. mays
  peptide (1)..(276): Ceres Seq. ID no. 12352691
  misc_feature (195)..(256): Pfam Name: a.k.a. RRM, RBD, or RNP domain Pfam Description: RNA recognition motif.
  misc_feature (79)..(258): NCBI GI NO: 7578881 NR Description: plastid-specific ribosomal protein 2 precursor
  misc_feature (83)..(258): NCBI GI NO: 30693595 NR Description: RNA recognition motif (RRM)-containing protein
  misc_feature (83)..(258): NCBI GI NO: 11357772 NR Description: hypothetical protein F4F15
  misc_feature (156)..(256): NCBI GI NO: 20159727 NR Description: plastid-specific ribosomal protein 2 precursor
  misc_feature (27)..(255): NCBI GI NO: 34913270 NR Description: putative ribonucleoprotein
  misc_feature (95)..(255): NCBI GI NO: 681912 NR Description: cp33 [Arabidopsis thaliana]
  misc_feature (95)..(255): NCBI GI NO: 17064758 NR Description: ubiquitin / ribosomal protein CEP52
  misc_feature (95)..(255): NCBI GI NO: 15231200 NR Description: chloroplast RNA-binding protein cp33
  misc_feature (89)..(270): NCBI GI NO: 100376 NR Description: ribonucleoprotein precursor - common tobacco
  misc_feature (89)..(255): NCBI GI NO: 7446342 NR Description: RNA-binding protein precursor, 33K - wood tobacco
QTHSQQRITLSSFGSSPLAPILSPPMATAISSLVTPPTLHRRCLGPACVSVSVCTPIRISFRPAAAPQVSRRGSALRVSASSAVLEAPEAVAARKLYVGNIPRTVTNDELRDMFAAHGTVERAEVMYDKYTNRSRRFGFVTMSTAEEANAAVEALNGTEVGDRKIKVNVTESFLPNIDRSAPEPEALFVDSQYKVYVGNLAKTVTTEVLKNFFSEKGNILSATVSHIPGTSKSKGYGFVTFSSEEEVEAAVATFNNAVSFSCKFYAFLPFLSNLIK

SEQ ID NO: 24369 - protein, 251 aa, Zea mays subsp. mays
  peptide (1)..(251): Ceres Seq. ID no. 12352692
  misc_feature (170)..(231): Pfam Name: a.k.a. RRM, RBD, or RNP domain Pfam Description: RNA recognition motif.
  misc_feature (54)..(233): NCBI GI NO: 7578881 NR Description: plastid-specific ribosomal protein 2 precursor
  misc_feature (58)..(233): NCBI GI NO: 30693595 NR Description: RNA recognition motif (RRM)-containing protein
  misc_feature (58)..(233): NCBI GI NO: 11357772 NR Description: hypothetical protein F4F15
  misc_feature (131)..(231): NCBI GI NO: 20159727 NR Description: plastid-specific ribosomal protein 2 precursor
  misc_feature (2)..(230): NCBI GI NO: 34913270 NR Description: putative ribonucleoprotein
  misc_feature (70)..(230): NCBI GI NO: 681912 NR Description: cp33 [Arabidopsis thaliana]
  misc_feature (70)..(230): NCBI GI NO: 15231200 NR Description: chloroplast RNA-binding protein cp33
  misc_feature (70)..(230): NCBI GI NO: 17064758 NR Description: ubiquitin / ribosomal protein CEP52
  misc_feature (64)..(245): NCBI GI NO: 100376 NR Description: ribonucleoprotein precursor - common tobacco
  misc_feature (64)..(230): NCBI GI NO: 7446342 NR Description: RNA-binding protein precursor, 33K - wood tobacco
MATAISSLVTPPTLHRRCLGPACVSVSVCTPIRISFRPAAAPQVSRRGSALRVSASSAVLEAPEAVAARKLYVGNIPRTVTNDELRDMFAAHGTVERAEVMYDKYTNRSRRFGFVTMSTAEEANAAVEALNGTEVGDRKIKVNVTESFLPNIDRSAPEPEALFVDSQYKVYVGNLAKTVTTEVLKNFFSEKGNILSATVSHIPGTSKSKGYGFVTFSSEEEVEAAVATFNNAVSFSCKFYAFLPFLSNLIK

SEQ ID NO: 24370 - protein, 164 aa, Zea mays subsp. mays
  peptide (1)..(164): Ceres Seq. ID no. 12352693
  misc_feature (83)..(144): Pfam Name: a.k.a. RRM, RBD, or RNP domain Pfam Description: RNA recognition motif.
  misc_feature (1)..(146): NCBI GI NO: 7578881 NR Description: plastid-specific ribosomal protein 2 precursor
  misc_feature (1)..(146): NCBI GI NO: 30693595 NR Description: RNA recognition motif (RRM)-containing protein
  misc_feature (1)..(146): NCBI GI NO: 11357772 NR Description: hypothetical protein F4F15
  misc_feature (44)..(144): NCBI GI NO: 20159727 NR Description: plastid-specific ribosomal protein 2 precursor
  misc_feature (1)..(143): NCBI GI NO: 34913270 NR Description: putative ribonucleoprotein
  misc_feature (1)..(143): NCBI GI NO: 681912 NR Description: cp33 [Arabidopsis thaliana]
  misc_feature (1)..(143): NCBI GI NO: 15231200 NR Description: chloroplast RNA-binding protein cp33
  misc_feature (1)..(143): NCBI GI NO: 17064758 NR Description: ubiquitin / ribosomal protein CEP52
  misc_feature (1)..(158): NCBI GI NO: 100376 NR Description: ribonucleoprotein precursor - common tobacco
  misc_feature (1)..(143): NCBI GI NO: 7446342 NR Description: RNA-binding protein precursor, 33K - wood tobacco
MFAAHGTVERAEVMYDKYTNRSRRFGFVTMSTAEEANAAVEALNGTEVGDRKIKVNVTESFLPNIDRSAPEPEALFVDSQYKVYVGNLAKTVTTEVLKNFFSEKGNILSATVSHIPGTSKSKGYGFVTFSSEEEVEAAVATFNNAVSFSCKFYAFLPFLSNLIK

SEQ ID NO: 24371 - DNA, 1881 bp, Zea mays subsp. mays
  misc_feature (1)..(1881): Ceres Seq. ID no. 12341608
aggcagagcactgcacgccaccttatctctaaccggagatcaaagaagtagccgttaacgatggcttccgacgagctcgcaaaggccgtcgagcccaggaagaagggcaacgtcaagtatgcctccatatgtgccatcctggcctccatggcctctgtcatccttggctatgacattggggtgatgagtggagcggccatgtacatcaagaaggacctgaatatcacggacgtgcagctggagatcctgatcgggatcctcagtctctactcgctgttcggatccttcgctggcgcgcggacgtccgacaggatcgggcgccgcttgaccgtcgtgttcgccgctgtcatcttcttcgtgggctcgttgctcatgggtttcgccgtcaactacggcatgctcatggcgggccgcttcgtggccggagtcggtgtgggctacgggggcatgatcgcgcccgtgtacacggccgagatctcgcctgcggcgtcccgtggcttcctgaccaccttcccggaggtgttcatcaacatcggcatcctgcttggctacctgtccaacttcgcgttcgcgcgcctcccgctccacctcggctggcgcgtcatgctcgccattggcgcagttccgtccggcctgctcgcgctcctggtgttctgcatgcccgagtcgcctcggtggctggtcttgaagggccgcctcgcggacgccagggctgtgctagagaagacctctgccacgccagaggaggccgccgagcggctggccgacatcaaggccgcggcggggattccgaagggcctcgacggggacgtagtcaccgtacccggcaaggagcaaggcggcggtgagttgcaggtgtggaagaagctcatcctgtccccgaccccggctgtccgacgcatactgctctcggccgtgggtctccacttcttccagcaggcttctggcagcgactccgtcgtccagtacagcgcccgcctgttcaagagcgcggggatcaccgacgacaacaagctcctgggcgtcacctgcgcggtgggcgtgaccaagacgttcttcatcctggtggccacgttcctgctggaccgcgcggggcgtcggcctctgctgctgatcagcacgggcgggatgatcgtctcgctcatctgcctcgggtcggggctcaccgtcgcggggcatcacccggacaccaaggtcgcgtgggccgtcgccctgtgcatcgcgtccaccctgtcctacatcgccttcttctccatcggcctcgggcccatcacgggcgtgtacacctcggaaatattcccgctgcaggtgcgcgcgctgggcttcgcggtgggtgtggcgagcaaccgcgtcaccagcgccgtcatctccatgaccttcctgtccctctccaaggccatcaccatcggcggcagcttcttcctctactccggcatcgccgcggtcgcttgggttttcttcttcacgtgcctcccggagacacgcggccggacgctggaggagatgggcaagctgttcggcatgccagacacgggcatggctgaagaagcagaagacgccgcagccaaggagaaggtggtggaactgcctagcagcaagtaggtggctatcccagagcacaggtcaagtgaagtagatggacaagatcattgtcttttcaactaattagatgggcaagaataactaagactgccctatgaggtgtcgtggttcaaccagagatcattctgctccttttcttttcccttcctttttcgagtaccattcccattcgtcgtggtcagtacgatgttgggtcgttgggagttagtggtgtcagagtccgcgtgtgctttgcaagccagggctgaacccacaatcatcagtaacaaaaattcttcc

SEQ ID NO: 24372 - protein, 513 aa, Zea mays subsp. mays
  peptide (1)..(513): Ceres Seq. ID no. 12341609
  misc_feature (24)..(486): Pfam Name: and other Pfam Description: Sugar
  misc_feature (1)..(512): NCBI GI NO: 16118827 NR Description: putative sugar transporter [Oryza sativa]
  misc_feature (10)..(487): NCBI GI NO: 28316433 NR Description: sorbitol transporter [Prunus cerasus]
  misc_feature (1)..(486): NCBI GI NO: 15230212 NR Description: sugar transport, putative; protein id: At3g18830.1
  misc_feature (1)..(486): NCBI GI NO: 1778095 NR Description: putative sugar transporter
  misc_feature (1)..(486): NCBI GI NO: 7484647 NR Description: probable sugar transport protein 205 - beet
  misc_feature (11)..(487): NCBI GI NO: 15226682 NR Description: putative sugar transporter; protein id: At2g16120
  misc_feature (11)..(487): NCBI GI NO: 15226696 NR Description: putative sugar transporter; protein id: At2g16130
  misc_feature (1)..(487): NCBI GI NO: 34392081 NR Description: polyol transporter [Plantago major]
  misc_feature (11)..(504): NCBI GI NO: 12004316 NR Description: mannitol transporter [Apium graveolens var. dulce]
  misc_feature (6)..(486): NCBI GI NO: 15234491 NR Description: sugar transporter like protein
MASDELAKAVEPRKKGNVKYASICAILASMASVILGYDIGVMSGAAMYIKKDLNITDVQLEILIGILSLYSLFGSFAGARTSDRIGRRLTVVFAAVIFFVGSLLMGFAVNYGMLMAGRFVAGVGVGYGGMIAPVYTAEISPAASRGFLTTFPEVFINIGILLGYLSNFAFARLPLHLGWRVMLAIGAVPSGLLALLVFCMPESPRWLVLKGRLADARAVLEKTSATPEEAAERLADIKAAAGIPKGLDGDVVTVPGKEQGGGELQVWKKLILSPTPAVRRILLSAVGLHFFQQASGSDSVVQYSARLFKSAGITDDNKLLGVTCAVGVTKTFFILVATFLLDRAGRRPLLLISTGGMIVSLICLGSGLTVAGHHPDTKVAWAVALCIASTLSYIAFFSIGLGPITGVYTSEIFPLQVRALGFAVGVASNRVTSAVISMTFLSLSKAITIGGSFFLYSGIAAVAWVFFFTCLPETRGRTLEEMGKLFGMPDTGMAEEAEDAAAKEKVVELPSSK

SEQ ID NO: 24373 - protein, 484 aa, Zea mays subsp. mays
  peptide (1)..(484): Ceres Seq. ID no. 12341610
  misc_feature (1)..(457): Pfam Name: and other Pfam Description: Sugar
  misc_feature (1)..(483): NCBI GI NO: 16118827 NR Description: putative sugar transporter [Oryza sativa]
  misc_feature (1)..(458): NCBI GI NO: 28316433 NR Description: sorbitol transporter [Prunus cerasus]
  misc_feature (1)..(457): NCBI GI NO: 15230212 NR Description: sugar transport, putative; protein id: At3g18830.1
  misc_feature (1)..(457): NCBI GI NO: 1778095 NR Description: putative sugar transporter
  misc_feature (1)..(457): NCBI GI NO: 7484647 NR Description: probable sugar transport protein 205 - beet
  misc_feature (1)..(458): NCBI GI NO: 15226682 NR Description: putative sugar transporter; protein id: At2g16120
  misc_feature (1)..(458): NCBI GI NO: 15226696 NR Description: putative sugar transporter; protein id: At2g16130
  misc_feature (1)..(458): NCBI GI NO: 34392081 NR Description: polyol transporter [Plantago major]
  misc_feature (1)..(475): NCBI GI NO: 12004316 NR Description: mannitol transporter [Apium graveolens var. dulce]
  misc_feature (1)..(457): NCBI GI NO: 15234491 NR Description: sugar transporter like protein
MASVILGYDIGVMSGAAMYIKKDLNITDVQLEILIGILSLYSLFGSFAGARTSDRIGRRLTVVFAAVIFFVGSLLMGFAVNYGMLMAGRFVAGVGVGYGGMIAPVYTAEISPAASRGFLTTFPEVFINIGILLGYLSNFAFARLPLHLGWRVMLAIGAVPSGLLALLVFCMPESPRWLVLKGRLADARAVLEKTSATPEEAAERLADIKAAAGIPKGLDGDVVTVPGKEQGGGELQVWKKLILSPTPAVRRILLSAVGLHFFQQASGSDSVVQYSARLFKSAGITDDNKLLGVTCAVGVTKTFFILVATFLLDRAGRRPLLLISTGGMIVSLICLGSGLTVAGHHPDTKVAWAVALCIASTLSYIAFFSIGLGPITGVYTSEIFPLQVRALGFAVGVASNRVTSAVISMTFLSLSKAITIGGSFFLYSGIAAVAWVFFFTCLPETRGRTLEEMGKLFGMPDTGMAEEAEDAAAKEKVVELPSSK

SEQ ID NO: 24374 - protein, 472 aa, Zea mays subsp. mays
  peptide (1)..(472): Ceres Seq. ID no. 12341611
  misc_feature (1)..(445): Pfam Name: and other Pfam Description: Sugar
  misc_feature (1)..(471): NCBI GI NO: 16118827 NR Description: putative sugar transporter [Oryza sativa]
  misc_feature (1)..(446): NCBI GI NO: 28316433 NR Description: sorbitol transporter [Prunus cerasus]
  misc_feature (1)..(445): NCBI GI NO: 15230212 NR Description: sugar transport, putative; protein id: At3g18830.1
  misc_feature (1)..(445): NCBI GI NO: 1778095 NR Description: putative sugar transporter
  misc_feature (1)..(445): NCBI GI NO: 7484647 NR Description: probable sugar transport protein 205 - beet
  misc_feature (1)..(446): NCBI GI NO: 15226682 NR Description: putative sugar transporter; protein id: At2g16120
  misc_feature (1)..(446): NCBI GI NO: 15226696 NR Description: putative sugar transporter; protein id: At2g16130
  misc_feature (1)..(446): NCBI GI NO: 34392081 NR Description: polyol transporter [Plantago major]
  misc_feature (1)..(463): NCBI GI NO: 12004316 NR Description: mannitol transporter [Apium graveolens var. dulce]
  misc_feature (1)..(445): NCBI GI NO: 15234491 NR Description: sugar transporter like protein
MSGAAMYIKKDLNITDVQLEILIGILSLYSLFGSFAGARTSDRIGRRLTVVFAAVIFFVGSLLMGFAVNYGMLMAGRFVAGVGVGYGGMIAPVYTAEISPAASRGFLTTFPEVFINIGILLGYLSNFAFARLPLHLGWRVMLAIGAVPSGLLALLVFCMPESPRWLVLKGRLADARAVLEKTSATPEEAAERLADIKAAAGIPKGLDGDVVTVPGKEQGGGELQVWKKLILSPTPAVRRILLSAVGLHFFQQASGSDSVVQYSARLFKSAGITDDNKLLGVTCAVGVTKTFFILVATFLLDRAGRRPLLLISTGGMIVSLICLGSGLTVAGHHPDTKVAWAVALCIASTLSYIAFFSIGLGPITGVYTSEIFPLQVRALGFAVGVASNRVTSAVISMTFLSLSKAITIGGSFFLYSGIAAVAWVFFFTCLPETRGRTLEEMGKLFGMPDTGMAEEAEDAAAKEKVVELPSSK

SEQ ID NO: 24375 - DNA, 1230 bp, Zea mays subsp. mays
  misc_feature (1)..(1230): Ceres Seq. ID no. 12410593
aacactatcccctttcgccggcgccgctcccgctccatcccacccgcgctctccagtctccacggatcgatcgaagcttccgtcttccggcgcgatgttcccgtgccgccccctggctccgccgcacctgccgcgtgccccttccctcgcgcggcttccactgtcgtcgctgcggccgccgtcgtcgtcgctgcgcgtggtgcggtgcatggcgaaggagcggcgggtacggatggtggcgaagcagatccagcgggagctcgccgacatgctcacccgcgaccccgtgctgcagcgcgccgtgctccccgaagccgcgctcggcgctgaccgctacctctcgtcgctcaccaccatcgccgacgtcgagctctccaacgacctccaggtgtgcaaagtgtacgtgtccgtgtttggggacgagagggggaagaaggtggccatcgaggggctcaaggccaagaccaagtacgtcaggagccagataggcaggaggatgaagcttcgcctcacgccggagataaggttcatcgaggatgagtctatggagcgtggaagcaggatccttgctatacttgacaaactaaaggaggaaagggagcaacaagaaggaaaagatggggaggaagatgatgattcatatatatcagaagaagatgatggtgactgggatgcagatgagccagatgaggaggacatcatttacgtaaaatagcccattgtcttctaggaacttggccatcattcatccagaacacaacagtcctcttcagagtttaattcagtgaagttcactgctcgcctgcttgtcgaagcactccaaagtatatcagcacttgaagaggtctacagagacatctcttttgccaattgaagcaggacatatcacacccttgctgccatttagaagctggtcatgtccttttttatggcttttcaatgcgggggatatttcaaagaggaatttggaagagtatttttttccctgtccactggaatactggattatgatatctgaccattgacgcaagacagtttgggctgatgctcattcctctgttatgttaactagcacttgtttaatttgtacttgcctagttatcttgctgtatttcagtctccatttcttctatggttttggtacagtatttcgtctttctataagccattatgtaatagagtagcatcagtatgattttaatgataatttatcactctctcatctgatct

SEQ ID NO: 24376 - protein, 237 aa, Zea mays subsp. mays
  peptide (1)..(237): Ceres Seq. ID no. 12410594
  misc_feature (75)..(195): Pfam Name: Pfam Description:  Ribosome-binding factor A
  misc_feature (42)..(237): NCBI GI NO: 30690114 NR Description: expressed protein [Arabidopsis thaliana]
  misc_feature (56)..(237): NCBI GI NO: 3914555 NR Description: Putative ribosome-binding factor A
  misc_feature (70)..(217): NCBI GI NO: 23127176 NR Description: hypothetical protein [Nostoc punctiforme]
  misc_feature (70)..(212): NCBI GI NO: 17227559 NR Description: ribosome binding facror A [Nostoc sp. PCC 7120]
  misc_feature (70)..(206): NCBI GI NO: 23039367 NR Description: hypothetical protein
  misc_feature (70)..(203): NCBI GI NO: 22299172 NR Description: ribosome binding factor A
  misc_feature (70)..(202): NCBI GI NO: 33866739 NR Description: possible Ribosome-binding factor A
  misc_feature (70)..(213): NCBI GI NO: 16331339 NR Description: hypothetical protein [Synechocystis sp. PCC 6803]
  misc_feature (72)..(200): NCBI GI NO: 37523601 NR Description: ribosome binding facror A [Gloeobacter violaceus]
  misc_feature (70)..(205): NCBI GI NO: 33239584 NR Description: Ribosome-binding factor A
TLSPFAGAAPAPSHPRSPVSTDRSKLPSSGAMFPCRPLAPPHLPRAPSLARLPLSSLRPPSSSLRVVRCMAKERRVRMVAKQIQRELADMLTRDPVLQRAVLPEAALGADRYLSSLTTIADVELSNDLQVCKVYVSVFGDERGKKVAIEGLKAKTKYVRSQIGRRMKLRLTPEIRFIEDESMERGSRILAILDKLKEEREQQEGKDGEEDDDSYISEEDDGDWDADEPDEEDIIYVK

SEQ ID NO: 24377 - protein, 206 aa, Zea mays subsp. mays
  peptide (1)..(206): Ceres Seq. ID no. 12410595
  misc_feature (44)..(164): Pfam Name: Pfam Description:  Ribosome-binding factor A
  misc_feature (11)..(206): NCBI GI NO: 30690114 NR Description: expressed protein [Arabidopsis thaliana]
  misc_feature (25)..(206): NCBI GI NO: 3914555 NR Description: Putative ribosome-binding factor A
  misc_feature (39)..(186): NCBI GI NO: 23127176 NR Description: hypothetical protein [Nostoc punctiforme]
  misc_feature (39)..(181): NCBI GI NO: 17227559 NR Description: ribosome binding facror A [Nostoc sp. PCC 7120]
  misc_feature (39)..(175): NCBI GI NO: 23039367 NR Description: hypothetical protein
  misc_feature (39)..(172): NCBI GI NO: 22299172 NR Description: ribosome binding factor A
  misc_feature (39)..(171): NCBI GI NO: 33866739 NR Description: possible Ribosome-binding factor A
  misc_feature (39)..(182): NCBI GI NO: 16331339 NR Description: hypothetical protein [Synechocystis sp. PCC 6803]
  misc_feature (41)..(169): NCBI GI NO: 37523601 NR Description: ribosome binding facror A [Gloeobacter violaceus]
  misc_feature (39)..(174): NCBI GI NO: 33239584 NR Description: Ribosome-binding factor A
MFPCRPLAPPHLPRAPSLARLPLSSLRPPSSSLRVVRCMAKERRVRMVAKQIQRELADMLTRDPVLQRAVLPEAALGADRYLSSLTTIADVELSNDLQVCKVYVSVFGDERGKKVAIEGLKAKTKYVRSQIGRRMKLRLTPEIRFIEDESMERGSRILAILDKLKEEREQQEGKDGEEDDDSYISEEDDGDWDADEPDEEDIIYVK

SEQ ID NO: 24378 - protein, 168 aa, Zea mays subsp. mays
  peptide (1)..(168): Ceres Seq. ID no. 12410596
  misc_feature (6)..(126): Pfam Name: Pfam Description:  Ribosome-binding factor A
  misc_feature (1)..(168): NCBI GI NO: 30690114 NR Description: expressed protein [Arabidopsis thaliana]
  misc_feature (1)..(168): NCBI GI NO: 3914555 NR Description: Putative ribosome-binding factor A
  misc_feature (1)..(148): NCBI GI NO: 23127176 NR Description: hypothetical protein [Nostoc punctiforme]
  misc_feature (1)..(143): NCBI GI NO: 17227559 NR Description: ribosome binding facror A [Nostoc sp. PCC 7120]
  misc_feature (1)..(137): NCBI GI NO: 23039367 NR Description: hypothetical protein
  misc_feature (1)..(134): NCBI GI NO: 22299172 NR Description: ribosome binding factor A
  misc_feature (1)..(133): NCBI GI NO: 33866739 NR Description: possible Ribosome-binding factor A
  misc_feature (1)..(144): NCBI GI NO: 16331339 NR Description: hypothetical protein [Synechocystis sp. PCC 6803]
  misc_feature (3)..(131): NCBI GI NO: 37523601 NR Description: ribosome binding facror A [Gloeobacter violaceus]
  misc_feature (1)..(136): NCBI GI NO: 33239584 NR Description: Ribosome-binding factor A
MAKERRVRMVAKQIQRELADMLTRDPVLQRAVLPEAALGADRYLSSLTTIADVELSNDLQVCKVYVSVFGDERGKKVAIEGLKAKTKYVRSQIGRRMKLRLTPEIRFIEDESMERGSRILAILDKLKEEREQQEGKDGEEDDDSYISEEDDGDWDADEPDEEDIIYVK

SEQ ID NO: 24379 - DNA, 1670 bp, Zea mays subsp. mays
  misc_feature (1)..(1670): Ceres Seq. ID no. 12353627
aaatttctgggcctctctcctccagcctgcatagccaacccttttgataaagaaacgggcctacactacacgggacacctgcctcctccccttctcccatctctccccctctccctctcgtggccacgactgccgctgccgccctacgccaggtgtccaggtcatctccggcccattcgccggcgacgagcaccccactagatcgaccgagatatggacggcctgtggcatctgggggacgagctccgcgggcagcccaaggtggtggaggaccgccagtggtcgctcatgacgtccaagctggcagagatcaccaggtccaggggcgagaggacgaacgacctcgactacgccaggatgaacgccgcccccgacgccaagcggtggggcaaggcggcgtcctaccagcaccatgacgagggcaggatggaccaccacgtcggcctcagcctcaagatgaacgatctcaagatgaacgaggccgccgctgccgccgtcatgaagctccccttccgcggcgtgccctacaacgtcaacccgatgtaccccaaggggagcaacgccaacgccaatgtcaacgcgttcaagatgaatgtcggggtgaacaagtactccagcagcgcgaacgggaaagacgccggcgggaaaagcagtggcggtggcagcaacaacaacagcggcggcggaggcaacggcaatgggaccgccaacggcagttccgcggtcgacaagcgcttcaagacgttgccgacgagcgagatgctgccaaagaacgaagtccttggtgggtacatctttgtctgcaacaacgataccatgcaggaggacctcaagaggcagctttttggattgccagcaagatatcgtgattcagtccgggcaattactcctggcctgcctcttttcctctataactacaccactcaccagcttcatggggtatttgaggctgccagtttcggtgggtctaatatcgatcccactgcatggggaggataagaagtgtaaaggtgaatctagattcccagcgcaggtgaggatccgcgttaggaagctctgcaagccgttggaagaggattccttcaggccagttttgcaccactatgatggcccaaagtttcgccttgagctctccatcgcggagaccctgtccctgctagacctatgcgagaaggaaggcatctgagctgttggctgcctcgtgaggttctagtaaatatcaatcatccttgtatgttctgtggatggtggttggcaatgttgtttatttttcaagcgcaagctgctgccggtctcgttttccctgtcctggatggaagcaaagggacctggtactttgaaggccccccctcaaacataagctgtgagcctgtcagtgcacgtgtccgccgttgtcgtcaagaaccaaaccaaatcatgaaatcttgcgccgacggagagttggagcgtgtatgttttgctatctctatctacatgtctcagtagagtggatataccctggggtccccaaaagatgggggcctgtatgtaacactacgtgtaatggttaaggtgaatgtgccgtgaggccccccaaaagttggagtgtgtattttttgttgtcaccttgaaccgactttgcgtatgctttttttagtgctgctaccttttgcgctgtgtttggcttctgg

SEQ ID NO: 24380 - protein, 261 aa, Zea mays subsp. mays
  peptide (1)..(261): Ceres Seq. ID no. 12353628
  misc_feature (79)..(259): NCBI GI NO: 2369766 NR Description: hypothetical protein [Citrus x paradisi]
  misc_feature (79)..(259): NCBI GI NO: 15232081 NR Description: gda-1, putative; protein id: At3g27090
  misc_feature (79)..(259): NCBI GI NO: 21592623 NR Description: gda-1, putative [Arabidopsis thaliana]
  misc_feature (116)..(259): NCBI GI NO: 21665866 NR Description: GDA2 protein [Pisum sativum]
  misc_feature (119)..(259): NCBI GI NO: 584825 NR Description: B2 PROTEIN
  misc_feature (32)..(259): NCBI GI NO: 18422167 NR Description: putative protein; protein id: At5g42050
  misc_feature (71)..(259): NCBI GI NO: 34913876 NR Description: B1156H12.22
  misc_feature (125)..(259): NCBI GI NO: 9757950 NR Description: gene_id:MJC20
  misc_feature (1)..(155): NCBI GI NO: 2369766 NR Description: hypothetical protein [Citrus x paradisi]
  misc_feature (1)..(152): NCBI GI NO: 15232081 NR Description: gda-1, putative; protein id: At3g27090
MDGLWHLGDELRGQPKVVEDRQWSLMTSKLAEITRSRGERTNDLDYARMNAAPDAKRWGKAASYQHHDEGRMDHHVGLSLKMNDLKMNEAAAAAVMKLPFRGVPYNVNPMYPKGSNANANVNAFKMNVGVNKYSSSANGKDAGGKSSGGGSNNNSGGGGNGNGTANGSSAVDKRFKTLPTSEMLPKNEVLGGYIFVCNNDTMQEDLKRQLFGLPARYRDSVRAITPGLPLFLYNYTTHQLHGVFEAASFGGSNIDPTAWGG

SEQ ID NO: 24381 - protein, 236 aa, Zea mays subsp. mays
  peptide (1)..(236): Ceres Seq. ID no. 12353629
  misc_feature (54)..(234): NCBI GI NO: 2369766 NR Description: hypothetical protein [Citrus x paradisi]
  misc_feature (54)..(234): NCBI GI NO: 15232081 NR Description: gda-1, putative; protein id: At3g27090
  misc_feature (54)..(234): NCBI GI NO: 21592623 NR Description: gda-1, putative [Arabidopsis thaliana]
  misc_feature (91)..(234): NCBI GI NO: 21665866 NR Description: GDA2 protein [Pisum sativum]
  misc_feature (94)..(234): NCBI GI NO: 584825 NR Description: B2 PROTEIN
  misc_feature (7)..(234): NCBI GI NO: 18422167 NR Description: putative protein; protein id: At5g42050
  misc_feature (46)..(234): NCBI GI NO: 34913876 NR Description: B1156H12.22
  misc_feature (100)..(234): NCBI GI NO: 9757950 NR Description: gene_id:MJC20
  misc_feature (1)..(130): NCBI GI NO: 2369766 NR Description: hypothetical protein [Citrus x paradisi]
  misc_feature (1)..(127): NCBI GI NO: 15232081 NR Description: gda-1, putative; protein id: At3g27090
MTSKLAEITRSRGERTNDLDYARMNAAPDAKRWGKAASYQHHDEGRMDHHVGLSLKMNDLKMNEAAAAAVMKLPFRGVPYNVNPMYPKGSNANANVNAFKMNVGVNKYSSSANGKDAGGKSSGGGSNNNSGGGGNGNGTANGSSAVDKRFKTLPTSEMLPKNEVLGGYIFVCNNDTMQEDLKRQLFGLPARYRDSVRAITPGLPLFLYNYTTHQLHGVFEAASFGGSNIDPTAWGG

SEQ ID NO: 24382 - protein, 213 aa, Zea mays subsp. mays
  peptide (1)..(213): Ceres Seq. ID no. 12353630
  misc_feature (31)..(211): NCBI GI NO: 2369766 NR Description: hypothetical protein [Citrus x paradisi]
  misc_feature (31)..(211): NCBI GI NO: 15232081 NR Description: gda-1, putative; protein id: At3g27090
  misc_feature (31)..(211): NCBI GI NO: 21592623 NR Description: gda-1, putative [Arabidopsis thaliana]
  misc_feature (68)..(211): NCBI GI NO: 21665866 NR Description: GDA2 protein [Pisum sativum]
  misc_feature (71)..(211): NCBI GI NO: 584825 NR Description: B2 PROTEIN
  misc_feature (1)..(211): NCBI GI NO: 18422167 NR Description: putative protein; protein id: At5g42050
  misc_feature (23)..(211): NCBI GI NO: 34913876 NR Description: B1156H12.22
  misc_feature (77)..(211): NCBI GI NO: 9757950 NR Description: gene_id:MJC20
  misc_feature (1)..(107): NCBI GI NO: 2369766 NR Description: hypothetical protein [Citrus x paradisi]
  misc_feature (1)..(104): NCBI GI NO: 15232081 NR Description: gda-1, putative; protein id: At3g27090
MNAAPDAKRWGKAASYQHHDEGRMDHHVGLSLKMNDLKMNEAAAAAVMKLPFRGVPYNVNPMYPKGSNANANVNAFKMNVGVNKYSSSANGKDAGGKSSGGGSNNNSGGGGNGNGTANGSSAVDKRFKTLPTSEMLPKNEVLGGYIFVCNNDTMQEDLKRQLFGLPARYRDSVRAITPGLPLFLYNYTTHQLHGVFEAASFGGSNIDPTAWGG

SEQ ID NO: 24383 - DNA, 862 bp, Zea mays subsp. mays
  misc_feature (1)..(862): Ceres Seq. ID no. 13499085
aagcaagcgaagcatcgccagattggtatatcgatcgattgatcggtggcggaggaaggggaggacggggggcagatggcggcgtgccggggcttcttcgagtgcctgctcaggctgctcaacttcatcctcaccgtcgccggcctcgctatggttggttacgggatctacctgctcgtcgagtggatgaagatatccgaggacggcatcggcggggcttcgacggcggaggtgctcgtctctggccggccgttgttgggggctgtcattctcggtgacagcttcctcgacaatctacccaaagcatggtttatttatttgtttattggtgttggcaccatcgtcatcttggtgtctctgtttggctgcattggagcagggacaagaaacacctgctgtttgtgtttctatgctttcttggtcatattgttgatccttgctgaagctgcagctgctgcattcattttctttgaccatggctggaaagatgtaattccagtggacaaaacacataactttgatgttatgtatgactttctgaaggaaaactgggagattgcaagatgggtcgctctgggcgttgttgtttttgaggcagtgctcttgctgttagctctggctgtcagggcaatgaacaaacctgctgagtatgacagtgatgacgaaattatagcaattggccgaagccctaccatccggcagccactgatccatacccaaaatgttcctgccactggtgttcctgtcccaacacttgatcaacgtgcaagtagaaatgatgcctggagccaaaggatgcgagagaagtatggtctggacacgagccagttcacatacaacccttcagacccaagcaggtacc

SEQ ID NO: 24384 - protein, 262 aa, Zea mays subsp. mays
  peptide (1)..(262): Ceres Seq. ID no. 13499086
  misc_feature (9)..(173): Pfam Name: Pfam Description:  Tetraspanin family
  misc_feature (3)..(261): NCBI GI NO: 18398417 NR Description: senescence-associated protein family
  misc_feature (112)..(261): NCBI GI NO: 25518327 NR Description: hypothetical protein F5D14
  misc_feature (3)..(99): NCBI GI NO: 25518327 NR Description: hypothetical protein F5D14
  misc_feature (100)..(249): NCBI GI NO: 34905192 NR Description: P0498E12.14
  misc_feature (73)..(257): NCBI GI NO: 15235419 NR Description: expressed protein [Arabidopsis thaliana]
  misc_feature (49)..(256): NCBI GI NO: 18399283 NR Description: expressed protein [Arabidopsis thaliana]
  misc_feature (49)..(256): NCBI GI NO: 25360978 NR Description: hypothetical protein At2g20230
  misc_feature (173)..(261): NCBI GI NO: 4097569 NR Description: GMFP4 [Glycine max]
  misc_feature (61)..(221): NCBI GI NO: 30681117 NR Description: expressed protein [Arabidopsis thaliana]
  misc_feature (3)..(101): NCBI GI NO: 34905192 NR Description: P0498E12.14
MAACRGFFECLLRLLNFILTVAGLAMVGYGIYLLVEWMKISEDGIGGASTAEVLVSGRPLLGAVILGDSFLDNLPKAWFIYLFIGVGTIVILVSLFGCIGAGTRNTCCLCFYAFLVILLILAEAAAAAFIFFDHGWKDVIPVDKTHNFDVMYDFLKENWEIARWVALGVVVFEAVLLLLALAVRAMNKPAEYDSDDEIIAIGRSPTIRQPLIHTQNVPATGVPVPTLDQRASRNDAWSQRMREKYGLDTSQFTYNPSDPSRY

SEQ ID NO: 24385 - protein, 237 aa, Zea mays subsp. mays
  peptide (1)..(237): Ceres Seq. ID no. 13499087
  misc_feature (1)..(148): Pfam Name: Pfam Description:  Tetraspanin family
  misc_feature (1)..(236): NCBI GI NO: 18398417 NR Description: senescence-associated protein family
  misc_feature (87)..(236): NCBI GI NO: 25518327 NR Description: hypothetical protein F5D14
  misc_feature (1)..(74): NCBI GI NO: 25518327 NR Description: hypothetical protein F5D14
  misc_feature (75)..(224): NCBI GI NO: 34905192 NR Description: P0498E12.14
  misc_feature (48)..(232): NCBI GI NO: 15235419 NR Description: expressed protein [Arabidopsis thaliana]
  misc_feature (24)..(231): NCBI GI NO: 18399283 NR Description: expressed protein [Arabidopsis thaliana]
  misc_feature (24)..(231): NCBI GI NO: 25360978 NR Description: hypothetical protein At2g20230
  misc_feature (148)..(236): NCBI GI NO: 4097569 NR Description: GMFP4 [Glycine max]
  misc_feature (36)..(196): NCBI GI NO: 30681117 NR Description: expressed protein [Arabidopsis thaliana]
  misc_feature (1)..(76): NCBI GI NO: 34905192 NR Description: P0498E12.14
MVGYGIYLLVEWMKISEDGIGGASTAEVLVSGRPLLGAVILGDSFLDNLPKAWFIYLFIGVGTIVILVSLFGCIGAGTRNTCCLCFYAFLVILLILAEAAAAAFIFFDHGWKDVIPVDKTHNFDVMYDFLKENWEIARWVALGVVVFEAVLLLLALAVRAMNKPAEYDSDDEIIAIGRSPTIRQPLIHTQNVPATGVPVPTLDQRASRNDAWSQRMREKYGLDTSQFTYNPSDPSRY

SEQ ID NO: 24386 - protein, 225 aa, Zea mays subsp. mays
  peptide (1)..(225): Ceres Seq. ID no. 13499088
  misc_feature (1)..(136): Pfam Name: Pfam Description:  Tetraspanin family
  misc_feature (1)..(224): NCBI GI NO: 18398417 NR Description: senescence-associated protein family
  misc_feature (75)..(224): NCBI GI NO: 25518327 NR Description: hypothetical protein F5D14
  misc_feature (1)..(62): NCBI GI NO: 25518327 NR Description: hypothetical protein F5D14
  misc_feature (63)..(212): NCBI GI NO: 34905192 NR Description: P0498E12.14
  misc_feature (36)..(220): NCBI GI NO: 15235419 NR Description: expressed protein [Arabidopsis thaliana]
  misc_feature (12)..(219): NCBI GI NO: 18399283 NR Description: expressed protein [Arabidopsis thaliana]
  misc_feature (12)..(219): NCBI GI NO: 25360978 NR Description: hypothetical protein At2g20230
  misc_feature (136)..(224): NCBI GI NO: 4097569 NR Description: GMFP4 [Glycine max]
  misc_feature (24)..(184): NCBI GI NO: 30681117 NR Description: expressed protein [Arabidopsis thaliana]
  misc_feature (1)..(64): NCBI GI NO: 34905192 NR Description: P0498E12.14
MKISEDGIGGASTAEVLVSGRPLLGAVILGDSFLDNLPKAWFIYLFIGVGTIVILVSLFGCIGAGTRNTCCLCFYAFLVILLILAEAAAAAFIFFDHGWKDVIPVDKTHNFDVMYDFLKENWEIARWVALGVVVFEAVLLLLALAVRAMNKPAEYDSDDEIIAIGRSPTIRQPLIHTQNVPATGVPVPTLDQRASRNDAWSQRMREKYGLDTSQFTYNPSDPSRY

SEQ ID NO: 24387 - DNA, 1421 bp, Zea mays subsp. mays
  misc_feature (1)..(1421): Ceres Seq. ID no. 12410589
  misc_feature (1415)..(1415): n is a, c, t, g, unknown, or other
  misc_feature (1416)..(1416): n is a, c, t, g, unknown, or other
aatatcatgcgcaggggctgaaagcctgaaactgctcaagacgccaccgtcttcctccgcgatcttcagttctctgtctctccctctctctttcctctagctcccaaccaagccaagagtacgtcgtcaagcgcgccgcgcgtgtgtgtgtcagtaggctacagggctcggaggaacgccgtcatgagcttgatcagcatgatggaggcgcggctgccgccgggggttccggttccacccgagggacgacgagctcgtgctcgactacctctgccgcaagctctccggcaaaggcggcggcggagcgtacggcggcatcgccatggtcgacgtcgacctcaacaagtgcgagccgtgggatcttccagacgaggcgtgcgtgggcggccgcgagtggtacttcttcagcctgcacgaccgcaagtacgccacggggcagcggaccaaccgcgccacgcgcaccgggtactggaaggccacgggcaaggaccgccccatctccgtctccggccgccgcggggccggcgacaccgccgcgctggtcgggatgcgcaagacgctggtgttctaccagggcagggcgccccgcgggagcaagaccgagtgggtcatgcacgagttccgcgtggacggcccgcccgttgccgaccgccccggctcacctctcctccagctccagctccaggaggattgggtcctgtgcagggtgttctacaagagccgaactgccagcacaagaccagcagcaggccccgacgaggccgggccgctgtccagccagctgatcggcggcctgccgatgccgcgaatggccgcccctgctgacgccgcctacctgtccttcgacgtcacacctgccgctggcggctactaccaccaccaagactccggccccgcggacgcgcgccaccacctgccgccgccgccggcgcagcctttcagcaggagtagcctgtccagcttgcgggacttgctcagcagcatggcctgaaggcagcgacgccgccgccgccgttcgggagacggagctccacctgcagctggagggctggaccgaggcggcctacgcgcagcagcagggcggcgccatgccggcgcacccgcagcagacgtggagcccgtttctgagctcgggatgacggcacgcggctgggggctcacgtgtgcgtggcgccctggcgcctggcgggcatcgcgtgcgtagtgaatagtcaacaatttgcttgtctttcttgcaatgtaacgttgacttggttagtgcatgcgatctctgccgtttgttaggcgtagggtaaaaacccacgcagcggataggtggaatgccttggtgattattggtgcagtaacttttgtacagttgattgttgcagaaaattactctctctttgtctgccttctaaaaaaaaaaaagaaannaaaaa

SEQ ID NO: 24388 - protein, 222 aa, Zea mays subsp. mays
  peptide (1)..(222): Ceres Seq. ID no. 12410590
  misc_feature (1)..(103): Pfam Name: NAM Pfam Description: No apical meristem
  misc_feature (1)..(178): NCBI GI NO: 38636961 NR Description: putative NAC domain protein NAC1
  misc_feature (1)..(143): NCBI GI NO: 15148912 NR Description: NAC domain protein NAC1 [Phaseolus vulgaris]
  misc_feature (16)..(222): NCBI GI NO: 38344327 NR Description: OSJNBa0058K23.9
  misc_feature (16)..(221): NCBI GI NO: 5679845 NR Description: l1332.9 [Oryza sativa (indica cultivar-group)]
  misc_feature (16)..(221): NCBI GI NO: 5852096 NR Description: zwh19.1 [Oryza sativa (indica cultivar-group)]
  misc_feature (1)..(133): NCBI GI NO: 15795128 NR Description: NAM (no apical meristem) protein-like
  misc_feature (1)..(133): NCBI GI NO: 15222818 NR Description: NAC1; protein id: At1g56010
  misc_feature (1)..(132): NCBI GI NO: 28411877 NR Description: putative NAM
  misc_feature (1)..(149): NCBI GI NO: 15229637 NR Description: organ separation protein, putative
  misc_feature (1)..(182): NCBI GI NO: 27529808 NR Description: OsNAC1 protein [Oryza sativa]
MVDVDLNKCEPWDLPDEACVGGREWYFFSLHDRKYATGQRTNRATRTGYWKATGKDRPISVSGRRGAGDTAALVGMRKTLVFYQGRAPRGSKTEWVMHEFRVDGPPVADRPGSPLLQLQLQEDWVLCRVFYKSRTASTRPAAGPDEAGPLSSQLIGGLPMPRMAAPADAAYLSFDVTPAAGGYYHHQDSGPADARHHLPPPPAQPFSRSSLSSLRDLLSSMA

SEQ ID NO: 24389 - protein, 213 aa, Zea mays subsp. mays
  peptide (1)..(213): Ceres Seq. ID no. 12410591
MSLISMMEARLPPGVPVPPEGRRARARLPLPQALRQRRRRSVRRHRHGRRRPQQVRAVGSSRRGVRGRPRVVLLQPARPQVRHGAADQPRHAHRVLEGHGQGPPHLRLRPPRGRRHRRAGRDAQDAGVLPGQGAPREQDRVGHARVPRGRPARCRPPRLTSPPAPAPGGLGPVQGVLQEPNCQHKTSSRPRRGRAAVQPADRRPADAANGRPC

SEQ ID NO: 24390 - protein, 208 aa, Zea mays subsp. mays
  peptide (1)..(208): Ceres Seq. ID no. 12410592
MMEARLPPGVPVPPEGRRARARLPLPQALRQRRRRSVRRHRHGRRRPQQVRAVGSSRRGVRGRPRVVLLQPARPQVRHGAADQPRHAHRVLEGHGQGPPHLRLRPPRGRRHRRAGRDAQDAGVLPGQGAPREQDRVGHARVPRGRPARCRPPRLTSPPAPAPGGLGPVQGVLQEPNCQHKTSSRPRRGRAAVQPADRRPADAANGRPC

SEQ ID NO: 24391 - DNA, 1291 bp, Zea mays subsp. mays
  misc_feature (1)..(1291): Ceres Seq. ID no. 12365243
actgtccagccagccatccaggcccaggagcgcgagttctgtgcctgtgcctctgctccacctcccctgcccctgcgccccaagtccacgtccaccacttagcactcacgctgctcgctcgctcgctcgtacacgcgcccgcttcgcgcagggaaggaaccgtgggagggaagcggacggacatgatgcacgccaagtcggagtcggacgtgacgagcctggcggcgtcgtcgccgcctcggtcgccgaagcggggcggcggcgccgccggcaacggcggctactacgtgcagagcccgtcgcgggagtcgccacgacggcggctacaagtcctcgtcgatgcagccccacgccggtctacaacagccccaacgagtcgccgtcgcacccctcctacggccgccactcccgctcctcctccgtcagccgcttctccggcaacctccgcaagggcgccgccggggaccgcaaggtgctcaacgacaaggggtggcccgagtgcaacgtcatcgaggaggagggcccgtacgaggacctcgccggcgatagcggcctctcccgccgctgccagatcatactcggcttcctcaccttcgtcctcctcttcaccgtcttctgcctcatcatctggggcgccgcccggccgtacgagcccgaggtcatcgtcaagagcttggtgatggacgacttctacgcgggtgaaggcacggaccacagcggcgttccaacaaaattggtcacaacaaactgctctctgcacatagctgtctacaaccctgccacaatgtttggaattcatgtcacttctggccccatccacctgatgtattcagagatcccaatagcagtcggtcaggttcggaggtattaccagccgaggaagagccaccggatggtgacggcggtcatccacggcgagaaggtgccgctgtacggcgccgggggcagcctgatgctgtcgacaagcacgggcggggcggtgcccctgacgctggacttggacctgacctcgcggggctacgtgatcggcaagctcgtgcgggtgacgcacaaggtgcacgtgacgtgccccgtcgtcgtggacgccaagaagaccaagcccgtcaggttctccaagaaggcctgcgccgtgtacagggcctgaacttcaaatgcgttttcgtaggctgcgatccgacggcgcattagcaacgcgcgtaggatgccgtgcctgtatttagttatcgtattggtggtgaagaacaataagctgcacacacatatggtctgtttgagccttttggttctgccg

SEQ ID NO: 24392 - protein, 380 aa, Zea mays subsp. mays
  peptide (1)..(380): Ceres Seq. ID no. 12365244
  misc_feature (117)..(223): NCBI GI NO: 34898370 NR Description: ESTD24835
  misc_feature (280)..(379): NCBI GI NO: 34898370 NR Description: ESTD24835
  misc_feature (121)..(376): NCBI GI NO: 34904260 NR Description: P0452F10.18
  misc_feature (117)..(318): NCBI GI NO: 18401556 NR Description: expressed protein; protein id: At1g45688
  misc_feature (117)..(378): NCBI GI NO: 38345517 NR Description: OSJNBa0039K24.20
  misc_feature (117)..(378): NCBI GI NO: 5777621 NR Description: CAA30379.1 protein [Oryza sativa]
  misc_feature (117)..(318): NCBI GI NO: 15239097 NR Description: putative protein; protein id: At5g42860.1
  misc_feature (117)..(318): NCBI GI NO: 28416677 NR Description: At5g42860 [Arabidopsis thaliana]
  misc_feature (127)..(375): NCBI GI NO: 15230135 NR Description: hypothetical protein; protein id: At3g24600.1
  misc_feature (117)..(375): NCBI GI NO: 9294055 NR Description: gene_id:MOB24.18~unknown protein
LSSQPSRPRSASSVPVPLLHLPCPCAPSPRPPLSTHAARSLARTRARFAQGRNRGREADGHDARQVGVGRDEPGGVVAASVAEAGRRRRRQRRLLRAEPVAGVATTAATSPRRCSPTPVYNSPNESPSHPSYGRHSRSSSVSRFSGNLRKGAAGDRKVLNDKGWPECNVIEEEGPYEDLAGDSGLSRRCQIILGFLTFVLLFTVFCLIIWGAARPYEPEVIVKSLVMDDFYAGEGTDHSGVPTKLVTTNCSLHIAVYNPATMFGIHVTSGPIHLMYSEIPIAVGQVRRYYQPRKSHRMVTAVIHGEKVPLYGAGGSLMLSTSTGGAVPLTLDLDLTSRGYVIGKLVRVTHKVHVTCPVVVDAKKTKPVRFSKKACAVYRA

SEQ ID NO: 24393 - protein, 225 aa, Zea mays subsp. mays
  peptide (1)..(225): Ceres Seq. ID no. 12365245
  misc_feature (23)..(174): NCBI GI NO: 34898370 NR Description: ESTD24835
  misc_feature (62)..(103): NCBI GI NO: 18401556 NR Description: expressed protein; protein id: At1g45688
  misc_feature (62)..(103): NCBI GI NO: 15239097 NR Description: putative protein; protein id: At5g42860.1
  misc_feature (62)..(103): NCBI GI NO: 28416677 NR Description: At5g42860 [Arabidopsis thaliana]
  misc_feature (19)..(224): NCBI GI NO: 11359723 NR Description: proteophosphoglycan, membrane-associated
  misc_feature (64)..(225): NCBI GI NO: 11359723 NR Description: proteophosphoglycan, membrane-associated
  misc_feature (19)..(225): NCBI GI NO: 13592175 NR Description: ppg3 [Leishmania major]
  misc_feature (18)..(225): NCBI GI NO: 13592175 NR Description: ppg3 [Leishmania major]
  misc_feature (66)..(224): NCBI GI NO: 5420387 NR Description: proteophosphoglycan [Leishmania major]
  misc_feature (66)..(225): NCBI GI NO: 13592175 NR Description: ppg3 [Leishmania major]
CPASHPGPGARVLCLCLCSTSPAPAPQVHVHHLALTLLARSLVHAPASRREGTVGGKRTDMMHAKSESDVTSLAASSPPRSPKRGGGAAGNGGYYVQSPSRESPRRRLQVLVDAAPRRSTTAPTSRRRTPPTAATPAPPPSAASPATSARAPPGTARCSTTRGGPSATSSRRRARTRTSPAIAASPAAARSYSASSPSSSSSPSSASSSGAPPGRTSPRSSSRAW

SEQ ID NO: 24394 - DNA, 1431 bp, Zea mays subsp. mays
  misc_feature (1)..(1431): Ceres Seq. ID no. 12414588
agcgagaggatgacaccacgaggcaaataaacccagacgtagttcagctagccgcttctacctccctctcccccccccgcctgcgcgctgccgcgagagctcgttcctgatggggaactgcgccggcgtggaggggaacgccgagatcaacccttccttcagtgcccccaattcctcagggaccgccggttctaagagcgtcagcaagaacgcggccgacaccggcaccttcggcaccaagacgtccggctcgtcgtcgtcggtgccgccaacccctcgtacggaggcggagatcctggagtcgtcgaatgtccgcaagttcagcttcggcgagctcaaaggctccacgaggaacttcaggccggacagcctgctcggggaggggggcttcgggtccgtgttcaaggggtggatggatgagcgcacgctcgcgcccgtgaggccgggcgccgggatcatcgtcgccgtcaagaagctcaagctcgacagcttccaagggcaccgggaatggctggcggaggtcaattacctggggcagttatcccaccctaatctcgtgaaactcatcggctactgcttggaggacgaacagcggcttcttgtgtacgagtacatgccgagagggagcctggagcatcatcttttcaggaggggctcgaacttccagccgctcccatggaacttacgcatgaaggttgctctcgaggctgccagaggtcttgctttcctgcacggcgaccaggccaaagttatctaccgcgatttcaagacctccaatatccttctcgactcggagtacaacgcaaaactgtctgatttcggtttggcaaaggacggtccaagcggtgataagagccatgtttctactagggtcatggggacacaaggatacgctgcccctgaatatcttgcgacaggccatttgacagcgaagagcgatgtgtacagctacggtgtggttcttctggagctgctgtctgggcagcgcgctctggacaagaaccgcccgcccggtcagcacaatctggtggagtgggctagaccttacatcaccaacaagaggagggtcattcatgtcctggactcacggctgggttcccagtattcccttcccgcggctcagaaggtggcaaccctggcgctgcaatgcttatcgatggacgcacgatgcaggcctgccatggatcaggttgtgactgcattagaacaacttcaaaggccaagggctcactgaaaaagatgtccatctacctctgtggagtctggagcatcctcctgtaatactttaggggagtaaaaaacagagaacgggtgagggtttgaagggctacgtggcttgtgaagagaatataatattcccttgctttgtgtacagctagttgcttcgtcgttgtaacttgggtctctacttatatattttattagtcttcg

SEQ ID NO: 24395 - protein, 374 aa, Zea mays subsp. mays
  peptide (1)..(374): Ceres Seq. ID no. 12414589
  misc_feature (1)..(374): NCBI GI NO: 34906046 NR Description: putative serine/threonine-specific protein kinase
  misc_feature (1)..(369): NCBI GI NO: 14719339 NR Description: putative protein kinase [Oryza sativa]
  misc_feature (1)..(374): NCBI GI NO: 34897424 NR Description: putative protein kinase
  misc_feature (18)..(369): NCBI GI NO: 15222437 NR Description: protein kinase APK1A; protein id: At1g07570.1
  misc_feature (26)..(369): NCBI GI NO: 15227001 NR Description: putative protein kinase; protein id: At2g28930.1
  misc_feature (18)..(270): NCBI GI NO: 8778537 NR Description: F22G5.5 [Arabidopsis thaliana]
  misc_feature (270)..(369): NCBI GI NO: 8778537 NR Description: F22G5.5 [Arabidopsis thaliana]
  misc_feature (42)..(374): NCBI GI NO: 15241749 NR Description: serine/threonine-specific protein kinase NAK
  misc_feature (42)..(374): NCBI GI NO: 166809 NR Description: protein kinase
  misc_feature (34)..(369): NCBI GI NO: 15225520 NR Description: putative protein kinase; protein id: At2g39660
MGNCAGVEGNAEINPSFSAPNSSGTAGSKSVSKNAADTGTFGTKTSGSSSSVPPTPRTEAEILESSNVRKFSFGELKGSTRNFRPDSLLGEGGFGSVFKGWMDERTLAPVRPGAGIIVAVKKLKLDSFQGHREWLAEVNYLGQLSHPNLVKLIGYCLEDEQRLLVYEYMPRGSLEHHLFRRGSNFQPLPWNLRMKVALEAARGLAFLHGDQAKVIYRDFKTSNILLDSEYNAKLSDFGLAKDGPSGDKSHVSTRVMGTQGYAAPEYLATGHLTAKSDVYSYGVVLLELLSGQRALDKNRPPGQHNLVEWARPYITNKRRVIHVLDSRLGSQYSLPAAQKVATLALQCLSMDARCRPAMDQVVTALEQLQRPRAH

SEQ ID NO: 24396 - protein, 273 aa, Zea mays subsp. mays
  peptide (1)..(273): Ceres Seq. ID no. 12414590
  misc_feature (1)..(273): NCBI GI NO: 34906046 NR Description: putative serine/threonine-specific protein kinase
  misc_feature (1)..(268): NCBI GI NO: 14719339 NR Description: putative protein kinase [Oryza sativa]
  misc_feature (1)..(273): NCBI GI NO: 34897424 NR Description: putative protein kinase
  misc_feature (1)..(268): NCBI GI NO: 15222437 NR Description: protein kinase APK1A; protein id: At1g07570.1
  misc_feature (1)..(268): NCBI GI NO: 15227001 NR Description: putative protein kinase; protein id: At2g28930.1
  misc_feature (1)..(169): NCBI GI NO: 8778537 NR Description: F22G5.5 [Arabidopsis thaliana]
  misc_feature (169)..(268): NCBI GI NO: 8778537 NR Description: F22G5.5 [Arabidopsis thaliana]
  misc_feature (1)..(273): NCBI GI NO: 15241749 NR Description: serine/threonine-specific protein kinase NAK
  misc_feature (1)..(273): NCBI GI NO: 166809 NR Description: protein kinase
  misc_feature (1)..(268): NCBI GI NO: 15225520 NR Description: putative protein kinase; protein id: At2g39660
MDERTLAPVRPGAGIIVAVKKLKLDSFQGHREWLAEVNYLGQLSHPNLVKLIGYCLEDEQRLLVYEYMPRGSLEHHLFRRGSNFQPLPWNLRMKVALEAARGLAFLHGDQAKVIYRDFKTSNILLDSEYNAKLSDFGLAKDGPSGDKSHVSTRVMGTQGYAAPEYLATGHLTAKSDVYSYGVVLLELLSGQRALDKNRPPGQHNLVEWARPYITNKRRVIHVLDSRLGSQYSLPAAQKVATLALQCLSMDARCRPAMDQVVTALEQLQRPRAH

SEQ ID NO: 24397 - protein, 206 aa, Zea mays subsp. mays
  peptide (1)..(206): Ceres Seq. ID no. 12414591
  misc_feature (1)..(206): NCBI GI NO: 34906046 NR Description: putative serine/threonine-specific protein kinase
  misc_feature (1)..(201): NCBI GI NO: 14719339 NR Description: putative protein kinase [Oryza sativa]
  misc_feature (1)..(206): NCBI GI NO: 34897424 NR Description: putative protein kinase
  misc_feature (1)..(201): NCBI GI NO: 15222437 NR Description: protein kinase APK1A; protein id: At1g07570.1
  misc_feature (1)..(201): NCBI GI NO: 15227001 NR Description: putative protein kinase; protein id: At2g28930.1
  misc_feature (1)..(102): NCBI GI NO: 8778537 NR Description: F22G5.5 [Arabidopsis thaliana]
  misc_feature (102)..(201): NCBI GI NO: 8778537 NR Description: F22G5.5 [Arabidopsis thaliana]
  misc_feature (1)..(206): NCBI GI NO: 15241749 NR Description: serine/threonine-specific protein kinase NAK
  misc_feature (1)..(206): NCBI GI NO: 166809 NR Description: protein kinase
  misc_feature (1)..(201): NCBI GI NO: 15225520 NR Description: putative protein kinase; protein id: At2g39660
MPRGSLEHHLFRRGSNFQPLPWNLRMKVALEAARGLAFLHGDQAKVIYRDFKTSNILLDSEYNAKLSDFGLAKDGPSGDKSHVSTRVMGTQGYAAPEYLATGHLTAKSDVYSYGVVLLELLSGQRALDKNRPPGQHNLVEWARPYITNKRRVIHVLDSRLGSQYSLPAAQKVATLALQCLSMDARCRPAMDQVVTALEQLQRPRAH

SEQ ID NO: 24398 - DNA, 749 bp, Zea mays subsp. mays
  misc_feature (1)..(749): Ceres Seq. ID no. 12414219
gaaccctagctcccgcaactgccgccgccaccccacgcctgcagccatgccgcccaagctcgacccgtcgcaggtggtggaggtgttcgtccgtgtgaccggcggcgaggtaggcgcggcgtcttcgctggcccccaagatcggtccgctcggtctttctcccaagaagatcggagaggacatcgccaaggagacggccaaggactggaagggcctccgcgtcaccgtcaagctcactgtccagaaccgacaggccaaggtctccgtcgttccctctgccgcggccctcgtcatcaaggcgctcaaggagcccgagagggaccgcaagaaggtcaagaacatcaagcacagcggcaacatcagtctcgacgatgtcatcgagattgccaggaccatgaggcccaggtccatggccaaggaaatgtccggcagcgtcaaggagattctcggcacctgcgtcagcgtcggctgcaccgtcgacggcaaggaccccaaggacctgcagcaggagattgacgacggcgaggtggagatcccgtccgcttaagaagggattggagcctaggagggttgtcttggtctctgaagtaattctctctagctagatttgtctgttgaagtaattttctctagctagatttttgttaaaatgtatctctgctacccattgctatggttttctggtggatgcgtgctttttccttttatatatatatatatatatatatataaaaggaacagtgtctttc

SEQ ID NO: 24399 - protein, 181 aa, Zea mays subsp. mays
  peptide (1)..(181): Ceres Seq. ID no. 12414220
  misc_feature (91)..(159): Pfam Name: Pfam Description:  Ribosomal protein L11, RNA binding domain
  misc_feature (16)..(181): NCBI GI NO: 38567975 NR Description: OSJNBa0093F12.16
  misc_feature (16)..(179): NCBI GI NO: 40287508 NR Description: 60S ribosomal protein L12 [Capsicum annuum]
  misc_feature (16)..(179): NCBI GI NO: 15228098 NR Description: 60S ribosomal protein L12; protein id: At2g37190
  misc_feature (16)..(179): NCBI GI NO: 15231814 NR Description: 60S RIBOSOMAL PROTEIN L12 -like
  misc_feature (16)..(180): NCBI GI NO: 15239409 NR Description: 60S ribosomal protein L12 - like
  misc_feature (16)..(179): NCBI GI NO: 6094002 NR Description: 60S RIBOSOMAL PROTEIN L12
  misc_feature (16)..(157): NCBI GI NO: 3986695 NR Description: ribosomal protein L12 [Cichorium intybus]
  misc_feature (16)..(179): NCBI GI NO: 19075397 NR Description: 60s ribosomal protein l12
  misc_feature (25)..(181): NCBI GI NO: 1710485 NR Description: 60S RIBOSOMAL PROTEIN L12
  misc_feature (3)..(181): NCBI GI NO: 34865048 NR Description: similar to 60S RIBOSOMAL PROTEIN L12
NPSSRNCRRHPTPAAMPPKLDPSQVVEVFVRVTGGEVGAASSLAPKIGPLGLSPKKIGEDIAKETAKDWKGLRVTVKLTVQNRQAKVSVVPSAAALVIKALKEPERDRKKVKNIKHSGNISLDDVIEIARTMRPRSMAKEMSGSVKEILGTCVSVGCTVDGKDPKDLQQEIDDGEVEIPSA

SEQ ID NO: 24400 - protein, 166 aa, Zea mays subsp. mays
  peptide (1)..(166): Ceres Seq. ID no. 12414221
  misc_feature (76)..(144): Pfam Name: Pfam Description:  Ribosomal protein L11, RNA binding domain
  misc_feature (1)..(166): NCBI GI NO: 38567975 NR Description: OSJNBa0093F12.16
  misc_feature (1)..(164): NCBI GI NO: 40287508 NR Description: 60S ribosomal protein L12 [Capsicum annuum]
  misc_feature (1)..(164): NCBI GI NO: 15228098 NR Description: 60S ribosomal protein L12; protein id: At2g37190
  misc_feature (1)..(164): NCBI GI NO: 15231814 NR Description: 60S RIBOSOMAL PROTEIN L12 -like
  misc_feature (1)..(165): NCBI GI NO: 15239409 NR Description: 60S ribosomal protein L12 - like
  misc_feature (1)..(164): NCBI GI NO: 6094002 NR Description: 60S RIBOSOMAL PROTEIN L12
  misc_feature (1)..(142): NCBI GI NO: 3986695 NR Description: ribosomal protein L12 [Cichorium intybus]
  misc_feature (1)..(164): NCBI GI NO: 19075397 NR Description: 60s ribosomal protein l12
  misc_feature (10)..(166): NCBI GI NO: 1710485 NR Description: 60S RIBOSOMAL PROTEIN L12
  misc_feature (1)..(166): NCBI GI NO: 34865048 NR Description: similar to 60S RIBOSOMAL PROTEIN L12
MPPKLDPSQVVEVFVRVTGGEVGAASSLAPKIGPLGLSPKKIGEDIAKETAKDWKGLRVTVKLTVQNRQAKVSVVPSAAALVIKALKEPERDRKKVKNIKHSGNISLDDVIEIARTMRPRSMAKEMSGSVKEILGTCVSVGCTVDGKDPKDLQQEIDDGEVEIPSA

SEQ ID NO: 24401 - DNA, 1572 bp, Zea mays subsp. mays
  misc_feature (1)..(1572): Ceres Seq. ID no. 12405776
agcagtcagcacgtctccgtccccgacgatgccggggagcaatgccaatggagggcgcagcctgtacggacacggccgaccggccatcttcacccccctctccttgccgccctcggttccggactctgctcccctgccccatacccccaccgctcctcacgcctcgcctgactgccgaggcaaccccggaagctcctcccgcgcgcgaacatgatttggcctgaacaacgcagaggaagtgatcttatgtagctacaaaagatagtaatggggatatccaaggtgacaggcattgccgccacagcttttcttgtcacatctgttagtctgtgccagttgggaatgaggattattatgcttccattcctagccaccggtattgttgcttccattgtcacggttgcatcgcatgatgccatcaacctaccgtggatcttggggaagaactcggtcggaagatttcctctttggtcgattatactgtttggtcctttcttgacgcttgctcggacatatgcgatggttaagagatacatgaggaaggaggccgtgtatgacaagatcgtggaaggcctatatctcggaggatggccgtttctcttgaaacatttgccccctggaaacccatctgtcatagattgcacttgtgagcttccaagaagttcattcgttccagcagacgagtatctttgccttgcaacttgggataccagagctccaacaccgcaccagatcgaaaaggctgcacgttgggcttgtgaaaagaaatctgaggggaagccagtttatgtccattgcgcatttggtcatggaagaagtgcctgtgttgtgtgtgcaattctagtagcgctgggtactgctgagaactggaaagatgctgagaacatcatccgtgaaagaagaaagataaaaatgaacgcccttcaccgtaaaaccttggaagagtggtccaaacaacgagttcgtcagaaaaaggataagtagttgtttgaccagatgcatggagttgccctggatatggtgttattgctgcaccaatttattttaatccaatattccatagctcatgtatagtcgagtggaatgaggaatatcatagggagcccagctcgtgtgtaggatctatctatggagtacctatgacactgtcatagtaacatattgatttgagattctagatttggtgagaaccccataacctgtatcacaaagccttcaaggttggccagcttgccgagggcaagagccatttggctcatgaagctcatgttggcgtcgtcagtcagagatccaccggccatggtgtcagcaagcgactgatgcagctgctccaagccctgcgagagagcttcctctgcctgctgtgatgactgctgaaggctgcatatgccgaccacttgctgctctgtcagtggatctagctggggcagcagtgtctgcaacagaatggaatttcgtatactttattattggaactgcaaattcttcttgtactaaggggaaatctgatttacattggaacagttcttgtgatctcagtaatgaaaaagtaacatcgcctgagttccctgc

SEQ ID NO: 24402 - protein, 238 aa, Zea mays subsp. mays
  peptide (1)..(238): Ceres Seq. ID no. 12405777
  misc_feature (98)..(230): Pfam Name: Pfam Description:  Dual specificity phosphatase, catalytic domain
  misc_feature (2)..(236): NCBI GI NO: 34908470 NR Description: P0489B03.9
  misc_feature (1)..(230): NCBI GI NO: 15801736 NR Description: putative enzymes [Escherichia coli O157:H7 EDL933]
  misc_feature (58)..(230): NCBI GI NO: 26247698 NR Description: Hypothetical protein ynbD
  misc_feature (58)..(230): NCBI GI NO: 3041758 NR Description: unnamed protein product [Escherichia coli]
  misc_feature (58)..(230): NCBI GI NO: 16129372 NR Description: putative enzymes [Escherichia coli K12]
  misc_feature (1)..(232): NCBI GI NO: 28896859 NR Description: hypothetical protein
  misc_feature (15)..(238): NCBI GI NO: 23030039 NR Description: hypothetical protein
MGISKVTGIAATAFLVTSVSLCQLGMRIIMLPFLATGIVASIVTVASHDAINLPWILGKNSVGRFPLWSIILFGPFLTLARTYAMVKRYMRKEAVYDKIVEGLYLGGWPFLLKHLPPGNPSVIDCTCELPRSSFVPADEYLCLATWDTRAPTPHQIEKAARWACEKKSEGKPVYVHCAFGHGRSACVVCAILVALGTAENWKDAENIIRERRKIKMNALHRKTLEEWSKQRVRQKKDK

SEQ ID NO: 24403 - protein, 213 aa, Zea mays subsp. mays
  peptide (1)..(213): Ceres Seq. ID no. 12405778
  misc_feature (73)..(205): Pfam Name: Pfam Description:  Dual specificity phosphatase, catalytic domain
  misc_feature (1)..(211): NCBI GI NO: 34908470 NR Description: P0489B03.9
  misc_feature (1)..(205): NCBI GI NO: 15801736 NR Description: putative enzymes [Escherichia coli O157:H7 EDL933]
  misc_feature (33)..(205): NCBI GI NO: 26247698 NR Description: Hypothetical protein ynbD
  misc_feature (33)..(205): NCBI GI NO: 3041758 NR Description: unnamed protein product [Escherichia coli]
  misc_feature (33)..(205): NCBI GI NO: 16129372 NR Description: putative enzymes [Escherichia coli K12]
  misc_feature (1)..(207): NCBI GI NO: 28896859 NR Description: hypothetical protein
  misc_feature (1)..(213): NCBI GI NO: 23030039 NR Description: hypothetical protein
MRIIMLPFLATGIVASIVTVASHDAINLPWILGKNSVGRFPLWSIILFGPFLTLARTYAMVKRYMRKEAVYDKIVEGLYLGGWPFLLKHLPPGNPSVIDCTCELPRSSFVPADEYLCLATWDTRAPTPHQIEKAARWACEKKSEGKPVYVHCAFGHGRSACVVCAILVALGTAENWKDAENIIRERRKIKMNALHRKTLEEWSKQRVRQKKDK

SEQ ID NO: 24404 - protein, 209 aa, Zea mays subsp. mays
  peptide (1)..(209): Ceres Seq. ID no. 12405779
  misc_feature (69)..(201): Pfam Name: Pfam Description:  Dual specificity phosphatase, catalytic domain
  misc_feature (1)..(207): NCBI GI NO: 34908470 NR Description: P0489B03.9
  misc_feature (1)..(201): NCBI GI NO: 15801736 NR Description: putative enzymes [Escherichia coli O157:H7 EDL933]
  misc_feature (29)..(201): NCBI GI NO: 26247698 NR Description: Hypothetical protein ynbD
  misc_feature (29)..(201): NCBI GI NO: 3041758 NR Description: unnamed protein product [Escherichia coli]
  misc_feature (29)..(201): NCBI GI NO: 16129372 NR Description: putative enzymes [Escherichia coli K12]
  misc_feature (1)..(203): NCBI GI NO: 28896859 NR Description: hypothetical protein
  misc_feature (1)..(209): NCBI GI NO: 23030039 NR Description: hypothetical protein
MLPFLATGIVASIVTVASHDAINLPWILGKNSVGRFPLWSIILFGPFLTLARTYAMVKRYMRKEAVYDKIVEGLYLGGWPFLLKHLPPGNPSVIDCTCELPRSSFVPADEYLCLATWDTRAPTPHQIEKAARWACEKKSEGKPVYVHCAFGHGRSACVVCAILVALGTAENWKDAENIIRERRKIKMNALHRKTLEEWSKQRVRQKKDK

SEQ ID NO: 24405 - DNA, 1641 bp, Zea mays subsp. mays
  misc_feature (1)..(1641): Ceres Seq. ID no. 12352107
ttctctagactccccttcgtccctttctctctcttcacactcgcctcgccattaaagctccaaaaaagaaaaaaaggctgcgaaaaaaatcatcttctcttctcctaaaatcttccacctttaaccgtccctgtccgcgaatttctagatgccccgatcgcttccgattttttcctggatttctccgattttttgaagtatttttccttggggacggtttcattgccattcctcgacggggttagggtttgcggggatgagggtgcacggcgaggtgtcggacgatgaggcggccgtggctgtggttggggaaacggtgccctcctcgccgcctcccgcctccgtggtgcagccgctggtggtggggtacgccctcaccaagaagaaagtcaagagcttcctgcagcccaagctgctcgcgctggccaggaagaaaggcattcatttcgtatcaattgatgagacttgccccctctctgaacaaggtccatttgacatcattttgcacaagcttactagtaaggagtggcagcaagttttggaggactatcgtgaagagcatccagaagtgactgtcctcgacccaccaaatgctatccaacatttgcacaatcgccaatcaatgctacaagaagttgctgatttgaacctgtccaatggttatggagaggtttgcgctccacgacaactagtcatcatgaaagatccgtcttccatacctgatgcagttgccaaggctggactaaccttgcctttggttgccaaaccattggtcgctgatggtacatcaaaatctcatgagctatcccttgcatatgtggaagcatcattgcctttgcttgaccctcctttggttctccaggaatttgtcaatcatggtgggatcctatttaaggtatatattgttggtgaaacaatacaggtagtccgcaggttttcacttcctgatgttaatacgtatgacctgggaaacaatgacggtatctttcgattcccaagagtttcttgtgctacaaataatgcagaagatgcagatgttgacccttgtattgcagaacttcctccaaagccacttcttgagaaacttggccgggagcttcgacgccggctgggtcttagactgtttaacatagatatgattagagaacatggaagaaaggaccggtactatgtcattgacatcaactattttcctggatatggcaagatgccaggatatgagcacatattcactgacttcctgctaagcctcgtgcaaagcaagtacaagaggctaagtgggagctgaagcgtagagaagatttactttcgatggagactattaacagatgccagctagcctggccatataacagtggggcagctagaaaggtcttccaggttgtacatagcaagggggtgggtcttagcatgaatgcggtgtttgggccggggccttgactgaaggcgcatagcagaactaagacaaaaaatgcagtgtttgggccggggcagtatctgaagaaaggttttggctccgtgcccagcctactgtgtaattcgtttgaccgagtggccgacctgtgtaaatcgttttaccgagtgccgacctgggcttctttagtttcaaaaacaaacaaacaaaacctttgcttcgttttt

SEQ ID NO: 24406 - protein, 343 aa, Zea mays subsp. mays
  peptide (1)..(343): Ceres Seq. ID no. 12352108
  misc_feature (32)..(331): Pfam Name: Pfam Description:  Inositol 1, 3, 4-trisphosphate 5/6-kinase
  misc_feature (21)..(343): NCBI GI NO: 37530372 NR Description: putative inositol 1,3,4-trisphosphate 5/6-kinase
  misc_feature (1)..(342): NCBI GI NO: 27311236 NR Description: Putative inositol 1,3,4-trisphosphate 5/6-kinase
  misc_feature (30)..(339): NCBI GI NO: 18413088 NR Description: inositol 1
  misc_feature (30)..(314): NCBI GI NO: 7487925 NR Description: inositol 1
  misc_feature (5)..(197): NCBI GI NO: 30689810 NR Description: expressed protein [Arabidopsis thaliana]
  misc_feature (168)..(339): NCBI GI NO: 30689810 NR Description: expressed protein [Arabidopsis thaliana]
  misc_feature (89)..(339): NCBI GI NO: 30680654 NR Description: inositol 1
  misc_feature (5)..(197): NCBI GI NO: 7487088 NR Description: hypothetical protein T16L1
  misc_feature (168)..(314): NCBI GI NO: 7487088 NR Description: hypothetical protein T16L1
  misc_feature (23)..(333): NCBI GI NO: 27549256 NR Description: inositol phosphate kinase [Zea mays]
MRVHGEVSDDEAAVAVVGETVPSSPPPASVVQPLVVGYALTKKKVKSFLQPKLLALARKKGIHFVSIDETCPLSEQGPFDIILHKLTSKEWQQVLEDYREEHPEVTVLDPPNAIQHLHNRQSMLQEVADLNLSNGYGEVCAPRQLVIMKDPSSIPDAVAKAGLTLPLVAKPLVADGTSKSHELSLAYVEASLPLLDPPLVLQEFVNHGGILFKVYIVGETIQVVRRFSLPDVNTYDLGNNDGIFRFPRVSCATNNAEDADVDPCIAELPPKPLLEKLGRELRRRLGLRLFNIDMIREHGRKDRYYVIDINYFPGYGKMPGYEHIFTDFLLSLVQSKYKRLSGS

SEQ ID NO: 24407 - protein, 221 aa, Zea mays subsp. mays
  peptide (1)..(221): Ceres Seq. ID no. 12352109
  misc_feature (1)..(209): Pfam Name: Pfam Description:  Inositol 1, 3, 4-trisphosphate 5/6-kinase
  misc_feature (1)..(221): NCBI GI NO: 37530372 NR Description: putative inositol 1,3,4-trisphosphate 5/6-kinase
  misc_feature (1)..(220): NCBI GI NO: 27311236 NR Description: Putative inositol 1,3,4-trisphosphate 5/6-kinase
  misc_feature (1)..(217): NCBI GI NO: 18413088 NR Description: inositol 1
  misc_feature (1)..(192): NCBI GI NO: 7487925 NR Description: inositol 1
  misc_feature (1)..(75): NCBI GI NO: 30689810 NR Description: expressed protein [Arabidopsis thaliana]
  misc_feature (46)..(217): NCBI GI NO: 30689810 NR Description: expressed protein [Arabidopsis thaliana]
  misc_feature (1)..(217): NCBI GI NO: 30680654 NR Description: inositol 1
  misc_feature (1)..(75): NCBI GI NO: 7487088 NR Description: hypothetical protein T16L1
  misc_feature (46)..(192): NCBI GI NO: 7487088 NR Description: hypothetical protein T16L1
  misc_feature (1)..(211): NCBI GI NO: 27549256 NR Description: inositol phosphate kinase [Zea mays]
MLQEVADLNLSNGYGEVCAPRQLVIMKDPSSIPDAVAKAGLTLPLVAKPLVADGTSKSHELSLAYVEASLPLLDPPLVLQEFVNHGGILFKVYIVGETIQVVRRFSLPDVNTYDLGNNDGIFRFPRVSCATNNAEDADVDPCIAELPPKPLLEKLGRELRRRLGLRLFNIDMIREHGRKDRYYVIDINYFPGYGKMPGYEHIFTDFLLSLVQSKYKRLSGS

SEQ ID NO: 24408 - protein, 196 aa, Zea mays subsp. mays
  peptide (1)..(196): Ceres Seq. ID no. 12352110
  misc_feature (1)..(184): Pfam Name: Pfam Description:  Inositol 1, 3, 4-trisphosphate 5/6-kinase
  misc_feature (1)..(196): NCBI GI NO: 37530372 NR Description: putative inositol 1,3,4-trisphosphate 5/6-kinase
  misc_feature (1)..(195): NCBI GI NO: 27311236 NR Description: Putative inositol 1,3,4-trisphosphate 5/6-kinase
  misc_feature (1)..(192): NCBI GI NO: 18413088 NR Description: inositol 1
  misc_feature (1)..(167): NCBI GI NO: 7487925 NR Description: inositol 1
  misc_feature (1)..(50): NCBI GI NO: 30689810 NR Description: expressed protein [Arabidopsis thaliana]
  misc_feature (21)..(192): NCBI GI NO: 30689810 NR Description: expressed protein [Arabidopsis thaliana]
  misc_feature (1)..(192): NCBI GI NO: 30680654 NR Description: inositol 1
  misc_feature (1)..(50): NCBI GI NO: 7487088 NR Description: hypothetical protein T16L1
  misc_feature (21)..(167): NCBI GI NO: 7487088 NR Description: hypothetical protein T16L1
  misc_feature (1)..(186): NCBI GI NO: 27549256 NR Description: inositol phosphate kinase [Zea mays]
MKDPSSIPDAVAKAGLTLPLVAKPLVADGTSKSHELSLAYVEASLPLLDPPLVLQEFVNHGGILFKVYIVGETIQVVRRFSLPDVNTYDLGNNDGIFRFPRVSCATNNAEDADVDPCIAELPPKPLLEKLGRELRRRLGLRLFNIDMIREHGRKDRYYVIDINYFPGYGKMPGYEHIFTDFLLSLVQSKYKRLSGS

SEQ ID NO: 24409 - DNA, 1769 bp, Zea mays subsp. mays
  misc_feature (1)..(1769): Ceres Seq. ID no. 12405773
aaaagcgaaacgactccttcagttccgtcccgttcgtgacgacctccggtcccgggagggggagggggagggggagggagaggcgaggtcatggcctccggcaccggctccggccagccgcaacccgcagcagctgatgctgacccgggagccggcgacaacaagctcgtcttcgagacgccgctgcagccgcagcccgtgagggaggactacgtcgagaacgccgtcaagttcctctcccacccaaaggtcaggggctcccccgtcgtctacagacgatccttcctcgagaagaagggcctcaccacacaggagatcgacgaggccctacgaagagtccctgatcctgaacccatcactacggctaccgcttctccacagcagcaggttggcagccagaatcaatcagctggggcgcaaacttatgcgccagcgcgatctatgcacccagcaaccgctggccctgtcgtccgaccccggttcagctggtaccaagcattcctcgctgcagggctcttgcttggttttggtgctagcacggctgtctttatcaagaaactgttccttcctaggctcaagtcttggatccgcaacgtcgtagcacaaggtgatggcgctgaaggcaaccaacttaagcacaggattgatgaggaaacggctgaggctgtaaaggcttctgcttcagctgtttctgctattgccaaaacaaaccagcagctgcttgcttcaaaggatgaagaaaagaagatactcgtgacattaacacaagctctagattcccaagccaaggagttaaaatccttgaccgagtcaatcaatcgtaccagggaacccataaacattaccagagacgataggttttctcagcaccgcccactggaagaccatgtccctcctgttacgaggaatggggcaattaacagttcatggagatcttctcagcaaactaacatgtatggtgtgtcacatggtgactttggttccgcaaggtctgcttcattcgtgccagcacctgctgaacctacagctggatcattttcaagatcttgtgccgagcagacgtccaccgctgcacaacgagcggataggtcctctggcggtaagccatgggagatgcagcagtattcgcagcagaggcctggttatggatccaactcccagttgaatgatgatggatcatactctgatgcccaggacagctatgctccttcctattaccagaatggaaaggcccctgattttcaatcagatgaacctaggtctttgacctacaacactgggattgaggagagaccgccgccgcctcagcgccgctgggtgccccctcagcctccaggtgttgcgatgccagaagcagctgctgctatacgtcaaccaaaggtccctccaaagcagccctccagcgatgcctctcgggcagctggagagatgcaggtgaatggtgcttcaagtgcatcaccggatgctgtgactgaggttcctgttaatagtgctaccacaagtgatgctggacacagcgagatcgaagaacaaccagtggccgtctaagtgaaaaaccgagaccagccaagaactgggaagcaatctaagagagatttggggtttctggtacatactggggtttgtcatacatttctgaataacatgtgtcagaacagcatgacgacaacatgtcaataagtagcagatagtttctgtatttagagtaatgctacttgtacacaggagaatgtcaagcattatctatggctgttcgatcgagggtgcct

SEQ ID NO: 24410 - protein, 485 aa, Zea mays subsp. mays
  peptide (1)..(485): Ceres Seq. ID no. 12405774
  misc_feature (37)..(161): Pfam Name: Pex14p Pfam Description: Peroxisomal membrane anchor protein
  misc_feature (35)..(450): NCBI GI NO: 11094252 NR Description: PEX14 [Arabidopsis thaliana]
  misc_feature (35)..(450): NCBI GI NO: 30697742 NR Description: (PEX14) protein [Arabidopsis thaliana]
  misc_feature (35)..(450): NCBI GI NO: 11121113 NR Description: peroxin Pex14 [Arabidopsis thaliana]
  misc_feature (118)..(450): NCBI GI NO: 20466350 NR Description: putative protein [Arabidopsis thaliana]
  misc_feature (37)..(84): NCBI GI NO: 9945056 NR Description: rice EST D22333 corresponds to a region of thepredicated gene
MASGTGSGQPQPAAADADPGAGDNKLVFETPLQPQPVREDYVENAVKFLSHPKVRGSPVVYRRSFLEKKGLTTQEIDEALRRVPDPEPITTATASPQQQVGSQNQSAGAQTYAPARSMHPATAGPVVRPRFSWYQAFLAAGLLLGFGASTAVFIKKLFLPRLKSWIRNVVAQGDGAEGNQLKHRIDEETAEAVKASASAVSAIAKTNQQLLASKDEEKKILVTLTQALDSQAKELKSLTESINRTREPINITRDDRFSQHRPLEDHVPPVTRNGAINSSWRSSQQTNMYGVSHGDFGSARSASFVPAPAEPTAGSFSRSCAEQTSTAAQRADRSSGGKPWEMQQYSQQRPGYGSNSQLNDDGSYSDAQDSYAPSYYQNGKAPDFQSDEPRSLTYNTGIEERPPPPQRRWVPPQPPGVAMPEAAAAIRQPKVPPKQPSSDASRAAGEMQVNGASSASPDAVTEVPVNSATTSDAGHSEIEEQPVAV

SEQ ID NO: 24411 - protein, 368 aa, Zea mays subsp. mays
  peptide (1)..(368): Ceres Seq. ID no. 12405775
  misc_feature (1)..(333): NCBI GI NO: 11094252 NR Description: PEX14 [Arabidopsis thaliana]
  misc_feature (1)..(333): NCBI GI NO: 30697742 NR Description: (PEX14) protein [Arabidopsis thaliana]
  misc_feature (1)..(333): NCBI GI NO: 11121113 NR Description: peroxin Pex14 [Arabidopsis thaliana]
  misc_feature (1)..(333): NCBI GI NO: 20466350 NR Description: putative protein [Arabidopsis thaliana]
MHPATAGPVVRPRFSWYQAFLAAGLLLGFGASTAVFIKKLFLPRLKSWIRNVVAQGDGAEGNQLKHRIDEETAEAVKASASAVSAIAKTNQQLLASKDEEKKILVTLTQALDSQAKELKSLTESINRTREPINITRDDRFSQHRPLEDHVPPVTRNGAINSSWRSSQQTNMYGVSHGDFGSARSASFVPAPAEPTAGSFSRSCAEQTSTAAQRADRSSGGKPWEMQQYSQQRPGYGSNSQLNDDGSYSDAQDSYAPSYYQNGKAPDFQSDEPRSLTYNTGIEERPPPPQRRWVPPQPPGVAMPEAAAAIRQPKVPPKQPSSDASRAAGEMQVNGASSASPDAVTEVPVNSATTSDAGHSEIEEQPVAV

SEQ ID NO: 24412 - DNA, 1509 bp, Zea mays subsp. mays
  misc_feature (1)..(1509): Ceres Seq. ID no. 13498540
gagccctcgacgagcacccgagagacacgagagtgaaggaaagaggaaaaagaagaagactacagccaaaaccctatctcactccggcgcgccaccggccgatggtttcgatgaacaccacgccgaatccgcttgactccgccgccggcagcgccgccgtcgccggcggaagcgtggacgagggaggaggaggaggcggcaggaagaagcggatgcgcggggcggtagcggcggcgatggtgccgccgccgatggcggtcccgctgccggccgcggcgcccgcggcgggggaggaggttcggaaggtcaggaagccgtacaccatcaccaaatcccgggagagctggacggagccggagcacgataagttcctcgaggccctgcagctttttgatcgtgattggaagaagattgaagcatatgtcggctcgaagactgttatacagataaggagccatgcacagaagtacttcttgaaggttcagaagaatggcacaggcgagcatctgcccccacccaggccaaaacggaaggcagctcatccatatccccagaaatcatctaaaaatgtttctcaaactattttattacaagaacaacctactcagcgggagcaaggttctgtcatgcctatggatactgctactgtgataaacacaaatgcgaatgtggcagtggcagtggcagtgccttcctgggacaatactcttgctcaatctctcagtgctggtcttgttccaggtgcaacaaataactgttcaagtagcatagagagtccatctggtacttggccaacttctgaagcagttgagcaagaaattgtggttccatcactccatgctatgccagattttgcccgagtatacagcttcctaggaagcatatttgatcctgatacaagtgggcatttgcagaggttaaaagtgatggatccaattgatattcaaacggtactactacttatgagaaatctttccacgaaccttaggagtcctgactttgagcaacatctatggtggtggggaccatgttaaacctgaaggcatggaaaatcatggatctcctcagagtggccatcttccattcctggtaacaagtgaatgagagcacactggcaatttgtggtcgaagctttggttgtttccacgagacacattcttgtgtgttctcagcaatcgagttgtggacggctggtctggcaatttatgaatgccatgtctgccaatctgtatagcttccaataatgggtctgaccctagactagttttgttttccacgttcatgtagatagctagttttgtgtgctcatgcaattttttactgggtggagcctagatcgatatgtttttgttgtatcacttgtgcacgcgtgtatgtaagtatgtggaaccttgtaatgcttgaggtacttgagagtcttcggttaagacaaagcatatatgcgcaataatcaggagatcaccatcgtcgactatataatgagaagtttttttagttgtggacctacct

SEQ ID NO: 24413 - protein, 343 aa, Zea mays subsp. mays
  peptide (1)..(343): Ceres Seq. ID no. 13498541
  misc_feature (112)..(157): Pfam Name: Pfam Description:  Myb-like DNA-binding domain
  misc_feature (84)..(336): NCBI GI NO: 30696221 NR Description: myb family transcription factor
  misc_feature (84)..(337): NCBI GI NO: 8953721 NR Description: contains similarity to MYB-related DNA-bindingprotein~gene_id:F6N7
  misc_feature (84)..(336): NCBI GI NO: 30696225 NR Description: myb family transcription factor
  misc_feature (78)..(334): NCBI GI NO: 30680926 NR Description: myb family transcription factor
  misc_feature (75)..(233): NCBI GI NO: 11357907 NR Description: hypothetical protein F9G14
  misc_feature (249)..(334): NCBI GI NO: 11357907 NR Description: hypothetical protein F9G14
  misc_feature (75)..(334): NCBI GI NO: 18414039 NR Description: myb family transcription factor
  misc_feature (75)..(334): NCBI GI NO: 14596213 NR Description: putative protein [Arabidopsis thaliana]
  misc_feature (97)..(335): NCBI GI NO: 15223419 NR Description: myb family transcription factor
  misc_feature (101)..(335): NCBI GI NO: 15234118 NR Description: myb family transcription factor
ALDEHPRDTRVKERGKRRRLQPKPYLTPARHRPMVSMNTTPNPLDSAAGSAAVAGGSVDEGGGGGGRKKRMRGAVAAAMVPPPMAVPLPAAAPAAGEEVRKVRKPYTITKSRESWTEPEHDKFLEALQLFDRDWKKIEAYVGSKTVIQIRSHAQKYFLKVQKNGTGEHLPPPRPKRKAAHPYPQKSSKNVSQTILLQEQPTQREQGSVMPMDTATVINTNANVAVAVAVPSWDNTLAQSLSAGLVPGATNNCSSSIESPSGTWPTSEAVEQEIVVPSLHAMPDFARVYSFLGSIFDPDTSGHLQRLKVMDPIDIQTVLLLMRNLSTNLRSPDFEQHLWWWGPC

SEQ ID NO: 24414 - protein, 310 aa, Zea mays subsp. mays
  peptide (1)..(310): Ceres Seq. ID no. 13498542
  misc_feature (79)..(124): Pfam Name: Pfam Description:  Myb-like DNA-binding domain
  misc_feature (51)..(303): NCBI GI NO: 30696221 NR Description: myb family transcription factor
  misc_feature (51)..(304): NCBI GI NO: 8953721 NR Description: contains similarity to MYB-related DNA-bindingprotein~gene_id:F6N7
  misc_feature (51)..(303): NCBI GI NO: 30696225 NR Description: myb family transcription factor
  misc_feature (45)..(301): NCBI GI NO: 30680926 NR Description: myb family transcription factor
  misc_feature (42)..(200): NCBI GI NO: 11357907 NR Description: hypothetical protein F9G14
  misc_feature (216)..(301): NCBI GI NO: 11357907 NR Description: hypothetical protein F9G14
  misc_feature (42)..(301): NCBI GI NO: 18414039 NR Description: myb family transcription factor
  misc_feature (42)..(301): NCBI GI NO: 14596213 NR Description: putative protein [Arabidopsis thaliana]
  misc_feature (64)..(302): NCBI GI NO: 15223419 NR Description: myb family transcription factor
  misc_feature (68)..(302): NCBI GI NO: 15234118 NR Description: myb family transcription factor
MVSMNTTPNPLDSAAGSAAVAGGSVDEGGGGGGRKKRMRGAVAAAMVPPPMAVPLPAAAPAAGEEVRKVRKPYTITKSRESWTEPEHDKFLEALQLFDRDWKKIEAYVGSKTVIQIRSHAQKYFLKVQKNGTGEHLPPPRPKRKAAHPYPQKSSKNVSQTILLQEQPTQREQGSVMPMDTATVINTNANVAVAVAVPSWDNTLAQSLSAGLVPGATNNCSSSIESPSGTWPTSEAVEQEIVVPSLHAMPDFARVYSFLGSIFDPDTSGHLQRLKVMDPIDIQTVLLLMRNLSTNLRSPDFEQHLWWWGPC

SEQ ID NO: 24415 - protein, 307 aa, Zea mays subsp. mays
  peptide (1)..(307): Ceres Seq. ID no. 13498543
  misc_feature (76)..(121): Pfam Name: Pfam Description:  Myb-like DNA-binding domain
  misc_feature (48)..(300): NCBI GI NO: 30696221 NR Description: myb family transcription factor
  misc_feature (48)..(301): NCBI GI NO: 8953721 NR Description: contains similarity to MYB-related DNA-bindingprotein~gene_id:F6N7
  misc_feature (48)..(300): NCBI GI NO: 30696225 NR Description: myb family transcription factor
  misc_feature (42)..(298): NCBI GI NO: 30680926 NR Description: myb family transcription factor
  misc_feature (39)..(197): NCBI GI NO: 11357907 NR Description: hypothetical protein F9G14
  misc_feature (213)..(298): NCBI GI NO: 11357907 NR Description: hypothetical protein F9G14
  misc_feature (39)..(298): NCBI GI NO: 18414039 NR Description: myb family transcription factor
  misc_feature (39)..(298): NCBI GI NO: 14596213 NR Description: putative protein [Arabidopsis thaliana]
  misc_feature (61)..(299): NCBI GI NO: 15223419 NR Description: myb family transcription factor
  misc_feature (65)..(299): NCBI GI NO: 15234118 NR Description: myb family transcription factor
MNTTPNPLDSAAGSAAVAGGSVDEGGGGGGRKKRMRGAVAAAMVPPPMAVPLPAAAPAAGEEVRKVRKPYTITKSRESWTEPEHDKFLEALQLFDRDWKKIEAYVGSKTVIQIRSHAQKYFLKVQKNGTGEHLPPPRPKRKAAHPYPQKSSKNVSQTILLQEQPTQREQGSVMPMDTATVINTNANVAVAVAVPSWDNTLAQSLSAGLVPGATNNCSSSIESPSGTWPTSEAVEQEIVVPSLHAMPDFARVYSFLGSIFDPDTSGHLQRLKVMDPIDIQTVLLLMRNLSTNLRSPDFEQHLWWWGPC

SEQ ID NO: 24416 - DNA, 1544 bp, Zea mays subsp. mays
  misc_feature (1)..(1544): Ceres Seq. ID no. 12410573
ctacgcgacacacacacaccatcactgcgctgcgctactctactccccaccaccgccgccacccaagagctttcctcgctgcacaagaaatggccacgaaccatctctcccaagggcagcacccgcaggcctggccctggggcgtggccatgtacaccaacctacactaccaccaccagcagcaccaccactacgagaaggagcacctgttcgagaagccgctgacgccgagcgacgtgggcaagctcaacaggctggtgatccccaagcagcacgccgagaggtacttccctctcagcagcagcggcgccggcgacaaaggcctcatcctgtgcttcgaggacgacgacgacgaggaggctgctgccgccaacaagccgtggcggttccgctactcgtactggaccagcagccagagctacgtgctcaccaagggctggagccgctacgtcaaggagaagcagcttgacgccggcgacgtcgtgcgcttccagaggatgcgtggtttcggcatgcccgaccgcctgttcatcagccacagccgccgcggcgagactactgctactgctgcaacaacagtgccaccgccacctgctgctgctgccgtgcgcgtagtagtggcacctgcacagagcgctggcttagagcaccagcagcagcagccgtcgccttggagcccaatgtgctacagcacatcgggctcgtactcgtacccccccaccagcagcccagccaattcccagcatgcctaccaccgccactcagctgaccatgaccacagcaacaacatgcaacatgcaggagaatctcagtccgacagagacaacaggagctgcagtgcagcttcggcaccgccgccgccgccgtcgcggcggctccggctgttcggcgtcaacctcgactgcgggccggggccggagccggagacaccaacggcgatgtacggctacatgcaccaaagcccctacgcttacaacaactggggcagtccataccagcatgacgaggagatttaagattatgcctgcagaatccaaacagccaaagtagtagcagactagtagttgctagcagcagcagcctagtactacttgcacacgaagtgacaggattgaattgacctgtacacggggagaaaaaaaaaggaaggaaggaagtggagagagatcccttgtttcccgggcaatcttccttccaagttccatccccgcccccagaagaatgctgctgcctttttgctgttccgttttttttaaaattttattttcttctccatggcttccagaaaaccctacttactgtaggggatctggtagcagggggccgggcatgcgtgggaggtttgcaggaagcatcaagctgcgaaggagctggaacgagagacaacagacagagagaaagatgtgtgtgtgtatgtatgtgtgtgtcatctgtacctatatgtcttaatttgtgggtccgatagagaacaaactgcgaagttgatgtgtgtgcctgcctgcctcctgaagaaacaatgcaatatccccatggggattttgttc

SEQ ID NO: 24417 - protein, 337 aa, Zea mays subsp. mays
  peptide (1)..(337): Ceres Seq. ID no. 12410574
  misc_feature (69)..(185): Pfam Name: Pfam Description:  B3 DNA binding domain
  misc_feature (65)..(301): NCBI GI NO: 34902226 NR Description: Putative RAV-like B3 domain DNA binding protein
  misc_feature (30)..(189): NCBI GI NO: 30686669 NR Description: DNA-binding protein, putative
  misc_feature (30)..(189): NCBI GI NO: 30686674 NR Description: DNA-binding protein, putative
  misc_feature (59)..(189): NCBI GI NO: 25408446 NR Description: probable RAV2-like DNA binding protein
  misc_feature (65)..(301): NCBI GI NO: 37536454 NR Description: putative DNA-binding protein
  misc_feature (53)..(193): NCBI GI NO: 30681787 NR Description: DNA-binding protein, putative
  misc_feature (53)..(193): NCBI GI NO: 30681791 NR Description: DNA-binding protein, putative
  misc_feature (65)..(302): NCBI GI NO: 18407193 NR Description: putative RAV-like B3 domain DNA binding protein
  misc_feature (65)..(184): NCBI GI NO: 32492293 NR Description: OSJNBa0088A01.1
  misc_feature (62)..(191): NCBI GI NO: 15239984 NR Description: putative protein; protein id: At5g06250.1
TRHTHTITALRYSTPHHRRHPRAFLAAQEMATNHLSQGQHPQAWPWGVAMYTNLHYHHQQHHHYEKEHLFEKPLTPSDVGKLNRLVIPKQHAERYFPLSSSGAGDKGLILCFEDDDDEEAAAANKPWRFRYSYWTSSQSYVLTKGWSRYVKEKQLDAGDVVRFQRMRGFGMPDRLFISHSRRGETTATAATTVPPPPAAAAVRVVVAPAQSAGLEHQQQQPSPWSPMCYSTSGSYSYPPTSSPANSQHAYHRHSADHDHSNNMQHAGESQSDRDNRSCSAASAPPPPPSRRLRLFGVNLDCGPGPEPETPTAMYGYMHQSPYAYNNWGSPYQHDEEI

SEQ ID NO: 24418 - protein, 308 aa, Zea mays subsp. mays
  peptide (1)..(308): Ceres Seq. ID no. 12410575
  misc_feature (40)..(156): Pfam Name: Pfam Description:  B3 DNA binding domain
  misc_feature (36)..(272): NCBI GI NO: 34902226 NR Description: Putative RAV-like B3 domain DNA binding protein
  misc_feature (1)..(160): NCBI GI NO: 30686669 NR Description: DNA-binding protein, putative
  misc_feature (1)..(160): NCBI GI NO: 30686674 NR Description: DNA-binding protein, putative
  misc_feature (30)..(160): NCBI GI NO: 25408446 NR Description: probable RAV2-like DNA binding protein
  misc_feature (36)..(272): NCBI GI NO: 37536454 NR Description: putative DNA-binding protein
  misc_feature (24)..(164): NCBI GI NO: 30681787 NR Description: DNA-binding protein, putative
  misc_feature (24)..(164): NCBI GI NO: 30681791 NR Description: DNA-binding protein, putative
  misc_feature (36)..(273): NCBI GI NO: 18407193 NR Description: putative RAV-like B3 domain DNA binding protein
  misc_feature (36)..(155): NCBI GI NO: 32492293 NR Description: OSJNBa0088A01.1
  misc_feature (33)..(162): NCBI GI NO: 15239984 NR Description: putative protein; protein id: At5g06250.1
MATNHLSQGQHPQAWPWGVAMYTNLHYHHQQHHHYEKEHLFEKPLTPSDVGKLNRLVIPKQHAERYFPLSSSGAGDKGLILCFEDDDDEEAAAANKPWRFRYSYWTSSQSYVLTKGWSRYVKEKQLDAGDVVRFQRMRGFGMPDRLFISHSRRGETTATAATTVPPPPAAAAVRVVVAPAQSAGLEHQQQQPSPWSPMCYSTSGSYSYPPTSSPANSQHAYHRHSADHDHSNNMQHAGESQSDRDNRSCSAASAPPPPPSRRLRLFGVNLDCGPGPEPETPTAMYGYMHQSPYAYNNWGSPYQHDEEI

SEQ ID NO: 24419 - protein, 288 aa, Zea mays subsp. mays
  peptide (1)..(288): Ceres Seq. ID no. 12410576
  misc_feature (20)..(136): Pfam Name: Pfam Description:  B3 DNA binding domain
  misc_feature (16)..(252): NCBI GI NO: 34902226 NR Description: Putative RAV-like B3 domain DNA binding protein
  misc_feature (1)..(140): NCBI GI NO: 30686669 NR Description: DNA-binding protein, putative
  misc_feature (1)..(140): NCBI GI NO: 30686674 NR Description: DNA-binding protein, putative
  misc_feature (10)..(140): NCBI GI NO: 25408446 NR Description: probable RAV2-like DNA binding protein
  misc_feature (16)..(252): NCBI GI NO: 37536454 NR Description: putative DNA-binding protein
  misc_feature (4)..(144): NCBI GI NO: 30681787 NR Description: DNA-binding protein, putative
  misc_feature (4)..(144): NCBI GI NO: 30681791 NR Description: DNA-binding protein, putative
  misc_feature (16)..(253): NCBI GI NO: 18407193 NR Description: putative RAV-like B3 domain DNA binding protein
  misc_feature (16)..(135): NCBI GI NO: 32492293 NR Description: OSJNBa0088A01.1
  misc_feature (13)..(142): NCBI GI NO: 15239984 NR Description: putative protein; protein id: At5g06250.1
MYTNLHYHHQQHHHYEKEHLFEKPLTPSDVGKLNRLVIPKQHAERYFPLSSSGAGDKGLILCFEDDDDEEAAAANKPWRFRYSYWTSSQSYVLTKGWSRYVKEKQLDAGDVVRFQRMRGFGMPDRLFISHSRRGETTATAATTVPPPPAAAAVRVVVAPAQSAGLEHQQQQPSPWSPMCYSTSGSYSYPPTSSPANSQHAYHRHSADHDHSNNMQHAGESQSDRDNRSCSAASAPPPPPSRRLRLFGVNLDCGPGPEPETPTAMYGYMHQSPYAYNNWGSPYQHDEEI

SEQ ID NO: 24420 - DNA, 1532 bp, Zea mays subsp. mays
  misc_feature (1)..(1532): Ceres Seq. ID no. 12362073
gcgttattttgtttgccaacccacagaaaaaggcggcagttcatccgctgctgttcctagttctctccacccagaagtcgacctcgttttttcctccctcctgtcccaaatctcacctccttccagttccagctaccgctgctcgcgttgactcgcctcttcctccattcagtgactccttggatcggctcagggacacgcaccagcgtattgtgtcggcgccgaatcttgcgcgcatttcgcgctattgttgccccggaggagtggtttggatccaagaaagtgatcggccttcttggttggatctcctcccgcaatggcggcgctcctggagctgttcctgggctcctctcccacgccggtggactgggaggcagaggtctacccggcgtacggggacttcgccgtactccccttactcgtcgccttcttccccgccgtccggttcctcctcgaccgactcgtcttcgaggttttagcacgaaaatttatatttggaaagggacatgataagctttctgaaacagatgacagtagaaagaaaatcaataaatttaaggaatcagcatggaagtttgttttttttctttctggcgaactgctttcactatctgtaacatacaatgagccatggtttaagaacacaagatacttttggataggccctggtgaccagatctggcctgatcaaaagataaaactgaagctcaaagctgtctacatgtatgctgctggattttacacatattcaattttcgctctcctgttctgggaaacaagacgttcggactttggagtatcaatgtcccaccatatagcaactgttgttctgattattctttcctacattttccgattcgctcgtgttggcactgttgttttagcccttcatgatgcaagtgatatattcctagagattgggaagatggccaagtacagtagctgcgagtggctagcagttatggcatttcttctttttgtggcatcgtggatacttcttcggctcgttatgttccctttctggatcctaagaagcacaagctatgaagtgctgctgaccttggatagggagaagcatcgattttatggccccatatactactatgttttcaactgtcttctgttctcactcctagttcttcacatatatttgtgggtactgatatggcggatgctagttaaacagattcaatcgaaagggcgtgttggtgatgatgttcgatccgattctgaaggcgaagatgagcatgaagattaactttttaggttgaatgattaactgaagaactacattgtgtgatacctgcagcaaggcacaccttctgaaccttttttttttcttttacagaagatatccagatattgtaattcattaggtcatatcattcgttcagcatagaagatgacaaccatcatttgggagttgtcaatgaagccgcctatcggatgctttttatcaaaacagaagtgcattgtatttatttcactaaaccatcatttataagagatacagaatgatcccttgttcatcc

SEQ ID NO: 24421 - protein, 313 aa, Zea mays subsp. mays
  peptide (1)..(313): Ceres Seq. ID no. 12362074
  misc_feature (98)..(310): Pfam Name: LAG1 Pfam Description: Longevity-assurance protein
  misc_feature (14)..(313): NCBI GI NO: 16974114 NR Description: putative resistance protein
  misc_feature (16)..(313): NCBI GI NO: 25518747 NR Description: hypothetical protein F13B4
  misc_feature (9)..(313): NCBI GI NO: 18404559 NR Description: expressed protein; protein id: At3g25540
  misc_feature (16)..(313): NCBI GI NO: 7688742 NR Description: ASC1 [Lycopersicon esculentum]
  misc_feature (16)..(243): NCBI GI NO: 30683361 NR Description: longevity assurance protein -related
  misc_feature (38)..(310): NCBI GI NO: 15230323 NR Description: longevity factor-like protein
  misc_feature (24)..(309): NCBI GI NO: 34901974 NR Description: unknown protein
  misc_feature (38)..(310): NCBI GI NO: 7658241 NR Description: LAG1 homolog 2 [Arabidopsis thaliana]
  misc_feature (16)..(128): NCBI GI NO: 8920562 NR Description: Contains similarity to LAG1 homolog 1 fromArabidopsis thaliana gb|AF198179
  misc_feature (77)..(313): NCBI GI NO: 27769146 NR Description: Similar to RIKEN cDNA 0610013I17 gene
MAALLELFLGSSPTPVDWEAEVYPAYGDFAVLPLLVAFFPAVRFLLDRLVFEVLARKFIFGKGHDKLSETDDSRKKINKFKESAWKFVFFLSGELLSLSVTYNEPWFKNTRYFWIGPGDQIWPDQKIKLKLKAVYMYAAGFYTYSIFALLFWETRRSDFGVSMSHHIATVVLIILSYIFRFARVGTVVLALHDASDIFLEIGKMAKYSSCEWLAVMAFLLFVASWILLRLVMFPFWILRSTSYEVLLTLDREKHRFYGPIYYYVFNCLLFSLLVLHIYLWVLIWRMLVKQIQSKGRVGDDVRSDSEGEDEHED

SEQ ID NO: 24422 - protein, 178 aa, Zea mays subsp. mays
  peptide (1)..(178): Ceres Seq. ID no. 12362075
  misc_feature (1)..(175): Pfam Name: LAG1 Pfam Description: Longevity-assurance protein
  misc_feature (1)..(178): NCBI GI NO: 16974114 NR Description: putative resistance protein
  misc_feature (1)..(178): NCBI GI NO: 25518747 NR Description: hypothetical protein F13B4
  misc_feature (1)..(178): NCBI GI NO: 18404559 NR Description: expressed protein; protein id: At3g25540
  misc_feature (1)..(178): NCBI GI NO: 7688742 NR Description: ASC1 [Lycopersicon esculentum]
  misc_feature (1)..(108): NCBI GI NO: 30683361 NR Description: longevity assurance protein -related
  misc_feature (1)..(175): NCBI GI NO: 15230323 NR Description: longevity factor-like protein
  misc_feature (1)..(174): NCBI GI NO: 34901974 NR Description: unknown protein
  misc_feature (1)..(175): NCBI GI NO: 7658241 NR Description: LAG1 homolog 2 [Arabidopsis thaliana]
  misc_feature (1)..(178): NCBI GI NO: 27769146 NR Description: Similar to RIKEN cDNA 0610013I17 gene
  misc_feature (1)..(178): NCBI GI NO: 24119257 NR Description: trh3 protein [Danio rerio]
MYAAGFYTYSIFALLFWETRRSDFGVSMSHHIATVVLIILSYIFRFARVGTVVLALHDASDIFLEIGKMAKYSSCEWLAVMAFLLFVASWILLRLVMFPFWILRSTSYEVLLTLDREKHRFYGPIYYYVFNCLLFSLLVLHIYLWVLIWRMLVKQIQSKGRVGDDVRSDSEGEDEHED

SEQ ID NO: 24423 - protein, 158 aa, Zea mays subsp. mays
  peptide (1)..(158): Ceres Seq. ID no. 12362076
VILFANPQKKAAVHPLLFLVLSTQKSTSFFPPSCPKSHLLPVPATAARVDSPLPPFSDSLDRLRDTHQRIVSAPNLARISRYCCPGGVVWIQESDRPSWLDLLPQWRRSWSCSWAPLPRRWTGRQRSTRRTGTSPYSPYSSPSSPPSGSSSTDSSSRF

SEQ ID NO: 24424 - DNA, 1442 bp, Zea mays subsp. mays
  misc_feature (1)..(1442): Ceres Seq. ID no. 12566169
ctcgcccgttgcctgctctgtgccttatataaacgcagcagagcacggcagccggaagggagttcagacatcaatcaggcggaggagagaaactcccggccatttccaagcacaagaagtgggaagagagaacaggagggcgctgagctctctgatcgctgttctgagtggtggcggctgcagctgcccgcgcggcgaagatggctgcgccatggcttcttgcttgcagcttgctgctgctctccctggcgacctttcacggagctgagggcgcgatcggcgtgaactacggcatgatcgccaacaacctgccggcgccggagcaggtcgtctccatgtacaaggccaagaatatcagctacgtgcgtctgttccacccggacacgaccgtgctgaacgcgctccgcggctccggcatcggtgtcatcctgggcacgctgaacgaggacctcccgcgcctggcgtccgacccgtccttcgccgcgtcgtgggtggccaccaacgtgcagcccttcgccggcgctgtccagttccggtacatcaacgcgggcaacgaggtcatcccgggggacccggcggcgcaggtgctcccggccatgaagaacctggagtcggcgctccggtccgcgggggtcgcgggcgtccccgtcacgacggccgtggccaccagcgtgctcggcgcgtcgtacccgccgtcccagggcgccttctccgaggcggccacgacggtgatggcgccgctcgtctcgtacctgtcgtccaggggcgcgccgctgctggtgaacgtgtacccgtacttcgcctactcgggcagcggcgggcaggtggcgctcgggtacgcgctgctgtcgggcgccggcgccggcgccgcgtcgacggtgacggacggcggggcggtgtacactaacatgttcgacgcgatcgtggacgcgacgcacgcggcggtggagaaggccggggtgcaggggctggagctggtggtgtcggagaccggctggccgtcggccggcggcgagggcgccagcgtggagaacgcggcggcgtacaacaacaacgtggtgcggcacgtcgacggcggcacccctcggcggcccgggaatgccctggagacctacctgttcgccatgttcaacgagaacggcaaggccgagggcgtggagcagcacttcggcctcttccagccggacatgagcgaggtctaccacgtcgacttcacggcgggatccccctagggaggctcacccgcttctgtgtttactttatttatgtagtaggaatgatcattcttcattcagagactgatcgacttcatcggagctgctcgatactcgagcggcgcggataggcttactgcgtactggtagtattgttggagacttggagtagcattactatcgacgtgattcattacagtgcatgtcgttacacggcgccatggattt

SEQ ID NO: 24425 - protein, 343 aa, Zea mays subsp. mays
  peptide (1)..(343): Ceres Seq. ID no. 12566170
  misc_feature (28)..(338): Pfam Name: Pfam Description:  Glycosyl hydrolases family 17
  misc_feature (28)..(342): NCBI GI NO: 4884532 NR Description: beta-1,3-glucanase [Oryza sativa]
  misc_feature (22)..(337): NCBI GI NO: 4097946 NR Description: beta-1,3-glucanase precursor [Oryza sativa]
  misc_feature (25)..(342): NCBI GI NO: 7447972 NR Description: glucan endo-1,3-beta-D-glucosidase (EC 3
  misc_feature (12)..(340): NCBI GI NO: 34908958 NR Description: beta-1,3-glucanase precursor
  misc_feature (12)..(340): NCBI GI NO: 4097944 NR Description: beta-1,3-glucanase precursor [Oryza sativa]
  misc_feature (21)..(342): NCBI GI NO: 585078 NR Description: PUTATIVE GLUCAN ENDO-1
  misc_feature (26)..(342): NCBI GI NO: 322839 NR Description: glucan endo-1,3-beta-D-glucosidase (EC 3
  misc_feature (25)..(338): NCBI GI NO: 6073860 NR Description: beta-1, 3-glucananse [Musa acuminata]
  misc_feature (25)..(338): NCBI GI NO: 6448757 NR Description: beta-1,3-glucanase [Musa acuminata]
  misc_feature (3)..(338): NCBI GI NO: 34906502 NR Description: putative beta 1,3-glucanase
MAAPWLLACSLLLLSLATFHGAEGAIGVNYGMIANNLPAPEQVVSMYKAKNISYVRLFHPDTTVLNALRGSGIGVILGTLNEDLPRLASDPSFAASWVATNVQPFAGAVQFRYINAGNEVIPGDPAAQVLPAMKNLESALRSAGVAGVPVTTAVATSVLGASYPPSQGAFSEAATTVMAPLVSYLSSRGAPLLVNVYPYFAYSGSGGQVALGYALLSGAGAGAASTVTDGGAVYTNMFDAIVDATHAAVEKAGVQGLELVVSETGWPSAGGEGASVENAAAYNNNVVRHVDGGTPRRPGNALETYLFAMFNENGKAEGVEQHFGLFQPDMSEVYHVDFTAGSP

SEQ ID NO: 24426 - protein, 312 aa, Zea mays subsp. mays
  peptide (1)..(312): Ceres Seq. ID no. 12566171
  misc_feature (1)..(307): Pfam Name: Pfam Description:  Glycosyl hydrolases family 17
  misc_feature (1)..(311): NCBI GI NO: 4884532 NR Description: beta-1,3-glucanase [Oryza sativa]
  misc_feature (1)..(306): NCBI GI NO: 4097946 NR Description: beta-1,3-glucanase precursor [Oryza sativa]
  misc_feature (1)..(311): NCBI GI NO: 7447972 NR Description: glucan endo-1,3-beta-D-glucosidase (EC 3
  misc_feature (1)..(309): NCBI GI NO: 34908958 NR Description: beta-1,3-glucanase precursor
  misc_feature (1)..(309): NCBI GI NO: 4097944 NR Description: beta-1,3-glucanase precursor [Oryza sativa]
  misc_feature (1)..(311): NCBI GI NO: 585078 NR Description: PUTATIVE GLUCAN ENDO-1
  misc_feature (1)..(311): NCBI GI NO: 322839 NR Description: glucan endo-1,3-beta-D-glucosidase (EC 3
  misc_feature (1)..(307): NCBI GI NO: 6073860 NR Description: beta-1, 3-glucananse [Musa acuminata]
  misc_feature (1)..(307): NCBI GI NO: 6448757 NR Description: beta-1,3-glucanase [Musa acuminata]
  misc_feature (1)..(307): NCBI GI NO: 34906502 NR Description: putative beta 1,3-glucanase
MIANNLPAPEQVVSMYKAKNISYVRLFHPDTTVLNALRGSGIGVILGTLNEDLPRLASDPSFAASWVATNVQPFAGAVQFRYINAGNEVIPGDPAAQVLPAMKNLESALRSAGVAGVPVTTAVATSVLGASYPPSQGAFSEAATTVMAPLVSYLSSRGAPLLVNVYPYFAYSGSGGQVALGYALLSGAGAGAASTVTDGGAVYTNMFDAIVDATHAAVEKAGVQGLELVVSETGWPSAGGEGASVENAAAYNNNVVRHVDGGTPRRPGNALETYLFAMFNENGKAEGVEQHFGLFQPDMSEVYHVDFTAGSP

SEQ ID NO: 24427 - protein, 298 aa, Zea mays subsp. mays
  peptide (1)..(298): Ceres Seq. ID no. 12566172
  misc_feature (1)..(293): Pfam Name: Pfam Description:  Glycosyl hydrolases family 17
  misc_feature (1)..(297): NCBI GI NO: 4884532 NR Description: beta-1,3-glucanase [Oryza sativa]
  misc_feature (1)..(292): NCBI GI NO: 4097946 NR Description: beta-1,3-glucanase precursor [Oryza sativa]
  misc_feature (1)..(297): NCBI GI NO: 7447972 NR Description: glucan endo-1,3-beta-D-glucosidase (EC 3
  misc_feature (1)..(295): NCBI GI NO: 34908958 NR Description: beta-1,3-glucanase precursor
  misc_feature (1)..(295): NCBI GI NO: 4097944 NR Description: beta-1,3-glucanase precursor [Oryza sativa]
  misc_feature (1)..(297): NCBI GI NO: 585078 NR Description: PUTATIVE GLUCAN ENDO-1
  misc_feature (1)..(297): NCBI GI NO: 322839 NR Description: glucan endo-1,3-beta-D-glucosidase (EC 3
  misc_feature (1)..(293): NCBI GI NO: 6073860 NR Description: beta-1, 3-glucananse [Musa acuminata]
  misc_feature (1)..(293): NCBI GI NO: 6448757 NR Description: beta-1,3-glucanase [Musa acuminata]
  misc_feature (1)..(293): NCBI GI NO: 34906502 NR Description: putative beta 1,3-glucanase
MYKAKNISYVRLFHPDTTVLNALRGSGIGVILGTLNEDLPRLASDPSFAASWVATNVQPFAGAVQFRYINAGNEVIPGDPAAQVLPAMKNLESALRSAGVAGVPVTTAVATSVLGASYPPSQGAFSEAATTVMAPLVSYLSSRGAPLLVNVYPYFAYSGSGGQVALGYALLSGAGAGAASTVTDGGAVYTNMFDAIVDATHAAVEKAGVQGLELVVSETGWPSAGGEGASVENAAAYNNNVVRHVDGGTPRRPGNALETYLFAMFNENGKAEGVEQHFGLFQPDMSEVYHVDFTAGSP

SEQ ID NO: 24428 - DNA, 1486 bp, Zea mays subsp. mays
  misc_feature (1)..(1486): Ceres Seq. ID no. 12352115
atctcctatctctctctctctctccactcgccgccgcctcgacctgcccggtgcccgcccgcacacaccacctgtccccgctccgctccgcgttcccttcccctcccggcattcccgatcgccgccgcccgcccgcctgacctcgacctcccctctcccctctcgcgccatccctcaggcccgggtttgtctcgccgccgctactggccttcgctcggtccgccgcgatggtgtctggcgggtgcgtgggggcggagggggaggcggaccgcgcggcggcgcctccggaggccgcggaggagccggtggtgccggcgcctcccgcgcgggaggtcgtggtggggtacgcgctcacgacgaagaaggccaagagcttcctccagcccaagctccgggggctcgccaggaaaaagggaatcttgtttgttgctattgatcagaaacgtccattgtctgatcaaggtccatttgacattgttcttcataagttgactggaaaggggtggcagcaattgctggaggaatatagggaggctcacccagaagttactgttcttgatccacctggcgcaatagcaaacttgctagatcgccaatctatgcttcaagaagtatctgaattggacctcaccgattgtcatggtaaagtacgcgtgcctaaacagctattcattaatactgatccctcatcaataccagctgcagttaggagggcgggtctctctctcccattggtggcaaaacccttggtggcgaagtcccatgagctatctctggcttatgatccaacttcactgaccaaacttgagccccctttagttcttcaggaatttgttaaccatggtggcgtcatgtttaaggtgtacattgttggggatgcaataagggttgtacgtcggttttcacttccaaatgttgatgaaggtgatctgtcgaataatgctggggtatttcggtttccaagggtctcttgtgctgcagccagtgcagatgatgcagatcttgaccctggtgttgctgaacttcctccgagaccattgcttgagatcttggcacgagagctgcggcgacgactgggtcttagactattcaacattgatatgattagggagcacggaacaagagaccggttttatgtcatagacatgaactactttcctgggtacggcaaaatgcccgggtacgagcacgtgttcaccgacttcctgctgagccttgcccagaaagagtacaagaggcgaccaagctatagctccctaggctcaggcgaagggtgacaagtgaggaggaggctacttggcgggggcgccctgtatatgtatagcatccgcaatgcgtgcgtacagatgtgctgcgtgacgggagatgatgggtcgtagagctggggcatcactgcatcacatcagtagccgcgataaaagaagcgaggacttttggcaggctgtaattaaattgttactttgcatgtgctaactgttcatgcttc

SEQ ID NO: 24429 - protein, 349 aa, Zea mays subsp. mays
  peptide (1)..(349): Ceres Seq. ID no. 12352116
  misc_feature (31)..(329): Pfam Name: Pfam Description:  Inositol 1, 3, 4-trisphosphate 5/6-kinase
  misc_feature (27)..(338): NCBI GI NO: 18413088 NR Description: inositol 1
  misc_feature (18)..(342): NCBI GI NO: 37530372 NR Description: putative inositol 1,3,4-trisphosphate 5/6-kinase
  misc_feature (10)..(337): NCBI GI NO: 27311236 NR Description: Putative inositol 1,3,4-trisphosphate 5/6-kinase
  misc_feature (27)..(312): NCBI GI NO: 7487925 NR Description: inositol 1
  misc_feature (90)..(338): NCBI GI NO: 30680654 NR Description: inositol 1
  misc_feature (170)..(338): NCBI GI NO: 30689810 NR Description: expressed protein [Arabidopsis thaliana]
  misc_feature (34)..(169): NCBI GI NO: 30689810 NR Description: expressed protein [Arabidopsis thaliana]
  misc_feature (170)..(312): NCBI GI NO: 7487088 NR Description: hypothetical protein T16L1
  misc_feature (34)..(169): NCBI GI NO: 7487088 NR Description: hypothetical protein T16L1
  misc_feature (22)..(334): NCBI GI NO: 37537118 NR Description: putative inositol 1,3,4-trisphosphate 5/6-kinase
MVSGGCVGAEGEADRAAAPPEAAEEPVVPAPPAREVVVGYALTTKKAKSFLQPKLRGLARKKGILFVAIDQKRPLSDQGPFDIVLHKLTGKGWQQLLEEYREAHPEVTVLDPPGAIANLLDRQSMLQEVSELDLTDCHGKVRVPKQLFINTDPSSIPAAVRRAGLSLPLVAKPLVAKSHELSLAYDPTSLTKLEPPLVLQEFVNHGGVMFKVYIVGDAIRVVRRFSLPNVDEGDLSNNAGVFRFPRVSCAAASADDADLDPGVAELPPRPLLEILARELRRRLGLRLFNIDMIREHGTRDRFYVIDMNYFPGYGKMPGYEHVFTDFLLSLAQKEYKRRPSYSSLGSGEG

SEQ ID NO: 24430 - protein, 225 aa, Zea mays subsp. mays
  peptide (1)..(225): Ceres Seq. ID no. 12352117
  misc_feature (1)..(205): Pfam Name: Pfam Description:  Inositol 1, 3, 4-trisphosphate 5/6-kinase
  misc_feature (1)..(214): NCBI GI NO: 18413088 NR Description: inositol 1
  misc_feature (1)..(218): NCBI GI NO: 37530372 NR Description: putative inositol 1,3,4-trisphosphate 5/6-kinase
  misc_feature (1)..(213): NCBI GI NO: 27311236 NR Description: Putative inositol 1,3,4-trisphosphate 5/6-kinase
  misc_feature (1)..(188): NCBI GI NO: 7487925 NR Description: inositol 1
  misc_feature (1)..(214): NCBI GI NO: 30680654 NR Description: inositol 1
  misc_feature (46)..(214): NCBI GI NO: 30689810 NR Description: expressed protein [Arabidopsis thaliana]
  misc_feature (1)..(45): NCBI GI NO: 30689810 NR Description: expressed protein [Arabidopsis thaliana]
  misc_feature (46)..(188): NCBI GI NO: 7487088 NR Description: hypothetical protein T16L1
  misc_feature (1)..(45): NCBI GI NO: 7487088 NR Description: hypothetical protein T16L1
  misc_feature (1)..(210): NCBI GI NO: 37537118 NR Description: putative inositol 1,3,4-trisphosphate 5/6-kinase
MLQEVSELDLTDCHGKVRVPKQLFINTDPSSIPAAVRRAGLSLPLVAKPLVAKSHELSLAYDPTSLTKLEPPLVLQEFVNHGGVMFKVYIVGDAIRVVRRFSLPNVDEGDLSNNAGVFRFPRVSCAAASADDADLDPGVAELPPRPLLEILARELRRRLGLRLFNIDMIREHGTRDRFYVIDMNYFPGYGKMPGYEHVFTDFLLSLAQKEYKRRPSYSSLGSGEG

SEQ ID NO: 24431 - DNA, 1923 bp, Zea mays subsp. mays
  misc_feature (1)..(1923): Ceres Seq. ID no. 12408064
aaataagatcagttagcttgtctttatttcttcctccgatcactgattatacacacgcacttgatgaggttagatcgctagttaagcaagaaattagaggaggagagaggggtagccatggaagagcagcagccccgcccccgcccaagcatcatgttcgtcctgtcgtcgctcgccaagaataacccagagtccgtgctggcgctcatcgcggtgctcaccgtcgtcgccctgcgccacttgatctcctcatggcggcagcaggcccggctgcccccgtcaccgacgagcctcccggtgatcggccacctgcacctgctccgcccgccagtgcaccgcaccttccaggagctggcgtcccggatcggtccgctgatgcacatccgcctcggctccacgcactgcgtggttgccagcaccccggaggtggccagcgagctcatccgcggccacgagggcagcatctcggagcggccgctcacggcggtggcccgccagttcgcgtacgactcggccggcttcgccttcgcgccctataacacgcactggcgcttcatgaagcgcctctgcatgtcggagctgctcggcccgcgcactgtcgagcagctgcgccccgtccgccgcgccggcaccgtgtccctgctcgccgacctgctggcgtcgtcggcgcggggggagacggtggacctcacccgccatctcatccgcctctccaacacctccatcatccggatggtggccagcaccgtgcccggaagcgtcaccgacgaggcgcaggaggtggtcaaggacgtggccgagctcgtgggcgccttcaacgtcgacgactacatctccctagtccgtggctgggatctccagggcctccgcaggagagccgctggcgtccaccgccgcttcgacgcgctgctggaggacatcctcaggcacaaggaggaggcgagggcggcgcgaaggctcgaccaagacgacgacggacgtggcagcagcaagcaggacaagaagcaggccacgcacagcaaggacctgctcgacatcctcatggacaaggcagacgacccggcggcggagatcaagctcacccgggaaaacatcaaggctttcatcatcgacgtggtgactgctggttcagacacgtcggccgccatggtagagtggatgctggcggagctgatgaaccacccggagacgctgcgtaaggtggcggaggagatcgacgcggtggtcggcggcgacaggatcgccagcgaagcggacctgccacagctgccgtacctgatggcggcgtacaaggagacgttgcgtctgcacccggcagcgcccatcgcgcaccgacagtcgagcgaggagatggtggtgcgcggcttcacggtgccgccgcagacggcggtgttcatcaacgtgtgggccatcgggcgcgacccggcgtactgggaggagcccctagcgttccggccggagcggttcatgcccggcggcgccgccgagagcctggagccccgtgggcagcactttcagtacatgcccttcggcagcggccgccggggatgccccggcatgggcctggcgctacagtccgtgccggccgtgctggcggcgctcgtgcagtgcttccactgggccacccgtcgacggcgacggcggggtgaacaagatcgacatgtcggagtcggacgggctggtgtgcgctcgcaagaagccgcttctgctccgccccacgcctcgcctcacccccttcccggccgtcgtctagcgtgtcttccatggcaataccgtctatgtctgtaccaacctctaccagtaccaccacgtacgtacggattcgaagaatgtggataccatgcattaattatatgtatcacattattatatatatgatatgcaagagtaatatgcatggcattgtcttgcatgctctttgtt

SEQ ID NO: 24432 - protein, 586 aa, Zea mays subsp. mays
  peptide (1)..(586): Ceres Seq. ID no. 12408065
  misc_feature (53)..(501): Pfam Name: Pfam Description:  Cytochrome P450
  misc_feature (29)..(501): NCBI GI NO: 38344759 NR Description: OSJNBa0068L06.2
  misc_feature (30)..(540): NCBI GI NO: 5915852 NR Description: Cytochrome P450 93A2
  misc_feature (27)..(501): NCBI GI NO: 5915853 NR Description: Cytochrome P450 93A3 (P450 CP5)
  misc_feature (30)..(539): NCBI GI NO: 3913192 NR Description: Cytochrome P450 93A1
  misc_feature (27)..(501): NCBI GI NO: 5832709 NR Description: cytochrome P450 [Torenia hybrida]
  misc_feature (51)..(501): NCBI GI NO: 5081817 NR Description: flavone synthase II [Gerbera hybrida]
  misc_feature (29)..(501): NCBI GI NO: 6118407 NR Description: flavone synthase II [Callistephus chinensis]
  misc_feature (26)..(501): NCBI GI NO: 14278923 NR Description: flavone synthase II [Perilla frutescens]
  misc_feature (27)..(501): NCBI GI NO: 5832707 NR Description: cytochrome P450 [Antirrhinum majus]
  misc_feature (27)..(501): NCBI GI NO: 5059126 NR Description: cytochrome P450 monooxygenaseCYP93D1 [Glycine max]
MEEQQPRPRPSIMFVLSSLAKNNPESVLALIAVLTVVALRHLISSWRQQARLPPSPTSLPVIGHLHLLRPPVHRTFQELASRIGPLMHIRLGSTHCVVASTPEVASELIRGHEGSISERPLTAVARQFAYDSAGFAFAPYNTHWRFMKRLCMSELLGPRTVEQLRPVRRAGTVSLLADLLASSARGETVDLTRHLIRLSNTSIIRMVASTVPGSVTDEAQEVVKDVAELVGAFNVDDYISLVRGWDLQGLRRRAAGVHRRFDALLEDILRHKEEARAARRLDQDDDGRGSSKQDKKQATHSKDLLDILMDKADDPAAEIKLTRENIKAFIIDVVTAGSDTSAAMVEWMLAELMNHPETLRKVAEEIDAVVGGDRIASEADLPQLPYLMAAYKETLRLHPAAPIAHRQSSEEMVVRGFTVPPQTAVFINVWAIGRDPAYWEEPLAFRPERFMPGGAAESLEPRGQHFQYMPFGSGRRGCPGMGLALQSVPAVLAALVQCFHWATRRRRRRGEQDRHVGVGRAGVRSQEAASAPPHASPHPLPGRRLACLPWQYRLCLYQPLPVPPRTYGFEECGYHALIICITLLYI

SEQ ID NO: 24433 - protein, 574 aa, Zea mays subsp. mays
  peptide (1)..(574): Ceres Seq. ID no. 12408066
  misc_feature (41)..(489): Pfam Name: Pfam Description:  Cytochrome P450
  misc_feature (17)..(489): NCBI GI NO: 38344759 NR Description: OSJNBa0068L06.2
  misc_feature (18)..(528): NCBI GI NO: 5915852 NR Description: Cytochrome P450 93A2
  misc_feature (15)..(489): NCBI GI NO: 5915853 NR Description: Cytochrome P450 93A3 (P450 CP5)
  misc_feature (18)..(527): NCBI GI NO: 3913192 NR Description: Cytochrome P450 93A1
  misc_feature (15)..(489): NCBI GI NO: 5832709 NR Description: cytochrome P450 [Torenia hybrida]
  misc_feature (39)..(489): NCBI GI NO: 5081817 NR Description: flavone synthase II [Gerbera hybrida]
  misc_feature (17)..(489): NCBI GI NO: 6118407 NR Description: flavone synthase II [Callistephus chinensis]
  misc_feature (14)..(489): NCBI GI NO: 14278923 NR Description: flavone synthase II [Perilla frutescens]
  misc_feature (15)..(489): NCBI GI NO: 5832707 NR Description: cytochrome P450 [Antirrhinum majus]
  misc_feature (15)..(489): NCBI GI NO: 5059126 NR Description: cytochrome P450 monooxygenaseCYP93D1 [Glycine max]
MFVLSSLAKNNPESVLALIAVLTVVALRHLISSWRQQARLPPSPTSLPVIGHLHLLRPPVHRTFQELASRIGPLMHIRLGSTHCVVASTPEVASELIRGHEGSISERPLTAVARQFAYDSAGFAFAPYNTHWRFMKRLCMSELLGPRTVEQLRPVRRAGTVSLLADLLASSARGETVDLTRHLIRLSNTSIIRMVASTVPGSVTDEAQEVVKDVAELVGAFNVDDYISLVRGWDLQGLRRRAAGVHRRFDALLEDILRHKEEARAARRLDQDDDGRGSSKQDKKQATHSKDLLDILMDKADDPAAEIKLTRENIKAFIIDVVTAGSDTSAAMVEWMLAELMNHPETLRKVAEEIDAVVGGDRIASEADLPQLPYLMAAYKETLRLHPAAPIAHRQSSEEMVVRGFTVPPQTAVFINVWAIGRDPAYWEEPLAFRPERFMPGGAAESLEPRGQHFQYMPFGSGRRGCPGMGLALQSVPAVLAALVQCFHWATRRRRRRGEQDRHVGVGRAGVRSQEAASAPPHASPHPLPGRRLACLPWQYRLCLYQPLPVPPRTYGFEECGYHALIICITLLYI

SEQ ID NO: 24434 - protein, 500 aa, Zea mays subsp. mays
  peptide (1)..(500): Ceres Seq. ID no. 12408067
  misc_feature (1)..(415): Pfam Name: Pfam Description:  Cytochrome P450
  misc_feature (1)..(415): NCBI GI NO: 38344759 NR Description: OSJNBa0068L06.2
  misc_feature (1)..(454): NCBI GI NO: 5915852 NR Description: Cytochrome P450 93A2
  misc_feature (1)..(415): NCBI GI NO: 5915853 NR Description: Cytochrome P450 93A3 (P450 CP5)
  misc_feature (1)..(453): NCBI GI NO: 3913192 NR Description: Cytochrome P450 93A1
  misc_feature (1)..(415): NCBI GI NO: 5832709 NR Description: cytochrome P450 [Torenia hybrida]
  misc_feature (1)..(415): NCBI GI NO: 5081817 NR Description: flavone synthase II [Gerbera hybrida]
  misc_feature (1)..(415): NCBI GI NO: 6118407 NR Description: flavone synthase II [Callistephus chinensis]
  misc_feature (1)..(415): NCBI GI NO: 14278923 NR Description: flavone synthase II [Perilla frutescens]
  misc_feature (1)..(415): NCBI GI NO: 5832707 NR Description: cytochrome P450 [Antirrhinum majus]
  misc_feature (1)..(415): NCBI GI NO: 5059126 NR Description: cytochrome P450 monooxygenaseCYP93D1 [Glycine max]
MHIRLGSTHCVVASTPEVASELIRGHEGSISERPLTAVARQFAYDSAGFAFAPYNTHWRFMKRLCMSELLGPRTVEQLRPVRRAGTVSLLADLLASSARGETVDLTRHLIRLSNTSIIRMVASTVPGSVTDEAQEVVKDVAELVGAFNVDDYISLVRGWDLQGLRRRAAGVHRRFDALLEDILRHKEEARAARRLDQDDDGRGSSKQDKKQATHSKDLLDILMDKADDPAAEIKLTRENIKAFIIDVVTAGSDTSAAMVEWMLAELMNHPETLRKVAEEIDAVVGGDRIASEADLPQLPYLMAAYKETLRLHPAAPIAHRQSSEEMVVRGFTVPPQTAVFINVWAIGRDPAYWEEPLAFRPERFMPGGAAESLEPRGQHFQYMPFGSGRRGCPGMGLALQSVPAVLAALVQCFHWATRRRRRRGEQDRHVGVGRAGVRSQEAASAPPHASPHPLPGRRLACLPWQYRLCLYQPLPVPPRTYGFEECGYHALIICITLLYI

SEQ ID NO: 24435 - DNA, 1052 bp, Zea mays subsp. mays
  misc_feature (1)..(1052): Ceres Seq. ID no. 12340741
atatatgtgaatcctaactgtacactgtctgaagtggacgaacggctctggcttcggcgtgttacgtgtatagtaggccccttttgaacgaacggcgcgggccggggccaccaccagcatctgcggcagggagaatcgcgttggttcgacgcaaacgctacccggcgcccccttgcccttggggccggctattttaccgcacccgttctcccctctctaccgcagatcagatcacactcgtagagagaaggaaaaatatccccaaaccctagctcccgatctcgatggcgaaccctcgcgtcttcttcgacatgaccgtcggcggcgccccggcgggccggatcgtgatggagctgtacgccaacgaggtgcccaagaccgcggagaacttccgcgcgctgtgcacgggcgagaagggcgtgggcaagtccgggaagccgctccactacaagggctccaccttccaccgcgtcatccccgagttcatgtgccagggcggcgacttcacccgcggcaacggcaccggcggcgagtccatctacggcgagaagttccccgacgagaagttcgtgcgcaagcaacccgcccccggtgtgctctccatggccaacgccgggcccaacaccaacggctcccagttcttcatctgcaccgtcgcgaccccttggctcgacggcaagcacgtcgtcttcggccaggtcgtcgagggcatggacgtcgtcaaggccatcgagaaggtgggcacccgcaacggctccacctccaaggtggtcaaggtcgctgactgcggacagctctcctagatctctctgatctggtctgttcggccgccctccctccgtcatcgtcgactccccctgcgtccgttcctttggatctgaataagatggtggtgatctgagtggtggtcttagtttatcatgtatcgctcgcagtttaatttagcggtttaggtgtggatctgtgaaccccatggcgcctctgcttgattcgtgtttcacctgttatgttctgagattcatgataatgctatgagaactgaaattcccgtt

SEQ ID NO: 24436 - protein, 172 aa, Zea mays subsp. mays
  peptide (1)..(172): Ceres Seq. ID no. 12340742
  misc_feature (1)..(172): NCBI GI NO: 118104 NR Description: Peptidyl-prolyl cis-trans isomerase
  misc_feature (1)..(172): NCBI GI NO: 1084455 NR Description: peptidylprolyl isomerase (EC 5.2.1.8) Cyp2 - rice
  misc_feature (1)..(172): NCBI GI NO: 600769 NR Description: cyclophilin 2
  misc_feature (1)..(171): NCBI GI NO: 13925731 NR Description: cyclophilin A-1 [Triticum aestivum]
  misc_feature (1)..(171): NCBI GI NO: 13925734 NR Description: cyclophilin A-2 [Triticum aestivum]
  misc_feature (1)..(172): NCBI GI NO: 18376589 NR Description: putative cyclosporin A-binding protein
  misc_feature (2)..(172): NCBI GI NO: 18076088 NR Description: cyclophilin [Ricinus communis]
  misc_feature (1)..(171): NCBI GI NO: 11270316 NR Description: peptidylprolyl isomerase (EC 5.2.1.8)
  misc_feature (1)..(171): NCBI GI NO: 23394388 NR Description: peptidylprolyl isomerase [Phytophthora infestans]
  misc_feature (1)..(172): NCBI GI NO: 3334157 NR Description: Peptidyl-prolyl cis-trans isomerase
MANPRVFFDMTVGGAPAGRIVMELYANEVPKTAENFRALCTGEKGVGKSGKPLHYKGSTFHRVIPEFMCQGGDFTRGNGTGGESIYGEKFPDEKFVRKQPAPGVLSMANAGPNTNGSQFFICTVATPWLDGKHVVFGQVVEGMDVVKAIEKVGTRNGSTSKVVKVADCGQLS

SEQ ID NO: 24437 - protein, 163 aa, Zea mays subsp. mays
  peptide (1)..(163): Ceres Seq. ID no. 12340743
  misc_feature (1)..(163): NCBI GI NO: 118104 NR Description: Peptidyl-prolyl cis-trans isomerase
  misc_feature (1)..(163): NCBI GI NO: 1084455 NR Description: peptidylprolyl isomerase (EC 5.2.1.8) Cyp2 - rice
  misc_feature (1)..(163): NCBI GI NO: 600769 NR Description: cyclophilin 2
  misc_feature (1)..(162): NCBI GI NO: 13925731 NR Description: cyclophilin A-1 [Triticum aestivum]
  misc_feature (1)..(162): NCBI GI NO: 13925734 NR Description: cyclophilin A-2 [Triticum aestivum]
  misc_feature (1)..(163): NCBI GI NO: 18376589 NR Description: putative cyclosporin A-binding protein
  misc_feature (1)..(163): NCBI GI NO: 18076088 NR Description: cyclophilin [Ricinus communis]
  misc_feature (1)..(162): NCBI GI NO: 11270316 NR Description: peptidylprolyl isomerase (EC 5.2.1.8)
  misc_feature (1)..(162): NCBI GI NO: 23394388 NR Description: peptidylprolyl isomerase [Phytophthora infestans]
  misc_feature (1)..(163): NCBI GI NO: 3334157 NR Description: Peptidyl-prolyl cis-trans isomerase
MTVGGAPAGRIVMELYANEVPKTAENFRALCTGEKGVGKSGKPLHYKGSTFHRVIPEFMCQGGDFTRGNGTGGESIYGEKFPDEKFVRKQPAPGVLSMANAGPNTNGSQFFICTVATPWLDGKHVVFGQVVEGMDVVKAIEKVGTRNGSTSKVVKVADCGQLS

SEQ ID NO: 24438 - protein, 151 aa, Zea mays subsp. mays
  peptide (1)..(151): Ceres Seq. ID no. 12340744
  misc_feature (1)..(151): NCBI GI NO: 118104 NR Description: Peptidyl-prolyl cis-trans isomerase
  misc_feature (1)..(151): NCBI GI NO: 1084455 NR Description: peptidylprolyl isomerase (EC 5.2.1.8) Cyp2 - rice
  misc_feature (1)..(151): NCBI GI NO: 600769 NR Description: cyclophilin 2
  misc_feature (1)..(150): NCBI GI NO: 13925731 NR Description: cyclophilin A-1 [Triticum aestivum]
  misc_feature (1)..(150): NCBI GI NO: 13925734 NR Description: cyclophilin A-2 [Triticum aestivum]
  misc_feature (1)..(151): NCBI GI NO: 18376589 NR Description: putative cyclosporin A-binding protein
  misc_feature (1)..(151): NCBI GI NO: 18076088 NR Description: cyclophilin [Ricinus communis]
  misc_feature (1)..(150): NCBI GI NO: 11270316 NR Description: peptidylprolyl isomerase (EC 5.2.1.8)
  misc_feature (1)..(150): NCBI GI NO: 23394388 NR Description: peptidylprolyl isomerase [Phytophthora infestans]
  misc_feature (1)..(151): NCBI GI NO: 3334157 NR Description: Peptidyl-prolyl cis-trans isomerase
MELYANEVPKTAENFRALCTGEKGVGKSGKPLHYKGSTFHRVIPEFMCQGGDFTRGNGTGGESIYGEKFPDEKFVRKQPAPGVLSMANAGPNTNGSQFFICTVATPWLDGKHVVFGQVVEGMDVVKAIEKVGTRNGSTSKVVKVADCGQLS

SEQ ID NO: 24439 - DNA, 1416 bp, Zea mays subsp. mays
  misc_feature (1)..(1416): Ceres Seq. ID no. 12454754
aaaagccaggattcctctgctcttcctgtttagggtttccccctctctctgctcctgccggatgcgatggcgattccgccgcggactccttccccgccgccatcgtggtcgcgctctgtaaccgagaccgttcgggggtcccaccagttcaccgtacggggctactccctcgccaagggcatgggccccggccgctacctcgccagcgacgtcttcgccgtcggaggataccactgggccgtctacctctaccccgacggcaagaacgccgaggacaactccaactacgtctccgttttcgtcgccctcgcttccgacggcatcgacgtccgagccctcttcgagctcaccctcctcgaccagtccggccgcggctgccacaaggttcactcgcactttgaccgctcgctcaagttcggcccatacaccctcaagtacaggggatccatgtggggttacaagcgcttctacaaaagaacactcttggaagaatctgatttcttaaagaatgattgcctagtgatgaactgcacagtaggtgttgtcaagaaccgtatagaaacaccaaaggacatccagattcatgttccacgatcagacatgggccgctgcttcaaggagctcctcagccgctgcattggatgtgacataacattcgaagtgcgagatgagaaagtcagggcacacaagtggattcttgctgctcgctccccagtatttaaagcccagttctttggtcctattggaaagcctgacctgcacacggttgttgtggaggatgtggaacctgttgtcttcaaggcaatggtgaacttcatttacgctgatgaactccccagcattcctgagctagctgggtctgcctcaacgtggacatcaacagtagtagtacagcatttgttggcagcagctgatagatatggactggtccgtctgcgtatcctgtgtgaatcaaagctctgtgatgaactgactcctgaaactgtcgcaacaactttagcccttgctgaacagcaccattgtgctgagctgaagtctgcatgtctaaagttcattgctttgcgaggaaatttgggagctgttatggagacggaaggctttgattacctggaggatacatgcccgtccctactatctgacttgttagctactgtggcagtcgtggacgacgatcttgcatcccttaaccgaaaaaggggagtcagcgggaaccaagtcatggctctagtgggaagcgttgaaaggcgcacccggaggaagctttagtagctggcttccctagagggagactgtagttgacaacgatttgatttggacgctggtagctgtgaataatatcgtatccagatgattttttttttttttttgcagaagcagaagttgtaaattttttgaattgaatgcctttttttttcc

SEQ ID NO: 24440 - protein, 399 aa, Zea mays subsp. mays
  peptide (1)..(399): Ceres Seq. ID no. 12454755
  misc_feature (30)..(159): Pfam Name: Pfam Description:  MATH domain
  misc_feature (13)..(399): NCBI GI NO: 34394164 NR Description: putative speckle-type POZ protein
  misc_feature (11)..(399): NCBI GI NO: 21595740 NR Description: unknown [Arabidopsis thaliana]
  misc_feature (11)..(399): NCBI GI NO: 18405153 NR Description: expressed protein; protein id: At2g39760
  misc_feature (15)..(377): NCBI GI NO: 18397497 NR Description: expressed protein; protein id: At3g06190
  misc_feature (1)..(372): NCBI GI NO: 23617108 NR Description: contains ESTsAU056959
  misc_feature (15)..(376): NCBI GI NO: 22531225 NR Description: putative protein [Arabidopsis thaliana]
  misc_feature (1)..(381): NCBI GI NO: 34900034 NR Description: OJ1641_C04.24
  misc_feature (8)..(381): NCBI GI NO: 21536509 NR Description: unknown [Arabidopsis thaliana]
  misc_feature (8)..(381): NCBI GI NO: 30678912 NR Description: expressed protein [Arabidopsis thaliana]
  misc_feature (10)..(381): NCBI GI NO: 28269444 NR Description: unknown protein
MAIPPRTPSPPPSWSRSVTETVRGSHQFTVRGYSLAKGMGPGRYLASDVFAVGGYHWAVYLYPDGKNAEDNSNYVSVFVALASDGIDVRALFELTLLDQSGRGCHKVHSHFDRSLKFGPYTLKYRGSMWGYKRFYKRTLLEESDFLKNDCLVMNCTVGVVKNRIETPKDIQIHVPRSDMGRCFKELLSRCIGCDITFEVRDEKVRAHKWILAARSPVFKAQFFGPIGKPDLHTVVVEDVEPVVFKAMVNFIYADELPSIPELAGSASTWTSTVVVQHLLAAADRYGLVRLRILCESKLCDELTPETVATTLALAEQHHCAELKSACLKFIALRGNLGAVMETEGFDYLEDTCPSLLSDLLATVAVVDDDLASLNRKRGVSGNQVMALVGSVERRTRRKL

SEQ ID NO: 24441 - protein, 361 aa, Zea mays subsp. mays
  peptide (1)..(361): Ceres Seq. ID no. 12454756
  misc_feature (1)..(121): Pfam Name: Pfam Description:  MATH domain
  misc_feature (1)..(361): NCBI GI NO: 34394164 NR Description: putative speckle-type POZ protein
  misc_feature (1)..(361): NCBI GI NO: 21595740 NR Description: unknown [Arabidopsis thaliana]
  misc_feature (1)..(361): NCBI GI NO: 18405153 NR Description: expressed protein; protein id: At2g39760
  misc_feature (1)..(339): NCBI GI NO: 18397497 NR Description: expressed protein; protein id: At3g06190
  misc_feature (1)..(334): NCBI GI NO: 23617108 NR Description: contains ESTsAU056959
  misc_feature (1)..(338): NCBI GI NO: 22531225 NR Description: putative protein [Arabidopsis thaliana]
  misc_feature (1)..(343): NCBI GI NO: 34900034 NR Description: OJ1641_C04.24
  misc_feature (1)..(343): NCBI GI NO: 21536509 NR Description: unknown [Arabidopsis thaliana]
  misc_feature (1)..(343): NCBI GI NO: 30678912 NR Description: expressed protein [Arabidopsis thaliana]
  misc_feature (1)..(343): NCBI GI NO: 28269444 NR Description: unknown protein
MGPGRYLASDVFAVGGYHWAVYLYPDGKNAEDNSNYVSVFVALASDGIDVRALFELTLLDQSGRGCHKVHSHFDRSLKFGPYTLKYRGSMWGYKRFYKRTLLEESDFLKNDCLVMNCTVGVVKNRIETPKDIQIHVPRSDMGRCFKELLSRCIGCDITFEVRDEKVRAHKWILAARSPVFKAQFFGPIGKPDLHTVVVEDVEPVVFKAMVNFIYADELPSIPELAGSASTWTSTVVVQHLLAAADRYGLVRLRILCESKLCDELTPETVATTLALAEQHHCAELKSACLKFIALRGNLGAVMETEGFDYLEDTCPSLLSDLLATVAVVDDDLASLNRKRGVSGNQVMALVGSVERRTRRKL

SEQ ID NO: 24442 - protein, 272 aa, Zea mays subsp. mays
  peptide (1)..(272): Ceres Seq. ID no. 12454757
  misc_feature (57)..(175): Pfam Name: Pfam Description:  BTB/POZ domain
  misc_feature (1)..(272): NCBI GI NO: 34394164 NR Description: putative speckle-type POZ protein
  misc_feature (1)..(272): NCBI GI NO: 21595740 NR Description: unknown [Arabidopsis thaliana]
  misc_feature (1)..(272): NCBI GI NO: 18405153 NR Description: expressed protein; protein id: At2g39760
  misc_feature (1)..(250): NCBI GI NO: 18397497 NR Description: expressed protein; protein id: At3g06190
  misc_feature (1)..(245): NCBI GI NO: 23617108 NR Description: contains ESTsAU056959
  misc_feature (1)..(249): NCBI GI NO: 22531225 NR Description: putative protein [Arabidopsis thaliana]
  misc_feature (1)..(254): NCBI GI NO: 34900034 NR Description: OJ1641_C04.24
  misc_feature (1)..(254): NCBI GI NO: 21536509 NR Description: unknown [Arabidopsis thaliana]
  misc_feature (1)..(254): NCBI GI NO: 30678912 NR Description: expressed protein [Arabidopsis thaliana]
  misc_feature (1)..(254): NCBI GI NO: 28269444 NR Description: unknown protein
MWGYKRFYKRTLLEESDFLKNDCLVMNCTVGVVKNRIETPKDIQIHVPRSDMGRCFKELLSRCIGCDITFEVRDEKVRAHKWILAARSPVFKAQFFGPIGKPDLHTVVVEDVEPVVFKAMVNFIYADELPSIPELAGSASTWTSTVVVQHLLAAADRYGLVRLRILCESKLCDELTPETVATTLALAEQHHCAELKSACLKFIALRGNLGAVMETEGFDYLEDTCPSLLSDLLATVAVVDDDLASLNRKRGVSGNQVMALVGSVERRTRRKL

SEQ ID NO: 24443 - DNA, 1392 bp, Zea mays subsp. mays
  misc_feature (1)..(1392): Ceres Seq. ID no. 12381199
aaaacacccccaatcccacccagaatccggcggaagtcaagccaacctccgtcctccatccatgggcgagcaatccctctcccagcccaaggcccagcctctctccccgttcccgtcgcctcccgcctccgccgcgttgccgccccccgcctctgcctcatgcctcatgcctctgctgcctccacctcccgcaccaccagcgccgcggcctcgcgccccaagaagaaggtgacgaacccatcgcccgaccgtaacccggcaaagaagccccgcctgacgttctcgatcccgggccggcccctgtccgcagtcggcgaggtgggcgtggccatccgctacctgcgcgccgcggaccccgtcctcgccgccgtcatcgacgcgcacgagccccccgtgttccagtgcccgcaccgcccgttccactccctcgtccgatccatcctgtaccagcagctcgccttcaaggccgccgcctccgtctactcccgcttcctcgcgcttctcggcggcgagtcctgcgtggcccccgatgccgtcctcgcgctcaccccgcaccagctccgccagatcggggtctccccgcgcaaggcttcctacctccacgacctcgcccgcaagtatgcctccgggatcctctccgacgccgccatcgtcaacatggacgaccgctccctcgccgccatgcttaccatggtcaagggcatcggctcctggagcgtccacatgttcatgatcttctctctcgcgcgccccgacgtgctcccctccgccgacctcggcgtgcgcaagggcgtgcagatgctctacgccctcgaggacgtgcctcgtccgtcgcagatggacaagctgtgcgagcggtggcgcccctatcgctcagttggggcttggtacatgtggcggctcattgaatccaaggtgccccagccagcgccggccatccctgttggatcacttgctttcccttcgccggacggcgcagagtatgctacagcagcaagaacaacagcaacagcagactgtcatccaaatgatcgacccccttcagatgctcccagggatggggtgaattcggtatcacgtctactaattagttactctactccgtcttagatcaatcaatggttactctgtgcatctgatagtcagctccacacgttgttgttctggaatggaaccgcaggagggtagaattggatatgaaatgaggtttgggcccaacttattaagttgtcaatttggtttgtgttgtttatctgtgtcaagaatctgtgaagatgatggttggctgttgtttacattgtaaaatccacctagcagtattttagaaccttctggaattgttccatgcttgtagttcacctgtgataaaatgattaagaccatgcttaacgc

SEQ ID NO: 24444 - protein, 369 aa, Zea mays subsp. mays
  peptide (1)..(369): Ceres Seq. ID no. 12381200
  misc_feature (144)..(289): Pfam Name: Pfam Description:  HhH-GPD superfamily base excision DNA repair
  misc_feature (57)..(316): NCBI GI NO: 5091600 NR Description: This gene is a member of PF| 01332 Alkylbase DNAglycosidases alkA family
  misc_feature (1)..(321): NCBI GI NO: 18410802 NR Description: 3-methyladenine DNA glycosylase, putative
  misc_feature (1)..(321): NCBI GI NO: 25406423 NR Description: hypothetical protein F22H5.5
  misc_feature (96)..(324): NCBI GI NO: 18394744 NR Description: Expressed protein; protein id: At1g19480
  misc_feature (96)..(324): NCBI GI NO: 21593178 NR Description: unknown [Arabidopsis thaliana]
  misc_feature (96)..(324): NCBI GI NO: 25402893 NR Description: protein F18O14.25
  misc_feature (58)..(305): NCBI GI NO: 15230333 NR Description: putative DNA-3-methyladenine glycosidase
  misc_feature (110)..(303): NCBI GI NO: 37521587 NR Description: probable DNA-3-methyladenine glycosylase
  misc_feature (110)..(300): NCBI GI NO: 22971879 NR Description: hypothetical protein [Chloroflexus aurantiacus]
  misc_feature (110)..(300): NCBI GI NO: 26987441 NR Description: DNA-3-methyladenine glycosylase
KTPPIPPRIRRKSSQPPSSIHGRAIPLPAQGPASLPVPVASRLRRVAAPRLCLMPHASAASTSRTTSAAASRPKKKVTNPSPDRNPAKKPRLTFSIPGRPLSAVGEVGVAIRYLRAADPVLAAVIDAHEPPVFQCPHRPFHSLVRSILYQQLAFKAAASVYSRFLALLGGESCVAPDAVLALTPHQLRQIGVSPRKASYLHDLARKYASGILSDAAIVNMDDRSLAAMLTMVKGIGSWSVHMFMIFSLARPDVLPSADLGVRKGVQMLYALEDVPRPSQMDKLCERWRPYRSVGAWYMWRLIESKVPQPAPAIPVGSLAFPSPDGAEYATAARTTATADCHPNDRPPSDAPRDGVNSVSRLLISYSTPS

SEQ ID NO: 24445 - protein, 316 aa, Zea mays subsp. mays
  peptide (1)..(316): Ceres Seq. ID no. 12381201
  misc_feature (91)..(236): Pfam Name: Pfam Description:  HhH-GPD superfamily base excision DNA repair
  misc_feature (4)..(263): NCBI GI NO: 5091600 NR Description: This gene is a member of PF| 01332 Alkylbase DNAglycosidases alkA family
  misc_feature (1)..(268): NCBI GI NO: 18410802 NR Description: 3-methyladenine DNA glycosylase, putative
  misc_feature (1)..(268): NCBI GI NO: 25406423 NR Description: hypothetical protein F22H5.5
  misc_feature (43)..(271): NCBI GI NO: 18394744 NR Description: Expressed protein; protein id: At1g19480
  misc_feature (43)..(271): NCBI GI NO: 21593178 NR Description: unknown [Arabidopsis thaliana]
  misc_feature (43)..(271): NCBI GI NO: 25402893 NR Description: protein F18O14.25
  misc_feature (5)..(252): NCBI GI NO: 15230333 NR Description: putative DNA-3-methyladenine glycosidase
  misc_feature (57)..(250): NCBI GI NO: 37521587 NR Description: probable DNA-3-methyladenine glycosylase
  misc_feature (57)..(247): NCBI GI NO: 22971879 NR Description: hypothetical protein [Chloroflexus aurantiacus]
  misc_feature (57)..(247): NCBI GI NO: 26987441 NR Description: DNA-3-methyladenine glycosylase
MPHASAASTSRTTSAAASRPKKKVTNPSPDRNPAKKPRLTFSIPGRPLSAVGEVGVAIRYLRAADPVLAAVIDAHEPPVFQCPHRPFHSLVRSILYQQLAFKAAASVYSRFLALLGGESCVAPDAVLALTPHQLRQIGVSPRKASYLHDLARKYASGILSDAAIVNMDDRSLAAMLTMVKGIGSWSVHMFMIFSLARPDVLPSADLGVRKGVQMLYALEDVPRPSQMDKLCERWRPYRSVGAWYMWRLIESKVPQPAPAIPVGSLAFPSPDGAEYATAARTTATADCHPNDRPPSDAPRDGVNSVSRLLISYSTPS

SEQ ID NO: 24446 - DNA, 1159 bp, Zea mays subsp. mays
  misc_feature (1)..(1159): Ceres Seq. ID no. 13492677
ggccacaccttccgtcccccggcctccgctcgcctcgccgcccgcctgtccctgtctgtctctctctctcctcgctgagtcgccgccagccatgaacaacctcctcacggattcctttgagctcccccggcgggactcctcaagagatgcagacattgaaatgggaatgcatcaagctgatgcttcagacaacttaaaagatttcttgaagaaggtcgatacaattgagagtttaattgcaaagctgacaaatctattgaataagctacagactgcaaatgaggaatccaaagcagttacaaaagcaagttccatgaaagcaattaagcagcggatggagaaagatattgatgaagtggggaaaattgctcgtcaggcgaagacaaaagttgatgaattggaaaaagacaacttatcaaataggcaaaaacctggatgtggaaaaggttctgccgtggaccgatcaagagagcaaactactggagcagtgaaaaagaaattgaaggagcggatggatgactttcagaccttgagagaagcaatcaggcaagagtatcgggaggttgttgaaagaagggtttttactgtaactggtaatcgtcctgatgaagagacaattgatgacttgatagagaccggaaaaagtgagcaaatattcaaagatgctatccaacatcagggaagaggccagatactagacactgttgctgaaatacaggagcgacatgatgctgtaagggatctagagaggaagcttctggagttgcaacagatattcatggacatggcagttcttgttgaggcgcaaggagacatgatcaacaacatcgagacccatgtctcgaacgccaccaaccacatacagcaaggtgtgagcgcgctccagaacgcgaagaaactgcagaggaattcgaggaagtggatgtgctacgccatcatcatactgctggtgatagtcgtggtcattgtcgtcgcagtcatccagccatggaagaagggcacctagcgtggtggtgccttttttcctgtttgtgtaatatgtgtgcagttttttttgtgggtgattcgtgatttgttgttgtacctatagtcgacgcaacaggagctctggcatttcgattcattctgtctagtgaaaggacactgccatcatatgccg

SEQ ID NO: 24447 - protein, 334 aa, Zea mays subsp. mays
  peptide (1)..(334): Ceres Seq. ID no. 13492678
  misc_feature (31)..(333): NCBI GI NO: 33146794 NR Description: putative syntaxin-related protein
  misc_feature (31)..(333): NCBI GI NO: 34899960 NR Description: P0428D12.21
  misc_feature (31)..(331): NCBI GI NO: 18415701 NR Description: syntaxin of plants SYP132 [Arabidopsis thaliana]
  misc_feature (31)..(331): NCBI GI NO: 11358872 NR Description: syntaxin-like protein - Arabidopsis thaliana
  misc_feature (31)..(330): NCBI GI NO: 15228637 NR Description: syntaxin of plants SYP131 [Arabidopsis thaliana]
  misc_feature (31)..(333): NCBI GI NO: 34899972 NR Description: P0039H02.3
  misc_feature (31)..(334): NCBI GI NO: 15229865 NR Description: syntaxin of plants SYP121 [Arabidopsis thaliana]
  misc_feature (31)..(332): NCBI GI NO: 4206787 NR Description: syntaxin-related protein Nt-syr1
  misc_feature (31)..(327): NCBI GI NO: 15220328 NR Description: syntaxin of plants SYP125 [Arabidopsis thaliana]
  misc_feature (31)..(327): NCBI GI NO: 15236285 NR Description: syntaxin of plants SYP123 [Arabidopsis thaliana]
ATPSVPRPPLASPPACPCLSLSLLAESPPAMNNLLTDSFELPRRDSSRDADIEMGMHQADASDNLKDFLKKVDTIESLIAKLTNLLNKLQTANEESKAVTKASSMKAIKQRMEKDIDEVGKIARQAKTKVDELEKDNLSNRQKPGCGKGSAVDRSREQTTGAVKKKLKERMDDFQTLREAIRQEYREVVERRVFTVTGNRPDEETIDDLIETGKSEQIFKDAIQHQGRGQILDTVAEIQERHDAVRDLERKLLELQQIFMDMAVLVEAQGDMINNIETHVSNATNHIQQGVSALQNAKKLQRNSRKWMCYAIIILLVIVVVIVVAVIQPWKKGT

SEQ ID NO: 24448 - protein, 304 aa, Zea mays subsp. mays
  peptide (1)..(304): Ceres Seq. ID no. 13492679
  misc_feature (1)..(303): NCBI GI NO: 33146794 NR Description: putative syntaxin-related protein
  misc_feature (1)..(303): NCBI GI NO: 34899960 NR Description: P0428D12.21
  misc_feature (1)..(301): NCBI GI NO: 18415701 NR Description: syntaxin of plants SYP132 [Arabidopsis thaliana]
  misc_feature (1)..(301): NCBI GI NO: 11358872 NR Description: syntaxin-like protein - Arabidopsis thaliana
  misc_feature (1)..(300): NCBI GI NO: 15228637 NR Description: syntaxin of plants SYP131 [Arabidopsis thaliana]
  misc_feature (1)..(303): NCBI GI NO: 34899972 NR Description: P0039H02.3
  misc_feature (1)..(304): NCBI GI NO: 15229865 NR Description: syntaxin of plants SYP121 [Arabidopsis thaliana]
  misc_feature (1)..(302): NCBI GI NO: 4206787 NR Description: syntaxin-related protein Nt-syr1
  misc_feature (1)..(297): NCBI GI NO: 15220328 NR Description: syntaxin of plants SYP125 [Arabidopsis thaliana]
  misc_feature (1)..(297): NCBI GI NO: 15236285 NR Description: syntaxin of plants SYP123 [Arabidopsis thaliana]
MNNLLTDSFELPRRDSSRDADIEMGMHQADASDNLKDFLKKVDTIESLIAKLTNLLNKLQTANEESKAVTKASSMKAIKQRMEKDIDEVGKIARQAKTKVDELEKDNLSNRQKPGCGKGSAVDRSREQTTGAVKKKLKERMDDFQTLREAIRQEYREVVERRVFTVTGNRPDEETIDDLIETGKSEQIFKDAIQHQGRGQILDTVAEIQERHDAVRDLERKLLELQQIFMDMAVLVEAQGDMINNIETHVSNATNHIQQGVSALQNAKKLQRNSRKWMCYAIIILLVIVVVIVVAVIQPWKKGT

SEQ ID NO: 24449 - protein, 281 aa, Zea mays subsp. mays
  peptide (1)..(281): Ceres Seq. ID no. 13492680
  misc_feature (1)..(280): NCBI GI NO: 33146794 NR Description: putative syntaxin-related protein
  misc_feature (1)..(280): NCBI GI NO: 34899960 NR Description: P0428D12.21
  misc_feature (1)..(278): NCBI GI NO: 18415701 NR Description: syntaxin of plants SYP132 [Arabidopsis thaliana]
  misc_feature (1)..(278): NCBI GI NO: 11358872 NR Description: syntaxin-like protein - Arabidopsis thaliana
  misc_feature (1)..(277): NCBI GI NO: 15228637 NR Description: syntaxin of plants SYP131 [Arabidopsis thaliana]
  misc_feature (1)..(280): NCBI GI NO: 34899972 NR Description: P0039H02.3
  misc_feature (1)..(281): NCBI GI NO: 15229865 NR Description: syntaxin of plants SYP121 [Arabidopsis thaliana]
  misc_feature (1)..(279): NCBI GI NO: 4206787 NR Description: syntaxin-related protein Nt-syr1
  misc_feature (1)..(274): NCBI GI NO: 15220328 NR Description: syntaxin of plants SYP125 [Arabidopsis thaliana]
  misc_feature (1)..(274): NCBI GI NO: 15236285 NR Description: syntaxin of plants SYP123 [Arabidopsis thaliana]
MGMHQADASDNLKDFLKKVDTIESLIAKLTNLLNKLQTANEESKAVTKASSMKAIKQRMEKDIDEVGKIARQAKTKVDELEKDNLSNRQKPGCGKGSAVDRSREQTTGAVKKKLKERMDDFQTLREAIRQEYREVVERRVFTVTGNRPDEETIDDLIETGKSEQIFKDAIQHQGRGQILDTVAEIQERHDAVRDLERKLLELQQIFMDMAVLVEAQGDMINNIETHVSNATNHIQQGVSALQNAKKLQRNSRKWMCYAIIILLVIVVVIVVAVIQPWKKGT

SEQ ID NO: 24450 - DNA, 1352 bp, Zea mays subsp. mays
  misc_feature (1)..(1352): Ceres Seq. ID no. 13493446
  misc_feature (77)..(77): n is a, c, t, g, unknown, or other
tcggcaaatatacactgcgcccgtccgcctccgcaatcgacaacgaaccactgggcaccggccgcggctcgcaagtngcctgcgttcctcttccacgctccgcccacccgtcccggggcccgccgcaacccgatccctccccgcgcccaacgatgccggccggccagccgcacgcgcacgaagccgctgccgccgcctgcgtcggcagcggcgcgaaccactccaaccaccgagtgccggcgcactcgccaccgccgctccccgcggaggtggtgccggcgtacccgcccccggagtcggaggacgacgagacctgggtgtggacgcagatcaaggcggaggcccgccgcgacgcggacgcggagccggcgctcgcctccttcctctacgccaccgtgttgtcccacccgtccctgccccgctccctctccttccacctcgccaacaagctctgctcctccacgctcctctccacgctcctctacgacctcttcctcgccacgctcaccgcgcacccctctctccgcgccgccgtcgtcgccgacctcctcgcggcccactcccgcgaccccgcctgcgtcggcttctcccactgcctcctcaactacaagggcttcctcgccatccaggcccaccgcgtcgcgcacgtgctctgggcgcagcagcgacggcccctcgcgctcgcgctccagtcccgcgtcgccgacgtcttcgccgttgacatccaccccgccgccgtcgtcgggaagggaatcctcctcgaccacgccaccggcgtcgtcatcggtgagacggccgtcgtcggcgacaacgtctccatcctccaccacgtcaccttgggcgggaccgggaaggcggtgggtgaccggcaccccaagattggggatggcgtgctgattggagcaggggccaccattcttggtaacgtgaaaattggtgccggggctaagattggagccggatccgtggtgctgatagatgtgccggcgaggagcacggcggttggaaccctgccaggctgatggtggaagaaggccgaggtgcgaatgaggaggacatgccaggggagtccatggatcacacgtccttcatacgtcaatggtcggactacaccatttgagagcggttatccaaggtctattgctcttcttttgtatcactagtaatggtgatgtaccaaataccgagtacttgctctttgttgtgtgtctatggtttgtgtattgtacttagaagcctagtggtgtttatgatcattgtcagctgagtgtgccatgcctgaatactggtaaatttcgattgatggatggacaaatctgtatgagagttggttggaatttgtcacattcctt

SEQ ID NO: 24451 - protein, 339 aa, Zea mays subsp. mays
  peptide (1)..(339): Ceres Seq. ID no. 13493447
  misc_feature (51)..(339): NCBI GI NO: 25991545 NR Description: satase isoform III [Zea mays]
  misc_feature (81)..(335): NCBI GI NO: 34910686 NR Description: putative serine acetyltransferase
  misc_feature (81)..(335): NCBI GI NO: 25991547 NR Description: satase isoform I [Zea mays]
  misc_feature (86)..(335): NCBI GI NO: 7384806 NR Description: serine acetyltransferase [Allium tuberosum]
  misc_feature (91)..(335): NCBI GI NO: 6601494 NR Description: serine acetyltransferase [Allium cepa]
  misc_feature (94)..(335): NCBI GI NO: 23343585 NR Description: serine acetyltransferase 7 [Nicotiana tabacum]
  misc_feature (87)..(335): NCBI GI NO: 28460066 NR Description: serine O-acetyltransferase [Beta vulgaris]
  misc_feature (99)..(335): NCBI GI NO: 1361979 NR Description: serine O-acetyltransferase (EC 2
  misc_feature (88)..(335): NCBI GI NO: 15241928 NR Description: serine acetyltransferase (Sat-52)
  misc_feature (88)..(335): NCBI GI NO: 21537083 NR Description: serine O-acetyltransferase (EC 2.3.1.30) Sat-52
  misc_feature (25)..(25): Xaa is any aa, unknown or other
GKYTLRPSASAIDNEPLGTGRGSQXACVPLPRSAHPSRGPPQPDPSPRPTMPAGQPHAHEAAAAACVGSGANHSNHRVPAHSPPPLPAEVVPAYPPPESEDDETWVWTQIKAEARRDADAEPALASFLYATVLSHPSLPRSLSFHLANKLCSSTLLSTLLYDLFLATLTAHPSLRAAVVADLLAAHSRDPACVGFSHCLLNYKGFLAIQAHRVAHVLWAQQRRPLALALQSRVADVFAVDIHPAAVVGKGILLDHATGVVIGETAVVGDNVSILHHVTLGGTGKAVGDRHPKIGDGVLIGAGATILGNVKIGAGAKIGAGSVVLIDVPARSTAVGTLPG

SEQ ID NO: 24452 - protein, 298 aa, Zea mays subsp. mays
  peptide (1)..(298): Ceres Seq. ID no. 13493448
  misc_feature (143)..(278): Pfam Name: Pfam Description:  Equine herpesvirus glycoprotein gp2
  misc_feature (9)..(279): NCBI GI NO: 188864 NR Description: mucin
  misc_feature (9)..(279): NCBI GI NO: 2135765 NR Description: mucin 2 precursor, intestinal - human (fragments)
  misc_feature (9)..(277): NCBI GI NO: 188864 NR Description: mucin
  misc_feature (9)..(279): NCBI GI NO: 188864 NR Description: mucin
  misc_feature (9)..(277): NCBI GI NO: 2135765 NR Description: mucin 2 precursor, intestinal - human (fragments)
  misc_feature (9)..(283): NCBI GI NO: 188864 NR Description: mucin
  misc_feature (7)..(278): NCBI GI NO: 23017082 NR Description: hypothetical protein [Thermobifida fusca]
  misc_feature (9)..(282): NCBI GI NO: 188864 NR Description: mucin
  misc_feature (7)..(295): NCBI GI NO: 23017082 NR Description: hypothetical protein [Thermobifida fusca]
  misc_feature (9)..(279): NCBI GI NO: 2135765 NR Description: mucin 2 precursor, intestinal - human (fragments)
  misc_feature (26)..(26): Xaa is any aa, unknown or other
SANIHCARPPPQSTTNHWAPAAARKXPAFLFHAPPTRPGARRNPIPPRAQRCRPASRTRTKPLPPPASAAARTTPTTECRRTRHRRSPRRWCRRTRPRSRRTTRPGCGRRSRRRPAATRTRSRRSPPSSTPPCCPTRPCPAPSPSTSPTSSAPPRSSPRSSTTSSSPRSPRTPLSAPPSSPTSSRPTPATPPASASPTASSTTRASSPSRPTASRTCSGRSSDGPSRSRSSPASPTSSPLTSTPPPSSGRESSSTTPPASSSVRRPSSATTSPSSTTSPWAGPGRRWVTGTPRLGMAC

SEQ ID NO: 24453 - protein, 289 aa, Zea mays subsp. mays
  peptide (1)..(289): Ceres Seq. ID no. 13493449
  misc_feature (1)..(289): NCBI GI NO: 25991545 NR Description: satase isoform III [Zea mays]
  misc_feature (31)..(285): NCBI GI NO: 34910686 NR Description: putative serine acetyltransferase
  misc_feature (31)..(285): NCBI GI NO: 25991547 NR Description: satase isoform I [Zea mays]
  misc_feature (36)..(285): NCBI GI NO: 7384806 NR Description: serine acetyltransferase [Allium tuberosum]
  misc_feature (41)..(285): NCBI GI NO: 6601494 NR Description: serine acetyltransferase [Allium cepa]
  misc_feature (44)..(285): NCBI GI NO: 23343585 NR Description: serine acetyltransferase 7 [Nicotiana tabacum]
  misc_feature (37)..(285): NCBI GI NO: 28460066 NR Description: serine O-acetyltransferase [Beta vulgaris]
  misc_feature (49)..(285): NCBI GI NO: 1361979 NR Description: serine O-acetyltransferase (EC 2
  misc_feature (38)..(285): NCBI GI NO: 15241928 NR Description: serine acetyltransferase (Sat-52)
  misc_feature (38)..(285): NCBI GI NO: 21537083 NR Description: serine O-acetyltransferase (EC 2.3.1.30) Sat-52
MPAGQPHAHEAAAAACVGSGANHSNHRVPAHSPPPLPAEVVPAYPPPESEDDETWVWTQIKAEARRDADAEPALASFLYATVLSHPSLPRSLSFHLANKLCSSTLLSTLLYDLFLATLTAHPSLRAAVVADLLAAHSRDPACVGFSHCLLNYKGFLAIQAHRVAHVLWAQQRRPLALALQSRVADVFAVDIHPAAVVGKGILLDHATGVVIGETAVVGDNVSILHHVTLGGTGKAVGDRHPKIGDGVLIGAGATILGNVKIGAGAKIGAGSVVLIDVPARSTAVGTLPG

SEQ ID NO: 24454 - DNA, 1589 bp, Zea mays subsp. mays
  misc_feature (1)..(1589): Ceres Seq. ID no. 12410562
gtcgatttggattcgcagcggcggcggcggccaatcaaagcaatcatcacccagtcgcccagccccaacagacgctccagtccccagccctcccacccgcatcgatcgatgcgaggcacaatgccggccaccgactcctcctcctcgtcgtcgccggcggcggcgccgctgtcctctatcggccgctccatccgctcgctccgccgtgaccagaaccagatccactccttcccgccgccgccagacgccacagacgccttccagcgccgcgccgcccaactcctggccgacctcccggcagccgacgacgtcctctccctcgcctggacgcgccgcctcctcgaatccttcctcctctgcctcgaggagttccgcgccctgctcttcggctccggggactcgcccgccgctcgccccccgctcgaccgcctcgtcgccgacttctccgaccgcgccgtcaaggcgctcgacctctgcaacgccgtccgcgacggcctcgacctcgtccgccagtggcgcaagcacctcgccatcgccgcagccgtcctcgcctcgtcctctgattcctcctcgccgctcggggaggcccagatccgccgcgcccgcaaggcgctcaccgacctcaccatcctcatgctcgacgacagggacggcgggggcgtcgtcggccagcgcaaccgatccttcggccgcgccaacgagaagccccctcgccaccaccgccggagcagcagcggcgggagctccggctccggctccggctcccacctcaggtccctctcctggagcgtgtcccgggcctggtccgccgcgcgccagctgcaggccatcgggggaggactccccgtgccccgcccgcacgacaacgctgccacgggaggcctcgcctccgccgtctacaccatgggcgccgtcctcttcatcgtcgccttcgcgctcgtcgccgcaatcccgtgccaggaccgcggcctccacgcgcatttctccgtcatcaggaacctcccctgctcggcccccatcacaacgctctacgagcgcatcctcgacgagtccaagaagaaggaccgcaagaactcgtgcggcctgctcaaggagatccaccagattgagctctgctccaggcacctcatggagatcactgacgccgccgacttcccgttgcgcgaggacaaggacgccgtcttgcgggaggccgcgcaggacctagtgcacctgtgcgaatccatcaaggaagggctcgacccgctcgagcgccaggtcagagagatgttccacaggattgtgcgcacccgcacagaaatccttgactgcttgagtaagccacatggcaccgggtgatgggatacaggagattgccagcccgtttgcttgctgtgatgccccttaaccaaacattcttgtgaaatgcagcagcggtgttcagatgaggtagccttttctctgcataagttagcaactactgcatcatacaaatgcgtcttcatagaggcttgtccttctgtttgatataaattggtttgtttattatttttatttcatttcctcatctgtgtagattgtgaatccatacttggcagtgcttcgtagtc

SEQ ID NO: 24455 - protein, 445 aa, Zea mays subsp. mays
  peptide (1)..(445): Ceres Seq. ID no. 12410563
  misc_feature (85)..(438): Pfam Name: DUF793 Pfam Description: Protein of unknown function
  misc_feature (85)..(445): NCBI GI NO: 5777630 NR Description: CAA303718.1 protein [Oryza sativa]
  misc_feature (41)..(445): NCBI GI NO: 38345505 NR Description: OSJNBa0039K24.3
  misc_feature (52)..(444): NCBI GI NO: 21536674 NR Description: unknown [Arabidopsis thaliana]
  misc_feature (52)..(444): NCBI GI NO: 18410617 NR Description: expressed protein; protein id: At1g74450
  misc_feature (52)..(438): NCBI GI NO: 18394649 NR Description: expressed protein; protein id: At1g18740
  misc_feature (52)..(438): NCBI GI NO: 21593634 NR Description: unknown [Arabidopsis thaliana]
  misc_feature (78)..(440): NCBI GI NO: 15222577 NR Description: hypothetical protein; protein id: At1g63930.1
  misc_feature (194)..(440): NCBI GI NO: 15218428 NR Description: hypothetical protein; protein id: At1g43630.1
  misc_feature (101)..(440): NCBI GI NO: 15236522 NR Description: putative protein; protein id: At4g23530
  misc_feature (59)..(255): NCBI GI NO: 15218428 NR Description: hypothetical protein; protein id: At1g43630.1
VDLDSQRRRRPIKAIITQSPSPNRRSSPQPSHPHRSMRGTMPATDSSSSSSPAAAPLSSIGRSIRSLRRDQNQIHSFPPPPDATDAFQRRAAQLLADLPAADDVLSLAWTRRLLESFLLCLEEFRALLFGSGDSPAARPPLDRLVADFSDRAVKALDLCNAVRDGLDLVRQWRKHLAIAAAVLASSSDSSSPLGEAQIRRARKALTDLTILMLDDRDGGGVVGQRNRSFGRANEKPPRHHRRSSSGGSSGSGSGSHLRSLSWSVSRAWSAARQLQAIGGGLPVPRPHDNAATGGLASAVYTMGAVLFIVAFALVAAIPCQDRGLHAHFSVIRNLPCSAPITTLYERILDESKKKDRKNSCGLLKEIHQIELCSRHLMEITDAADFPLREDKDAVLREAAQDLVHLCESIKEGLDPLERQVREMFHRIVRTRTEILDCLSKPHGTG

SEQ ID NO: 24456 - protein, 409 aa, Zea mays subsp. mays
  peptide (1)..(409): Ceres Seq. ID no. 12410564
  misc_feature (49)..(402): Pfam Name: DUF793 Pfam Description: Protein of unknown function
  misc_feature (49)..(409): NCBI GI NO: 5777630 NR Description: CAA303718.1 protein [Oryza sativa]
  misc_feature (5)..(409): NCBI GI NO: 38345505 NR Description: OSJNBa0039K24.3
  misc_feature (16)..(408): NCBI GI NO: 21536674 NR Description: unknown [Arabidopsis thaliana]
  misc_feature (16)..(408): NCBI GI NO: 18410617 NR Description: expressed protein; protein id: At1g74450
  misc_feature (16)..(402): NCBI GI NO: 18394649 NR Description: expressed protein; protein id: At1g18740
  misc_feature (16)..(402): NCBI GI NO: 21593634 NR Description: unknown [Arabidopsis thaliana]
  misc_feature (42)..(404): NCBI GI NO: 15222577 NR Description: hypothetical protein; protein id: At1g63930.1
  misc_feature (158)..(404): NCBI GI NO: 15218428 NR Description: hypothetical protein; protein id: At1g43630.1
  misc_feature (65)..(404): NCBI GI NO: 15236522 NR Description: putative protein; protein id: At4g23530
  misc_feature (23)..(219): NCBI GI NO: 15218428 NR Description: hypothetical protein; protein id: At1g43630.1
MRGTMPATDSSSSSSPAAAPLSSIGRSIRSLRRDQNQIHSFPPPPDATDAFQRRAAQLLADLPAADDVLSLAWTRRLLESFLLCLEEFRALLFGSGDSPAARPPLDRLVADFSDRAVKALDLCNAVRDGLDLVRQWRKHLAIAAAVLASSSDSSSPLGEAQIRRARKALTDLTILMLDDRDGGGVVGQRNRSFGRANEKPPRHHRRSSSGGSSGSGSGSHLRSLSWSVSRAWSAARQLQAIGGGLPVPRPHDNAATGGLASAVYTMGAVLFIVAFALVAAIPCQDRGLHAHFSVIRNLPCSAPITTLYERILDESKKKDRKNSCGLLKEIHQIELCSRHLMEITDAADFPLREDKDAVLREAAQDLVHLCESIKEGLDPLERQVREMFHRIVRTRTEILDCLSKPHGTG

SEQ ID NO: 24457 - protein, 405 aa, Zea mays subsp. mays
  peptide (1)..(405): Ceres Seq. ID no. 12410565
  misc_feature (45)..(398): Pfam Name: DUF793 Pfam Description: Protein of unknown function
  misc_feature (45)..(405): NCBI GI NO: 5777630 NR Description: CAA303718.1 protein [Oryza sativa]
  misc_feature (1)..(405): NCBI GI NO: 38345505 NR Description: OSJNBa0039K24.3
  misc_feature (12)..(404): NCBI GI NO: 21536674 NR Description: unknown [Arabidopsis thaliana]
  misc_feature (12)..(404): NCBI GI NO: 18410617 NR Description: expressed protein; protein id: At1g74450
  misc_feature (12)..(398): NCBI GI NO: 18394649 NR Description: expressed protein; protein id: At1g18740
  misc_feature (12)..(398): NCBI GI NO: 21593634 NR Description: unknown [Arabidopsis thaliana]
  misc_feature (38)..(400): NCBI GI NO: 15222577 NR Description: hypothetical protein; protein id: At1g63930.1
  misc_feature (154)..(400): NCBI GI NO: 15218428 NR Description: hypothetical protein; protein id: At1g43630.1
  misc_feature (61)..(400): NCBI GI NO: 15236522 NR Description: putative protein; protein id: At4g23530
  misc_feature (19)..(215): NCBI GI NO: 15218428 NR Description: hypothetical protein; protein id: At1g43630.1
MPATDSSSSSSPAAAPLSSIGRSIRSLRRDQNQIHSFPPPPDATDAFQRRAAQLLADLPAADDVLSLAWTRRLLESFLLCLEEFRALLFGSGDSPAARPPLDRLVADFSDRAVKALDLCNAVRDGLDLVRQWRKHLAIAAAVLASSSDSSSPLGEAQIRRARKALTDLTILMLDDRDGGGVVGQRNRSFGRANEKPPRHHRRSSSGGSSGSGSGSHLRSLSWSVSRAWSAARQLQAIGGGLPVPRPHDNAATGGLASAVYTMGAVLFIVAFALVAAIPCQDRGLHAHFSVIRNLPCSAPITTLYERILDESKKKDRKNSCGLLKEIHQIELCSRHLMEITDAADFPLREDKDAVLREAAQDLVHLCESIKEGLDPLERQVREMFHRIVRTRTEILDCLSKPHGTG

SEQ ID NO: 24458 - DNA, 1299 bp, Zea mays subsp. mays
  misc_feature (1)..(1299): Ceres Seq. ID no. 13498950
aaaggatgctgagggctcatctcgctgcttctgaactgcaagtggatggaaatcggcccctgcacaagaaaactaccttccaactgaaagaggttagaggtcctaatcactcgcaaactctcaacaactacgcacgccttcctctgcctccgccggccggcacgatggcgtcaggcggcgagcccggggctccgaaggtcgtcctcctcctcgtcccccacgtggacgagtccttccacgccgctctgcgggcgcgcttccgcgtcctcgacttcttcgcctccccctcctcaggtgagccgctgccagccttcctcgvhgcggcggcggccgctccggagccccctcgcgccgccgtcgtggtgggcgcgggcccggcccgcgtgracrccgcgttcctcgacgccgtgccgtcgctccgctgcgtcttgtccctggcggcgggcgtggacttcatcgacctcggcgagtgcgcgcgccgcggcgtggccgtcgccaactccggcagcgtgttctcggccagacgtcgccgaccacgccgtcggcctgctcatcgacgtgctccgccgcgtgtcggccgccgagcggttcagtccgccgcggcctctggccggtgcagggtgaccacccgctcggctccaaggtcggtggcaggcgtgtgggcgtcgttggcttggggaacatcggctcgcagatcgcaaagaggctccaggctctcggctgcaccgtctgctaccactctagaacgcccagggactcggtcccttacagatacttcgccaacgtccgcgacctcgcggcggattccgacgtgctcgtcgtggcgtgcgcgctgaacgaggcgacgcggcacatcgtckgcagggacgtcctggaggcgctagggacggacggggtcgtcgtgaacatcagcaggggcgccaacgtcgacgaggccgagctggtcagggcgctcaaggagggcaggatcgccggcgccggcctcgatgtcttcgagagcgagcccggagcgcgccgcgagttcttctccatggacaacgtggtcatgacgcctcatgtggcggttttcacggcggagtccatgtcggacctgcgagaccacgccatcgccaacctcgaagcattcttctccggtcagccgttsttacgccggtgcctccctactcaccggtcaagtaggctgccaacgtgattgaagccagcggattattggctctgtttgtaacttcgcatcgtttaaaatgtctcgtataatacttgatttgttttttactgtcaatagatcgaaggtgaaaatcc

SEQ ID NO: 24459 - protein, 277 aa, Zea mays subsp. mays
  peptide (1)..(277): Ceres Seq. ID no. 15223055
  misc_feature (55)..(172): NCBI GI NO: 38345306 NR Description: OSJNBb0085F13.6
  misc_feature (58)..(173): NCBI GI NO: 21636166 NR Description: unknown [Aegilops tauschii]
  misc_feature (61)..(172): NCBI GI NO: 38345308 NR Description: OSJNBb0085F13.13
  misc_feature (60)..(172): NCBI GI NO: 15222015 NR Description: oxidoreductase family [Arabidopsis thaliana]
  misc_feature (64)..(172): NCBI GI NO: 7485630 NR Description: probable glycerate dehydrogenase
  misc_feature (67)..(172): NCBI GI NO: 15220005 NR Description: oxidoreductase family [Arabidopsis thaliana]
  misc_feature (68)..(173): NCBI GI NO: 23103901 NR Description: hypothetical protein [Azotobacter vinelandii]
  misc_feature (68)..(172): NCBI GI NO: 23104708 NR Description: hypothetical protein [Azotobacter vinelandii]
  misc_feature (128)..(172): NCBI GI NO: 22979887 NR Description: hypothetical protein [Ralstonia metallidurans]
  misc_feature (64)..(170): NCBI GI NO: 23102747 NR Description: hypothetical protein [Azotobacter vinelandii]
  misc_feature (106)..(106): Xaa is any aa, unknown or other
  misc_feature (129)..(129): Xaa is any aa, unknown or other
  misc_feature (130)..(130): Xaa is any aa, unknown or other
RMLRAHLAASELQVDGNRPLHKKTTFQLKEVRGPNHSQTLNNYARLPLPPPAGTMASGGEPGAPKVVLLLVPHVDESFHAALRARFRVLDFFASPSSGEPLPAFLXAAAAAPEPPRAAVVVGAGPARVXXAFLDAVPSLRCVLSLAAGVDFIDLGECARRGVAVANSGSVFSARRRRPRRRPAHRRAPPRVGRRAVQSAAASGRCRVTTRSAPRSVAGVWASLAWGTSARRSQRGSRLSAAPSATTLERPGTRSLTDTSPTSATSRRIPTCSSWRAR

SEQ ID NO: 24460 - protein, 276 aa, Zea mays subsp. mays
  peptide (1)..(276): Ceres Seq. ID no. 15223056
  misc_feature (54)..(171): NCBI GI NO: 38345306 NR Description: OSJNBb0085F13.6
  misc_feature (57)..(172): NCBI GI NO: 21636166 NR Description: unknown [Aegilops tauschii]
  misc_feature (60)..(171): NCBI GI NO: 38345308 NR Description: OSJNBb0085F13.13
  misc_feature (59)..(171): NCBI GI NO: 15222015 NR Description: oxidoreductase family [Arabidopsis thaliana]
  misc_feature (63)..(171): NCBI GI NO: 7485630 NR Description: probable glycerate dehydrogenase
  misc_feature (66)..(171): NCBI GI NO: 15220005 NR Description: oxidoreductase family [Arabidopsis thaliana]
  misc_feature (67)..(172): NCBI GI NO: 23103901 NR Description: hypothetical protein [Azotobacter vinelandii]
  misc_feature (67)..(171): NCBI GI NO: 23104708 NR Description: hypothetical protein [Azotobacter vinelandii]
  misc_feature (127)..(171): NCBI GI NO: 22979887 NR Description: hypothetical protein [Ralstonia metallidurans]
  misc_feature (63)..(169): NCBI GI NO: 23102747 NR Description: hypothetical protein [Azotobacter vinelandii]
  misc_feature (105)..(105): Xaa is any aa, unknown or other
  misc_feature (128)..(128): Xaa is any aa, unknown or other
  misc_feature (129)..(129): Xaa is any aa, unknown or other
MLRAHLAASELQVDGNRPLHKKTTFQLKEVRGPNHSQTLNNYARLPLPPPAGTMASGGEPGAPKVVLLLVPHVDESFHAALRARFRVLDFFASPSSGEPLPAFLXAAAAAPEPPRAAVVVGAGPARVXXAFLDAVPSLRCVLSLAAGVDFIDLGECARRGVAVANSGSVFSARRRRPRRRPAHRRAPPRVGRRAVQSAAASGRCRVTTRSAPRSVAGVWASLAWGTSARRSQRGSRLSAAPSATTLERPGTRSLTDTSPTSATSRRIPTCSSWRAR

SEQ ID NO: 24461 - protein, 223 aa, Zea mays subsp. mays
  peptide (1)..(223): Ceres Seq. ID no. 15223057
  misc_feature (1)..(118): NCBI GI NO: 38345306 NR Description: OSJNBb0085F13.6
  misc_feature (4)..(119): NCBI GI NO: 21636166 NR Description: unknown [Aegilops tauschii]
  misc_feature (7)..(118): NCBI GI NO: 38345308 NR Description: OSJNBb0085F13.13
  misc_feature (6)..(118): NCBI GI NO: 15222015 NR Description: oxidoreductase family [Arabidopsis thaliana]
  misc_feature (10)..(118): NCBI GI NO: 7485630 NR Description: probable glycerate dehydrogenase
  misc_feature (13)..(118): NCBI GI NO: 15220005 NR Description: oxidoreductase family [Arabidopsis thaliana]
  misc_feature (14)..(119): NCBI GI NO: 23103901 NR Description: hypothetical protein [Azotobacter vinelandii]
  misc_feature (14)..(118): NCBI GI NO: 23104708 NR Description: hypothetical protein [Azotobacter vinelandii]
  misc_feature (74)..(118): NCBI GI NO: 22979887 NR Description: hypothetical protein [Ralstonia metallidurans]
  misc_feature (10)..(116): NCBI GI NO: 23102747 NR Description: hypothetical protein [Azotobacter vinelandii]
  misc_feature (52)..(52): Xaa is any aa, unknown or other
  misc_feature (75)..(75): Xaa is any aa, unknown or other
  misc_feature (76)..(76): Xaa is any aa, unknown or other
MASGGEPGAPKVVLLLVPHVDESFHAALRARFRVLDFFASPSSGEPLPAFLXAAAAAPEPPRAAVVVGAGPARVXXAFLDAVPSLRCVLSLAAGVDFIDLGECARRGVAVANSGSVFSARRRRPRRRPAHRRAPPRVGRRAVQSAAASGRCRVTTRSAPRSVAGVWASLAWGTSARRSQRGSRLSAAPSATTLERPGTRSLTDTSPTSATSRRIPTCSSWRAR

SEQ ID NO: 24462 - DNA, 1522 bp, Zea mays subsp. mays
  misc_feature (1)..(1522): Ceres Seq. ID no. 12363287
gcacgagaccattacctagaacatcctaatcgaaaaaccactcgctgcctggttatggactccaccaggagcaaccaggtcgccggcagatgcaacagcaccatcgcgtcaagggctgccacggtcccgccgtcgctgaccatgccgcgcggcgaactcgctgacgccatcgtgggcggaggcggaggaggaggagcggacggggacccccgggccgccctcctccgtctgtctgctctcggggaccgcatggccgccgtccggggccgtatctgcgcctctatctcgggcgaagcccggcctctctcctacgccgacatccaatctgtctcctccgagatctccgccgctgcccagctcgtcgtcctcaacgccgccgagctcctcgcttcctccgtcccctttcccgccccacctccacctcctccttccgccgctccctctcccgctcccgtccgagagatcccagttgtggccgcttccgcccaagagcaacccctggaggccgccaaggacgacggtggctacgaggtcgtggagctcgacgccgccgagctgctagcggagcacgtccacttctgcgagatctgcggcaagggcttccgccgcgacgccaacctcaggatgcacatgcgcgcccacggcgaccgcttcaagaccctagacgcgctctcccgccctggtcacggccagccgaagccgcccgttggcagcaacgtgcgcttctcctgcccctttgcgggctgcaacaggaaccgcacacaccgccgcttccggccgctcaagtcggcggtgtgcgcgcggaaccacttccggcgcagccactgccccaagctctacgcctgcgagcgatgtggcggcaagaagcgcttcactgtcctggcggacctccgcagccacctccgccactgcggcgaggaggcacagtggcgctgctcctgcggcaccaccttctcccgcaaggacaagctcttcggtcatctagcgctctttgaaggccacacgccagcagttactaagccaaacaaggatgtggtgacagggcctacagagtccaccattgatgctatggaggaagggggatttgaagaaggcattcctgaccgggaggaggatgaagagggcggttatgatccagagttcttcaaggagtggatggatgagctcagaggtggtgctggtggctccaattggcctggaccagcagcagatggacattagcaatgttgcgagggttaataggatggtttgacaagggacatctgcttacatcaagtgaccaggaggatcaataaagactgaataaaggtgatagtaaagaaaagaggtgctttgggatagtttgtaggatttctctttaccattgtgtttgtgcgttcgttctaaccagtagcttgtatggtatggtgtgcgtgtgttgtttagttgctgttcactgggcctctcccttgccattctcggttgctttcatgttatcctgtgaatttgtgatctaccaggtaatacagtggagaaatgtgtc

SEQ ID NO: 24463 - protein, 406 aa, Zea mays subsp. mays
  peptide (1)..(406): Ceres Seq. ID no. 12363288
  misc_feature (192)..(214): Pfam Name: Pfam Description:  Zinc finger, C2H2 type
  misc_feature (174)..(400): NCBI GI NO: 34908682 NR Description: putative zinc finger protein
  misc_feature (141)..(360): NCBI GI NO: 38346456 NR Description: OSJNBa0019G23.4
  misc_feature (174)..(361): NCBI GI NO: 21593564 NR Description: zinc finger protein, putative
  misc_feature (141)..(355): NCBI GI NO: 10241636 NR Description: putative zinc finger protein
  misc_feature (174)..(361): NCBI GI NO: 15218606 NR Description: zinc finger protein, putative
  misc_feature (168)..(344): NCBI GI NO: 28376689 NR Description: putative zinc finger protein
  misc_feature (174)..(337): NCBI GI NO: 10177236 NR Description: contains similarity to C2H2-type zinc fingerprotein~gene_id:MRN17
  misc_feature (174)..(337): NCBI GI NO: 30688719 NR Description: expressed protein [Arabidopsis thaliana]
  misc_feature (141)..(374): NCBI GI NO: 33146841 NR Description: zinc finger protein-like protein
  misc_feature (147)..(387): NCBI GI NO: 34907180 NR Description: putative zinc finger protein
ARDHYLEHPNRKTTRCLVMDSTRSNQVAGRCNSTIASRAATVPPSLTMPRGELADAIVGGGGGGGADGDPRAALLRLSALGDRMAAVRGRICASISGEARPLSYADIQSVSSEISAAAQLVVLNAAELLASSVPFPAPPPPPPSAAPSPAPVREIPVVAASAQEQPLEAAKDDGGYEVVELDAAELLAEHVHFCEICGKGFRRDANLRMHMRAHGDRFKTLDALSRPGHGQPKPPVGSNVRFSCPFAGCNRNRTHRRFRPLKSAVCARNHFRRSHCPKLYACERCGGKKRFTVLADLRSHLRHCGEEAQWRCSCGTTFSRKDKLFGHLALFEGHTPAVTKPNKDVVTGPTESTIDAMEEGGFEEGIPDREEDEEGGYDPEFFKEWMDELRGGAGGSNWPGPAADGH

SEQ ID NO: 24464 - protein, 388 aa, Zea mays subsp. mays
  peptide (1)..(388): Ceres Seq. ID no. 12363289
  misc_feature (174)..(196): Pfam Name: Pfam Description:  Zinc finger, C2H2 type
  misc_feature (156)..(382): NCBI GI NO: 34908682 NR Description: putative zinc finger protein
  misc_feature (123)..(342): NCBI GI NO: 38346456 NR Description: OSJNBa0019G23.4
  misc_feature (156)..(343): NCBI GI NO: 21593564 NR Description: zinc finger protein, putative
  misc_feature (123)..(337): NCBI GI NO: 10241636 NR Description: putative zinc finger protein
  misc_feature (156)..(343): NCBI GI NO: 15218606 NR Description: zinc finger protein, putative
  misc_feature (150)..(326): NCBI GI NO: 28376689 NR Description: putative zinc finger protein
  misc_feature (156)..(319): NCBI GI NO: 10177236 NR Description: contains similarity to C2H2-type zinc fingerprotein~gene_id:MRN17
  misc_feature (156)..(319): NCBI GI NO: 30688719 NR Description: expressed protein [Arabidopsis thaliana]
  misc_feature (123)..(356): NCBI GI NO: 33146841 NR Description: zinc finger protein-like protein
  misc_feature (129)..(369): NCBI GI NO: 34907180 NR Description: putative zinc finger protein
MDSTRSNQVAGRCNSTIASRAATVPPSLTMPRGELADAIVGGGGGGGADGDPRAALLRLSALGDRMAAVRGRICASISGEARPLSYADIQSVSSEISAAAQLVVLNAAELLASSVPFPAPPPPPPSAAPSPAPVREIPVVAASAQEQPLEAAKDDGGYEVVELDAAELLAEHVHFCEICGKGFRRDANLRMHMRAHGDRFKTLDALSRPGHGQPKPPVGSNVRFSCPFAGCNRNRTHRRFRPLKSAVCARNHFRRSHCPKLYACERCGGKKRFTVLADLRSHLRHCGEEAQWRCSCGTTFSRKDKLFGHLALFEGHTPAVTKPNKDVVTGPTESTIDAMEEGGFEEGIPDREEDEEGGYDPEFFKEWMDELRGGAGGSNWPGPAADGH

SEQ ID NO: 24465 - protein, 359 aa, Zea mays subsp. mays
  peptide (1)..(359): Ceres Seq. ID no. 12363290
  misc_feature (145)..(167): Pfam Name: Pfam Description:  Zinc finger, C2H2 type
  misc_feature (127)..(353): NCBI GI NO: 34908682 NR Description: putative zinc finger protein
  misc_feature (94)..(313): NCBI GI NO: 38346456 NR Description: OSJNBa0019G23.4
  misc_feature (127)..(314): NCBI GI NO: 21593564 NR Description: zinc finger protein, putative
  misc_feature (94)..(308): NCBI GI NO: 10241636 NR Description: putative zinc finger protein
  misc_feature (127)..(314): NCBI GI NO: 15218606 NR Description: zinc finger protein, putative
  misc_feature (121)..(297): NCBI GI NO: 28376689 NR Description: putative zinc finger protein
  misc_feature (127)..(290): NCBI GI NO: 10177236 NR Description: contains similarity to C2H2-type zinc fingerprotein~gene_id:MRN17
  misc_feature (127)..(290): NCBI GI NO: 30688719 NR Description: expressed protein [Arabidopsis thaliana]
  misc_feature (94)..(327): NCBI GI NO: 33146841 NR Description: zinc finger protein-like protein
  misc_feature (100)..(340): NCBI GI NO: 34907180 NR Description: putative zinc finger protein
MPRGELADAIVGGGGGGGADGDPRAALLRLSALGDRMAAVRGRICASISGEARPLSYADIQSVSSEISAAAQLVVLNAAELLASSVPFPAPPPPPPSAAPSPAPVREIPVVAASAQEQPLEAAKDDGGYEVVELDAAELLAEHVHFCEICGKGFRRDANLRMHMRAHGDRFKTLDALSRPGHGQPKPPVGSNVRFSCPFAGCNRNRTHRRFRPLKSAVCARNHFRRSHCPKLYACERCGGKKRFTVLADLRSHLRHCGEEAQWRCSCGTTFSRKDKLFGHLALFEGHTPAVTKPNKDVVTGPTESTIDAMEEGGFEEGIPDREEDEEGGYDPEFFKEWMDELRGGAGGSNWPGPAADGH

SEQ ID NO: 24466 - DNA, 1409 bp, Zea mays subsp. mays
  misc_feature (1)..(1409): Ceres Seq. ID no. 12373843
gaaaaaaaaaggcaccaagggagaatcagcaagacgacaccatggcagcggcgctctacggcaacggcagctcgacgagcggcggtggcggcgcccgtggccgcgggaagcccatcacatgcaaagcggcggtggcgtggggtcccggagtgccgctgtcgctggaggaggtcgaggtggcgccgcctggtcccatggaggtccgcgtcaaggtgctcttcacctccatctgccacaccgacctcagcgcctggaagggagagtgcgaggcgcagcgcaaataccctcgcatcttgggccatgaggcagccggagtggtagagagcgtgggcgaaggagtagaaggcctcgcccctggagaccacgtcgttccgatcttcaccggggagtgcgagaaatgcgtgtactgcaagtcggacaagacaaacctgtgtggaacctaccgtgtggatcctttgaagagcagcatggtctacgacgacggcacgaggttctccgtggtggaccagccgtcaggccagcggcggccggtgtaccacttcctcaacacctccaccttcaccgagtacaccgtgcttgacgcggcatgtgccgtcaaaatcaaccctgaggccccgctgcagaggatgtgcctcctcagctgcggcatctccacaggagtgggagctgcgtggaacactgcaaacgtttctgctcggtccaccgttgcagtgtttggactcggcgctgttggtcttgctgtagctgaaggtgccaggctacgaggggcaactcggatcatcggcgtggacgtaaacccttcaaagttcaccaaaggtaaagagatggggataacagacttcatcgaccctaacgacatctgtgacaaaccggtccatgaggtgatcagggagatgactgacggaggtgtcgactacagcttcgagtgtaccgggataaatgatgtgctgagagaggccttcttgtccacgcatgatggttggggcctgacggtggtgctagggatccattcaacgcccaagatggtgccgctgcacccgatggagctctacagccgtaggatcaccggctgcgtctttggcgacttcaagggcaagtcccagctgcccgacctcgtcgataagtgcgtcaacggggaggtcaatataaacttcgatggcttcataacacacaagatgccattctcgtacatcaacaaggctttccggttactcgaggaaggcaagtcgctgaggtgcctgctcagtctctgatcgacaatacttcatcagcgaggacagttttggattattgagtagcaaaataaatgtacaaggaaagtttttccctagtacattcgcttcttataaaacgaatgcatgcaacttctttcgttctttgaagaagacaaaagggcacaattattctgg

SEQ ID NO: 24467 - protein, 416 aa, Zea mays subsp. mays
  peptide (1)..(416): Ceres Seq. ID no. 12373844
  misc_feature (31)..(416): NCBI GI NO: 18398586 NR Description: alcohol dehydrogenase, putative
  misc_feature (31)..(416): NCBI GI NO: 21592656 NR Description: alcohol dehydrogenase, putative
  misc_feature (34)..(416): NCBI GI NO: 15217715 NR Description: alcohol dehydrogenase, putative
  misc_feature (34)..(416): NCBI GI NO: 25283039 NR Description: alcohol dehydrogenase (EC 1.-.-.-)
  misc_feature (35)..(416): NCBI GI NO: 113363 NR Description: ALCOHOL DEHYDROGENASE 1
  misc_feature (35)..(416): NCBI GI NO: 7427629 NR Description: alcohol dehydrogenase (EC 1.1.1.1) - potato
  misc_feature (35)..(416): NCBI GI NO: 113379 NR Description: ALCOHOL DEHYDROGENASE 2
  misc_feature (35)..(416): NCBI GI NO: 113386 NR Description: ALCOHOL DEHYDROGENASE 3
  misc_feature (35)..(416): NCBI GI NO: 113365 NR Description: Alcohol dehydrogenase 1
  misc_feature (35)..(416): NCBI GI NO: 1362105 NR Description: alcohol dehydrogenase (EC 1
KKKAPRENQQDDTMAAALYGNGSSTSGGGGARGRGKPITCKAAVAWGPGVPLSLEEVEVAPPGPMEVRVKVLFTSICHTDLSAWKGECEAQRKYPRILGHEAAGVVESVGEGVEGLAPGDHVVPIFTGECEKCVYCKSDKTNLCGTYRVDPLKSSMVYDDGTRFSVVDQPSGQRRPVYHFLNTSTFTEYTVLDAACAVKINPEAPLQRMCLLSCGISTGVGAAWNTANVSARSTVAVFGLGAVGLAVAEGARLRGATRIIGVDVNPSKFTKGKEMGITDFIDPNDICDKPVHEVIREMTDGGVDYSFECTGINDVLREAFLSTHDGWGLTVVLGIHSTPKMVPLHPMELYSRRITGCVFGDFKGKSQLPDLVDKCVNGEVNINFDGFITHKMPFSYINKAFRLLEEGKSLRCLLSL

SEQ ID NO: 24468 - protein, 403 aa, Zea mays subsp. mays
  peptide (1)..(403): Ceres Seq. ID no. 12373845
  misc_feature (18)..(403): NCBI GI NO: 18398586 NR Description: alcohol dehydrogenase, putative
  misc_feature (18)..(403): NCBI GI NO: 21592656 NR Description: alcohol dehydrogenase, putative
  misc_feature (21)..(403): NCBI GI NO: 15217715 NR Description: alcohol dehydrogenase, putative
  misc_feature (21)..(403): NCBI GI NO: 25283039 NR Description: alcohol dehydrogenase (EC 1.-.-.-)
  misc_feature (22)..(403): NCBI GI NO: 113363 NR Description: ALCOHOL DEHYDROGENASE 1
  misc_feature (22)..(403): NCBI GI NO: 7427629 NR Description: alcohol dehydrogenase (EC 1.1.1.1) - potato
  misc_feature (22)..(403): NCBI GI NO: 113379 NR Description: ALCOHOL DEHYDROGENASE 2
  misc_feature (22)..(403): NCBI GI NO: 113386 NR Description: ALCOHOL DEHYDROGENASE 3
  misc_feature (22)..(403): NCBI GI NO: 113365 NR Description: Alcohol dehydrogenase 1
  misc_feature (22)..(403): NCBI GI NO: 1362105 NR Description: alcohol dehydrogenase (EC 1
MAAALYGNGSSTSGGGGARGRGKPITCKAAVAWGPGVPLSLEEVEVAPPGPMEVRVKVLFTSICHTDLSAWKGECEAQRKYPRILGHEAAGVVESVGEGVEGLAPGDHVVPIFTGECEKCVYCKSDKTNLCGTYRVDPLKSSMVYDDGTRFSVVDQPSGQRRPVYHFLNTSTFTEYTVLDAACAVKINPEAPLQRMCLLSCGISTGVGAAWNTANVSARSTVAVFGLGAVGLAVAEGARLRGATRIIGVDVNPSKFTKGKEMGITDFIDPNDICDKPVHEVIREMTDGGVDYSFECTGINDVLREAFLSTHDGWGLTVVLGIHSTPKMVPLHPMELYSRRITGCVFGDFKGKSQLPDLVDKCVNGEVNINFDGFITHKMPFSYINKAFRLLEEGKSLRCLLSL

SEQ ID NO: 24469 - protein, 352 aa, Zea mays subsp. mays
  peptide (1)..(352): Ceres Seq. ID no. 12373846
  misc_feature (1)..(352): NCBI GI NO: 18398586 NR Description: alcohol dehydrogenase, putative
  misc_feature (1)..(352): NCBI GI NO: 21592656 NR Description: alcohol dehydrogenase, putative
  misc_feature (1)..(352): NCBI GI NO: 15217715 NR Description: alcohol dehydrogenase, putative
  misc_feature (1)..(352): NCBI GI NO: 25283039 NR Description: alcohol dehydrogenase (EC 1.-.-.-)
  misc_feature (1)..(352): NCBI GI NO: 113363 NR Description: ALCOHOL DEHYDROGENASE 1
  misc_feature (1)..(352): NCBI GI NO: 7427629 NR Description: alcohol dehydrogenase (EC 1.1.1.1) - potato
  misc_feature (1)..(352): NCBI GI NO: 113379 NR Description: ALCOHOL DEHYDROGENASE 2
  misc_feature (1)..(352): NCBI GI NO: 113386 NR Description: ALCOHOL DEHYDROGENASE 3
  misc_feature (1)..(352): NCBI GI NO: 113365 NR Description: Alcohol dehydrogenase 1
  misc_feature (1)..(352): NCBI GI NO: 1362105 NR Description: alcohol dehydrogenase (EC 1
MEVRVKVLFTSICHTDLSAWKGECEAQRKYPRILGHEAAGVVESVGEGVEGLAPGDHVVPIFTGECEKCVYCKSDKTNLCGTYRVDPLKSSMVYDDGTRFSVVDQPSGQRRPVYHFLNTSTFTEYTVLDAACAVKINPEAPLQRMCLLSCGISTGVGAAWNTANVSARSTVAVFGLGAVGLAVAEGARLRGATRIIGVDVNPSKFTKGKEMGITDFIDPNDICDKPVHEVIREMTDGGVDYSFECTGINDVLREAFLSTHDGWGLTVVLGIHSTPKMVPLHPMELYSRRITGCVFGDFKGKSQLPDLVDKCVNGEVNINFDGFITHKMPFSYINKAFRLLEEGKSLRCLLSL

SEQ ID NO: 24470 - DNA, 1170 bp, Zea mays subsp. mays
  misc_feature (1)..(1170): Ceres Seq. ID no. 13498830
gccatttttggtgagtgcgccctttcccttcctccccagatccccgtccccgttttccacttttgcctccgccccaattcggataacaaacccctccgcctcgtcgcgtctcctcccagccgagccgatccggtagagagagggagagggagggactgagggaggaggagctgggttccggtcccggccgcccggccggctgcgcgattcgattgcagctctcgtccccgggcggcgtccaggatggtgcggggcaagacgcagatgaagcggatagagaacccgaccagccgccaggtcaccttctccaagcgccgcaacggcctgctcaagaaggcgttcgagctctccgtcctctgcgacgccgaggtcgccctcgtcgtcttctccccgcgcggcaagctctacgaattcgccagcggaagtgcgcagaaaacgattgaacgttatagaacatacacaaaggataatgtcagcaacaagacagtgcagcaggatattgagcgagtaaaagctgatgcggatggcctgtcaaagagactcgaagcacttgaagcttacaaaaggaaacttttgggtgagaggttggaagactgctccattgaagagctgcacagtttggaagtcaagcttgagaagagcctgcattgcatcaggggaagaaagactgagctgctggaggagcaagtccgtaagctgaagcagaaggagatgagtctgcgcaagagcaacgaagatttgcgtgaaaagtgcaagaagcagccgcctgtgccgatggcttcggcgccgcctcgtgcgccggcagtcgacaacgtggaggacggtcaccgggagccgaaggacgacgggatggacgtggagacggagctgtacataggattgcccggcagagactaccgctcaagcaaagacaaggctgcagtggcggtcaggtcaggctagcagctacctcagccacgcacaggcccaatcaacgcaagctagctagctgagaataatcttttagatctctggtagtgtggagatcgagatgcaagccaagcaatgtgatatcgcgttgtgtgttaccaacctgtcagtctgtgtatcatcccgtcccgtccgtcagagtctcagagaacgaacacttcttctccttctccctgtagctagctgctcctgcttgtgtcc

SEQ ID NO: 24471 - protein, 232 aa, Zea mays subsp. mays
  peptide (1)..(232): Ceres Seq. ID no. 13498831
  misc_feature (74)..(172): Pfam Name: Pfam Description:  K-box region
  misc_feature (1)..(232): NCBI GI NO: 12002139 NR Description: MADS box protein 1 [Zea mays]
  misc_feature (1)..(221): NCBI GI NO: 5295990 NR Description: MADS box-like protein
  misc_feature (1)..(224): NCBI GI NO: 5051933 NR Description: MADS-box protein FDRMADS8 [Oryza sativa]
  misc_feature (1)..(224): NCBI GI NO: 33621123 NR Description: transcription factor MADS56
  misc_feature (1)..(224): NCBI GI NO: 37536442 NR Description: putative transcription factor
  misc_feature (1)..(216): NCBI GI NO: 6635740 NR Description: agamous-like MADS box protein OPMADS1
  misc_feature (1)..(214): NCBI GI NO: 15225534 NR Description: MADS-box protein (AGL20) [Arabidopsis thaliana]
  misc_feature (1)..(214): NCBI GI NO: 30171309 NR Description: MADS-box protein [Cardamine flexuosa]
  misc_feature (1)..(214): NCBI GI NO: 7446552 NR Description: MADS box protein A - white mustard
  misc_feature (1)..(214): NCBI GI NO: 33771690 NR Description: MADS-box protein [Brassica rapa]
MVRGKTQMKRIENPTSRQVTFSKRRNGLLKKAFELSVLCDAEVALVVFSPRGKLYEFASGSAQKTIERYRTYTKDNVSNKTVQQDIERVKADADGLSKRLEALEAYKRKLLGERLEDCSIEELHSLEVKLEKSLHCIRGRKTELLEEQVRKLKQKEMSLRKSNEDLREKCKKQPPVPMASAPPRAPAVDNVEDGHREPKDDGMDVETELYIGLPGRDYRSSKDKAAVAVRSG

SEQ ID NO: 24472 - protein, 225 aa, Zea mays subsp. mays
  peptide (1)..(225): Ceres Seq. ID no. 13498832
  misc_feature (67)..(165): Pfam Name: Pfam Description:  K-box region
  misc_feature (1)..(225): NCBI GI NO: 12002139 NR Description: MADS box protein 1 [Zea mays]
  misc_feature (1)..(214): NCBI GI NO: 5295990 NR Description: MADS box-like protein
  misc_feature (1)..(217): NCBI GI NO: 5051933 NR Description: MADS-box protein FDRMADS8 [Oryza sativa]
  misc_feature (1)..(217): NCBI GI NO: 33621123 NR Description: transcription factor MADS56
  misc_feature (1)..(217): NCBI GI NO: 37536442 NR Description: putative transcription factor
  misc_feature (1)..(209): NCBI GI NO: 6635740 NR Description: agamous-like MADS box protein OPMADS1
  misc_feature (1)..(207): NCBI GI NO: 15225534 NR Description: MADS-box protein (AGL20) [Arabidopsis thaliana]
  misc_feature (1)..(207): NCBI GI NO: 30171309 NR Description: MADS-box protein [Cardamine flexuosa]
  misc_feature (1)..(207): NCBI GI NO: 7446552 NR Description: MADS box protein A - white mustard
  misc_feature (1)..(207): NCBI GI NO: 33771690 NR Description: MADS-box protein [Brassica rapa]
MKRIENPTSRQVTFSKRRNGLLKKAFELSVLCDAEVALVVFSPRGKLYEFASGSAQKTIERYRTYTKDNVSNKTVQQDIERVKADADGLSKRLEALEAYKRKLLGERLEDCSIEELHSLEVKLEKSLHCIRGRKTELLEEQVRKLKQKEMSLRKSNEDLREKCKKQPPVPMASAPPRAPAVDNVEDGHREPKDDGMDVETELYIGLPGRDYRSSKDKAAVAVRSG

SEQ ID NO: 24473 - DNA, 1017 bp, Zea mays subsp. mays
  misc_feature (1)..(1017): Ceres Seq. ID no. 12402465
aacccggctggagctcagcctcagctagcctggggaccgctgcacgaacagtagtccttcctcctcctataaagtaaccacacgacccgcctcctacccatccaccagcagctgaggtcgtcggccatggcggagcgggagcagcaagagcaggtggctagcgacgacgcggcggagtggaagcaggtggcggagctgagggccgtcacccaggcccaggacccttcctgcaaggatgaggacgactacacgctccggcgcttcctccgcgcgcgggaccacaacatcggcaaggcgtcggcgatgctgctcaagtacctcaagtggaagcccgcggccaagccccacggcgccatcgcagcggcggaggtggcgcgggaggcggcgcaggggaagctctacctgcagggccacgaccgggagggccgccccctcatctacggcttcggcgcgcgccaccacccggcgcgcagggacctcgacgagttcaagcgctacgtcgtccacgtcctcgacgccaccgtcgcgcgcctgccccctccccctccgggagatggtcgccaggagaagttcgccgccgtcgccgacctcgccggctggggctacgccaactgcgacatccgaggctacctggcggcgctcgacatcatgcagagctactacccggagcgcctcgcccgcgtcttcctcgtccacgtgccctacgtcttcatggccgcctggaagatcgtctacccttttatcgacgacaacaccaagaagaagttcgtcttcgtgccggacaaggacctggacaggacgctccgcgaggccatcgacgactcccagctgccggagatctatggtggcaagctcaagctcgtcacgccggccgcaaaattaccaagccactagctagggggcccggtgcatgacgattgtacgagttcttaactctcactggtatatcaccatccctagccggccgcattgattggggatgcaaaacctaccaaaagataagttcacaagttacat

SEQ ID NO: 24474 - protein, 255 aa, Zea mays subsp. mays
  peptide (1)..(255): Ceres Seq. ID no. 12402466
  misc_feature (90)..(243): Pfam Name: Pfam Description:  CRAL/TRIO domain
  misc_feature (3)..(248): NCBI GI NO: 27573358 NR Description: putative phosphatidylinositol/phosphatidylcholinetransfer protein
  misc_feature (6)..(246): NCBI GI NO: 7488696 NR Description: polyphosphoinositide binding protein Ssh2
  misc_feature (17)..(247): NCBI GI NO: 34907052 NR Description: sec14 like protein
  misc_feature (1)..(246): NCBI GI NO: 15223439 NR Description: SEC14 cytosolic factor, putative
  misc_feature (17)..(247): NCBI GI NO: 2286121 NR Description: sec14 like protein [Oryza sativa]
  misc_feature (1)..(246): NCBI GI NO: 17226662 NR Description: polyphosphoinositide binding protein
  misc_feature (54)..(246): NCBI GI NO: 19347976 NR Description: putative polyphosphoinositide binding protein
  misc_feature (36)..(245): NCBI GI NO: 30684014 NR Description: SEC14 cytosolic factor, putative
  misc_feature (36)..(245): NCBI GI NO: 25402783 NR Description: protein F10B6.22 [imported] - Arabidopsis thaliana
  misc_feature (40)..(242): NCBI GI NO: 34903076 NR Description: unnamed protein product
MAEREQQEQVASDDAAEWKQVAELRAVTQAQDPSCKDEDDYTLRRFLRARDHNIGKASAMLLKYLKWKPAAKPHGAIAAAEVAREAAQGKLYLQGHDREGRPLIYGFGARHHPARRDLDEFKRYVVHVLDATVARLPPPPPGDGRQEKFAAVADLAGWGYANCDIRGYLAALDIMQSYYPERLARVFLVHVPYVFMAAWKIVYPFIDDNTKKKFVFVPDKDLDRTLREAIDDSQLPEIYGGKLKLVTPAAKLPSH

SEQ ID NO: 24475 - protein, 220 aa, Zea mays subsp. mays
  peptide (1)..(220): Ceres Seq. ID no. 12402467
  misc_feature (3)..(220): Pfam Name: Pfam Description:  Equine herpesvirus glycoprotein gp2
  misc_feature (1)..(215): NCBI GI NO: 13592175 NR Description: ppg3 [Leishmania major]
  misc_feature (1)..(220): NCBI GI NO: 13592175 NR Description: ppg3 [Leishmania major]
  misc_feature (1)..(215): NCBI GI NO: 13592175 NR Description: ppg3 [Leishmania major]
  misc_feature (1)..(210): NCBI GI NO: 13592175 NR Description: ppg3 [Leishmania major]
  misc_feature (1)..(210): NCBI GI NO: 13592175 NR Description: ppg3 [Leishmania major]
  misc_feature (1)..(220): NCBI GI NO: 13592175 NR Description: ppg3 [Leishmania major]
  misc_feature (1)..(220): NCBI GI NO: 13592175 NR Description: ppg3 [Leishmania major]
  misc_feature (1)..(210): NCBI GI NO: 13592175 NR Description: ppg3 [Leishmania major]
  misc_feature (1)..(215): NCBI GI NO: 13592175 NR Description: ppg3 [Leishmania major]
  misc_feature (1)..(210): NCBI GI NO: 13592175 NR Description: ppg3 [Leishmania major]
MRTTTRSGASSARGTTTSARRRRCCSSTSSGSPRPSPTAPSQRRRWRGRRRRGSSTCRATTGRAAPSSTASARATTRRAGTSTSSSATSSTSSTPPSRACPLPLREMVARRSSPPSPTSPAGATPTATSEATWRRSTSCRATTRSASPASSSSTCPTSSWPPGRSSTLLSTTTPRRSSSSCRTRTWTGRSARPSTTPSCRRSMVASSSSSRRPQNYQATS

SEQ ID NO: 24476 - protein, 196 aa, Zea mays subsp. mays
  peptide (1)..(196): Ceres Seq. ID no. 12402468
  misc_feature (31)..(184): Pfam Name: Pfam Description:  CRAL/TRIO domain
  misc_feature (1)..(189): NCBI GI NO: 27573358 NR Description: putative phosphatidylinositol/phosphatidylcholinetransfer protein
  misc_feature (1)..(187): NCBI GI NO: 7488696 NR Description: polyphosphoinositide binding protein Ssh2
  misc_feature (1)..(188): NCBI GI NO: 34907052 NR Description: sec14 like protein
  misc_feature (1)..(187): NCBI GI NO: 15223439 NR Description: SEC14 cytosolic factor, putative
  misc_feature (1)..(188): NCBI GI NO: 2286121 NR Description: sec14 like protein [Oryza sativa]
  misc_feature (1)..(187): NCBI GI NO: 17226662 NR Description: polyphosphoinositide binding protein
  misc_feature (1)..(187): NCBI GI NO: 19347976 NR Description: putative polyphosphoinositide binding protein
  misc_feature (1)..(186): NCBI GI NO: 30684014 NR Description: SEC14 cytosolic factor, putative
  misc_feature (1)..(186): NCBI GI NO: 25402783 NR Description: protein F10B6.22 [imported] - Arabidopsis thaliana
  misc_feature (1)..(183): NCBI GI NO: 34903076 NR Description: unnamed protein product
MLLKYLKWKPAAKPHGAIAAAEVAREAAQGKLYLQGHDREGRPLIYGFGARHHPARRDLDEFKRYVVHVLDATVARLPPPPPGDGRQEKFAAVADLAGWGYANCDIRGYLAALDIMQSYYPERLARVFLVHVPYVFMAAWKIVYPFIDDNTKKKFVFVPDKDLDRTLREAIDDSQLPEIYGGKLKLVTPAAKLPSH

SEQ ID NO: 24477 - DNA, 1367 bp, Zea mays subsp. mays
  misc_feature (1)..(1367): Ceres Seq. ID no. 12366910
aaatcatacgtgtagtgatagccatgaggtctcttctccacaccaccaatagcagtagcccgccccctggcagcagcaggaagcagcagcactgcggcagcagatgcttcgtcgtatcccttctcctggtcctgctagctcttgtagcctcggacgtgtatctcagcttcccaaaccgacgacgggttcttccattgttcccccagcagcttttgtctcgcagacagcagcgaggcggcgagggcggctgtgacattttcaggggcgagtgggtgccggacccggacgcgccctactacaccaacgacacctgcaaggtgatccacgagcactacgactgtatggggtacggcaagccggacctgggctttgtcaactggaggtggcagcctgacggctgcgaccttccccgcttcaacccatggcgcttcctccacatgatgaggggcaagacccttgccttcgttggcgactccctcggcaggaaccacaaggactcgctcatctgcctcttgaccacagtcgcggagcctacgacgagctggccgagcagcaagcacaccgtgtactactacgccgactacaacttcaccgtggcccacttctgggcgccgtaccttgtccggcacgagcagatcgacgaggacgggccagcgcacacgggcgtctggaacctctacctggacgagccggacggcgtgtgggcggcgcacgtcgcggagttcgactacgccgtcgtgtccgcgtccagctggttctaccgcccctccatgctgtacgaggccggccggctcgtcggctgccactactgccggctgcccaacgtcaccgacctcacgctgcgctacgcgctgcgcatggccacgcgggccgcgctgcgggcgctgtccggcgccgacggccgcttccgcggcacggccctgctgcgcaccgtggacccgtcgcagtacgagggcggggagtggaacgaggacggcaactgcatccggacggcgccgttccggcgtggccagaacgcggtccagggcctcgagcgtgagttccgcacgctgcagctggaggagttcgcgtcggtggcgaaggcggcgacggacagtggcggtaaggtgaggatgctgctgatggacaccacggaagccatgatactgcgtgcggacgcgcacccgagcaagtaccgggggtggacgccggagaagcacttcaccctgcacaacgactgcgtgcactggtgcctgcccggggccattgatgcgtggaacgacatgctgcttcatatgttgaaatgatcatcagtaattttaattaataatgccaaaccagtgtggctgtgtagtgtgtacaatatggtgctccctccgttgacaagt

SEQ ID NO: 24478 - protein, 427 aa, Zea mays subsp. mays
  peptide (1)..(427): Ceres Seq. ID no. 12366911
  misc_feature (252)..(426): Pfam Name: Pfam Description:  Arabidopsis proteins of unknown function
  misc_feature (38)..(426): NCBI GI NO: 34898638 NR Description: contains ESTsAU089699
  misc_feature (83)..(426): NCBI GI NO: 34911880 NR Description: OSJNBb0032K15.17
  misc_feature (83)..(426): NCBI GI NO: 34911888 NR Description: OSJNBb0032K15.21
  misc_feature (83)..(427): NCBI GI NO: 15237213 NR Description: putative protein; protein id: At5g15900.1
  misc_feature (72)..(427): NCBI GI NO: 15237211 NR Description: putative protein; protein id: At5g15890.1
  misc_feature (83)..(426): NCBI GI NO: 30678135 NR Description: expressed protein [Arabidopsis thaliana]
  misc_feature (68)..(427): NCBI GI NO: 15232914 NR Description: hypothetical protein; protein id: At3g28150
  misc_feature (87)..(426): NCBI GI NO: 34898640 NR Description: hypothetical protein~similar to Oryza sativachromosome 1
  misc_feature (14)..(423): NCBI GI NO: 28393189 NR Description: unknown protein [Arabidopsis thaliana]
  misc_feature (14)..(423): NCBI GI NO: 15234058 NR Description: hypothetical protein; protein id: At4g01080.1
IIRVVIAMRSLLHTTNSSSPPPGSSRKQQHCGSRCFVVSLLLVLLALVASDVYLSFPNRRRVLPLFPQQLLSRRQQRGGEGGCDIFRGEWVPDPDAPYYTNDTCKVIHEHYDCMGYGKPDLGFVNWRWQPDGCDLPRFNPWRFLHMMRGKTLAFVGDSLGRNHKDSLICLLTTVAEPTTSWPSSKHTVYYYADYNFTVAHFWAPYLVRHEQIDEDGPAHTGVWNLYLDEPDGVWAAHVAEFDYAVVSASSWFYRPSMLYEAGRLVGCHYCRLPNVTDLTLRYALRMATRAALRALSGADGRFRGTALLRTVDPSQYEGGEWNEDGNCIRTAPFRRGQNAVQGLEREFRTLQLEEFASVAKAATDSGGKVRMLLMDTTEAMILRADAHPSKYRGWTPEKHFTLHNDCVHWCLPGAIDAWNDMLLHMLK

SEQ ID NO: 24479 - protein, 420 aa, Zea mays subsp. mays
  peptide (1)..(420): Ceres Seq. ID no. 12366912
  misc_feature (245)..(419): Pfam Name: Pfam Description:  Arabidopsis proteins of unknown function
  misc_feature (31)..(419): NCBI GI NO: 34898638 NR Description: contains ESTsAU089699
  misc_feature (76)..(419): NCBI GI NO: 34911880 NR Description: OSJNBb0032K15.17
  misc_feature (76)..(419): NCBI GI NO: 34911888 NR Description: OSJNBb0032K15.21
  misc_feature (76)..(420): NCBI GI NO: 15237213 NR Description: putative protein; protein id: At5g15900.1
  misc_feature (65)..(420): NCBI GI NO: 15237211 NR Description: putative protein; protein id: At5g15890.1
  misc_feature (76)..(419): NCBI GI NO: 30678135 NR Description: expressed protein [Arabidopsis thaliana]
  misc_feature (61)..(420): NCBI GI NO: 15232914 NR Description: hypothetical protein; protein id: At3g28150
  misc_feature (80)..(419): NCBI GI NO: 34898640 NR Description: hypothetical protein~similar to Oryza sativachromosome 1
  misc_feature (7)..(416): NCBI GI NO: 28393189 NR Description: unknown protein [Arabidopsis thaliana]
  misc_feature (7)..(416): NCBI GI NO: 15234058 NR Description: hypothetical protein; protein id: At4g01080.1
MRSLLHTTNSSSPPPGSSRKQQHCGSRCFVVSLLLVLLALVASDVYLSFPNRRRVLPLFPQQLLSRRQQRGGEGGCDIFRGEWVPDPDAPYYTNDTCKVIHEHYDCMGYGKPDLGFVNWRWQPDGCDLPRFNPWRFLHMMRGKTLAFVGDSLGRNHKDSLICLLTTVAEPTTSWPSSKHTVYYYADYNFTVAHFWAPYLVRHEQIDEDGPAHTGVWNLYLDEPDGVWAAHVAEFDYAVVSASSWFYRPSMLYEAGRLVGCHYCRLPNVTDLTLRYALRMATRAALRALSGADGRFRGTALLRTVDPSQYEGGEWNEDGNCIRTAPFRRGQNAVQGLEREFRTLQLEEFASVAKAATDSGGKVRMLLMDTTEAMILRADAHPSKYRGWTPEKHFTLHNDCVHWCLPGAIDAWNDMLLHMLK

SEQ ID NO: 24480 - protein, 314 aa, Zea mays subsp. mays
  peptide (1)..(314): Ceres Seq. ID no. 12366913
  misc_feature (139)..(313): Pfam Name: Pfam Description:  Arabidopsis proteins of unknown function
  misc_feature (1)..(313): NCBI GI NO: 34898638 NR Description: contains ESTsAU089699
  misc_feature (1)..(313): NCBI GI NO: 34911880 NR Description: OSJNBb0032K15.17
  misc_feature (1)..(313): NCBI GI NO: 34911888 NR Description: OSJNBb0032K15.21
  misc_feature (1)..(314): NCBI GI NO: 15237213 NR Description: putative protein; protein id: At5g15900.1
  misc_feature (1)..(314): NCBI GI NO: 15237211 NR Description: putative protein; protein id: At5g15890.1
  misc_feature (1)..(313): NCBI GI NO: 30678135 NR Description: expressed protein [Arabidopsis thaliana]
  misc_feature (1)..(314): NCBI GI NO: 15232914 NR Description: hypothetical protein; protein id: At3g28150
  misc_feature (1)..(313): NCBI GI NO: 34898640 NR Description: hypothetical protein~similar to Oryza sativachromosome 1
  misc_feature (1)..(310): NCBI GI NO: 28393189 NR Description: unknown protein [Arabidopsis thaliana]
  misc_feature (1)..(310): NCBI GI NO: 15234058 NR Description: hypothetical protein; protein id: At4g01080.1
MGYGKPDLGFVNWRWQPDGCDLPRFNPWRFLHMMRGKTLAFVGDSLGRNHKDSLICLLTTVAEPTTSWPSSKHTVYYYADYNFTVAHFWAPYLVRHEQIDEDGPAHTGVWNLYLDEPDGVWAAHVAEFDYAVVSASSWFYRPSMLYEAGRLVGCHYCRLPNVTDLTLRYALRMATRAALRALSGADGRFRGTALLRTVDPSQYEGGEWNEDGNCIRTAPFRRGQNAVQGLEREFRTLQLEEFASVAKAATDSGGKVRMLLMDTTEAMILRADAHPSKYRGWTPEKHFTLHNDCVHWCLPGAIDAWNDMLLHMLK

SEQ ID NO: 24481 - DNA, 1312 bp, Zea mays subsp. mays
  misc_feature (1)..(1312): Ceres Seq. ID no. 12406486
agttgttctttggcttctgatttcaacaaaaaaaatggtgtttctctaaaacccacaaagccctcctctgctctccatccctgtctctcgctttccctaacccacaccagaataccagatcgagcaccgatctagggttgcacctcttctgctagccggctggcgaggagccgttcggcatctggacgcggccaagggagatgaagctcgcggggctcaagtctgtggacggcgctcacgaggagtccatctgggcggcggcgtgggcgcccgccgctgaccaccgccccacggcggtgctcctcactggcgcgctcgacgagaccgtccgcgcttggctccccgacgacctcgctgccttggggtcccccacacggggccacgcgctcggagtcgtctccctcgccgcccaccccgccggctcgctcgccgccgccgtgtcgctcgacagcttcatccgcgtctttgacgtcgacacgggggcatccgtcgccacgctggaggcgccgccgtccgagatttggggcgtccagttccatcccaagggtaatgctctggccgcagccggtggtggcagtggatcagtgaagctgtgggacacggagaagtggaaggcgatcaccagcctcgccgtcccacgcccggagggagctcgccccgacaagacaggcagcggcaagttcgtcctgtcagtcgcctggagccccgacggaaggctcctagcatgcgggtccatggacggcacgatcgccgtctacgacgcggtccgcatgaagttcctgcaccacctggagggccaccacatgccggtgcggtccatggtgttctccccggtggacccgcacgtgcttttcacggcctgcgacgactgccacgtccacatctacgacgccagggagaagggcctcgtcggggccatgtcgggccacgcgagctgggtgctgagcatcgacgcgagccccgacggcctggcggtggccacggggtcgagcgaccgcaccgtccggctctgggacctcaacatgaggacctcggtgcagaccatgagcaaccactccgatcaggtgtgggccgtggccttcaggccaccaggcggtgccggagtccgagcagggcgtctggctagcgcgtcggatgacaagagcgtctccctgtacgattactcgtaggtttttgtttccttataaaccgttgcaaatgcctctgttgtaccgaccagagatttgaattcgggcatggtggttggaagaattgttgtacgcagcacagtagtcgaggtgttaaattgcaaggaaagagtttatttcgtgct

SEQ ID NO: 24482 - protein, 322 aa, Zea mays subsp. mays
  peptide (1)..(322): Ceres Seq. ID no. 12406487
  misc_feature (1)..(322): NCBI GI NO: 15233721 NR Description: G-protein beta family; protein id: At4g29830
  misc_feature (12)..(320): NCBI GI NO: 38541742 NR Description: Unknown (protein for MGC:77675) [Danio rerio]
  misc_feature (12)..(320): NCBI GI NO: 37590940 NR Description: Unknown (protein for MGC:75826)
  misc_feature (12)..(320): NCBI GI NO: 13376840 NR Description: recombination protein REC14 [Homo sapiens]
  misc_feature (12)..(320): NCBI GI NO: 13277350 NR Description: meiotic recombination protein REC14 [Mus musculus]
  misc_feature (12)..(320): NCBI GI NO: 12849020 NR Description: unnamed protein product [Mus musculus]
  misc_feature (12)..(320): NCBI GI NO: 33150742 NR Description: G protein beta subunit-like protein [Homo sapiens]
  misc_feature (29)..(319): NCBI GI NO: 21356075 NR Description: CG3909-PA [Drosophila melanogaster]
  misc_feature (12)..(288): NCBI GI NO: 26345856 NR Description: unnamed protein product [Mus musculus]
  misc_feature (34)..(320): NCBI GI NO: 13173173 NR Description: unknown protein i8 [Aedes aegypti]
MKLAGLKSVDGAHEESIWAAAWAPAADHRPTAVLLTGALDETVRAWLPDDLAALGSPTRGHALGVVSLAAHPAGSLAAAVSLDSFIRVFDVDTGASVATLEAPPSEIWGVQFHPKGNALAAAGGGSGSVKLWDTEKWKAITSLAVPRPEGARPDKTGSGKFVLSVAWSPDGRLLACGSMDGTIAVYDAVRMKFLHHLEGHHMPVRSMVFSPVDPHVLFTACDDCHVHIYDAREKGLVGAMSGHASWVLSIDASPDGLAVATGSSDRTVRLWDLNMRTSVQTMSNHSDQVWAVAFRPPGGAGVRAGRLASASDDKSVSLYDYS

SEQ ID NO: 24483 - DNA, 491 bp, Zea mays subsp. mays
  misc_feature (1)..(491): Ceres Seq. ID no. 5758056
  misc_feature (384)..(384): n is a, c, t, g, unknown, or other
aaaaacgaacccgcccggagcagcaaagcatatgcgctctgcaccaagaacatggtcccgggagaktccgtgtacgagagaagcgtgtctccgttcagaatgaggatggaacaaaggtcgaatacagggtgtggaaccccttccgttccaagctggctgctgctgtgcttggtggtgttgacaacatctggattgctcctggtacccgtgtgctgtatcttggtgctgcttctggcacaaccgtatctcatgtgtctgatattgtagggccggatggtttggtctacgctgttgagttctctcacaggagcggaagagaccttgtcaacatggcaaagaagaggaccaatgtgatccccattattgaggatgccaggcatccgncaaggtaccggatgttggtaggcatggttgatgttatcttctctgatgttgcacagccagaccaggctaggatcttagcacttaatgcttcatacttcttgaagaac

SEQ ID NO: 24484 - protein, 163 aa, Zea mays subsp. mays
  peptide (1)..(163): Ceres Seq. ID no. 5758057
  misc_feature (19)..(162): Pfam Name: Pfam Description:  Fibrillarin
  misc_feature (19)..(162): NCBI GI NO: 18416588 NR Description: fibrillarin 2 (AtFib2); protein id: At4g25630
  misc_feature (19)..(162): NCBI GI NO: 15028155 NR Description: putative fibrillarin 2 protein AtFib2
  misc_feature (19)..(162): NCBI GI NO: 30696189 NR Description: fibrillarin 1 (Fib1) (SKIP7)
  misc_feature (19)..(162): NCBI GI NO: 6003681 NR Description: fibrillarin homolog [Arabidopsis thaliana]
  misc_feature (26)..(162): NCBI GI NO: 2982266 NR Description: probable fibrillarin [Picea mariana]
  misc_feature (19)..(162): NCBI GI NO: 19113021 NR Description: fibrillarin. [Schizosaccharomyces pombe]
  misc_feature (19)..(162): NCBI GI NO: 27374264 NR Description: Fib-PA [Drosophila erecta]
  misc_feature (19)..(162): NCBI GI NO: 31200907 NR Description: ENSANGP00000015622 [Anopheles gambiae]
  misc_feature (19)..(162): NCBI GI NO: 17647425 NR Description: Fibrillarin CG9888-PA
  misc_feature (19)..(162): NCBI GI NO: 25012804 NR Description: RE72617p [Drosophila melanogaster]
  misc_feature (22)..(22): Xaa is any aa, unknown or other
  misc_feature (128)..(128): Xaa is any aa, unknown or other
KRTRPEQQSICALHQEHGPGRXRVREKRVSVQNEDGTKVEYRVWNPFRSKLAAAVLGGVDNIWIAPGTRVLYLGAASGTTVSHVSDIVGPDGLVYAVEFSHRSGRDLVNMAKKRTNVIPIIEDARHPXRYRMLVGMVDVIFSDVAQPDQARILALNASYFLKN

SEQ ID NO: 24485 - protein, 88 aa, Zea mays subsp. mays
  peptide (1)..(88): Ceres Seq. ID no. 5758058
  misc_feature (22)..(22): Xaa is any aa, unknown or other
KNEPARSSKAYALCTKNMVPGXSVYERSVSPFRMRMEQRSNTGCGTPSVPSWLLLCLVVLTTSGLLLVPVCCILVLLLAQPYLMCLIL

SEQ ID NO: 24486 - DNA, 1366 bp, Zea mays subsp. mays
  misc_feature (1)..(1366): Ceres Seq. ID no. 12407332
aagcgcaaggaagcaatcgggaagagacaacggcaagcgacgggactcgggaggaagcaagtgcaaagcagcattcttgtaggagagtgagtgagtttcttcgtaccgagctaagagaaacaaaagaacagcaagaaccggcagtgcaacataagactacgtagctgctaatcgaacctggcgtctactgtttcctcttccttttgcccaaaatcacagcgcctggggttcaatccaaactacttgcattgctatccaagtttttagttacaggatcggcgagctactcggattcctctcccacggcgttgcctgcgcgccacgcccggcgccgaacgtctcggctgcgccggccccggtcccggccatgccgccgatgggctggacgaacgcggggaggcctcgtcctgccgacgcgcccgacgggctcatcccgagccccaggaagtccagcgtcgccgggcttcccgctgaacagagacgactggcccatcatgagctccggcaggctcacctgagccccggtggagtcgtacggcagcccaaggccgagcccggccgacagcattggcgccggctccagctccagccgcggcggccattgctgcagcgaggcgtccgggagtgacacccgcatggcctcctggtgctggtgctgctggcctgacgacgaggcgcccggcgacgacgaggagacgtccaggcccagcccgcgcaggaacgaggagctcgacgaggtggcgcccatctgcgcggccttctgcagcagcgcggtggccgacatgtgtgcggacggggacggggacggaggcggcggcgcgaactgctggcgctcggcggtcaccgccggcgccgccgagaagatcgacgacgatgcgtccgtggcgaggcacagcggcgggggcttggcgggatgggcgcgctccggccggccgccgaggtccgcgtactgcggcgctgacgccatcgacgacggcgcgaacataccgccgagcaggctctgcgacgtccccgcgacgctgctgctgctgctgctggcgccaacgttggcagcagcgctcaccgaatcttgcgaaagcaccggtacctgtaactgcggcggcggcggtggcggaggcggcggcggtggcggaggcggcggcgcgaactggacggcctcagtcgcattcgtgtcagtctctgcatgcattgcaacgaagcattagcgaatcgggggcatggattagattcagactagattgattagtgtaaaaggcgctaaaagctcgggagatgcagaaagcaacgagaggccatgatggcgtccttttcatgttgctcgtgggcgtgcttttgtcatcggatttcaatgctctgagaagttctg

SEQ ID NO: 24487 - protein, 189 aa, Zea mays subsp. mays
  peptide (1)..(189): Ceres Seq. ID no. 12407333
MASWCWCCWPDDEAPGDDEETSRPSPRRNEELDEVAPICAAFCSSAVADMCADGDGDGGGGANCWRSAVTAGAAEKIDDDASVARHSGGGLAGWARSGRPPRSAYCGADAIDDGANIPPSRLCDVPATLLLLLLAPTLAAALTESCESTGTCNCGGGGGGGGGGGGGGGANWTASVAFVSVSACIATKH

SEQ ID NO: 24488 - protein, 140 aa, Zea mays subsp. mays
  peptide (1)..(140): Ceres Seq. ID no. 12407334
MCADGDGDGGGGANCWRSAVTAGAAEKIDDDASVARHSGGGLAGWARSGRPPRSAYCGADAIDDGANIPPSRLCDVPATLLLLLLAPTLAAALTESCESTGTCNCGGGGGGGGGGGGGGGANWTASVAFVSVSACIATKH

SEQ ID NO: 24489 - protein, 122 aa, Zea mays subsp. mays
  peptide (1)..(122): Ceres Seq. ID no. 12407335
  misc_feature (1)..(115): NCBI GI NO: 11360494 NR Description: antifreeze glycopeptide AFGP polyprotein precursor
  misc_feature (1)..(92): NCBI GI NO: 11360494 NR Description: antifreeze glycopeptide AFGP polyprotein precursor
  misc_feature (1)..(95): NCBI GI NO: 11360494 NR Description: antifreeze glycopeptide AFGP polyprotein precursor
  misc_feature (1)..(90): NCBI GI NO: 9366817 NR Description: conserved hypothetical protein
  misc_feature (1)..(94): NCBI GI NO: 11360494 NR Description: antifreeze glycopeptide AFGP polyprotein precursor
  misc_feature (1)..(40): NCBI GI NO: 25989119 NR Description: unknown [Streptomyces aureofaciens]
  misc_feature (1)..(92): NCBI GI NO: 11360494 NR Description: antifreeze glycopeptide AFGP polyprotein precursor
  misc_feature (1)..(94): NCBI GI NO: 11360494 NR Description: antifreeze glycopeptide AFGP polyprotein precursor
  misc_feature (1)..(49): NCBI GI NO: 29250754 NR Description: GLP_49_64409_65443 [Giardia lamblia ATCC 50803]
  misc_feature (1)..(86): NCBI GI NO: 11360494 NR Description: antifreeze glycopeptide AFGP polyprotein precursor
MRPWRGTAAGAWRDGRAPAGRRGPRTAALTPSTTARTYRRAGSATSPRRCCCCCWRQRWQQRSPNLAKAPVPVTAAAAVAEAAAVAEAAARTGRPQSHSCQSLHALQRSISESGAWIRFRLD

SEQ ID NO: 24490 - DNA, 1572 bp, Zea mays subsp. mays
  misc_feature (1)..(1572): Ceres Seq. ID no. 12410547
gcacaaccaagaggcaacagagcaacgccagccacacacgacacgaaccaggtaaccagctgccgaggaaccctagcggaacactgtgcaggtgacggcggcgcgctaccggtgacggggtataccgtatacggcggcatcgtccccctcggcccctcctccatcccggcgcggcggcgcaggcagccagccttcaggggttaaacctgatgccaatccgcaggggttaaacctaatgccaatccgaagggccttgctgagctcgcctccatcgcccaggacctcgccgcctcctctgtgtcgttgcccagaacctcacagccaacacacgcatcctcttatcgtgcctcatcctccaagacgatgggctgctccccctacgtgcctcctcctccacgccgacaagcatctccccccgacacgcatcctcctccacgccgtgcttggtggtggcggcggacggtggttacctggggctgcggtgggccgtgcctggcatgcaaggtgagcagtccagcatcgagtggtcagtgtagggtgtgccgcggtctgccattgcgctgattgaagcagagtcagtgagttactgccgtgcgctgattggagccttcgtagccggctggagcgccgccgagaggtgaaggccacacgcgattgctgattagagattagagcagatccattgagccaccactccacctctgttcaccggcacgagtgaattgaattgggttttctgactcagattacttgttcactgtggggtgcaagcttaatcggccaccatggatgttgataagcaagaaacaatggaggagaccatccttgttggtgatgatctcatgcgtgggccgccatcccctgtcataccgaaagagatcgcatcacatgtccttgaagatgttgagctttgtgatggtatactcaagaaccttttcttatgcctacagatcaatgatattgagccattctgccaagatgaaattgtgctatatcgacagtgtgctgagaaaagggacaaggaaataagagagcggatgcaaaatagtgaatataaattgggtttttcaatgcccctggaagaagcgaaagagagagctactcaactccaatcagaagtaacactgctagaaaggcgcatgattcttgctagtggacttgagggtatggaaggatttcgccagagatggagcttgcatggacagcttgaagacacaaggaaaaggctagaagcactgaaccatggcatggcaaaacgagagaaccaaagttctacggcggagaggacaaaatctccagctaggaagaagtggttcttttggtaggttagtatcattgtcagacttgagaaatattgtagcttgagttgtattagcggcaatgctacacactttttaacttccacagcactctgcctccaactagccacttaatttgctaacaagtaacaagcgatttgcttatatatagctgcagttttaaatgtttaaatcatgtattaaaccttgtaactgcaggtgatggtacggttgcattccattttgtgatttatgacagccacttgccctcctc

SEQ ID NO: 24491 - protein, 179 aa, Zea mays subsp. mays
  peptide (1)..(179): Ceres Seq. ID no. 12410548
  misc_feature (9)..(179): NCBI GI NO: 21741739 NR Description: OSJNBa0073L04.19
  misc_feature (9)..(143): NCBI GI NO: 15233419 NR Description: hypothetical protein; protein id: At4g04190.1
  misc_feature (128)..(166): NCBI GI NO: 34906406 NR Description: P0710E05.16
MDVDKQETMEETILVGDDLMRGPPSPVIPKEIASHVLEDVELCDGILKNLFLCLQINDIEPFCQDEIVLYRQCAEKRDKEIRERMQNSEYKLGFSMPLEEAKERATQLQSEVTLLERRMILASGLEGMEGFRQRWSLHGQLEDTRKRLEALNHGMAKRENQSSTAERTKSPARKKWFFW

SEQ ID NO: 24492 - protein, 171 aa, Zea mays subsp. mays
  peptide (1)..(171): Ceres Seq. ID no. 12410549
  misc_feature (1)..(171): NCBI GI NO: 21741739 NR Description: OSJNBa0073L04.19
  misc_feature (1)..(135): NCBI GI NO: 15233419 NR Description: hypothetical protein; protein id: At4g04190.1
  misc_feature (120)..(158): NCBI GI NO: 34906406 NR Description: P0710E05.16
MEETILVGDDLMRGPPSPVIPKEIASHVLEDVELCDGILKNLFLCLQINDIEPFCQDEIVLYRQCAEKRDKEIRERMQNSEYKLGFSMPLEEAKERATQLQSEVTLLERRMILASGLEGMEGFRQRWSLHGQLEDTRKRLEALNHGMAKRENQSSTAERTKSPARKKWFFW

SEQ ID NO: 24493 - protein, 160 aa, Zea mays subsp. mays
  peptide (1)..(160): Ceres Seq. ID no. 12410550
  misc_feature (1)..(160): NCBI GI NO: 21741739 NR Description: OSJNBa0073L04.19
  misc_feature (1)..(124): NCBI GI NO: 15233419 NR Description: hypothetical protein; protein id: At4g04190.1
  misc_feature (109)..(147): NCBI GI NO: 34906406 NR Description: P0710E05.16
MRGPPSPVIPKEIASHVLEDVELCDGILKNLFLCLQINDIEPFCQDEIVLYRQCAEKRDKEIRERMQNSEYKLGFSMPLEEAKERATQLQSEVTLLERRMILASGLEGMEGFRQRWSLHGQLEDTRKRLEALNHGMAKRENQSSTAERTKSPARKKWFFW

SEQ ID NO: 24494 - DNA, 1415 bp, Zea mays subsp. mays
  misc_feature (1)..(1415): Ceres Seq. ID no. 12352133
aatacttgcttgcattgcctcccgtttgccccgatccaacgacgacgttcgctggccgtagccaagaaggtatctcgcccaaacaaaggccgtcaagccaccatatggccgtgtccggcgagaagccgccaccgccaccgccaccggccacggcgtccggcggaacggcaaggaagctcatcctagcgctgcttacatgtctgtcgtcggcgctgctgtacaggcagattcagccgctaccgcccaagatccccggcacgccgggcggcccgccggtgacggcgaccaggacgaggctcagcgacggcaggtacctggcctatctggaaaccggcgtcccgagggagaaggccaagcacaggctcgtctttgtccatgggttcgactcctgcagacacgacgcgcttccgatctccacggagcttgcgcaagagctgggcgtttacatgttgtccttcgatcgccccgggtacgccgagagcgacccgcacccggccaggaccgaggagagcatcgccctcgacatcgccgagctcgccgacaacctgcagctgggtcgcaagttctaccttgctggcttctccatgggcggcgagatcatgtggagctgcctcaagtacatcccacacaggctctccggcgtggccattctcggccccgtaggcaactactggtggcccggcttgccgtcgaacgtgtcgcgggacgcctggtaccagcagctccctcgggaccagtgggcggtctgggtcgcgcatcacctgccgtggctcacctactggtggaacacccagaagctcttcccggcctccagcgtcatcgcctacaaccctgccctcctgtcccaagaggacgagatgctcatggccaagtttggctatagagcctacatgccgcagatcaggcaacagggggagcacgagtgcctgcaccgggacatgatggtcgggttcggcaagtggagctggagccccgctgcagctggagaacccgttcgccgacgccgacgccgacgatggccagggggcggggaaggtgcacctgtggcacggcgccgaggacctcatcgtgccggtcagcctgtccaggtacatcagccagaagctgccgtgggtcgtctaccacgagctccccaagtcgggacatctcttcccgatcgccgaggggatggctgacatcattgtcaagtccctgctgctcggagacgatcatccgtcgtcgtcggcctcacagcgtcctcattctccatgaatccaggtcgtcacgtagtccgttcgcatctcgtggcccgtctctcactgtttctgtaaagggaccgatggtgcagctttctctagcgtgtagctaggatgctcttttttttttgaaaaataatggaactaagttttagcctatatatatcatctgataatgtt

SEQ ID NO: 24495 - protein, 390 aa, Zea mays subsp. mays
  peptide (1)..(390): Ceres Seq. ID no. 12352134
  misc_feature (147)..(330): Pfam Name: Pfam Description:  alpha/beta hydrolase fold
  misc_feature (57)..(330): NCBI GI NO: 38346334 NR Description: OSJNBa0073L04.5
  misc_feature (50)..(330): NCBI GI NO: 15228377 NR Description: putative protein; protein id: At3g48410
  misc_feature (76)..(352): NCBI GI NO: 11357595 NR Description: hypothetical protein F24B22
  misc_feature (76)..(352): NCBI GI NO: 15232465 NR Description: putative protein (fragment); protein id:At3g54240
  misc_feature (61)..(330): NCBI GI NO: 15242253 NR Description: putative protein; protein id: At5g22460
  misc_feature (52)..(377): NCBI GI NO: 18404095 NR Description: expressed protein; protein id: At2g36290
  misc_feature (52)..(377): NCBI GI NO: 28416665 NR Description: At2g36290 [Arabidopsis thaliana]
  misc_feature (70)..(371): NCBI GI NO: 21592662 NR Description: unknown [Arabidopsis thaliana]
  misc_feature (61)..(330): NCBI GI NO: 34908462 NR Description: P0683F02.22
  misc_feature (49)..(330): NCBI GI NO: 37536164 NR Description: putative alpha/beta hydrolase
YLLALPPVCPDPTTTFAGRSQEGISPKQRPSSHHMAVSGEKPPPPPPPATASGGTARKLILALLTCLSSALLYRQIQPLPPKIPGTPGGPPVTATRTRLSDGRYLAYLETGVPREKAKHRLVFVHGFDSCRHDALPISTELAQELGVYMLSFDRPGYAESDPHPARTEESIALDIAELADNLQLGRKFYLAGFSMGGEIMWSCLKYIPHRLSGVAILGPVGNYWWPGLPSNVSRDAWYQQLPRDQWAVWVAHHLPWLTYWWNTQKLFPASSVIAYNPALLSQEDEMLMAKFGYRAYMPQIRQQGEHECLHRDMMVGFGKWSWSPAAAGEPVRRRRRRRWPGGGEGAPVARRRGPHRAGQPVQVHQPEAAVGRLPRAPQVGTSLPDRRGDG

SEQ ID NO: 24496 - protein, 356 aa, Zea mays subsp. mays
  peptide (1)..(356): Ceres Seq. ID no. 12352135
  misc_feature (113)..(296): Pfam Name: Pfam Description:  alpha/beta hydrolase fold
  misc_feature (23)..(296): NCBI GI NO: 38346334 NR Description: OSJNBa0073L04.5
  misc_feature (16)..(296): NCBI GI NO: 15228377 NR Description: putative protein; protein id: At3g48410
  misc_feature (42)..(318): NCBI GI NO: 11357595 NR Description: hypothetical protein F24B22
  misc_feature (42)..(318): NCBI GI NO: 15232465 NR Description: putative protein (fragment); protein id:At3g54240
  misc_feature (27)..(296): NCBI GI NO: 15242253 NR Description: putative protein; protein id: At5g22460
  misc_feature (18)..(343): NCBI GI NO: 18404095 NR Description: expressed protein; protein id: At2g36290
  misc_feature (18)..(343): NCBI GI NO: 28416665 NR Description: At2g36290 [Arabidopsis thaliana]
  misc_feature (36)..(337): NCBI GI NO: 21592662 NR Description: unknown [Arabidopsis thaliana]
  misc_feature (27)..(296): NCBI GI NO: 34908462 NR Description: P0683F02.22
  misc_feature (15)..(296): NCBI GI NO: 37536164 NR Description: putative alpha/beta hydrolase
MAVSGEKPPPPPPPATASGGTARKLILALLTCLSSALLYRQIQPLPPKIPGTPGGPPVTATRTRLSDGRYLAYLETGVPREKAKHRLVFVHGFDSCRHDALPISTELAQELGVYMLSFDRPGYAESDPHPARTEESIALDIAELADNLQLGRKFYLAGFSMGGEIMWSCLKYIPHRLSGVAILGPVGNYWWPGLPSNVSRDAWYQQLPRDQWAVWVAHHLPWLTYWWNTQKLFPASSVIAYNPALLSQEDEMLMAKFGYRAYMPQIRQQGEHECLHRDMMVGFGKWSWSPAAAGEPVRRRRRRRWPGGGEGAPVARRRGPHRAGQPVQVHQPEAAVGRLPRAPQVGTSLPDRRGDG

SEQ ID NO: 24497 - protein, 242 aa, Zea mays subsp. mays
  peptide (1)..(242): Ceres Seq. ID no. 12352136
  misc_feature (1)..(182): Pfam Name: Pfam Description:  alpha/beta hydrolase fold
  misc_feature (1)..(182): NCBI GI NO: 38346334 NR Description: OSJNBa0073L04.5
  misc_feature (1)..(182): NCBI GI NO: 15228377 NR Description: putative protein; protein id: At3g48410
  misc_feature (1)..(204): NCBI GI NO: 11357595 NR Description: hypothetical protein F24B22
  misc_feature (1)..(204): NCBI GI NO: 15232465 NR Description: putative protein (fragment); protein id:At3g54240
  misc_feature (1)..(182): NCBI GI NO: 15242253 NR Description: putative protein; protein id: At5g22460
  misc_feature (1)..(229): NCBI GI NO: 18404095 NR Description: expressed protein; protein id: At2g36290
  misc_feature (1)..(229): NCBI GI NO: 28416665 NR Description: At2g36290 [Arabidopsis thaliana]
  misc_feature (1)..(223): NCBI GI NO: 21592662 NR Description: unknown [Arabidopsis thaliana]
  misc_feature (1)..(182): NCBI GI NO: 34908462 NR Description: P0683F02.22
  misc_feature (1)..(182): NCBI GI NO: 37536164 NR Description: putative alpha/beta hydrolase
MLSFDRPGYAESDPHPARTEESIALDIAELADNLQLGRKFYLAGFSMGGEIMWSCLKYIPHRLSGVAILGPVGNYWWPGLPSNVSRDAWYQQLPRDQWAVWVAHHLPWLTYWWNTQKLFPASSVIAYNPALLSQEDEMLMAKFGYRAYMPQIRQQGEHECLHRDMMVGFGKWSWSPAAAGEPVRRRRRRRWPGGGEGAPVARRRGPHRAGQPVQVHQPEAAVGRLPRAPQVGTSLPDRRGDG

SEQ ID NO: 24498 - DNA, 497 bp, Zea mays subsp. mays
  misc_feature (1)..(497): Ceres Seq. ID no. 1351195
gatgaactgtagcgcgtgayagtgaggggatttggttggatccaatgtttggtcggtctgcttgcatcacctggtttcctggctataaagcgacggggcccttgckctgggcsggagactggagagggcgagagtcctcccatccacaagttcttagcttttgctgagattgagatccggctggggacagaccgacagaggaaggaggacagaaaaatggggattggagatggatcttcaaatgggaaccagcaaccggtgcataaggaaatacgagatgagaccacaccacttcttccagtcaaggtggaggaggacgaggggtttcatgagttcaatggagcttcattctctggggcagttttcaatctgtcgaccaccatagttggggctggaattatggctcttccagcaagtatcaagatgctgggcatcatcccggggattctgttgatcatccttgtggcactgctcacagaggcatccatcgacatgct

SEQ ID NO: 24499 - protein, 93 aa, Zea mays subsp. mays
  peptide (1)..(93): Ceres Seq. ID no. 1351196
  misc_feature (11)..(92): NCBI GI NO: 15241555 NR Description: transporter -like protein; protein id: At5g38820.1
  misc_feature (11)..(92): NCBI GI NO: 9758059 NR Description: amino acid transporter-like protein
  misc_feature (21)..(92): NCBI GI NO: 18406463 NR Description: expressed protein; protein id: At3g30390
  misc_feature (25)..(92): NCBI GI NO: 34898706 NR Description: hypothetical protein
  misc_feature (25)..(92): NCBI GI NO: 34907896 NR Description: P0439E11.12
  misc_feature (25)..(90): NCBI GI NO: 30688270 NR Description: amino acid transporter family
  misc_feature (42)..(92): NCBI GI NO: 18412864 NR Description: expressed protein; protein id: At1g80510
  misc_feature (1)..(92): NCBI GI NO: 24461850 NR Description: CTV.3 [Poncirus trifoliata]
  misc_feature (24)..(91): NCBI GI NO: 15228851 NR Description: putative protein; protein id: At3g56200
  misc_feature (43)..(92): NCBI GI NO: 34907894 NR Description: P0439E11.11
MGIGDGSSNGNQQPVHKEIRDETTPLLPVKVEEDEGFHEFNGASFSGAVFNLSTTIVGAGIMALPASIKMLGIIPGILLIILVALLTEASIDM

SEQ ID NO: 24500 - protein, 51 aa, Zea mays subsp. mays
  peptide (1)..(51): Ceres Seq. ID no. 1351197
MDLQMGTSNRCIRKYEMRPHHFFQSRWRRTRGFMSSMELHSLGQFSICRPP

SEQ ID NO: 24501 - protein, 47 aa, Zea mays subsp. mays
  peptide (1)..(47): Ceres Seq. ID no. 1351198
MGTSNRCIRKYEMRPHHFFQSRWRRTRGFMSSMELHSLGQFSICRPP

SEQ ID NO: 24502 - DNA, 1033 bp, Zea mays subsp. mays
  misc_feature (1)..(1033): Ceres Seq. ID no. 12455198
gtgtctcttatttctttgtgtgtttggttgctggaaagggagtggacttttacaacttctcatgtccctattgttgggagggttcggagtccggatcgggatttgccacaaccagattgttcaacactcggaaggctcaccaaatcgtcctacgcttctgcttcctcctccacgaggtgaggaaaccctagcgactgaccatggcgttgctcccgcgcaccgcacggttggccttcctctctaccccgcggtcgtactccgccgccgccgctgcgggcgcctccccgacctccccagcgccatacgggggcgcgcccccaccggcgatgtcgaagacggccgagttcgtggtctccaaggttgatgacctgatgaactgggcgcgtaagggctcgatttggcccatgacctttgggctcgcctgctgcgcggtcgagatgatgcacgccggcgcgtcccgctacgacttcgaccggttcggcgtcatcttccgtccctcgccgcgccagtccgattgcatgatcgtcgccggcacgctcaccaacaaaatggctccagccctccgcaaggtttatgaccaaatgcctgagcctagatgggttatttcaatgggcagctgtgccaacggtggtggatactaccattactcctactctgttgtacgtggatgtgaccgtatagtccccgtggacatctacgtccctgggtgcccaccaactgctgaggcactgctgtacggtgttcttcagctccaaaagaagatcaacaggcgtaaggatttccttcactggtggaccaagtgaagcatgcttctgctgttgctcgcttgctacgtttctttgcactcgacctacctgtcttatctgaaataaggacggactttgctcggattcacaaatttgttgtgcctggaaggatgtatgcccaggttgtgacgaacatataacttgtgtacttggagtcagttcgcctgtaatggacaccagacctgctgtgaatctgtttttaagcttccattgtaatacagcaatac

SEQ ID NO: 24503 - protein, 200 aa, Zea mays subsp. mays
  peptide (1)..(200): Ceres Seq. ID no. 12455199
  misc_feature (78)..(185): Pfam Name: Pfam Description:  NADH ubiquinone oxidoreductase, 20 Kd subunit
  misc_feature (1)..(200): NCBI GI NO: 34910678 NR Description: putative NADH dehydrogenase
  misc_feature (1)..(200): NCBI GI NO: 1171866 NR Description: NADH-ubiquinone oxidoreductase 20 kDa subunit
  misc_feature (1)..(200): NCBI GI NO: 11277624 NR Description: NADH2 dehydrogenase (ubiquinone) (EC 1
  misc_feature (1)..(200): NCBI GI NO: 15239782 NR Description: NADH dehydrogenase
  misc_feature (1)..(200): NCBI GI NO: 9652180 NR Description: NADH-ubiquinone oxidoreductase subunit PSST
  misc_feature (28)..(200): NCBI GI NO: 9652190 NR Description: NADH-ubiquinone oxidoreductase subunit PSST
  misc_feature (1)..(200): NCBI GI NO: 2499328 NR Description: NADH-ubiquinone oxidoreductase 20 kDa subunit
  misc_feature (43)..(200): NCBI GI NO: 11466592 NR Description: NADH dehydrogenase subunit 10 [Rhodomonas salina]
  misc_feature (40)..(200): NCBI GI NO: 34328788 NR Description: NADH:ubiquinone oxidoreductase subunit 10
  misc_feature (44)..(200): NCBI GI NO: 11466535 NR Description: NADH dehydrogenase, subunit 10
MALLPRTARLAFLSTPRSYSAAAAAGASPTSPAPYGGAPPPAMSKTAEFVVSKVDDLMNWARKGSIWPMTFGLACCAVEMMHAGASRYDFDRFGVIFRPSPRQSDCMIVAGTLTNKMAPALRKVYDQMPEPRWVISMGSCANGGGYYHYSYSVVRGCDRIVPVDIYVPGCPPTAEALLYGVLQLQKKINRRKDFLHWWTK

SEQ ID NO: 24504 - protein, 158 aa, Zea mays subsp. mays
  peptide (1)..(158): Ceres Seq. ID no. 12455200
  misc_feature (36)..(143): Pfam Name: Pfam Description:  NADH ubiquinone oxidoreductase, 20 Kd subunit
  misc_feature (1)..(158): NCBI GI NO: 34910678 NR Description: putative NADH dehydrogenase
  misc_feature (1)..(158): NCBI GI NO: 1171866 NR Description: NADH-ubiquinone oxidoreductase 20 kDa subunit
  misc_feature (1)..(158): NCBI GI NO: 11277624 NR Description: NADH2 dehydrogenase (ubiquinone) (EC 1
  misc_feature (1)..(158): NCBI GI NO: 15239782 NR Description: NADH dehydrogenase
  misc_feature (1)..(158): NCBI GI NO: 9652180 NR Description: NADH-ubiquinone oxidoreductase subunit PSST
  misc_feature (1)..(158): NCBI GI NO: 9652190 NR Description: NADH-ubiquinone oxidoreductase subunit PSST
  misc_feature (1)..(158): NCBI GI NO: 2499328 NR Description: NADH-ubiquinone oxidoreductase 20 kDa subunit
  misc_feature (1)..(158): NCBI GI NO: 11466592 NR Description: NADH dehydrogenase subunit 10 [Rhodomonas salina]
  misc_feature (1)..(158): NCBI GI NO: 34328788 NR Description: NADH:ubiquinone oxidoreductase subunit 10
  misc_feature (2)..(158): NCBI GI NO: 11466535 NR Description: NADH dehydrogenase, subunit 10
MSKTAEFVVSKVDDLMNWARKGSIWPMTFGLACCAVEMMHAGASRYDFDRFGVIFRPSPRQSDCMIVAGTLTNKMAPALRKVYDQMPEPRWVISMGSCANGGGYYHYSYSVVRGCDRIVPVDIYVPGCPPTAEALLYGVLQLQKKINRRKDFLHWWTK

SEQ ID NO: 24505 - protein, 143 aa, Zea mays subsp. mays
  peptide (1)..(143): Ceres Seq. ID no. 12455201
  misc_feature (21)..(128): Pfam Name: Pfam Description:  NADH ubiquinone oxidoreductase, 20 Kd subunit
  misc_feature (1)..(143): NCBI GI NO: 34910678 NR Description: putative NADH dehydrogenase
  misc_feature (1)..(143): NCBI GI NO: 1171866 NR Description: NADH-ubiquinone oxidoreductase 20 kDa subunit
  misc_feature (1)..(143): NCBI GI NO: 11277624 NR Description: NADH2 dehydrogenase (ubiquinone) (EC 1
  misc_feature (1)..(143): NCBI GI NO: 15239782 NR Description: NADH dehydrogenase
  misc_feature (1)..(143): NCBI GI NO: 9652180 NR Description: NADH-ubiquinone oxidoreductase subunit PSST
  misc_feature (1)..(143): NCBI GI NO: 9652190 NR Description: NADH-ubiquinone oxidoreductase subunit PSST
  misc_feature (1)..(143): NCBI GI NO: 2499328 NR Description: NADH-ubiquinone oxidoreductase 20 kDa subunit
  misc_feature (1)..(143): NCBI GI NO: 11466592 NR Description: NADH dehydrogenase subunit 10 [Rhodomonas salina]
  misc_feature (1)..(143): NCBI GI NO: 34328788 NR Description: NADH:ubiquinone oxidoreductase subunit 10
  misc_feature (1)..(143): NCBI GI NO: 11466535 NR Description: NADH dehydrogenase, subunit 10
MNWARKGSIWPMTFGLACCAVEMMHAGASRYDFDRFGVIFRPSPRQSDCMIVAGTLTNKMAPALRKVYDQMPEPRWVISMGSCANGGGYYHYSYSVVRGCDRIVPVDIYVPGCPPTAEALLYGVLQLQKKINRRKDFLHWWTK

SEQ ID NO: 24506 - DNA, 1669 bp, Zea mays subsp. mays
  misc_feature (1)..(1669): Ceres Seq. ID no. 12410539
gtctgcgtcatctcatttccgtttccgtctctccctctcctcgcccacacgtccaaaaccgaagggagcaaacgaacaaaacccggccgagtaacgcaggagacgaagctgcggaaggcgagcaagcacgatggaggcggcagcgtcagccgagtacgggtactacggcggaggcgcgggcccacacgagacgaagaccgccgggtgcggggaccacttcgtcgtggacgacctcctcgcgctgccgccgtacgacgaggaggaggagggggcgacaggcgagaccccgctgtgcctgcagcctgtcaaggaggagggcggcctcgggaatttctcggccgactcttccatcgtcacagcaatcgacagctgcagcaactccttctgtaggctagccgatgacgacttcccgggggaattctacgagccgtacgaccaactggtggagctagaatggttatcaaactacatgggcgagggcgaggaaactttcgcggcggaggacctggagaagctgaagctcatttccggtgggttctccccggcggctgtgaacgtgtcagcaccagctccagtgggcgtagcttcagccgcctctgcgacacagtccggtatgttcctgccggtcccggcaaaggcccgtagcaagcggtcccgcgcagctccgggcaactggtcgtcacggttggtcgtgctcccgccgaccccggcctcaccaccggcccctgcagcgtccatggccatttcgccctcggagtccggcatctcggcgcagcaggcgttccgcgccaagaagccgccgccgtcgaagaagaaagacgcggcggcaccggcagaagggcgacggtgcgtgcactgcgacacggacaagacgccgcagtggaggacggggcccatgggccccaagacgctgtgcaacgcgtgcggggtgcggtacaagtcggggcggctggtgccggagtacaggcccgcggcgagccccaccttcgtgatgtccaagcactccaactcccaccgaaaggtgctggagctgcgccgccagaaggaggtggtggtgcagcagccgccgcacgtgatggccggcgccggcggtcctgcaggcgggctgatgcgcatgcagagcgcgatgctgttggacgggccggtggcggcggtgtcgtcgtcgtcccccatcgtcggcggcgacgagtttttgatccaccagcacttagggacggcagactaccggcagcgcatctaactagatgagtttttgatcagttagcctactagcccagtaataatcaatatgcgcaccagcttaaatccaagtaccctccttaaaaacatgaaagaactaataatcttgccttaattaattaattaggagttatttttcctcttcactatattttgtttattaattagttgctgtgttccggttcagatccttggaaattttttcgtggcgactttcgtatggttttgtatctctctttttttttattttttgctagactctcctaattaacatgcctatgagaactctacgagagagagagagagagagagagttttcctatctattttcttcctttgtttcttagcattatatatgtaatttaaggggctagctctcgttctgcttccggtccggagcacgcatgaaaagaagactggaaattttggt

SEQ ID NO: 24507 - protein, 369 aa, Zea mays subsp. mays
  peptide (1)..(369): Ceres Seq. ID no. 12410540
  misc_feature (6)..(234): NCBI GI NO: 34909448 NR Description: OSJNBa0014K08.18
  misc_feature (122)..(369): NCBI GI NO: 34909448 NR Description: OSJNBa0014K08.18
  misc_feature (70)..(307): NCBI GI NO: 15239503 NR Description: GATA zinc finger protein; protein id: At5g25830.1
  misc_feature (62)..(307): NCBI GI NO: 15233971 NR Description: GATA zinc finger protein; protein id: At4g32890.1
  misc_feature (3)..(323): NCBI GI NO: 37536778 NR Description: putative transcription factor
  misc_feature (28)..(306): NCBI GI NO: 37572449 NR Description: AG-motif binding protein-4 [Nicotiana tabacum]
  misc_feature (28)..(306): NCBI GI NO: 15239343 NR Description: GATA zinc finger protein; protein id: At5g66320.1
  misc_feature (146)..(315): NCBI GI NO: 15225399 NR Description: GATA zinc finger protein; protein id: At2g45050.1
  misc_feature (197)..(306): NCBI GI NO: 15232355 NR Description: GATA zinc finger protein; protein id: At3g60530
  misc_feature (238)..(321): NCBI GI NO: 37572447 NR Description: AG-motif binding protein-3 [Nicotiana tabacum]
MEAAASAEYGYYGGGAGPHETKTAGCGDHFVVDDLLALPPYDEEEEGATGETPLCLQPVKEEGGLGNFSADSSIVTAIDSCSNSFCRLADDDFPGEFYEPYDQLVELEWLSNYMGEGEETFAAEDLEKLKLISGGFSPAAVNVSAPAPVGVASAASATQSGMFLPVPAKARSKRSRAAPGNWSSRLVVLPPTPASPPAPAASMAISPSESGISAQQAFRAKKPPPSKKKDAAAPAEGRRCVHCDTDKTPQWRTGPMGPKTLCNACGVRYKSGRLVPEYRPAASPTFVMSKHSNSHRKVLELRRQKEVVVQQPPHVMAGAGGPAGGLMRMQSAMLLDGPVAAVSSSSPIVGGDEFLIHQHLGTADYRQRI

SEQ ID NO: 24508 - protein, 256 aa, Zea mays subsp. mays
  peptide (1)..(256): Ceres Seq. ID no. 12410541
  misc_feature (1)..(121): NCBI GI NO: 34909448 NR Description: OSJNBa0014K08.18
  misc_feature (9)..(256): NCBI GI NO: 34909448 NR Description: OSJNBa0014K08.18
  misc_feature (1)..(194): NCBI GI NO: 15239503 NR Description: GATA zinc finger protein; protein id: At5g25830.1
  misc_feature (1)..(194): NCBI GI NO: 15233971 NR Description: GATA zinc finger protein; protein id: At4g32890.1
  misc_feature (1)..(210): NCBI GI NO: 37536778 NR Description: putative transcription factor
  misc_feature (1)..(193): NCBI GI NO: 37572449 NR Description: AG-motif binding protein-4 [Nicotiana tabacum]
  misc_feature (1)..(193): NCBI GI NO: 15239343 NR Description: GATA zinc finger protein; protein id: At5g66320.1
  misc_feature (33)..(202): NCBI GI NO: 15225399 NR Description: GATA zinc finger protein; protein id: At2g45050.1
  misc_feature (84)..(193): NCBI GI NO: 15232355 NR Description: GATA zinc finger protein; protein id: At3g60530
  misc_feature (125)..(208): NCBI GI NO: 37572447 NR Description: AG-motif binding protein-3 [Nicotiana tabacum]
MGEGEETFAAEDLEKLKLISGGFSPAAVNVSAPAPVGVASAASATQSGMFLPVPAKARSKRSRAAPGNWSSRLVVLPPTPASPPAPAASMAISPSESGISAQQAFRAKKPPPSKKKDAAAPAEGRRCVHCDTDKTPQWRTGPMGPKTLCNACGVRYKSGRLVPEYRPAASPTFVMSKHSNSHRKVLELRRQKEVVVQQPPHVMAGAGGPAGGLMRMQSAMLLDGPVAAVSSSSPIVGGDEFLIHQHLGTADYRQRI

SEQ ID NO: 24509 - protein, 208 aa, Zea mays subsp. mays
  peptide (1)..(208): Ceres Seq. ID no. 12410542
  misc_feature (1)..(73): NCBI GI NO: 34909448 NR Description: OSJNBa0014K08.18
  misc_feature (1)..(208): NCBI GI NO: 34909448 NR Description: OSJNBa0014K08.18
  misc_feature (1)..(146): NCBI GI NO: 15239503 NR Description: GATA zinc finger protein; protein id: At5g25830.1
  misc_feature (1)..(146): NCBI GI NO: 15233971 NR Description: GATA zinc finger protein; protein id: At4g32890.1
  misc_feature (1)..(162): NCBI GI NO: 37536778 NR Description: putative transcription factor
  misc_feature (1)..(145): NCBI GI NO: 37572449 NR Description: AG-motif binding protein-4 [Nicotiana tabacum]
  misc_feature (1)..(145): NCBI GI NO: 15239343 NR Description: GATA zinc finger protein; protein id: At5g66320.1
  misc_feature (1)..(154): NCBI GI NO: 15225399 NR Description: GATA zinc finger protein; protein id: At2g45050.1
  misc_feature (36)..(145): NCBI GI NO: 15232355 NR Description: GATA zinc finger protein; protein id: At3g60530
  misc_feature (77)..(160): NCBI GI NO: 37572447 NR Description: AG-motif binding protein-3 [Nicotiana tabacum]
MFLPVPAKARSKRSRAAPGNWSSRLVVLPPTPASPPAPAASMAISPSESGISAQQAFRAKKPPPSKKKDAAAPAEGRRCVHCDTDKTPQWRTGPMGPKTLCNACGVRYKSGRLVPEYRPAASPTFVMSKHSNSHRKVLELRRQKEVVVQQPPHVMAGAGGPAGGLMRMQSAMLLDGPVAAVSSSSPIVGGDEFLIHQHLGTADYRQRI

SEQ ID NO: 24510 - DNA, 1591 bp, Zea mays subsp. mays
  misc_feature (1)..(1591): Ceres Seq. ID no. 12344661
gtctacgatgccgttgcgcacctcttctctctcgccgccccgagacccccacgcttccctctccgcccccgaactgtggcgcctccccccgccgccgcagcgatgccactcgcggcagagcccgacgacgctcatgaggaaagggagaatcagcagctgctaattacgacgaagggagggcccgggcttgagggactggtggtggggagctactgccacgatgtgctaatccggggcgggcgcatagtgggggagacgctcggcggggctgcggccttcgtgtccaacgtgctcgacgccgcttcgccccagggcgccgcgctcaacgagacatccccctttgtcgttgtggccaaggtgggtcacgacttcatctacgcccgcgcgccggcgtccgcgcggcatccgcctctgctctgctcgtccccaaccacctccttccacgcccagttctcggagaccgccgcctcggcgcacgcccccgaccgggagctccggcgcatgcgcgcctgcgacccgatctaccccgccgaccttcccgaccgccgcttcgcctacggcctcgctgtcggcgtcgccggggaggtgctaccggagacgctcgagcagatgatcaggctctgccgcacggtgctcgtggacgcgcaggcgctgatccgggcgttcgacggtgacggcgccgtcggtcacgtggcgcttggcgataccccgtacgcgcggcttctgccccgagtggcgttcgttaaggcgtcgtcggaggaggcgccatacgttggggtggaaacgacgaggcggcagtgctgtgtgatcgtcacggaggggagggacggctgccggctgtactgggacggtggggaggcgcacgttgcgccgttccccgccgtacaggtggaccctactggcgccggagacagttttctcgcgggctttgcagccggattgctgtgggggttgtcggcgacggacgccgcgctgctggggaacttctttggcgccgctgctgtatcgcaggtcggcgtgcccaccttccatcccaagatgttgcaggcagttaaagaaatacttgaagagaagacaaggaaacgatctagtccatgtatgaacggcgctagttttaccttggagaagtcaaatatgcacaacgagttacacgcagctctccaagaagctgcggtgctgatgtctgaacagcagcaggctgatccggcgaacggcagtggcggtgatatttgctcggcataggtacctcacagtgaagctgaagcagtcgaacgccaaactgaagtttgtggcaaaataaccagcactgcagtcctgaactcctgatctcacattgagatctgtaaacatggtgccaacaagtggaggaagtttgtacatacgctctctccggcctttacactactattctgctggcaaggccgtcagggatcgtttctaccttgctatcgctgacgaggaaatgaagacaactgaacagttgagctgtggcgcttgcacgcaccatgttttctccgctgaacaagtgcgcatttttgagctttcgggcattcgtgctgttaactttttaccattctatatgtcgacttct

SEQ ID NO: 24511 - protein, 413 aa, Zea mays subsp. mays
  peptide (1)..(413): Ceres Seq. ID no. 12344662
  misc_feature (66)..(348): Pfam Name: Pfam Description:  pfkB family carbohydrate kinase
  misc_feature (26)..(412): NCBI GI NO: 29788872 NR Description: unknown protein
  misc_feature (14)..(349): NCBI GI NO: 31126792 NR Description: unknown protein
  misc_feature (50)..(409): NCBI GI NO: 15237741 NR Description: putative protein; protein id: At5g58730
  misc_feature (50)..(349): NCBI GI NO: 8843793 NR Description: gene_id:MZN1
  misc_feature (232)..(360): NCBI GI NO: 11498013 NR Description: carbohydrate kinase, pfkB family
VYDAVAHLFSLAAPRPPRFPLRPRTVAPPPAAAAMPLAAEPDDAHEERENQQLLITTKGGPGLEGLVVGSYCHDVLIRGGRIVGETLGGAAAFVSNVLDAASPQGAALNETSPFVVVAKVGHDFIYARAPASARHPPLLCSSPTTSFHAQFSETAASAHAPDRELRRMRACDPIYPADLPDRRFAYGLAVGVAGEVLPETLEQMIRLCRTVLVDAQALIRAFDGDGAVGHVALGDTPYARLLPRVAFVKASSEEAPYVGVETTRRQCCVIVTEGRDGCRLYWDGGEAHVAPFPAVQVDPTGAGDSFLAGFAAGLLWGLSATDAALLGNFFGAAAVSQVGVPTFHPKMLQAVKEILEEKTRKRSSPCMNGASFTLEKSNMHNELHAALQEAAVLMSEQQQADPANGSGGDICSA

SEQ ID NO: 24512 - protein, 379 aa, Zea mays subsp. mays
  peptide (1)..(379): Ceres Seq. ID no. 12344663
  misc_feature (32)..(314): Pfam Name: Pfam Description:  pfkB family carbohydrate kinase
  misc_feature (1)..(378): NCBI GI NO: 29788872 NR Description: unknown protein
  misc_feature (1)..(315): NCBI GI NO: 31126792 NR Description: unknown protein
  misc_feature (16)..(375): NCBI GI NO: 15237741 NR Description: putative protein; protein id: At5g58730
  misc_feature (16)..(315): NCBI GI NO: 8843793 NR Description: gene_id:MZN1
  misc_feature (198)..(326): NCBI GI NO: 11498013 NR Description: carbohydrate kinase, pfkB family
MPLAAEPDDAHEERENQQLLITTKGGPGLEGLVVGSYCHDVLIRGGRIVGETLGGAAAFVSNVLDAASPQGAALNETSPFVVVAKVGHDFIYARAPASARHPPLLCSSPTTSFHAQFSETAASAHAPDRELRRMRACDPIYPADLPDRRFAYGLAVGVAGEVLPETLEQMIRLCRTVLVDAQALIRAFDGDGAVGHVALGDTPYARLLPRVAFVKASSEEAPYVGVETTRRQCCVIVTEGRDGCRLYWDGGEAHVAPFPAVQVDPTGAGDSFLAGFAAGLLWGLSATDAALLGNFFGAAAVSQVGVPTFHPKMLQAVKEILEEKTRKRSSPCMNGASFTLEKSNMHNELHAALQEAAVLMSEQQQADPANGSGGDICSA

SEQ ID NO: 24513 - protein, 246 aa, Zea mays subsp. mays
  peptide (1)..(246): Ceres Seq. ID no. 12344664
  misc_feature (1)..(181): Pfam Name: Pfam Description:  pfkB family carbohydrate kinase
  misc_feature (1)..(245): NCBI GI NO: 29788872 NR Description: unknown protein
  misc_feature (1)..(182): NCBI GI NO: 31126792 NR Description: unknown protein
  misc_feature (1)..(242): NCBI GI NO: 15237741 NR Description: putative protein; protein id: At5g58730
  misc_feature (1)..(182): NCBI GI NO: 8843793 NR Description: gene_id:MZN1
  misc_feature (65)..(193): NCBI GI NO: 11498013 NR Description: carbohydrate kinase, pfkB family
MRACDPIYPADLPDRRFAYGLAVGVAGEVLPETLEQMIRLCRTVLVDAQALIRAFDGDGAVGHVALGDTPYARLLPRVAFVKASSEEAPYVGVETTRRQCCVIVTEGRDGCRLYWDGGEAHVAPFPAVQVDPTGAGDSFLAGFAAGLLWGLSATDAALLGNFFGAAAVSQVGVPTFHPKMLQAVKEILEEKTRKRSSPCMNGASFTLEKSNMHNELHAALQEAAVLMSEQQQADPANGSGGDICSA

SEQ ID NO: 24514 - DNA, 1444 bp, Zea mays subsp. mays
  misc_feature (1)..(1444): Ceres Seq. ID no. 13498822
aaccacaccactcgagcgcgcgcgcggcccaccgctccgccgctgcccgcccgccgccatgcgagggatcctctcctcttcctccgctctcctccggcgagccggcgcccagctctcgcgcacggactgcagtagcccctcagcgtccgcgacctctcctctccgccgctcccctcttcagaatgggaaaagagacacattttgttcgctttggttcaaaggtcgttcggtatcaaccacagttgatatgcagttagactatgagagtgatccccctcttgacgatacaaaagctattgagaaggagtcatcacttaatgttgctgtttctcaactcgcaattgacttcgatagagactctaatttatgtttggagcgattttcccgtgcaaggaaagcatctgtagtctctactggttctcttaagcttgacctcgctctcggcgttggaggattaccgaagggtagaatggtggagatatatgggaaagaagcatctgggaagacaacactcgcgcttcatgttattaaggaagctcaaaagaatggaggttattgtgcttatattgatgcagaaaatgccttcaacccttcatttgctgaatctattggcgtagacagtgaaaggctcttgatagcccaacctgattctgctgaaaattctctaagcattgtaaacactcttgttggtggttctgttgctgttgttgttgtggacagtgtggcagcacttattcccaaatgtgaaattgaaggtgaaatatacacaaattgtggagacatccaatcccatttgatgactcgggcccttagaaaaattcagtacactttatgtcgatctgaaacacttattatttttgtgaatcaggttagaacaaagaggacatcaagtaatcctgggatctacaaggaggtgccttgcggtggtaatgcactaggattctatgctgcagtcagaatgaggacttcaaggagagaactgcgctatagtgaagatgaggctaccggcgtaggtatatcagtgcagatcatcaagaacaaattggctccagcgaacctgaagaaggaagccggcatcgacatcacattcggtaaggggatctgccacgagtcggagatcctggagacggcttcctccgtcggagtgatcctgaaagacgggtgtgggtattggatcaacaacgagttcctggcaggcaaggtggaagcggagaagttcctgcgtgaaaacgctgcagtggcagatgagatctgcaataccgtgaggaacgagttcttgcaaaggtgacatagggcgaccgattagagaggctaatgcattgttagtcggaaatgttgtaccgtcatgtattcatagaagaagatttatgtaggatgttgctgtgcctgtcgtgtaactttgactcgcaacagttcattgagtttaccagggccattccctcgc

SEQ ID NO: 24515 - protein, 428 aa, Zea mays subsp. mays
  peptide (1)..(428): Ceres Seq. ID no. 13498823
  misc_feature (103)..(427): Pfam Name: Pfam Description:  recA bacterial DNA recombination protein
  misc_feature (157)..(428): NCBI GI NO: 24636781 NR Description: P0614D08.19
  misc_feature (61)..(427): NCBI GI NO: 22330951 NR Description: RecA protein -related [Arabidopsis thaliana]
  misc_feature (61)..(427): NCBI GI NO: 6143863 NR Description: putative RecA protein [Arabidopsis thaliana]
  misc_feature (284)..(393): NCBI GI NO: 34906584 NR Description: hypothetical protein~similar to Arabidopsis RecA-like protein
  misc_feature (157)..(241): NCBI GI NO: 34906584 NR Description: hypothetical protein~similar to Arabidopsis RecA-like protein
  misc_feature (100)..(426): NCBI GI NO: 15224783 NR Description: recA protein -related [Arabidopsis thaliana]
  misc_feature (124)..(422): NCBI GI NO: 34907710 NR Description: putative RecA protein
  misc_feature (93)..(422): NCBI GI NO: 17987070 NR Description: RECA PROTEIN [Brucella melitensis]
  misc_feature (93)..(422): NCBI GI NO: 23502079 NR Description: recA protein [Brucella suis 1330]
  misc_feature (93)..(422): NCBI GI NO: 22966246 NR Description: hypothetical protein [Rhodospirillum rubrum]
TTPLERARGPPLRRCPPAAMRGILSSSSALLRRAGAQLSRTDCSSPSASATSPLRRSPLQNGKRDTFCSLWFKGRSVSTTVDMQLDYESDPPLDDTKAIEKESSLNVAVSQLAIDFDRDSNLCLERFSRARKASVVSTGSLKLDLALGVGGLPKGRMVEIYGKEASGKTTLALHVIKEAQKNGGYCAYIDAENAFNPSFAESIGVDSERLLIAQPDSAENSLSIVNTLVGGSVAVVVVDSVAALIPKCEIEGEIYTNCGDIQSHLMTRALRKIQYTLCRSETLIIFVNQVRTKRTSSNPGIYKEVPCGGNALGFYAAVRMRTSRRELRYSEDEATGVGISVQIIKNKLAPANLKKEAGIDITFGKGICHESEILETASSVGVILKDGCGYWINNEFLAGKVEAEKFLRENAAVADEICNTVRNEFLQR

SEQ ID NO: 24516 - protein, 409 aa, Zea mays subsp. mays
  peptide (1)..(409): Ceres Seq. ID no. 13498824
  misc_feature (84)..(408): Pfam Name: Pfam Description:  recA bacterial DNA recombination protein
  misc_feature (138)..(409): NCBI GI NO: 24636781 NR Description: P0614D08.19
  misc_feature (42)..(408): NCBI GI NO: 22330951 NR Description: RecA protein -related [Arabidopsis thaliana]
  misc_feature (42)..(408): NCBI GI NO: 6143863 NR Description: putative RecA protein [Arabidopsis thaliana]
  misc_feature (265)..(374): NCBI GI NO: 34906584 NR Description: hypothetical protein~similar to Arabidopsis RecA-like protein
  misc_feature (138)..(222): NCBI GI NO: 34906584 NR Description: hypothetical protein~similar to Arabidopsis RecA-like protein
  misc_feature (81)..(407): NCBI GI NO: 15224783 NR Description: recA protein -related [Arabidopsis thaliana]
  misc_feature (105)..(403): NCBI GI NO: 34907710 NR Description: putative RecA protein
  misc_feature (74)..(403): NCBI GI NO: 17987070 NR Description: RECA PROTEIN [Brucella melitensis]
  misc_feature (74)..(403): NCBI GI NO: 22966246 NR Description: hypothetical protein [Rhodospirillum rubrum]
  misc_feature (74)..(403): NCBI GI NO: 23502079 NR Description: recA protein [Brucella suis 1330]
MRGILSSSSALLRRAGAQLSRTDCSSPSASATSPLRRSPLQNGKRDTFCSLWFKGRSVSTTVDMQLDYESDPPLDDTKAIEKESSLNVAVSQLAIDFDRDSNLCLERFSRARKASVVSTGSLKLDLALGVGGLPKGRMVEIYGKEASGKTTLALHVIKEAQKNGGYCAYIDAENAFNPSFAESIGVDSERLLIAQPDSAENSLSIVNTLVGGSVAVVVVDSVAALIPKCEIEGEIYTNCGDIQSHLMTRALRKIQYTLCRSETLIIFVNQVRTKRTSSNPGIYKEVPCGGNALGFYAAVRMRTSRRELRYSEDEATGVGISVQIIKNKLAPANLKKEAGIDITFGKGICHESEILETASSVGVILKDGCGYWINNEFLAGKVEAEKFLRENAAVADEICNTVRNEFLQR

SEQ ID NO: 24517 - protein, 346 aa, Zea mays subsp. mays; identical to SEQ ID NO: 23270
  peptide (1)..(346): Ceres Seq. ID no. 13498825
  misc_feature (21)..(345): Pfam Name: Pfam Description:  recA bacterial DNA recombination protein
  misc_feature (75)..(346): NCBI GI NO: 24636781 NR Description: P0614D08.19
  misc_feature (1)..(345): NCBI GI NO: 22330951 NR Description: RecA protein -related [Arabidopsis thaliana]
  misc_feature (1)..(345): NCBI GI NO: 6143863 NR Description: putative RecA protein [Arabidopsis thaliana]
  misc_feature (202)..(311): NCBI GI NO: 34906584 NR Description: hypothetical protein~similar to Arabidopsis RecA-like protein
  misc_feature (75)..(159): NCBI GI NO: 34906584 NR Description: hypothetical protein~similar to Arabidopsis RecA-like protein
  misc_feature (18)..(344): NCBI GI NO: 15224783 NR Description: recA protein -related [Arabidopsis thaliana]
  misc_feature (42)..(340): NCBI GI NO: 34907710 NR Description: putative RecA protein
  misc_feature (11)..(340): NCBI GI NO: 17987070 NR Description: RECA PROTEIN [Brucella melitensis]
  misc_feature (11)..(340): NCBI GI NO: 22966246 NR Description: hypothetical protein [Rhodospirillum rubrum]
  misc_feature (11)..(340): NCBI GI NO: 23502079 NR Description: recA protein [Brucella suis 1330]

SEQ ID NO: 24518 - DNA, 750 bp, Zea mays subsp. mays
  misc_feature (1)..(750): Ceres Seq. ID no. 12414205
agccgactgggactgagaagaaacctccaaacacctacctctctacgaactacctgccgccggaaaaccctagagcgctcgaccatggatccgcagcagccggagcctgtcagttacctctgcggagattgcggacgtgagaacaccctgaagcccggagatgtcatccagtgccgtgaatgtggctaccgcatcctctacaagaagcggtagccacattcacggcactggaagacctctgagggtgaactgcgggccaccgccacctagagatggatccgcaccaagagcaccaaggggtggtggtggtggcggcggcggcagcagctttgtcgattcagggaacaaggtatacgtggggaaccttgcatggggcgttgacaactcgactctggagaacctattcagtgagcaaggacaggtgctggatgctaaggtcatctacgacagggatagcggcaggtcaagggggtttggtttcgtcacctatggctctgccgaggaggtcaacaatgccatatcaaaccttgatggcatagacttggatggtagacagatccgagtcacggttgcagaatcaaagcccaggcgtgaattttgagattttgttaaggtggtttagaggtcaatagcgtgtgttcacaagttctagtttgtagcgtctattctttcttccgtatgagtaacaagaagatgctgataatgagagactggaagtgaaactgctgtccacaggaagatatttttccc

SEQ ID NO: 24519 - protein, 146 aa, Zea mays subsp. mays
  peptide (1)..(146): Ceres Seq. ID no. 12414206
  misc_feature (64)..(135): Pfam Name: a.k.a. RRM, RBD, or RNP domain Pfam Description: RNA recognition motif.
  misc_feature (24)..(146): NCBI GI NO: 34913270 NR Description: putative ribonucleoprotein
  misc_feature (3)..(146): NCBI GI NO: 15228102 NR Description: chloroplast RNA-binding protein cp29, putative
  misc_feature (3)..(146): NCBI GI NO: 21617920 NR Description: putative RNA-binding protein
  misc_feature (1)..(146): NCBI GI NO: 18921322 NR Description: putative ribonucleoprotein [Oryza sativa]
  misc_feature (3)..(146): NCBI GI NO: 1350820 NR Description: 30 kDa ribonucleoprotein, chloroplast precursor
  misc_feature (3)..(146): NCBI GI NO: 12230584 NR Description: 29 kDa ribonucleoprotein A, chloroplast precursor
  misc_feature (3)..(146): NCBI GI NO: 1350821 NR Description: 31 kDa ribonucleoprotein, chloroplast precursor
  misc_feature (3)..(146): NCBI GI NO: 17432522 NR Description: single-stranded DNA binding protein precursor
  misc_feature (3)..(146): NCBI GI NO: 12230585 NR Description: 29 kDa ribonucleoprotein B, chloroplast precursor
  misc_feature (39)..(144): NCBI GI NO: 681904 NR Description: cp29 [Arabidopsis thaliana]
MSSSAVNVATASSTRSGSHIHGTGRPLRVNCGPPPPRDGSAPRAPRGGGGGGGGSSFVDSGNKVYVGNLAWGVDNSTLENLFSEQGQVLDAKVIYDRDSGRSRGFGFVTYGSAEEVNNAISNLDGIDLDGRQIRVTVAESKPRREF

SEQ ID NO: 24520 - protein, 88 aa, Zea mays subsp. mays
  peptide (1)..(88): Ceres Seq. ID no. 12414207
MDPHQEHQGVVVVAAAAAALSIQGTRYTWGTLHGALTTRLWRTYSVSKDRCWMLRSSTTGIAAGQGGLVSSPMALPRRSTMPYQTLMA

SEQ ID NO: 24521 - DNA, 1170 bp, Zea mays subsp. mays
  misc_feature (1)..(1170): Ceres Seq. ID no. 12407328
gtgtttaggtgtttagagactaaaagagactgaaaaataaggattaaaaattactccataaaaccaaataccctaactttttcctttccgcatgtaacgacgcaatcgacatcccctcgcctaccccagctctacccgcgacgaagcatcaccagtaaggatgacgggctcaatggatctcccggccaagggcgggttcagcttcgacctgtgccgccgcaacagcatgctggagaagaacgggctcaaactcccgggattcaggaagaccggaacaaccatcgtcggcctcgtctttcaggatggggttgttcttggggcagacacaagagcaactgaggggcctatagttgctgataagaattgtgagaagatccactttatggcgccaaacatttattgttgtggagcaggaactgctgctgacactgaggctgttacagacatggtcagctcacagctacagctgcaccgttatgcaacgggtcgcgaatctagagtcgtaactgctcttacactgctgaagtcacatctctttaggtatcaaggccatgtcagtgctgcccttgttcttggtggagtggattgtactggaccacatcttcacactgcttatccacacggctccactgatactcttccttttgccacgatgggttctggatcccttgctgcaatgtcagtgtttgaatcgaagtataaagaaggcctcactagggaagagggaatacaactggtgtcagaagcaatatgtgcaggtatcttcaatgacttgggtagtggaagcaatgtggatgtctgcgtgataaccaaggggaagacagaatacttgagaaatcaccagttgccgaatcccagaacttatgttagttcaaagggatatagcttcaccaaggggcagactgaggtgctgtccgcaaagatcacacatctcaagcagaaggttgaggtcactgagggcggtgatgctatggaggagtgatcctgtatgcttgcattcaggtaaaacagtcatactcttttttatattattttacttagtgtaggagctaggacaagacagaatggagatctttgttgtactttcttgactgaatccggactttcatgtgaaaggtgtttccaattaaatgcttgtttctgaatgtttaaactgcaatggtatgttac

SEQ ID NO: 24522 - protein, 273 aa, Zea mays subsp. mays
  peptide (1)..(273): Ceres Seq. ID no. 12407329
  misc_feature (36)..(216): Pfam Name: Pfam Description:  Proteasome A-type and B-type
  misc_feature (1)..(273): NCBI GI NO: 8671504 NR Description: beta 2 subunit of 20S proteasome
  misc_feature (4)..(273): NCBI GI NO: 18405364 NR Description: 20S proteasome beta subunit B
  misc_feature (4)..(273): NCBI GI NO: 2511578 NR Description: multicatalytic endopeptidase
  misc_feature (4)..(273): NCBI GI NO: 15237451 NR Description: 20S proteasome beta subunit B
  misc_feature (4)..(273): NCBI GI NO: 20260224 NR Description: 20S proteasome beta subunit PBB2
  misc_feature (4)..(273): NCBI GI NO: 21593337 NR Description: 20S proteasome beta subunit PBB2
  misc_feature (4)..(245): NCBI GI NO: 30688785 NR Description: 20S proteasome beta subunit B (PBB1)
  misc_feature (56)..(273): NCBI GI NO: 2511576 NR Description: multicatalytic endopeptidase
  misc_feature (4)..(266): NCBI GI NO: 4506203 NR Description: proteasome beta 7 subunit proprotein
  misc_feature (4)..(266): NCBI GI NO: 12653475 NR Description: proteasome
MTGSMDLPAKGGFSFDLCRRNSMLEKNGLKLPGFRKTGTTIVGLVFQDGVVLGADTRATEGPIVADKNCEKIHFMAPNIYCCGAGTAADTEAVTDMVSSQLQLHRYATGRESRVVTALTLLKSHLFRYQGHVSAALVLGGVDCTGPHLHTAYPHGSTDTLPFATMGSGSLAAMSVFESKYKEGLTREEGIQLVSEAICAGIFNDLGSGSNVDVCVITKGKTEYLRNHQLPNPRTYVSSKGYSFTKGQTEVLSAKITHLKQKVEVTEGGDAMEE

SEQ ID NO: 24523 - protein, 269 aa, Zea mays subsp. mays
  peptide (1)..(269): Ceres Seq. ID no. 12407330
  misc_feature (32)..(212): Pfam Name: Pfam Description:  Proteasome A-type and B-type
  misc_feature (1)..(269): NCBI GI NO: 8671504 NR Description: beta 2 subunit of 20S proteasome
  misc_feature (1)..(269): NCBI GI NO: 18405364 NR Description: 20S proteasome beta subunit B
  misc_feature (1)..(269): NCBI GI NO: 2511578 NR Description: multicatalytic endopeptidase
  misc_feature (1)..(269): NCBI GI NO: 15237451 NR Description: 20S proteasome beta subunit B
  misc_feature (1)..(269): NCBI GI NO: 20260224 NR Description: 20S proteasome beta subunit PBB2
  misc_feature (1)..(269): NCBI GI NO: 21593337 NR Description: 20S proteasome beta subunit PBB2
  misc_feature (1)..(241): NCBI GI NO: 30688785 NR Description: 20S proteasome beta subunit B (PBB1)
  misc_feature (52)..(269): NCBI GI NO: 2511576 NR Description: multicatalytic endopeptidase
  misc_feature (1)..(262): NCBI GI NO: 4506203 NR Description: proteasome beta 7 subunit proprotein
  misc_feature (1)..(262): NCBI GI NO: 12653475 NR Description: proteasome
MDLPAKGGFSFDLCRRNSMLEKNGLKLPGFRKTGTTIVGLVFQDGVVLGADTRATEGPIVADKNCEKIHFMAPNIYCCGAGTAADTEAVTDMVSSQLQLHRYATGRESRVVTALTLLKSHLFRYQGHVSAALVLGGVDCTGPHLHTAYPHGSTDTLPFATMGSGSLAAMSVFESKYKEGLTREEGIQLVSEAICAGIFNDLGSGSNVDVCVITKGKTEYLRNHQLPNPRTYVSSKGYSFTKGQTEVLSAKITHLKQKVEVTEGGDAMEE

SEQ ID NO: 24524 - protein, 251 aa, Zea mays subsp. mays
  peptide (1)..(251): Ceres Seq. ID no. 12407331
  misc_feature (14)..(194): Pfam Name: Pfam Description:  Proteasome A-type and B-type
  misc_feature (1)..(251): NCBI GI NO: 8671504 NR Description: beta 2 subunit of 20S proteasome
  misc_feature (1)..(251): NCBI GI NO: 18405364 NR Description: 20S proteasome beta subunit B
  misc_feature (1)..(251): NCBI GI NO: 2511578 NR Description: multicatalytic endopeptidase
  misc_feature (1)..(251): NCBI GI NO: 15237451 NR Description: 20S proteasome beta subunit B
  misc_feature (1)..(251): NCBI GI NO: 20260224 NR Description: 20S proteasome beta subunit PBB2
  misc_feature (1)..(251): NCBI GI NO: 21593337 NR Description: 20S proteasome beta subunit PBB2
  misc_feature (1)..(223): NCBI GI NO: 30688785 NR Description: 20S proteasome beta subunit B (PBB1)
  misc_feature (34)..(251): NCBI GI NO: 2511576 NR Description: multicatalytic endopeptidase
  misc_feature (1)..(244): NCBI GI NO: 4506203 NR Description: proteasome beta 7 subunit proprotein
  misc_feature (1)..(244): NCBI GI NO: 12653475 NR Description: proteasome
MLEKNGLKLPGFRKTGTTIVGLVFQDGVVLGADTRATEGPIVADKNCEKIHFMAPNIYCCGAGTAADTEAVTDMVSSQLQLHRYATGRESRVVTALTLLKSHLFRYQGHVSAALVLGGVDCTGPHLHTAYPHGSTDTLPFATMGSGSLAAMSVFESKYKEGLTREEGIQLVSEAICAGIFNDLGSGSNVDVCVITKGKTEYLRNHQLPNPRTYVSSKGYSFTKGQTEVLSAKITHLKQKVEVTEGGDAMEE

SEQ ID NO: 24525 - DNA, 1520 bp, Zea mays subsp. mays
  misc_feature (1)..(1520): Ceres Seq. ID no. 12373839
attttcgtagtgcactctctagtctctccacacaccacagtcgagcgagcactcctctccatggcccacggcgagggacgacgccagcatttcctggtggtggccctcggcgtccaaagccacgtcaacccggggcgcgccctcgcccaccgcctcgcacggctacgcgccgacggctccatcacggccacgctctccgtgccggtaaccacctaccggcgcatgttccctcggtcggcggattccgccccagcgacggcggagaccagcgacggggtcatctcgtacgtggcgcactcagacggcctcgacgacggctcgtcgtcgtcctgggccgcggacgccgaggacagggcgcgcaggcgccgcgcgagcgccgacagcctctccgccgtggccgcccgcctggccggccgcggccgcccggtgacgtgcatcgcgtgcacgatggtgtcgcctccggcgctcgacgtcgcgcgggagcacgccatccctctcgccgtcttctggctccagccggccaccgtcctcgccctctgctaccactacttccacggccacggcgcgagcgtggccgcccacgccgcggacccggcgcacgaggtgcgcgtgcccgggctgcgccgccccctccgcatgcgctgcctcccgtcgttcctcaccgacacgtcgggcagcgacagggccacggccctcaccgacgtgttccgagagctgttcgagttcttggaccgctggcggcccacggtgctggtcaacacgttcgacgagctggagccggacccgctcgcggaggtgaggcgccacctggacgtggtcgccgttggccccatggtcgggcccgccacggacgccccgcatccacctgttcgaccacgacgacgacgccggcaagaagaggtacacggagtggcttcacgctcacccggacggctcggtggtgtacgcgtcgttcgggagcgtcacgaagctcgccaagcggcagatgcaggagatcgccggagggttgcgccagtgcgggcggccgtacttgctggtcgtgcgcagggacggggtcgacgacgacgaaggcggcatccatggcctggagaacgacaccgagatgcaggggatggtcgtggactggtgcgaccagctggaggtgctgtcgcacccggcggtcggctgcttcgtctcgcattgcgggtggaactcggcgacggaggccatggcgtccggcgtgcccatcgtcggtgtgcccaacatgttcgaccagccgacgaacatgtacttggtcgaggaagagtggggggtcggcgtcagaggagagcgagacgccgatggcgtgctgacaggggcggagctggcaaggtgcattgagctggtcatgggtgatggcgcaggagcagtggtgatcagggaaagggcaaaggccttgcaagagacagcgcaggcggcggccagtgcagcaggcgggcccgccgagagaaacctttgtcacctcgtcaagacgatgtcaaaataattatcaaagctgtcgt

SEQ ID NO: 24526 - protein, 452 aa, Zea mays subsp. mays
  peptide (1)..(452): Ceres Seq. ID no. 12373840
  misc_feature (49)..(279): Pfam Name: Pfam Description:  UDP-glucoronosyl and UDP-glucosyl transferase
  misc_feature (5)..(279): NCBI GI NO: 34906162 NR Description: putative anthocyanin 5-O-glucosyltransferase
  misc_feature (28)..(282): NCBI GI NO: 40714353 NR Description: anthocyanin 5-O-glucosyltransferase
  misc_feature (30)..(283): NCBI GI NO: 20146093 NR Description: glucosyltransferase NTGT2 [Nicotiana tabacum]
  misc_feature (30)..(279): NCBI GI NO: 14192682 NR Description: cold-induced glucosyl transferase
  misc_feature (30)..(282): NCBI GI NO: 6683052 NR Description: anthocyanin 5-O-glucosyltransferase
  misc_feature (28)..(282): NCBI GI NO: 4115559 NR Description: UDP-glucose:anthocysnin 5-O-glucosyltransferase
  misc_feature (28)..(288): NCBI GI NO: 4115561 NR Description: UDP-glucose:anthocyanin 5-O-glucosyltransferase homologue
  misc_feature (28)..(291): NCBI GI NO: 4115563 NR Description: UDP-glucose:anthocyanin 5-O-glucosyltransferase
  misc_feature (30)..(284): NCBI GI NO: 2149127 NR Description: UDP-glucose: indole-3-acetate beta-D-glucosyltransferase
  misc_feature (30)..(284): NCBI GI NO: 18414478 NR Description: glucosyltransferase like protein
IFVVHSLVSPHTTVERALLSMAHGEGRRQHFLVVALGVQSHVNPGRALAHRLARLRADGSITATLSVPVTTYRRMFPRSADSAPATAETSDGVISYVAHSDGLDDGSSSSWAADAEDRARRRRASADSLSAVAARLAGRGRPVTCIACTMVSPPALDVAREHAIPLAVFWLQPATVLALCYHYFHGHGASVAAHAADPAHEVRVPGLRRPLRMRCLPSFLTDTSGSDRATALTDVFRELFEFLDRWRPTVLVNTFDELEPDPLAEVRRHLDVVAVGPMVGPATDAPHPPVRPRRRRRQEEVHGVASRSPGRLGGVRVVRERHEARQAADAGDRRRVAPVRAAVLAGRAQGRGRRRRRRHPWPGERHRDAGDGRGLVRPAGGAVAPGGRLLRLALRVELGDGGHGVRRAHRRCAQHVRPADEHVLGRGRVGGRRQRRARRRWRADRGGAGKVH

SEQ ID NO: 24527 - protein, 442 aa, Zea mays subsp. mays
  peptide (1)..(442): Ceres Seq. ID no. 12373841
  misc_feature (285)..(442): Pfam Name: Pfam Description:  Equine herpesvirus glycoprotein gp2
  misc_feature (257)..(439): NCBI GI NO: 30313663 NR Description: sublingual apomucin [Mus musculus]
  misc_feature (257)..(439): NCBI GI NO: 30313663 NR Description: sublingual apomucin [Mus musculus]
  misc_feature (17)..(276): NCBI GI NO: 30984486 NR Description: immediate early protein ICP0
FRSALSSLSTHHSRASTPLHGPRRGTTPAFPGGGPRRPKPRQPGARPRPPPRTATRRRLHHGHALRAGNHLPAHVPSVGGFRPSDGGDQRRGHLVRGALRRPRRRLVVVLGRGRRGQGAQAPRERRQPLRRGRPPGRPRPPGDVHRVHDGVASGARRRAGARHPSRRLLAPAGHRPRPLLPLLPRPRRERGRPRRGPGARGARARAAPPPPHALPPVVPHRHVGQRQGHGPHRRVPRAVRVLGPLAAHGAGQHVRRAGAGPARGGEAPPGRGRRWPHGRARHGRPASTCSTTTTTPARRGTRSGFTLTRTARWCTRRSGASRSSPSGRCRRSPEGCASAGGRTCWSCAGTGSTTTKAASMAWRTTPRCRGWSWTGATSWRCCRTRRSAASSRIAGGTRRRRPWRPACPSSVCPTCSTSRRTCTWSRKSGGSASEESETPMAC

SEQ ID NO: 24528 - protein, 432 aa, Zea mays subsp. mays
  peptide (1)..(432): Ceres Seq. ID no. 12373842
  misc_feature (29)..(259): Pfam Name: Pfam Description:  UDP-glucoronosyl and UDP-glucosyl transferase
  misc_feature (1)..(259): NCBI GI NO: 34906162 NR Description: putative anthocyanin 5-O-glucosyltransferase
  misc_feature (8)..(262): NCBI GI NO: 40714353 NR Description: anthocyanin 5-O-glucosyltransferase
  misc_feature (10)..(263): NCBI GI NO: 20146093 NR Description: glucosyltransferase NTGT2 [Nicotiana tabacum]
  misc_feature (10)..(259): NCBI GI NO: 14192682 NR Description: cold-induced glucosyl transferase
  misc_feature (10)..(262): NCBI GI NO: 6683052 NR Description: anthocyanin 5-O-glucosyltransferase
  misc_feature (8)..(262): NCBI GI NO: 4115559 NR Description: UDP-glucose:anthocysnin 5-O-glucosyltransferase
  misc_feature (8)..(268): NCBI GI NO: 4115561 NR Description: UDP-glucose:anthocyanin 5-O-glucosyltransferase homologue
  misc_feature (8)..(271): NCBI GI NO: 4115563 NR Description: UDP-glucose:anthocyanin 5-O-glucosyltransferase
  misc_feature (10)..(264): NCBI GI NO: 2149127 NR Description: UDP-glucose: indole-3-acetate beta-D-glucosyltransferase
  misc_feature (10)..(264): NCBI GI NO: 18414478 NR Description: glucosyltransferase like protein
MAHGEGRRQHFLVVALGVQSHVNPGRALAHRLARLRADGSITATLSVPVTTYRRMFPRSADSAPATAETSDGVISYVAHSDGLDDGSSSSWAADAEDRARRRRASADSLSAVAARLAGRGRPVTCIACTMVSPPALDVAREHAIPLAVFWLQPATVLALCYHYFHGHGASVAAHAADPAHEVRVPGLRRPLRMRCLPSFLTDTSGSDRATALTDVFRELFEFLDRWRPTVLVNTFDELEPDPLAEVRRHLDVVAVGPMVGPATDAPHPPVRPRRRRRQEEVHGVASRSPGRLGGVRVVRERHEARQAADAGDRRRVAPVRAAVLAGRAQGRGRRRRRRHPWPGERHRDAGDGRGLVRPAGGAVAPGGRLLRLALRVELGDGGHGVRRAHRRCAQHVRPADEHVLGRGRVGGRRQRRARRRWRADRGGAGKVH

SEQ ID NO: 24529 - DNA, 1620 bp, Zea mays subsp. mays
  misc_feature (1)..(1620): Ceres Seq. ID no. 12372917
aaactcccgcggtgccgcgcctcgctttcgcatccccccgcggagaggagaggaagaagaacccagccaaatcctcagtcctcaggcagtcaggctgctcgcagctcgtgccgtccactctcccccgaggcagtctcttgcgttcgctgctcgacatggcgctccaggcggcgacgtccttcctcccctctgccctctccgcgcgcaaggaggggtcggtgaaggactcggcgtcgttcttgggtgttcgtctcgcggcggatggcctcaagctggacaccaccgctctgggcctacgcaccgtgagggtgagcaggtcggcggacatccgcgcgcagacggcagcggtgtcctccccgtcagtgacccccgcgtcgccgtctggcaagaagaccctccgcaagggcacggcggtcatcaccggcgcgtcgtccggcctcggcctcgccacggcgaaggccctggcggagacaggcaagtggcacgtcatcatggcctgccgcgacttcctcaaggcgtcgcgcgcggccaaggcggccggcatggacaaggacagcttcaccgtcgtgcacctggacctcgcctccctggacagcgtccgccagttcgtcaggaacgtgcgccagctggagatgcccatcgacgtggtggtctgcaacgccgccgtgtaccagcccaccgccaaggagccgtcctacaccgccgacggcttcgagatgagcgtcggcgtcaaccacctcggccacttcctcctcgcgcgcgagctcctcagcgacctccagtcctccgactacccctctaagcgcctcatcatcgtcggctccatcaccgggaacacgaacacgctggcggggaacgtgcccccgaaggcgaacctgggcgacctgcgcggcctcgccggcggcctcaacggcgttggcagctcggtgatgatcgacggcggggagttcgacggcgccaaggcatacaaggacagcaaggtgtggcaacatgctgacgatgcaggagttccaccgccggtaccacgaggagacgggcgtgaccttcgcgtcgctctacccgggctgcatcgccaccacgggcctgttccgcgagcacatcccgctgttccgcctgctcttccccccgttccagaagtacatcaccaaggggtacgtctccgaggaggaggccgggaagcggctggcgcaggtggtgagcgaccccagcctgaccaagtccggcgtgtactggagctggaacaagaactccgcgtccttcgagaaccagctctctgaggaggccagcgacgccgacaaggccaagaagctctgggagatcagcgagaagctcgtcggcttggcgtgatgcccaccgtggccggcgtcggcagccggcgacagtttttcctacctaggacatgctcattagttggtctcagtcgagtagtcgacgtgtggtgcgcccgtgtcagagtgccaagccaagacagaaagtgagtacaaacgtgtaaaatatgtgctactgcgacgtgatggtttgggcagtggactgtatgtatctctactctctaggcttctgctttgctttgcatatttaattttctgctaataagaggacagcaaatgcctttcgagcttc

SEQ ID NO: 24530 - protein, 424 aa, Zea mays subsp. mays
  peptide (1)..(424): Ceres Seq. ID no. 12372918
  misc_feature (52)..(327): NCBI GI NO: 10720236 NR Description: Protochlorophyllide reductase B
  misc_feature (52)..(327): NCBI GI NO: 10720233 NR Description: Protochlorophyllide reductase
  misc_feature (52)..(327): NCBI GI NO: 81946 NR Description: protochlorophyllide reductase (EC 1
  misc_feature (52)..(327): NCBI GI NO: 266742 NR Description: Protochlorophyllide reductase
  misc_feature (52)..(327): NCBI GI NO: 10720220 NR Description: Protochlorophyllide reductase
  misc_feature (52)..(327): NCBI GI NO: 15239574 NR Description: NADPH:protochlorophyllide oxidoreductase A
  misc_feature (52)..(327): NCBI GI NO: 968975 NR Description: NADPH:protochlorophyllide oxidoreductase A
  misc_feature (52)..(327): NCBI GI NO: 21068893 NR Description: NADPH:protochlorophyllide oxidoreductase
  misc_feature (52)..(327): NCBI GI NO: 15234129 NR Description: protochlorophyllide reductase precursor
  misc_feature (17)..(327): NCBI GI NO: 10720231 NR Description: Protochlorophyllide reductase
TPAVPRLAFASPRGEERKKNPAKSSVLRQSGCSQLVPSTLPRGSLLRSLLDMALQAATSFLPSALSARKEGSVKDSASFLGVRLAADGLKLDTTALGLRTVRVSRSADIRAQTAAVSSPSVTPASPSGKKTLRKGTAVITGASSGLGLATAKALAETGKWHVIMACRDFLKASRAAKAAGMDKDSFTVVHLDLASLDSVRQFVRNVRQLEMPIDVVVCNAAVYQPTAKEPSYTADGFEMSVGVNHLGHFLLARELLSDLQSSDYPSKRLIIVGSITGNTNTLAGNVPPKANLGDLRGLAGGLNGVGSSVMIDGGEFDGAKAYKDSKVWQHADDAGVPPPVPRGDGRDLRVALPGLHRHHGPVPRAHPAVPPALPPVPEVHHQGVRLRGGGREAAGAGGERPQPDQVRRVLELEQELRVLREPAL

SEQ ID NO: 24531 - protein, 373 aa, Zea mays subsp. mays
  peptide (1)..(373): Ceres Seq. ID no. 12372919
  misc_feature (1)..(276): NCBI GI NO: 10720236 NR Description: Protochlorophyllide reductase B
  misc_feature (1)..(276): NCBI GI NO: 10720233 NR Description: Protochlorophyllide reductase
  misc_feature (1)..(276): NCBI GI NO: 81946 NR Description: protochlorophyllide reductase (EC 1
  misc_feature (1)..(276): NCBI GI NO: 266742 NR Description: Protochlorophyllide reductase
  misc_feature (1)..(276): NCBI GI NO: 10720220 NR Description: Protochlorophyllide reductase
  misc_feature (1)..(276): NCBI GI NO: 15239574 NR Description: NADPH:protochlorophyllide oxidoreductase A
  misc_feature (1)..(276): NCBI GI NO: 968975 NR Description: NADPH:protochlorophyllide oxidoreductase A
  misc_feature (1)..(276): NCBI GI NO: 21068893 NR Description: NADPH:protochlorophyllide oxidoreductase
  misc_feature (1)..(276): NCBI GI NO: 15234129 NR Description: protochlorophyllide reductase precursor
  misc_feature (1)..(276): NCBI GI NO: 10720231 NR Description: Protochlorophyllide reductase
MALQAATSFLPSALSARKEGSVKDSASFLGVRLAADGLKLDTTALGLRTVRVSRSADIRAQTAAVSSPSVTPASPSGKKTLRKGTAVITGASSGLGLATAKALAETGKWHVIMACRDFLKASRAAKAAGMDKDSFTVVHLDLASLDSVRQFVRNVRQLEMPIDVVVCNAAVYQPTAKEPSYTADGFEMSVGVNHLGHFLLARELLSDLQSSDYPSKRLIIVGSITGNTNTLAGNVPPKANLGDLRGLAGGLNGVGSSVMIDGGEFDGAKAYKDSKVWQHADDAGVPPPVPRGDGRDLRVALPGLHRHHGPVPRAHPAVPPALPPVPEVHHQGVRLRGGGREAAGAGGERPQPDQVRRVLELEQELRVLREPAL

SEQ ID NO: 24532 - protein, 266 aa, Zea mays subsp. mays
  peptide (1)..(266): Ceres Seq. ID no. 12372920
NSRGAAPRFRIPPRRGEEEEPSQILSPQAVRLLAARAVHSPPRQSLAFAARHGAPGGDVLPPLCPLRAQGGVGEGLGVVLGCSSRGGWPQAGHHRSGPTHREGEQVGGHPRADGSGVLPVSDPRVAVWQEDPPQGHGGHHRRVVRPRPRHGEGPGGDRQVARHHGLPRLPQGVARGQGGRHGQGQLHRRAPGPRLPGQRPPVRQERAPAGDAHRRGGLQRRRVPAHRQGAVLHRRRLRDERRRQPPRPLPPRARAPQRPPVLRLPL

SEQ ID NO: 24533 - DNA, 1574 bp, Zea mays subsp. mays
  misc_feature (1)..(1574): Ceres Seq. ID no. 12362111
gtcgatggaggaacaacacatggctgggccgccgtaccgctaccggcttcggcatctccggctgatggacatagcacccgcaagcgcgagcaacgacgattcagggcatcacggctccaacgggatggccatcatggtgtcgatcctggtggtggtcatcgtctgcaccctcttctactgcgtctactgctggagatggaggaagcgcaacgctgtcaggagagcgcagatagagaggctgaggccgatgtccagctcggacctgccgctcatggacctgtcctccatccacgaggccaccaacagcttctccaaggagaacaagctcggcgaaggcggtttcgggcccgtctatcggggcgtgatgggcggcggcgcggagatcgccgtgaagcggctgtcggctcggtcgcggcagggcgcggcggagttccgcaacgaggtggagctgatcgccaagctgcagcaccggaacctggtccgcctgctgggatgctgcgtcgagagggacgagaagatgctcgtctacgagtacctccccaaccgaagcctcgactccttcctcttcgatagcaggaagagcgggcagctggactggaagacgaggcagagcatcgtcctggggatcgcccgcggcatgctgtacctgcacgaggactcgtgcctcaaggtcatccacagggacctcaaggccagcaacgtgctcctggacaacaggatgaaccctaagatctccgacttcggcatggccaagatcttcgaggaggagggcaacgagcctaacacgggccccgtggtcggcacctacgggtacatggctccggagtacgccatggagggcgtcttctcggtgaagtcagacgtcttcagcttcggggtgctggtgctagagatcctcagcgggcagcggaacggctccatgtacctccaggagcaccagcacaccctgattcaagatgcctggaagctgtggaacgaggacagggcggcggagttcatggacgcggcgctggcggggtcgtacccgcgggacgaggcgtggcggtgcttccacgtggggctgctgtgcgtgcaggagagcccggacctccggcccaccatgtccagcgtggtgctcatgctcatcagcgaccagacggcgcagcagatgccggcgccggcgcagccgccgctgttcgccagcaggctcggcaggaaggcgtccgcgtcggacttgtcgctggccatgaagacggagacgaccaagacgcagtccgtcaacgaggtgtccatctccatgatggagccacggtgagacgaggggggccttgcttgatcgtcaaccaacaagtgtccgtctccgtcccatccgcatgagaaacccttactcggggagccgtcgtgatttgcttggttctttgatcagcaacgggatacgctgtgcgtcgtcgtagtcggtgcgcgcgtgtatgtgtgtgatggttacggatgtcttgcgagccgtaatcgcgctgggaaagtcccaggccccagcctttgtcgcgggaaaaatcttgtagccgtgacatgtgcagcgagaaaaacgctttgagact

SEQ ID NO: 24534 - protein, 430 aa, Zea mays subsp. mays
  peptide (1)..(430): Ceres Seq. ID no. 12362112
  misc_feature (26)..(430): NCBI GI NO: 24417476 NR Description: unknown [Arabidopsis thaliana]
  misc_feature (26)..(430): NCBI GI NO: 30686087 NR Description: serine/threonine kinase -related protein
  misc_feature (32)..(430): NCBI GI NO: 38344785 NR Description: OSJNBa0043L09.5
  misc_feature (40)..(430): NCBI GI NO: 13506745 NR Description: receptor-like protein kinase 4
  misc_feature (74)..(430): NCBI GI NO: 34898618 NR Description: putative S-receptor kinase
  misc_feature (81)..(427): NCBI GI NO: 15234429 NR Description: serine/threonine kinase - like protein
  misc_feature (81)..(427): NCBI GI NO: 7434416 NR Description: serine/threonine kinase (EC 2
  misc_feature (41)..(430): NCBI GI NO: 15237047 NR Description: putative receptor protein kinase
  misc_feature (25)..(430): NCBI GI NO: 34898856 NR Description: OJ1058_A12.26
  misc_feature (83)..(430): NCBI GI NO: 7488195 NR Description: probable serine/threonine-specific protein kinase
SMEEQHMAGPPYRYRLRHLRLMDIAPASASNDDSGHHGSNGMAIMVSILVVVIVCTLFYCVYCWRWRKRNAVRRAQIERLRPMSSSDLPLMDLSSIHEATNSFSKENKLGEGGFGPVYRGVMGGGAEIAVKRLSARSRQGAAEFRNEVELIAKLQHRNLVRLLGCCVERDEKMLVYEYLPNRSLDSFLFDSRKSGQLDWKTRQSIVLGIARGMLYLHEDSCLKVIHRDLKASNVLLDNRMNPKISDFGMAKIFEEEGNEPNTGPVVGTYGYMAPEYAMEGVFSVKSDVFSFGVLVLEILSGQRNGSMYLQEHQHTLIQDAWKLWNEDRAAEFMDAALAGSYPRDEAWRCFHVGLLCVQESPDLRPTMSSVVLMLISDQTAQQMPAPAQPPLFASRLGRKASASDLSLAMKTETTKTQSVNEVSISMMEPR

SEQ ID NO: 24535 - protein, 429 aa, Zea mays subsp. mays
  peptide (1)..(429): Ceres Seq. ID no. 12362113
  misc_feature (25)..(429): NCBI GI NO: 24417476 NR Description: unknown [Arabidopsis thaliana]
  misc_feature (25)..(429): NCBI GI NO: 30686087 NR Description: serine/threonine kinase -related protein
  misc_feature (31)..(429): NCBI GI NO: 38344785 NR Description: OSJNBa0043L09.5
  misc_feature (39)..(429): NCBI GI NO: 13506745 NR Description: receptor-like protein kinase 4
  misc_feature (73)..(429): NCBI GI NO: 34898618 NR Description: putative S-receptor kinase
  misc_feature (80)..(426): NCBI GI NO: 15234429 NR Description: serine/threonine kinase - like protein
  misc_feature (80)..(426): NCBI GI NO: 7434416 NR Description: serine/threonine kinase (EC 2
  misc_feature (40)..(429): NCBI GI NO: 15237047 NR Description: putative receptor protein kinase
  misc_feature (24)..(429): NCBI GI NO: 34898856 NR Description: OJ1058_A12.26
  misc_feature (82)..(429): NCBI GI NO: 7488195 NR Description: probable serine/threonine-specific protein kinase
MEEQHMAGPPYRYRLRHLRLMDIAPASASNDDSGHHGSNGMAIMVSILVVVIVCTLFYCVYCWRWRKRNAVRRAQIERLRPMSSSDLPLMDLSSIHEATNSFSKENKLGEGGFGPVYRGVMGGGAEIAVKRLSARSRQGAAEFRNEVELIAKLQHRNLVRLLGCCVERDEKMLVYEYLPNRSLDSFLFDSRKSGQLDWKTRQSIVLGIARGMLYLHEDSCLKVIHRDLKASNVLLDNRMNPKISDFGMAKIFEEEGNEPNTGPVVGTYGYMAPEYAMEGVFSVKSDVFSFGVLVLEILSGQRNGSMYLQEHQHTLIQDAWKLWNEDRAAEFMDAALAGSYPRDEAWRCFHVGLLCVQESPDLRPTMSSVVLMLISDQTAQQMPAPAQPPLFASRLGRKASASDLSLAMKTETTKTQSVNEVSISMMEPR

SEQ ID NO: 24536 - protein, 424 aa, Zea mays subsp. mays
  peptide (1)..(424): Ceres Seq. ID no. 12362114
  misc_feature (20)..(424): NCBI GI NO: 24417476 NR Description: unknown [Arabidopsis thaliana]
  misc_feature (20)..(424): NCBI GI NO: 30686087 NR Description: serine/threonine kinase -related protein
  misc_feature (26)..(424): NCBI GI NO: 38344785 NR Description: OSJNBa0043L09.5
  misc_feature (34)..(424): NCBI GI NO: 13506745 NR Description: receptor-like protein kinase 4
  misc_feature (68)..(424): NCBI GI NO: 34898618 NR Description: putative S-receptor kinase
  misc_feature (75)..(421): NCBI GI NO: 15234429 NR Description: serine/threonine kinase - like protein
  misc_feature (75)..(421): NCBI GI NO: 7434416 NR Description: serine/threonine kinase (EC 2
  misc_feature (35)..(424): NCBI GI NO: 15237047 NR Description: putative receptor protein kinase
  misc_feature (19)..(424): NCBI GI NO: 34898856 NR Description: OJ1058_A12.26
  misc_feature (77)..(424): NCBI GI NO: 7488195 NR Description: probable serine/threonine-specific protein kinase
MAGPPYRYRLRHLRLMDIAPASASNDDSGHHGSNGMAIMVSILVVVIVCTLFYCVYCWRWRKRNAVRRAQIERLRPMSSSDLPLMDLSSIHEATNSFSKENKLGEGGFGPVYRGVMGGGAEIAVKRLSARSRQGAAEFRNEVELIAKLQHRNLVRLLGCCVERDEKMLVYEYLPNRSLDSFLFDSRKSGQLDWKTRQSIVLGIARGMLYLHEDSCLKVIHRDLKASNVLLDNRMNPKISDFGMAKIFEEEGNEPNTGPVVGTYGYMAPEYAMEGVFSVKSDVFSFGVLVLEILSGQRNGSMYLQEHQHTLIQDAWKLWNEDRAAEFMDAALAGSYPRDEAWRCFHVGLLCVQESPDLRPTMSSVVLMLISDQTAQQMPAPAQPPLFASRLGRKASASDLSLAMKTETTKTQSVNEVSISMMEPR

SEQ ID NO: 24537 - DNA, 1432 bp, Zea mays subsp. mays
  misc_feature (1)..(1432): Ceres Seq. ID no. 12387277
actctcacagccacgccacgccacgagagaagaatgccgccgacgctgggcctgctcctcgcggcggcggcggcggtcctgctgctgctgctgccgccgccaccatcgacgggggcgcaggagacgtgctggtcggggccggcgccgcggcgcggggcgtggatgtccgtggccagcttcggggcgcgcggggacgggcagacgctcaacacgggcgcgttcgcgcgcgccgtggcgcgcatcgcgcgtcgccggggcgcgcggggcggcacgctgctgtacgtgccgcccggggtgtggctcacgggccccttcaacctcacctcccacatgacgctcttcctcgcccgcggcgccatcgtccgcgccacccaggacacgtcgagctggccgctcatcgacccgctgccgtcgtacgggagagggcgcgagctgcctggcgggagatacatgagcttgatccacggccacggtctgcaggacgtcttcatcacaggtgagaacggcaccatcgacggccaaggcggcgtgtggtgggacatgtggaagaagcgcacgctgcccttcacgaggccgcacctgctggagctcatgtactccaccgacgtcgtcgtctccaacctcgtcttccaggactcgccgttctggaacatccacccggtttactgcagcaacgtagtgatagcaaacctgactgtgttggcgccgcacgactcccccaacaccgacgggatcgatctagattcaagcagcaacgtgtgcgtcgaggactgctacatctccgccggcgacgacctgatttccatcaagagcgggtgggacgagtacggcgtggccttcggccgcccaagctccggcatcacggtccggaggataaccgggtcgggcccgttcgccggcttcgcggtcgggagcgagacctcgggcggcgtggaggacgtcgtggccgagcacctgagcttctccggcgtgggcgtcggggtccacgtgaagaccaactcgggcaggggcggcttcatccggaacgtcaccgtctcccaggtgaccctggacggcgcccgctacggcctgaggatcgccggcgacgtcgggggccaccccggcgcgtcctacaacgcgagcctgctccccgtcgtcgacggcgtggcggtcaggaacgtctggggccggaacgtccggcaggccgggctcatacggggcatcagggactcggtcttcagtaacatttgcctctccaacgtgaagctctatggcattggcagcgactccatcgggccgtggagatgccgagccgtcagtggcagcgcactcgacgtgcaaccgtcgccatgtgcggagctggctagtacgtccgggacaggtttctgtacctgaatcagtttttccgcctcctatagcagcaataaagacgtcagcatttctcaaaaaacag

SEQ ID NO: 24538 - protein, 457 aa, Zea mays subsp. mays
  peptide (1)..(457): Ceres Seq. ID no. 12387278
  misc_feature (169)..(444): Pfam Name: Pfam Description:  Glycosyl hydrolases family 28
  misc_feature (18)..(457): NCBI GI NO: 34912726 NR Description: putative polygalacturonase
  misc_feature (36)..(457): NCBI GI NO: 15236625 NR Description: polygalacturonase, putative; protein id:At4g23820
  misc_feature (26)..(454): NCBI GI NO: 15238207 NR Description: polygalacturonase, putative; protein id:At5g41870
  misc_feature (55)..(456): NCBI GI NO: 40714685 NR Description: putative polygalacturonase
  misc_feature (55)..(447): NCBI GI NO: 18412253 NR Description: polygalacturonase, putative; protein id:At3g62110
  misc_feature (47)..(453): NCBI GI NO: 22329119 NR Description: polygalacturonase, putative; protein id:At4g33440
  misc_feature (88)..(454): NCBI GI NO: 34393209 NR Description: putative polygalacturonase
  misc_feature (55)..(447): NCBI GI NO: 11263971 NR Description: hypothetical protein T17J13
  misc_feature (18)..(456): NCBI GI NO: 34897760 NR Description: ESTs AU029388
  misc_feature (56)..(453): NCBI GI NO: 30692538 NR Description: polygalacturonase-like protein
TLTATPRHERRMPPTLGLLLAAAAAVLLLLLPPPPSTGAQETCWSGPAPRRGAWMSVASFGARGDGQTLNTGAFARAVARIARRRGARGGTLLYVPPGVWLTGPFNLTSHMTLFLARGAIVRATQDTSSWPLIDPLPSYGRGRELPGGRYMSLIHGHGLQDVFITGENGTIDGQGGVWWDMWKKRTLPFTRPHLLELMYSTDVVVSNLVFQDSPFWNIHPVYCSNVVIANLTVLAPHDSPNTDGIDLDSSSNVCVEDCYISAGDDLISIKSGWDEYGVAFGRPSSGITVRRITGSGPFAGFAVGSETSGGVEDVVAEHLSFSGVGVGVHVKTNSGRGGFIRNVTVSQVTLDGARYGLRIAGDVGGHPGASYNASLLPVVDGVAVRNVWGRNVRQAGLIRGIRDSVFSNICLSNVKLYGIGSDSIGPWRCRAVSGSALDVQPSPCAELASTSGTGFCT

SEQ ID NO: 24539 - protein, 446 aa, Zea mays subsp. mays
  peptide (1)..(446): Ceres Seq. ID no. 12387279
  misc_feature (158)..(433): Pfam Name: Pfam Description:  Glycosyl hydrolases family 28
  misc_feature (7)..(446): NCBI GI NO: 34912726 NR Description: putative polygalacturonase
  misc_feature (25)..(446): NCBI GI NO: 15236625 NR Description: polygalacturonase, putative; protein id:At4g23820
  misc_feature (15)..(443): NCBI GI NO: 15238207 NR Description: polygalacturonase, putative; protein id:At5g41870
  misc_feature (44)..(445): NCBI GI NO: 40714685 NR Description: putative polygalacturonase
  misc_feature (44)..(436): NCBI GI NO: 18412253 NR Description: polygalacturonase, putative; protein id:At3g62110
  misc_feature (36)..(442): NCBI GI NO: 22329119 NR Description: polygalacturonase, putative; protein id:At4g33440
  misc_feature (77)..(443): NCBI GI NO: 34393209 NR Description: putative polygalacturonase
  misc_feature (44)..(436): NCBI GI NO: 11263971 NR Description: hypothetical protein T17J13
  misc_feature (7)..(445): NCBI GI NO: 34897760 NR Description: ESTs AU029388
  misc_feature (45)..(442): NCBI GI NO: 30692538 NR Description: polygalacturonase-like protein
MPPTLGLLLAAAAAVLLLLLPPPPSTGAQETCWSGPAPRRGAWMSVASFGARGDGQTLNTGAFARAVARIARRRGARGGTLLYVPPGVWLTGPFNLTSHMTLFLARGAIVRATQDTSSWPLIDPLPSYGRGRELPGGRYMSLIHGHGLQDVFITGENGTIDGQGGVWWDMWKKRTLPFTRPHLLELMYSTDVVVSNLVFQDSPFWNIHPVYCSNVVIANLTVLAPHDSPNTDGIDLDSSSNVCVEDCYISAGDDLISIKSGWDEYGVAFGRPSSGITVRRITGSGPFAGFAVGSETSGGVEDVVAEHLSFSGVGVGVHVKTNSGRGGFIRNVTVSQVTLDGARYGLRIAGDVGGHPGASYNASLLPVVDGVAVRNVWGRNVRQAGLIRGIRDSVFSNICLSNVKLYGIGSDSIGPWRCRAVSGSALDVQPSPCAELASTSGTGFCT

SEQ ID NO: 24540 - protein, 403 aa, Zea mays subsp. mays
  peptide (1)..(403): Ceres Seq. ID no. 12387280
  misc_feature (115)..(390): Pfam Name: Pfam Description:  Glycosyl hydrolases family 28
  misc_feature (1)..(403): NCBI GI NO: 34912726 NR Description: putative polygalacturonase
  misc_feature (1)..(403): NCBI GI NO: 15236625 NR Description: polygalacturonase, putative; protein id:At4g23820
  misc_feature (1)..(400): NCBI GI NO: 15238207 NR Description: polygalacturonase, putative; protein id:At5g41870
  misc_feature (1)..(402): NCBI GI NO: 40714685 NR Description: putative polygalacturonase
  misc_feature (1)..(393): NCBI GI NO: 18412253 NR Description: polygalacturonase, putative; protein id:At3g62110
  misc_feature (1)..(399): NCBI GI NO: 22329119 NR Description: polygalacturonase, putative; protein id:At4g33440
  misc_feature (34)..(400): NCBI GI NO: 34393209 NR Description: putative polygalacturonase
  misc_feature (1)..(393): NCBI GI NO: 11263971 NR Description: hypothetical protein T17J13
  misc_feature (1)..(402): NCBI GI NO: 34897760 NR Description: ESTs AU029388
  misc_feature (2)..(399): NCBI GI NO: 30692538 NR Description: polygalacturonase-like protein
MSVASFGARGDGQTLNTGAFARAVARIARRRGARGGTLLYVPPGVWLTGPFNLTSHMTLFLARGAIVRATQDTSSWPLIDPLPSYGRGRELPGGRYMSLIHGHGLQDVFITGENGTIDGQGGVWWDMWKKRTLPFTRPHLLELMYSTDVVVSNLVFQDSPFWNIHPVYCSNVVIANLTVLAPHDSPNTDGIDLDSSSNVCVEDCYISAGDDLISIKSGWDEYGVAFGRPSSGITVRRITGSGPFAGFAVGSETSGGVEDVVAEHLSFSGVGVGVHVKTNSGRGGFIRNVTVSQVTLDGARYGLRIAGDVGGHPGASYNASLLPVVDGVAVRNVWGRNVRQAGLIRGIRDSVFSNICLSNVKLYGIGSDSIGPWRCRAVSGSALDVQPSPCAELASTSGTGFCT

SEQ ID NO: 24541 - DNA, 1398 bp, Zea mays subsp. mays
  misc_feature (1)..(1398): Ceres Seq. ID no. 13498659
actttcgcccatttcatttcaaaccaaaaccctctctccccttgccttccacggttccaccacaccccggatcaaatcgccacagaaaattcccagaaaaataacaagcacttgttcatcatcaaagtaaacgcggcagaaccctagcgagccgttcctccaacgactcacctcccacccactcacccaccccatggcgaccaacccctccaacggcgccggcgccgacgtccctgcaagccccggcggcggtgcggctctcggttgcggcgcaggcggccgcgatccagccctcgtccccgcgcttcttcttctcctcgcttgccgggaccaacccggcctccccgcaccgtcgcatcgccatcgccgttgatctctccgacgagtccgccttcgcagtcaagtgggccgtgcagaactacgtccgccccggggacgccgtcgtgctgctccacgtgcgccccacctccgtcctctacggcgccgactgggggttccatcccggtctccgtcgctgacgaggacgacgctgccgaggacgccgccgccgccgccgagggcgatccctcggaggaggagctgcagaagaaacgggaggaggactacgacgccttcacctccaccaaggcgcaggacctcgcgcaaccgctggtcgacgcccagatccccttcaagatccacgtcgtcaaggaccacgacatgaaggagcgcctctgcctcgaggctgagcgccttggcctctccgccatgatcatggggagccgcggtttcggggcctcccggaaaggcagcaaggggcggcttgggagtgttagtgattactgcgtacaccactgtgtatgccctgttgtggttgttcgctaccctgatgatgctgcagatgcccggtggagatgcatcaggggtgacagatgagttgcacactgtaccagaggacgaacctgtttatcacgatgcacctgaggtgcagaaagaaaactgaggcaacggccacatgcagctgaagaacgaaggaaaacacgaggcttatagtgaggcaatcctgtgtatctggaagatgggaccggatgtttatctttgcttctatatatcaactgcgtatcatgatcagctgtctgcttcccgttgagtttcatatcggcgtcgtagatcatctgagttttttgttggtttgcttgtgagatgtagagtactcttcccgtgggtcgaaggtgtcttgcagatgcttgagctttatgttgtcgaacggtagttatctacacggtatcatctgctctgttaagcctgtttagtgtttactgtattggatactcgttaatagagaaccgctacttttcagtatttattatcacctgtatattggataaaattattgcttagcttatgcttgcatgctcc

SEQ ID NO: 24542 - protein, 71 aa, Zea mays subsp. mays
  peptide (1)..(71): Ceres Seq. ID no. 13498660
  misc_feature (1)..(54): Pfam Name: Pfam Description:  Universal stress protein family
  misc_feature (1)..(62): NCBI GI NO: 34910112 NR Description: B1100D10.31
  misc_feature (1)..(58): NCBI GI NO: 28971968 NR Description: OSJNBb0041B22.10
  misc_feature (1)..(58): NCBI GI NO: 33146953 NR Description: CHP-rich zinc finger protein-like
  misc_feature (1)..(58): NCBI GI NO: 30682187 NR Description: expressed protein [Arabidopsis thaliana]
  misc_feature (1)..(58): NCBI GI NO: 25402657 NR Description: protein T23J18.3 [imported] - Arabidopsis thaliana
  misc_feature (1)..(58): NCBI GI NO: 7486798 NR Description: hypothetical protein M4I22
  misc_feature (1)..(58): NCBI GI NO: 18416966 NR Description: expressed protein [Arabidopsis thaliana]
  misc_feature (1)..(58): NCBI GI NO: 8885586 NR Description: gene_id:F24B18
  misc_feature (1)..(58): NCBI GI NO: 18423628 NR Description: expressed protein [Arabidopsis thaliana]
  misc_feature (1)..(57): NCBI GI NO: 15232490 NR Description: CHP-rich zinc finger protein, putative
MKERLCLEAERLGLSAMIMGSRGFGASRKGSKGRLGSVSDYCVHHCVCPVVVVRYPDDAADARWRCIRGDR

SEQ ID NO: 24543 - protein, 59 aa, Zea mays subsp. mays
  peptide (1)..(59): Ceres Seq. ID no. 13498661
MATNPSNGAGADVPASPGGGAALGCGAGGRDPALVPALLLLLACRDQPGLPAPSHRHRR

SEQ ID NO: 24544 - protein, 55 aa, Zea mays subsp. mays
  peptide (1)..(55): Ceres Seq. ID no. 13498662
  misc_feature (1)..(46): NCBI GI NO: 34910112 NR Description: B1100D10.31
  misc_feature (1)..(42): NCBI GI NO: 28971968 NR Description: OSJNBb0041B22.10
  misc_feature (1)..(42): NCBI GI NO: 33146953 NR Description: CHP-rich zinc finger protein-like
  misc_feature (1)..(42): NCBI GI NO: 30682187 NR Description: expressed protein [Arabidopsis thaliana]
  misc_feature (1)..(42): NCBI GI NO: 25402657 NR Description: protein T23J18.3 [imported] - Arabidopsis thaliana
  misc_feature (1)..(42): NCBI GI NO: 7486798 NR Description: hypothetical protein M4I22
  misc_feature (1)..(42): NCBI GI NO: 18416966 NR Description: expressed protein [Arabidopsis thaliana]
  misc_feature (1)..(42): NCBI GI NO: 8885586 NR Description: gene_id:F24B18
  misc_feature (1)..(42): NCBI GI NO: 18423628 NR Description: expressed protein [Arabidopsis thaliana]
  misc_feature (1)..(41): NCBI GI NO: 15232490 NR Description: CHP-rich zinc finger protein, putative
MIMGSRGFGASRKGSKGRLGSVSDYCVHHCVCPVVVVRYPDDAADARWRCIRGDR

SEQ ID NO: 24545 - DNA, 886 bp, Zea mays subsp. mays
  misc_feature (1)..(886): Ceres Seq. ID no. 12386765
tttctatggaggaacaagaggatctctggtggggtgctcgcaggcgcaactgccttctggctgctgtttgaggtcatggattaccacctcctcaccctgctatgccactgcctcatcctcaccctggccatcctgttcctctggtccaatgccacgactttcatcaacaagtctcctcctaacatccccgaggtgaagatcccagatgacctggctgtgaatgttgcacgttccctgagatatgagatcaacaggggttttgctaccttgagggagattggccaaggccatgacctcaagaaatttctgattgtgattgcaggactgtggatcctttctgttcttgggagctgctgcaatttcctcaccttgtcttacatagtttttatggtactgtacactgtaccggtcctgtatgagaaacatgaggataaggttgatgcttttggtgagaaggccatggtcgagctgaagaagtactacgccatcttcgacgagaaatgtctatcaaagattccgaagggcccattaaaagacaagaagcaacattagaagcgtagaatcagataagggtctgcggtgatttatcatctcttttgaccattactcgtcggttttggaggatggatgtgattccatgtctaaatacctggacgtgctctagtgttttagtgtggtcagtatcaatgttctaaattatctgagattacgctgaatcatgttctgaagtccacgtttaactttgctctccctatcctttggaagtggcaatttcctaaatgtctgtaatatatctagtctagtgctatttcttaatctgacctagcgtcatgatgaaccttcttggatatttatttatatgtgccaccggacatggtaactatag

SEQ ID NO: 24546 - protein, 183 aa, Zea mays subsp. mays
  peptide (1)..(183): Ceres Seq. ID no. 12386766
  misc_feature (2)..(181): NCBI GI NO: 34909318 NR Description: OSJNBb0021A09.5
  misc_feature (1)..(181): NCBI GI NO: 34904202 NR Description: P0492F05.25
  misc_feature (1)..(182): NCBI GI NO: 15236556 NR Description: putative protein; protein id: At4g23630
  misc_feature (1)..(182): NCBI GI NO: 15237093 NR Description: putative protein; protein id: At4g11220
  misc_feature (1)..(181): NCBI GI NO: 15238125 NR Description: putative protein; protein id: At5g41600
  misc_feature (1)..(175): NCBI GI NO: 15222616 NR Description: hypothetical protein; protein id: At1g64090
  misc_feature (1)..(180): NCBI GI NO: 18406991 NR Description: expressed protein; protein id: At2g46170
  misc_feature (2)..(182): NCBI GI NO: 18398810 NR Description: expressed protein; protein id: At3g10260
  misc_feature (2)..(182): NCBI GI NO: 30681227 NR Description: expressed protein [Arabidopsis thaliana]
  misc_feature (2)..(181): NCBI GI NO: 34899590 NR Description: hypothetical protein~similar to Oryza sativachromosome3
FLWRNKRISGGVLAGATAFWLLFEVMDYHLLTLLCHCLILTLAILFLWSNATTFINKSPPNIPEVKIPDDLAVNVARSLRYEINRGFATLREIGQGHDLKKFLIVIAGLWILSVLGSCCNFLTLSYIVFMVLYTVPVLYEKHEDKVDAFGEKAMVELKKYYAIFDEKCLSKIPKGPLKDKKQH

SEQ ID NO: 24547 - protein, 158 aa, Zea mays subsp. mays
  peptide (1)..(158): Ceres Seq. ID no. 12386767
  misc_feature (1)..(156): NCBI GI NO: 34909318 NR Description: OSJNBb0021A09.5
  misc_feature (1)..(156): NCBI GI NO: 34904202 NR Description: P0492F05.25
  misc_feature (1)..(157): NCBI GI NO: 15236556 NR Description: putative protein; protein id: At4g23630
  misc_feature (1)..(157): NCBI GI NO: 15237093 NR Description: putative protein; protein id: At4g11220
  misc_feature (1)..(156): NCBI GI NO: 15238125 NR Description: putative protein; protein id: At5g41600
  misc_feature (1)..(150): NCBI GI NO: 15222616 NR Description: hypothetical protein; protein id: At1g64090
  misc_feature (1)..(155): NCBI GI NO: 18406991 NR Description: expressed protein; protein id: At2g46170
  misc_feature (1)..(157): NCBI GI NO: 18398810 NR Description: expressed protein; protein id: At3g10260
  misc_feature (1)..(157): NCBI GI NO: 30681227 NR Description: expressed protein [Arabidopsis thaliana]
  misc_feature (1)..(156): NCBI GI NO: 34899590 NR Description: hypothetical protein~similar to Oryza sativachromosome3
MDYHLLTLLCHCLILTLAILFLWSNATTFINKSPPNIPEVKIPDDLAVNVARSLRYEINRGFATLREIGQGHDLKKFLIVIAGLWILSVLGSCCNFLTLSYIVFMVLYTVPVLYEKHEDKVDAFGEKAMVELKKYYAIFDEKCLSKIPKGPLKDKKQH

SEQ ID NO: 24548 - DNA, 1413 bp, Zea mays subsp. mays; identical to SEQ ID NO: 23866
  misc_feature (1)..(1413): Ceres Seq. ID no. 12410874

SEQ ID NO: 24549 - protein, 357 aa, Zea mays subsp. mays; identical to SEQ ID NO: 23867
  peptide (1)..(357): Ceres Seq. ID no. 12410875
  misc_feature (103)..(355): Pfam Name: Pfam Description:  Glutamine synthetase, catalytic domain
  misc_feature (1)..(357): NCBI GI NO: 585201 NR Description: GLUTAMINE SYNTHETASE ROOT ISOZYME 1
  misc_feature (1)..(357): NCBI GI NO: 699623 NR Description: glutamine synthetase [Zea mays]
  misc_feature (1)..(357): NCBI GI NO: 699621 NR Description: glutamine synthetase [Zea mays]
  misc_feature (1)..(357): NCBI GI NO: 1169926 NR Description: GLUTAMINE SYNTHETASE ROOT ISOZYME 5
  misc_feature (1)..(357): NCBI GI NO: 121332 NR Description: GLUTAMINE SYNTHETASE ROOT ISOZYME
  misc_feature (1)..(355): NCBI GI NO: 1076474 NR Description: Gln 1.2 protein - radish
  misc_feature (1)..(354): NCBI GI NO: 13924490 NR Description: cytosolic glutamine synthetase
  misc_feature (1)..(354): NCBI GI NO: 121368 NR Description: Glutamine synthetase, cytosolic isozyme
  misc_feature (1)..(354): NCBI GI NO: 10946357 NR Description: cytosolic glutamine synthetase GSbeta1
  misc_feature (1)..(354): NCBI GI NO: 417060 NR Description: Glutamine synthetase nodule isozyme

SEQ ID NO: 24550 - protein, 267 aa, Zea mays subsp. mays; identical to SEQ ID NO: 23868
  peptide (1)..(267): Ceres Seq. ID no. 12410876
  misc_feature (13)..(265): Pfam Name: Pfam Description:  Glutamine synthetase, catalytic domain
  misc_feature (1)..(267): NCBI GI NO: 585201 NR Description: GLUTAMINE SYNTHETASE ROOT ISOZYME 1
  misc_feature (1)..(267): NCBI GI NO: 699623 NR Description: glutamine synthetase [Zea mays]
  misc_feature (1)..(267): NCBI GI NO: 699621 NR Description: glutamine synthetase [Zea mays]
  misc_feature (1)..(267): NCBI GI NO: 1169926 NR Description: GLUTAMINE SYNTHETASE ROOT ISOZYME 5
  misc_feature (1)..(267): NCBI GI NO: 121332 NR Description: GLUTAMINE SYNTHETASE ROOT ISOZYME
  misc_feature (1)..(265): NCBI GI NO: 1076474 NR Description: Gln 1.2 protein - radish
  misc_feature (1)..(264): NCBI GI NO: 13924490 NR Description: cytosolic glutamine synthetase
  misc_feature (1)..(264): NCBI GI NO: 121368 NR Description: Glutamine synthetase, cytosolic isozyme
  misc_feature (1)..(264): NCBI GI NO: 10946357 NR Description: cytosolic glutamine synthetase GSbeta1
  misc_feature (1)..(264): NCBI GI NO: 417060 NR Description: Glutamine synthetase nodule isozyme

SEQ ID NO: 24551 - DNA, 1408 bp, Zea mays subsp. mays
  misc_feature (1)..(1408): Ceres Seq. ID no. 12406456
gaagttctggacgggctcctgggcccgtactggaaggcggccgggctggcgttcaactgcactttcctgctcttcggcacggtcatccagctgatcgcctgcgcaagcaacatctactacatcaacgaccggctggacaagcggacgtggacgtacatcttcggcgcctgctgcgccaccaccgtcttcatcccctcgtaccacaactaccgcgtctggtccttcctcggcctcggcatgaccacctacaccgcctggtacctcaccatcgccgcggccgtccacggccaggtcccaggcgtcacccactctgggccccagcaagctcgtgccctacttcaccggcgccaccaacatcctctacaccttcggcggccacgcgatcactgtggagatcatgcacgcgatgtggaagcctcgcaagttcaagtacatctacctgctgggcgacgctgtacgtgttcacgctgacgcttccgtcggcggcggccatgtactgggcgttcggcgaccagctgctgacgcactccaacgccttctcgctgctgccgaggacgccgtggcgcgacgcggcggtggtgctgatgctggtccaccagttcatcaccttcggcttcgcgtgcacgccgctctacttcgtgtgggagaaggcggtggggatgcacgtcacccggagcgtcttcctccgcgcgctggtccgcctccccatcgtcgtccccgtctggttcctcgccatcatcttccccttcttcgggcccatcaactccgccgtcggcgcgctcctcgtcagcttcaccgtctacgtcatcccggccctcgcccacatgctcacgtaccgctccgcgtccgccagattgaacgcagcggagaagccgccgtccttcttgccgagctggtcggggatgttcgtgctgaacgcgttcgtggtggcgtggatgctggtggttggattcggcctcggcggctgggccagcgtcaccaacttcatcaagcagatcgatacgttcgggctcttcgccaagtgctaccagtgcccgacgaagccacaccccgggtcgccgctgccggcgccgccgcatcactgaagcagcgagcgagtgccaaaggctaacgaccgtaaaccgagacattcccgggtggtttcggtcgtcttgttatatgcagcctttctaggagtgtacaacacagcggagcagcttgtgagttcactgacccgagatacctagactggactcgcatgtgtcgcgtggctttgatacattagtgggcctcagtgtcacttcctttgtcttggttgtttgcacatggttgttttaggttgttcggttcatggtacgtgccatctagtacaagacttgatacaatgatacacagtggtgtctattcttatcttttgcatccttaatct

SEQ ID NO: 24552 - protein, 360 aa, Zea mays subsp. mays
  peptide (1)..(360): Ceres Seq. ID no. 12406457
  misc_feature (149)..(360): NCBI GI NO: 15240927 NR Description: LAX1 / AUX1 -like permease; protein id: At5g01240
  misc_feature (149)..(345): NCBI GI NO: 10441742 NR Description: putative AUX1-like permease
  misc_feature (149)..(360): NCBI GI NO: 37651177 NR Description: AUX1-like auxin influx carrier protein
  misc_feature (149)..(359): NCBI GI NO: 10800920 NR Description: putative AUX1-like permease [Medicago truncatula]
  misc_feature (149)..(360): NCBI GI NO: 18404642 NR Description: expressed protein; protein id: At2g38120
  misc_feature (149)..(353): NCBI GI NO: 21586468 NR Description: auxin influx carrier protein [Medicago truncatula]
  misc_feature (149)..(357): NCBI GI NO: 6650716 NR Description: AUX1-like protein
  misc_feature (148)..(359): NCBI GI NO: 10800918 NR Description: putative AUX1-like permease [Medicago truncatula]
  misc_feature (149)..(360): NCBI GI NO: 5881784 NR Description: putative AUX1-like permease [Arabidopsis thaliana]
  misc_feature (149)..(360): NCBI GI NO: 6689614 NR Description: AUX1 protein [Zea mays]
SSGRAPGPVLEGGRAGVQLHFPALRHGHPADRLRKQHLLHQRPAGQADVDVHLRRLLRHHRLHPLVPQLPRLVLPRPRHDHLHRLVPHHRRGRPRPGPRRHPLWAPASSCPTSPAPPTSSTPSAATRSLWRSCTRCGSLASSSTSTCWATLYVFTLTLPSAAAMYWAFGDQLLTHSNAFSLLPRTPWRDAAVVLMLVHQFITFGFACTPLYFVWEKAVGMHVTRSVFLRALVRLPIVVPVWFLAIIFPFFGPINSAVGALLVSFTVYVIPALAHMLTYRSASARLNAAEKPPSFLPSWSGMFVLNAFVVAWMLVVGFGLGGWASVTNFIKQIDTFGLFAKCYQCPTKPHPGSPLPAPPHH

SEQ ID NO: 24553 - protein, 237 aa, Zea mays subsp. mays
  peptide (1)..(237): Ceres Seq. ID no. 12406458
  misc_feature (1)..(16): NCBI GI NO: 15240927 NR Description: LAX1 / AUX1 -like permease; protein id: At5g01240
  misc_feature (1)..(16): NCBI GI NO: 10441742 NR Description: putative AUX1-like permease
  misc_feature (1)..(16): NCBI GI NO: 37651177 NR Description: AUX1-like auxin influx carrier protein
  misc_feature (1)..(16): NCBI GI NO: 10800920 NR Description: putative AUX1-like permease [Medicago truncatula]
  misc_feature (1)..(16): NCBI GI NO: 18404642 NR Description: expressed protein; protein id: At2g38120
  misc_feature (1)..(16): NCBI GI NO: 21586468 NR Description: auxin influx carrier protein [Medicago truncatula]
  misc_feature (1)..(16): NCBI GI NO: 6650716 NR Description: AUX1-like protein
  misc_feature (1)..(14): NCBI GI NO: 10800918 NR Description: putative AUX1-like permease [Medicago truncatula]
  misc_feature (1)..(16): NCBI GI NO: 5881784 NR Description: putative AUX1-like permease [Arabidopsis thaliana]
  misc_feature (1)..(16): NCBI GI NO: 6689614 NR Description: AUX1 protein [Zea mays]
MHAMWKPRKFKYIYLLGDAVRVHADASVGGGHVLGVRRPAADALQRLLAAAEDAVARRGGGADAGPPVHHLRLRVHAALLRVGEGGGDARHPERLPPRAGPPPHRRPRLVPRHHLPLLRAHQLRRRRAPRQLHRLRHPGPRPHAHVPLRVRQIERSGEAAVLLAELVGDVRAERVRGGVDAGGWIRPRRLGQRHQLHQADRYVRALRQVLPVPDEATPRVAAAGAAASLKQRASAKG

SEQ ID NO: 24554 - protein, 234 aa, Zea mays subsp. mays
  peptide (1)..(234): Ceres Seq. ID no. 12406459
  misc_feature (1)..(13): NCBI GI NO: 15240927 NR Description: LAX1 / AUX1 -like permease; protein id: At5g01240
  misc_feature (1)..(13): NCBI GI NO: 10441742 NR Description: putative AUX1-like permease
  misc_feature (1)..(13): NCBI GI NO: 37651177 NR Description: AUX1-like auxin influx carrier protein
  misc_feature (1)..(13): NCBI GI NO: 10800920 NR Description: putative AUX1-like permease [Medicago truncatula]
  misc_feature (1)..(13): NCBI GI NO: 18404642 NR Description: expressed protein; protein id: At2g38120
  misc_feature (1)..(13): NCBI GI NO: 21586468 NR Description: auxin influx carrier protein [Medicago truncatula]
  misc_feature (1)..(13): NCBI GI NO: 6650716 NR Description: AUX1-like protein
  misc_feature (1)..(11): NCBI GI NO: 10800918 NR Description: putative AUX1-like permease [Medicago truncatula]
  misc_feature (1)..(13): NCBI GI NO: 5881784 NR Description: putative AUX1-like permease [Arabidopsis thaliana]
  misc_feature (1)..(13): NCBI GI NO: 6689614 NR Description: AUX1 protein [Zea mays]
MWKPRKFKYIYLLGDAVRVHADASVGGGHVLGVRRPAADALQRLLAAAEDAVARRGGGADAGPPVHHLRLRVHAALLRVGEGGGDARHPERLPPRAGPPPHRRPRLVPRHHLPLLRAHQLRRRRAPRQLHRLRHPGPRPHAHVPLRVRQIERSGEAAVLLAELVGDVRAERVRGGVDAGGWIRPRRLGQRHQLHQADRYVRALRQVLPVPDEATPRVAAAGAAASLKQRASAKG

SEQ ID NO: 24555 - DNA, 880 bp, Zea mays subsp. mays
  misc_feature (1)..(880): Ceres Seq. ID no. 12578653
  misc_feature (375)..(375): n is a, c, t, g, unknown, or other
  misc_feature (376)..(376): n is a, c, t, g, unknown, or other
  misc_feature (265)..(265): n is a, c, t, g, unknown, or other
  misc_feature (393)..(393): n is a, c, t, g, unknown, or other
gttcggacttccgccgcgcttcgccctctcgctccagccgcttcacagcgccgccgctcgcctctccgaccgccgcgagaatgccgttcaagaggttcgtggagatcgggcgcgtggccctggtgaactacggcaaagactatggccgcctcgtcgtcatcgtctttgccgtagttcacctgggcacggacgaccactccctccacaacgccttcagcacctacggcgaggtcctcgagtccaagatcatcctcgatcgggagangcagaggtcccgcggcttcggcttcgtcaccttctccacggaggaggcgatgcggaacgcatcgagggcatgaacggcaaggagctggacggccgcaacatcaccgtcanngaggcccagtcccgcgncggccgtggaggcggcggcggcggcgggtacggtggtggccgtggaggcggcggctacggcggtggcgggccccgtgatggcggcggcggctacggcggtggcggcggctacggtggtggcggcggcggctacggtggtggtggcggcggctacggcggtggcaaccgtggcggcggctacggcaactccgacgggaactggaggaactgagcggtggggcccgcgcggccaagttatcctgttcgctaccgtgttgtttaccctagtccagagtgtttatcttcgttcgtctcgtgtttgttgttgcccatctgtgtttttgattgaaggtcgctctgtgtcagttgttagtgctgtgttcatcctcggctccagcagacccatgcatcaaccagcatggactgcggatcgatgggtgctgttacccccgtcaggctttattctaagttaaatcctaaggaaaaaaatggtgcttcttggtgctgc

SEQ ID NO: 24556 - protein, 200 aa, Zea mays subsp. mays
  peptide (1)..(200): Ceres Seq. ID no. 12578654
  misc_feature (63)..(200): Pfam Name: LMP1 Pfam Description: Herpesvirus latent membrane protein 1
  misc_feature (108)..(200): NCBI GI NO: 82696 NR Description: glycine-rich protein - maize
  misc_feature (109)..(200): NCBI GI NO: 544421 NR Description: Glycine-rich RNA-binding protein 1
  misc_feature (105)..(200): NCBI GI NO: 20257675 NR Description: glycine-rich RNA binding protein [Zea mays]
  misc_feature (105)..(200): NCBI GI NO: 20257687 NR Description: glycine-rich RNA binding protein [Zea mays]
  misc_feature (105)..(200): NCBI GI NO: 20257691 NR Description: glycine-rich RNA binding protein [Zea mays]
  misc_feature (105)..(200): NCBI GI NO: 20257683 NR Description: glycine-rich RNA binding protein [Zea mays]
  misc_feature (105)..(200): NCBI GI NO: 20257693 NR Description: glycine-rich RNA binding protein [Zea mays]
  misc_feature (109)..(200): NCBI GI NO: 20257699 NR Description: glycine-rich RNA binding protein [Zea mays]
  misc_feature (105)..(200): NCBI GI NO: 7439972 NR Description: glycine-rich RNA binding protein - maize
  misc_feature (105)..(200): NCBI GI NO: 20257715 NR Description: glycine-rich RNA binding protein [Zea mays]
  misc_feature (88)..(88): Xaa is any aa, unknown or other
  misc_feature (125)..(125): Xaa is any aa, unknown or other
  misc_feature (131)..(131): Xaa is any aa, unknown or other
FGLPPRFALSLQPLHSAAARLSDRRENAVQEVRGDRARGPGELRQRLWPPRRHRLCRSSPGHGRPLPPQRLQHLRRGPRVQDHPRSGXAEVPRLRLRHLLHGGGDAERIEGMNGKELDGRNITVXEAQSRXGRGGGGGGGYGGGRGGGGYGGGGPRDGGGGYGGGGGYGGGGGGYGGGGGGYGGGNRGGGYGNSDGNWRN

SEQ ID NO: 24557 - protein, 124 aa, Zea mays subsp. mays
  peptide (1)..(124): Ceres Seq. ID no. 12578655
  misc_feature (1)..(62): Pfam Name: Pfam Description:  Equine herpesvirus glycoprotein gp2
  misc_feature (4)..(76): NCBI GI NO: 18103931 NR Description: glycine rich RNA binding protein [Oryza sativa]
MAAAATAVAAATVVAAAATVVVAAATAVATVAAATATPTGTGGTERWGPRGQVILFATVLFTLVQSVYLRSSRVCCCPSVFLIEGRSVSVVSAVFILGSSRPMHQPAWTADRWVLLPPSGFILS

SEQ ID NO: 24558 - protein, 111 aa, Zea mays subsp. mays
  peptide (1)..(111): Ceres Seq. ID no. 12578656
  misc_feature (62)..(107): NCBI GI NO: 82696 NR Description: glycine-rich protein - maize
  misc_feature (65)..(108): NCBI GI NO: 544421 NR Description: Glycine-rich RNA-binding protein 1
  misc_feature (62)..(108): NCBI GI NO: 20257675 NR Description: glycine-rich RNA binding protein [Zea mays]
  misc_feature (62)..(108): NCBI GI NO: 20257691 NR Description: glycine-rich RNA binding protein [Zea mays]
  misc_feature (62)..(108): NCBI GI NO: 20257683 NR Description: glycine-rich RNA binding protein [Zea mays]
  misc_feature (62)..(108): NCBI GI NO: 20257687 NR Description: glycine-rich RNA binding protein [Zea mays]
  misc_feature (62)..(108): NCBI GI NO: 20257693 NR Description: glycine-rich RNA binding protein [Zea mays]
  misc_feature (62)..(108): NCBI GI NO: 20257699 NR Description: glycine-rich RNA binding protein [Zea mays]
  misc_feature (62)..(108): NCBI GI NO: 7439972 NR Description: glycine-rich RNA binding protein - maize
  misc_feature (62)..(108): NCBI GI NO: 20257715 NR Description: glycine-rich RNA binding protein [Zea mays]
  misc_feature (88)..(88): Xaa is any aa, unknown or other
SDFRRASPSRSSRFTAPPLASPTAARMPFKRFVEIGRVALVNYGKDYGRLVVIVFAVVHLGTDDHSLHNAFSTYGEVLESKIILDREXQRSRGFGFVTFSTEEAMRNASRA

SEQ ID NO: 24559 - DNA, 1805 bp, Zea mays subsp. mays
  misc_feature (1)..(1805): Ceres Seq. ID no. 13579576
taatcgaaaaaattgggcacagaagaggagacagagagacggagaggggagacccggtcactgccaatgccaagaacaagaaaccagagaggacagtcgtcaatccaatccgagtctcctccaaaaacccatcaatctgcaggaacgagagcagcaggagagcatcctaggaaaaaagttaggaccaactgaccgagcaaaaaaggtagcatctctgtatcaccaaggcaccgccgatcacagaccaaatccctcccccctcctctggtccatcccacacgtagagcagccggtatttcttcgatccgtgcttgcgctttttttttctctttgtaaagatttcgtttccctcccttttaactgttgtcgagaagtttcgacaagagtggtgtgagtgttgaagagctcctcaacatgatggatccggccttgcttgacgacgtcatacgccggctgctggaggtgaagaatctcaagcctgggaagaacgcgcagttgtcggagtcggagatcaagcagctctgcgctgccgccaaggagatcttcctgcaccagcccaacctgctggagctcgaggcgcccatcaaaatctgcggtgatgtccatggccagtactctgatctcctgaggctattcgattatggtggctatccgcctcaggccaactaccttttcttgggtgattatgtggatcgtggaaagcaaagcttggaaacaatatgtcttcttttggcctacaaggtcaagtacccagagaacttctttcttctaaggggaaaccatgaatgcgcatcagtaaatcgcatctatggtttttatgacgagtgcaaacgcagattcagtgtaaagctgtggaaaacattcactgactgttttaactgcttgccagtgtcagcattgatagacgaaaagatcctctgtatgcatggtggtctatctccagagttgaacaagctcgaacaaatacttaatctgagtcgccccacagacgtgcctgatactggattgctctgtgaccttctttggtctgatccttctaatgaagcaacaggatgggccataaatgatcgaggtgtttcatatacatttggtcctgataaagtttctgaattccttgagaagcatgatttggacctcatctgccgagcccatcaggttgtcgaagatggatatgagtttttcgctagccgccaactcgtaacaatgttttcagcccctaactactgtggagaatttgataacgctggtgccatgatgagtgtagatgagacattgatgtgctccttccaaatactgaaacctgcgaggaaggtgttgggtggttcaactaataacaaatcaggcttcaagtcatcgagaggatggtgacaatggcaagcctgatatcaggttggttggtgagcagcacgccagtggtcgacggggggttgttccatcataatcatattacagcggctgcaactgacaggcccaatgcatcttctcttccatgttggatcaacactcttgtaatgtattatttactgtgcggatctgagaggatgtgaatgatttcatttgcgtcctcaagttcaaaagattcaggaaggcatgcttgaaataaaaatagccagaaacatgcaaggtgctccacgacgcagcacggcatttccagtgttttctttttgctgtctagttctgaatatattttaccgccagaccagcacgtaagcttgcctggcaatggtttttatttgttgctatgccatctcaaaagtcaaaaccatggatttatatcaaaagtcaaaagactttgagaagtattt

SEQ ID NO: 24560 - protein, 317 aa, Zea mays subsp. mays
  peptide (1)..(317): Ceres Seq. ID no. 13579577
  misc_feature (55)..(250): Pfam Name: Pfam Description:  Calcineurin-like phosphoesterase
  misc_feature (2)..(317): NCBI GI NO: 130709 NR Description: SERINE/THREONINE PROTEIN PHOSPHATASE PP1
  misc_feature (2)..(317): NCBI GI NO: 14495346 NR Description: protein phosphatase [Oryza sativa]
  misc_feature (2)..(310): NCBI GI NO: 7435129 NR Description: phosphoprotein phosphatase (EC 3
  misc_feature (2)..(299): NCBI GI NO: 5917726 NR Description: serine/threonine protein phosphatase 1; PP1
  misc_feature (2)..(299): NCBI GI NO: 1346764 NR Description: SERINE/THREONINE PROTEIN PHOSPHATASE PP1
  misc_feature (2)..(299): NCBI GI NO: 15225576 NR Description: phosphoprotein phosphatase type 1 catalytic subunit
  misc_feature (2)..(299): NCBI GI NO: 15237829 NR Description: protein phosphatase 1A [Arabidopsis thaliana]
  misc_feature (2)..(310): NCBI GI NO: 7435136 NR Description: phosphoprotein phosphatase (EC 3
  misc_feature (2)..(299): NCBI GI NO: 99751 NR Description: phosphoprotein phosphatase (EC 3
  misc_feature (9)..(299): NCBI GI NO: 7435132 NR Description: phosphoprotein phosphatase (EC 3
MMDPALLDDVIRRLLEVKNLKPGKNAQLSESEIKQLCAAAKEIFLHQPNLLELEAPIKICGDVHGQYSDLLRLFDYGGYPPQANYLFLGDYVDRGKQSLETICLLLAYKVKYPENFFLLRGNHECASVNRIYGFYDECKRRFSVKLWKTFTDCFNCLPVSALIDEKILCMHGGLSPELNKLEQILNLSRPTDVPDTGLLCDLLWSDPSNEATGWAINDRGVSYTFGPDKVSEFLEKHDLDLICRAHQVVEDGYEFFASRQLVTMFSAPNYCGEFDNAGAMMSVDETLMCSFQILKPARKVLGGSTNNKSGFKSSRGW

SEQ ID NO: 24561 - protein, 316 aa, Zea mays subsp. mays
  peptide (1)..(316): Ceres Seq. ID no. 13579578
  misc_feature (54)..(249): Pfam Name: Pfam Description:  Calcineurin-like phosphoesterase
  misc_feature (1)..(316): NCBI GI NO: 130709 NR Description: SERINE/THREONINE PROTEIN PHOSPHATASE PP1
  misc_feature (1)..(316): NCBI GI NO: 14495346 NR Description: protein phosphatase [Oryza sativa]
  misc_feature (1)..(309): NCBI GI NO: 7435129 NR Description: phosphoprotein phosphatase (EC 3
  misc_feature (1)..(298): NCBI GI NO: 5917726 NR Description: serine/threonine protein phosphatase 1; PP1
  misc_feature (1)..(298): NCBI GI NO: 1346764 NR Description: SERINE/THREONINE PROTEIN PHOSPHATASE PP1
  misc_feature (1)..(298): NCBI GI NO: 15225576 NR Description: phosphoprotein phosphatase type 1 catalytic subunit
  misc_feature (1)..(298): NCBI GI NO: 15237829 NR Description: protein phosphatase 1A [Arabidopsis thaliana]
  misc_feature (1)..(309): NCBI GI NO: 7435136 NR Description: phosphoprotein phosphatase (EC 3
  misc_feature (1)..(298): NCBI GI NO: 99751 NR Description: phosphoprotein phosphatase (EC 3
  misc_feature (8)..(298): NCBI GI NO: 7435132 NR Description: phosphoprotein phosphatase (EC 3
MDPALLDDVIRRLLEVKNLKPGKNAQLSESEIKQLCAAAKEIFLHQPNLLELEAPIKICGDVHGQYSDLLRLFDYGGYPPQANYLFLGDYVDRGKQSLETICLLLAYKVKYPENFFLLRGNHECASVNRIYGFYDECKRRFSVKLWKTFTDCFNCLPVSALIDEKILCMHGGLSPELNKLEQILNLSRPTDVPDTGLLCDLLWSDPSNEATGWAINDRGVSYTFGPDKVSEFLEKHDLDLICRAHQVVEDGYEFFASRQLVTMFSAPNYCGEFDNAGAMMSVDETLMCSFQILKPARKVLGGSTNNKSGFKSSRGW

SEQ ID NO: 24562 - DNA, 1807 bp, Zea mays subsp. mays
  misc_feature (1)..(1807): Ceres Seq. ID no. 12566732
atcgaaaatttggtcgaaataaacaagcagagcagaaaacccccacacgcttttagttggccgtccgtccgtccgtctctgaggagcacacagcagtcgattttaaactgcagctacagtctacagaggtcaggtcaggggacacagcctgagcggctggctagcgggggctagcgagcggcgccacagcgcagcacgcagagagccagggcggcggccatggcgagcgcggcgagtggcggcggcgggtcgctgaagcggatgggcccgctccgggtacagtactacatcgtgatgggcgcggtggcagcggctgtggtgctggccacgctgcgctacatgccggggccagccgtcccggcgaccaccgcccgtaccagcggaggcggcgtcgtgcgctcggccccagcagccgcggccgtccccgtgcccgtgcccgccgtggaggaagaaacgggggaggatgagcaggcgcagaggaggaggaggagaaggaagaagaagggggacggggtcgtgctcttcaacttcggcgactccaacagcgacacgggcggcgtggcggcggtcatggggatccgcatcgcaccgccggagggcagggcctacttccaccaccccacggggcggctctccgacggacgcgtcatcctcgacttcatctgtgagagccctgggcacgccgcacctgagtccgttcatgaagccgctgggctccaacttctccaacggcgtcaacttcgccattgcagggtccacggccatgccgggagtaaccaccttctcgctggacgtgcaggtggatcagttcgtcttcttcaaggagagatgcctcgactccatcgagagaggtgagagtgccccgattgttgagaaggcgttcccagatgctatatacaccatggacatcgggcacaacgatataaacggtgttctccacttgccctatcatacaatgctcgaaaatctccccccagtaattgctgaaatcaagaaagccatcgagaggttgcacgagaatggagccaggaagttctggatacatggaacgggagcattagggtgcatgcctcagaagctttctatgccgagggatgacgacagcggcctcgatgagcatggatgcatcgcaagcattaataatgtctgcaagaagttcaattccttgctgagtgaagccttggacgagctgcgtttgacactgaaaagttcgactatcgtctttgtggatatgttcgctatcaagtatgatcttgttgccaaccacacgaaatatgggattgagaagccattgatgacatgttgtggtcatggaggccccccttacaactatgaccccaaggagagctgcatgacttcggacaaatacctgtgcaagcttggcgaaaagttcataagctgggacggggttcacttcaccgatgctgcaaatggcattgtggcttccaaagtactcagtggtgagtacaacattcccagggtcaagctggccagcctcgtccccgttccaaaatctgacgattaatggtgatgcagcatcttaattagcctttagtttggcctatcaaggatgatgaagatgaaactactaacaaaactgacaccaccaaagtttaattattttgaggttcttacgttacatccattgtagaagaagacttttcttttgtttccttctctttttgtacaatcggcgcatatgtatatcctaggggttaatatatggcgatgcatgtgtctgtaccatgtataattcttttcttttgaattttgggtctgttggtgcgatttagtcgccaaacacttg

SEQ ID NO: 24563 - protein, 353 aa, Zea mays subsp. mays
  peptide (1)..(353): Ceres Seq. ID no. 12566733
  misc_feature (70)..(330): Pfam Name: Pfam Description:  GDSL-like Lipase/Acylhydrolase
  misc_feature (70)..(346): NCBI GI NO: 34894838 NR Description: putative lipase homolog
  misc_feature (70)..(340): NCBI GI NO: 34894866 NR Description: putative lipase homolog
  misc_feature (69)..(338): NCBI GI NO: 15217506 NR Description: putative lipase; protein id: At1g09390.1
  misc_feature (69)..(338): NCBI GI NO: 15223585 NR Description: nodule-specific protein, putative
  misc_feature (70)..(341): NCBI GI NO: 34894844 NR Description: putative lipase homolog
  misc_feature (69)..(319): NCBI GI NO: 25336281 NR Description: lipase-like protein Lip-4
  misc_feature (74)..(338): NCBI GI NO: 25405771 NR Description: hypothetical protein T22H22.20
  misc_feature (205)..(342): NCBI GI NO: 15228721 NR Description: putative protein; protein id: At3g62280.1
  misc_feature (75)..(181): NCBI GI NO: 15228721 NR Description: putative protein; protein id: At3g62280.1
  misc_feature (74)..(338): NCBI GI NO: 18405064 NR Description: early nodule-specific protein, putative
MSRRRGGGGEGRRRGTGSCSSTSATPTATRAAWRRSWGSASHRRRAGPTSTTPRGGSPTDASSSTSSVRALGTPHLSPFMKPLGSNFSNGVNFAIAGSTAMPGVTTFSLDVQVDQFVFFKERCLDSIERGESAPIVEKAFPDAIYTMDIGHNDINGVLHLPYHTMLENLPPVIAEIKKAIERLHENGARKFWIHGTGALGCMPQKLSMPRDDDSGLDEHGCIASINNVCKKFNSLLSEALDELRLTLKSSTIVFVDMFAIKYDLVANHTKYGIEKPLMTCCGHGGPPYNYDPKESCMTSDKYLCKLGEKFISWDGVHFTDAANGIVASKVLSGEYNIPRVKLASLVPVPKSDD

SEQ ID NO: 24564 - protein, 274 aa, Zea mays subsp. mays
  peptide (1)..(274): Ceres Seq. ID no. 12566734
  misc_feature (1)..(251): Pfam Name: Pfam Description:  GDSL-like Lipase/Acylhydrolase
  misc_feature (1)..(267): NCBI GI NO: 34894838 NR Description: putative lipase homolog
  misc_feature (1)..(261): NCBI GI NO: 34894866 NR Description: putative lipase homolog
  misc_feature (1)..(259): NCBI GI NO: 15217506 NR Description: putative lipase; protein id: At1g09390.1
  misc_feature (1)..(259): NCBI GI NO: 15223585 NR Description: nodule-specific protein, putative
  misc_feature (1)..(262): NCBI GI NO: 34894844 NR Description: putative lipase homolog
  misc_feature (1)..(240): NCBI GI NO: 25336281 NR Description: lipase-like protein Lip-4
  misc_feature (1)..(259): NCBI GI NO: 25405771 NR Description: hypothetical protein T22H22.20
  misc_feature (126)..(263): NCBI GI NO: 15228721 NR Description: putative protein; protein id: At3g62280.1
  misc_feature (1)..(102): NCBI GI NO: 15228721 NR Description: putative protein; protein id: At3g62280.1
  misc_feature (1)..(259): NCBI GI NO: 18405064 NR Description: early nodule-specific protein, putative
MKPLGSNFSNGVNFAIAGSTAMPGVTTFSLDVQVDQFVFFKERCLDSIERGESAPIVEKAFPDAIYTMDIGHNDINGVLHLPYHTMLENLPPVIAEIKKAIERLHENGARKFWIHGTGALGCMPQKLSMPRDDDSGLDEHGCIASINNVCKKFNSLLSEALDELRLTLKSSTIVFVDMFAIKYDLVANHTKYGIEKPLMTCCGHGGPPYNYDPKESCMTSDKYLCKLGEKFISWDGVHFTDAANGIVASKVLSGEYNIPRVKLASLVPVPKSDD

SEQ ID NO: 24565 - protein, 253 aa, Zea mays subsp. mays
  peptide (1)..(253): Ceres Seq. ID no. 12566735
  misc_feature (1)..(230): Pfam Name: Pfam Description:  GDSL-like Lipase/Acylhydrolase
  misc_feature (1)..(246): NCBI GI NO: 34894838 NR Description: putative lipase homolog
  misc_feature (1)..(240): NCBI GI NO: 34894866 NR Description: putative lipase homolog
  misc_feature (1)..(238): NCBI GI NO: 15217506 NR Description: putative lipase; protein id: At1g09390.1
  misc_feature (1)..(238): NCBI GI NO: 15223585 NR Description: nodule-specific protein, putative
  misc_feature (1)..(241): NCBI GI NO: 34894844 NR Description: putative lipase homolog
  misc_feature (1)..(219): NCBI GI NO: 25336281 NR Description: lipase-like protein Lip-4
  misc_feature (1)..(238): NCBI GI NO: 25405771 NR Description: hypothetical protein T22H22.20
  misc_feature (105)..(242): NCBI GI NO: 15228721 NR Description: putative protein; protein id: At3g62280.1
  misc_feature (1)..(81): NCBI GI NO: 15228721 NR Description: putative protein; protein id: At3g62280.1
  misc_feature (1)..(238): NCBI GI NO: 18405064 NR Description: early nodule-specific protein, putative
MPGVTTFSLDVQVDQFVFFKERCLDSIERGESAPIVEKAFPDAIYTMDIGHNDINGVLHLPYHTMLENLPPVIAEIKKAIERLHENGARKFWIHGTGALGCMPQKLSMPRDDDSGLDEHGCIASINNVCKKFNSLLSEALDELRLTLKSSTIVFVDMFAIKYDLVANHTKYGIEKPLMTCCGHGGPPYNYDPKESCMTSDKYLCKLGEKFISWDGVHFTDAANGIVASKVLSGEYNIPRVKLASLVPVPKSDD

SEQ ID NO: 24566 - DNA, 1875 bp, Zea mays subsp. mays
  misc_feature (1)..(1875): Ceres Seq. ID no. 12364204
gcacgagaccattacctagaacatcctaatcgaaaaaaaccctaatcctcccccgctacacgttcgcttgatctttacggccgccgctactcgttcgccatggctgcctgctcctccaggctcctatacctcactctgagctcctctttcctccgctcctgccgcctcgcgtccagctccctacttcccaccgcctcccgctgccacccggggtcgctccactccctccgcttctgctctgctgtccccgagtttgtcgatgtcgccgccgaccctgccgaggcggctgtatcctccggacacccgtggccggagtggggcaacttccttgataagctgcgggccaaggggtacttcgagcaaggtttgccctccagcgtgagttctggcgagggagccgccggagatggggatccagcaactgcatctgagaacgcagcaacggctgcttccggtaatacggtggtggatgcggaggatagcgcggtgacctcggaagatatctatcattttctcaaggacgagaacagggtgaagaatgcgtgcctcaaatttgggcgagaccgcttcgatctcctcagcttgcttcccaagcaggatattcaagctattgttatgtctggctgtcctaataacaatcggaagcccgtctattctgcaaaaaggttgagagagtacgtgcaggtcaaagaagaagatgcatgcagcatttgcaaatttaaggcatcttgtgatagagcttatgtcactccaaagggtgaggttgaagttaggactgttgatgttgttcgtatactgttaagttatgcaatggataaaaaccattcaggagataactctgttatcgaagaaagtgtgcaagaatctgcaaaaaagcttctctcaaagcttactgaatttagtgacacaacaatcgatccatctcttccgaaacctgcatttcaagttgctaggaaggctcagggctcagtggggaaggggagagaaacgactgcagttgaaatgaagaagggtgactggttgtgcactaactgtaacttcttaaattttgctcgcaatcgtcactgtctcgaatgcaaagcagatggaccaaagaagatagaagcggccgtggatgcaatgaaaatgggcgattggatctgcacacagtgtcagtttatgaacttctctcgcaacaagatatgttttaaatgtgaagaacctcacccgaagaggcaactcaatcctggagagtgggagtgcccctcatgcgactttgttaacttccgacgcaacgctatctgcaagaagtgcaatcaggaccgccccgaggatgatacccgagatagtcagcggggactgagaaaaaccagaggggctggcaagtttagaagattcgactatattgatcagaagagcgatgacgatgatgacaatgcctggttccagaagcgtggggcaagcatgaggtcgaaaccggaccagagaaccaccactgccaagagcagaggctctgacggtctggatgatattcttgttaccaccaagcgtagaagcaccaagcaagacgaggacgacgaggtcttgccgtacgagggtgcgcgcaagcatgttgtgagcagaagggcaacgccttcccagaggaggttcacggctgcccgtaaccagtaataatacccgagcttggagctttgatgactccgttctgtgaacaaatttcacagcgtcgctcgctctgctgctgtgatgcagacgaatagatgatggacataacacataagcgtgttcgatctgtagtgttattatacaaactagtaactatcgcgcgcaccgcgcgcctacgaaaacagacaatataaatgataatactattataaagtatttgtcattgtgatt

SEQ ID NO: 24567 - protein, 516 aa, Zea mays subsp. mays
  peptide (1)..(516): Ceres Seq. ID no. 12364205
  misc_feature (342)..(371): Pfam Name: Pfam Description:  Zn-finger in Ran binding protein and others
  misc_feature (14)..(467): NCBI GI NO: 13702809 NR Description: putative ARP protein [Oryza sativa]
  misc_feature (124)..(280): NCBI GI NO: 15221905 NR Description: hypothetical protein; protein id: At1g48570
  misc_feature (295)..(411): NCBI GI NO: 15221905 NR Description: hypothetical protein; protein id: At1g48570
  misc_feature (42)..(86): NCBI GI NO: 15221905 NR Description: hypothetical protein; protein id: At1g48570
  misc_feature (140)..(433): NCBI GI NO: 21593408 NR Description: unknown [Arabidopsis thaliana]
  misc_feature (66)..(98): NCBI GI NO: 21593408 NR Description: unknown [Arabidopsis thaliana]
  misc_feature (140)..(417): NCBI GI NO: 18409643 NR Description: expressed protein; protein id: At1g70650
  misc_feature (66)..(98): NCBI GI NO: 18409643 NR Description: expressed protein; protein id: At1g70650
  misc_feature (278)..(402): NCBI GI NO: 15221905 NR Description: hypothetical protein; protein id: At1g48570
  misc_feature (140)..(414): NCBI GI NO: 13324787 NR Description: hypothetical protein [Oryza sativa]
MAACSSRLLYLTLSSSFLRSCRLASSSLLPTASRCHPGSLHSLRFCSAVPEFVDVAADPAEAAVSSGHPWPEWGNFLDKLRAKGYFEQGLPSSVSSGEGAAGDGDPATASENAATAASGNTVVDAEDSAVTSEDIYHFLKDENRVKNACLKFGRDRFDLLSLLPKQDIQAIVMSGCPNNNRKPVYSAKRLREYVQVKEEDACSICKFKASCDRAYVTPKGEVEVRTVDVVRILLSYAMDKNHSGDNSVIEESVQESAKKLLSKLTEFSDTTIDPSLPKPAFQVARKAQGSVGKGRETTAVEMKKGDWLCTNCNFLNFARNRHCLECKADGPKKIEAAVDAMKMGDWICTQCQFMNFSRNKICFKCEEPHPKRQLNPGEWECPSCDFVNFRRNAICKKCNQDRPEDDTRDSQRGLRKTRGAGKFRRFDYIDQKSDDDDDNAWFQKRGASMRSKPDQRTTTAKSRGSDGLDDILVTTKRRSTKQDEDDEVLPYEGARKHVVSRRATPSQRRFTAARNQ

SEQ ID NO: 24568 - protein, 344 aa, Zea mays subsp. mays
  peptide (1)..(344): Ceres Seq. ID no. 12364206
  misc_feature (170)..(199): Pfam Name: Pfam Description:  Zn-finger in Ran binding protein and others
  misc_feature (1)..(295): NCBI GI NO: 13702809 NR Description: putative ARP protein [Oryza sativa]
  misc_feature (1)..(108): NCBI GI NO: 15221905 NR Description: hypothetical protein; protein id: At1g48570
  misc_feature (123)..(239): NCBI GI NO: 15221905 NR Description: hypothetical protein; protein id: At1g48570
  misc_feature (1)..(261): NCBI GI NO: 21593408 NR Description: unknown [Arabidopsis thaliana]
  misc_feature (1)..(245): NCBI GI NO: 18409643 NR Description: expressed protein; protein id: At1g70650
  misc_feature (106)..(230): NCBI GI NO: 15221905 NR Description: hypothetical protein; protein id: At1g48570
  misc_feature (1)..(242): NCBI GI NO: 13324787 NR Description: hypothetical protein [Oryza sativa]
  misc_feature (1)..(298): NCBI GI NO: 34393925 NR Description: unknown protein
  misc_feature (155)..(344): NCBI GI NO: 13702809 NR Description: putative ARP protein [Oryza sativa]
  misc_feature (1)..(199): NCBI GI NO: 25372841 NR Description: hypothetical protein F5A18.17
MSGCPNNNRKPVYSAKRLREYVQVKEEDACSICKFKASCDRAYVTPKGEVEVRTVDVVRILLSYAMDKNHSGDNSVIEESVQESAKKLLSKLTEFSDTTIDPSLPKPAFQVARKAQGSVGKGRETTAVEMKKGDWLCTNCNFLNFARNRHCLECKADGPKKIEAAVDAMKMGDWICTQCQFMNFSRNKICFKCEEPHPKRQLNPGEWECPSCDFVNFRRNAICKKCNQDRPEDDTRDSQRGLRKTRGAGKFRRFDYIDQKSDDDDDNAWFQKRGASMRSKPDQRTTTAKSRGSDGLDDILVTTKRRSTKQDEDDEVLPYEGARKHVVSRRATPSQRRFTAARNQ

SEQ ID NO: 24569 - protein, 279 aa, Zea mays subsp. mays
  peptide (1)..(279): Ceres Seq. ID no. 12364207
  misc_feature (105)..(134): Pfam Name: Pfam Description:  Zn-finger in Ran binding protein and others
  misc_feature (1)..(230): NCBI GI NO: 13702809 NR Description: putative ARP protein [Oryza sativa]
  misc_feature (1)..(43): NCBI GI NO: 15221905 NR Description: hypothetical protein; protein id: At1g48570
  misc_feature (58)..(174): NCBI GI NO: 15221905 NR Description: hypothetical protein; protein id: At1g48570
  misc_feature (1)..(196): NCBI GI NO: 21593408 NR Description: unknown [Arabidopsis thaliana]
  misc_feature (1)..(180): NCBI GI NO: 18409643 NR Description: expressed protein; protein id: At1g70650
  misc_feature (41)..(165): NCBI GI NO: 15221905 NR Description: hypothetical protein; protein id: At1g48570
  misc_feature (1)..(177): NCBI GI NO: 13324787 NR Description: hypothetical protein [Oryza sativa]
  misc_feature (1)..(233): NCBI GI NO: 34393925 NR Description: unknown protein
  misc_feature (90)..(279): NCBI GI NO: 13702809 NR Description: putative ARP protein [Oryza sativa]
  misc_feature (1)..(134): NCBI GI NO: 25372841 NR Description: hypothetical protein F5A18.17
MDKNHSGDNSVIEESVQESAKKLLSKLTEFSDTTIDPSLPKPAFQVARKAQGSVGKGRETTAVEMKKGDWLCTNCNFLNFARNRHCLECKADGPKKIEAAVDAMKMGDWICTQCQFMNFSRNKICFKCEEPHPKRQLNPGEWECPSCDFVNFRRNAICKKCNQDRPEDDTRDSQRGLRKTRGAGKFRRFDYIDQKSDDDDDNAWFQKRGASMRSKPDQRTTTAKSRGSDGLDDILVTTKRRSTKQDEDDEVLPYEGARKHVVSRRATPSQRRFTAARNQ

SEQ ID NO: 24570 - DNA, 1675 bp, Zea mays subsp. mays
  misc_feature (1)..(1675): Ceres Seq. ID no. 12410523
acacggttcctctctgaccactcctctcctctcctctcctctcctctcgccggcgcatcgcccgactgtcagtcagcctcagccatggccgcggaggaggagcagggcttccgcccgctggacgaggcgtccctgctcgcctacatcaaggccacgccggcgctcgcctcccgcctcggcggcggtggcagtctagactccatcgagatcaaggaggtcggcgacggcaacctcaacttcgtctacatcgtgcagtccgaggccggcgccatcgtcgtcaagcaggcgctcccgtacgtgcgctgcgtgggggactcgtggcccatgacgcgggagcgcgcctacttcgaggcctccacgctgcgggagcacggccgcctgtgcccggagcacacccccgagggtgtaccacttcgaccggaccttgtcgctgatggggatgcgctacatcgagcccccgcacatcatcctccggaagggcctcgtcgccggtgtcgagtacccgctgctcgccgaccacatgtccgattacatggccaagacgctcttcttcacctccctcctctataacaataccacggatcataagaacggagttgctaagtactctgcgaacgtggagatgtgtaggctcacggagcaagttgtgttctcggacccataccgtgtttccaaatttaatcggtggacctcgccttatctcgacaaagatgctgaggcagttcgcgaggatgatgagctcaagttggaagtagctgggctgaaatcgatgtttatcgagagagctcaagctctgattcatggagatctccacactggttctatcatggtgaccgaaggttcaactcaagtcattgatccagaatttgggttctatgggccaatgggttttgatattggagccttccttggaaacctgattttggcatactatgcacagaatgggcatgctgatcaagcgaatgatcgtaaggcttacaagaaatggatcttgaagacaattgaagagtcgtggaatttgttccagaaaaagtttgttgaactatggaataaacacaaagaaagcaatggggaggcatacctgcctgatatatacaacaagccaaagcttttgagcgttgttcagaagaagtacatgacaaacctatttcatgatagccttgggtttggttcagccaaaatgatcaggagaatagtcggaatcgctcacgtagaggatctcgagtcaatcaaggatgccagcaagagagcagagtgcgagcgtgctgccctcaactgtgcgaagacgatcctcaagggaagacaccagtttgagacgatcgagcaagtcgtcgagcatattcagtcattcgatcaggactgagaagacgacagtctatttgtgcgctgaagcctgaaggagccatactctcgtcaattaacccacgcatgcccgagtatcgatgaatcgtctgttttgtagtgatgaagcgcccggttgtttgtgatctctgtattggttgctaggtgagaaaagtatgtggtctcctggcttgaactgtgtgtacactattattccgggccggcatagcgagcagctgaataatgaaatgtacgggtcctcagtgaccatctcagtgcatataaacacgtgtgttaccaataaattttgttatggtgctggtggttctatggt

SEQ ID NO: 24571 - protein, 309 aa, Zea mays subsp. mays
  peptide (1)..(309): Ceres Seq. ID no. 12410524
  misc_feature (1)..(304): NCBI GI NO: 18402794 NR Description: expressed protein; protein id: At1g49820
  misc_feature (1)..(299): NCBI GI NO: 27380009 NR Description: bll4898 [Bradyrhizobium japonicum]
  misc_feature (1)..(299): NCBI GI NO: 16265283 NR Description: conserved hypothetical protein
  misc_feature (1)..(306): NCBI GI NO: 18921366 NR Description: 5-methylthioribose kinase [Klebsiella pneumoniae]
  misc_feature (1)..(205): NCBI GI NO: 21402086 NR Description: Choline_kinase, Choline/ethanolamine kinase
  misc_feature (190)..(288): NCBI GI NO: 21402086 NR Description: Choline_kinase, Choline/ethanolamine kinase
  misc_feature (1)..(299): NCBI GI NO: 13476069 NR Description: hypothetical protein [Mesorhizobium loti]
  misc_feature (1)..(219): NCBI GI NO: 16078420 NR Description: ykrT [Bacillus subtilis]
  misc_feature (1)..(219): NCBI GI NO: 37999472 NR Description: Methylthioribose kinase (MTR kinase)
  misc_feature (1)..(205): NCBI GI NO: 30022120 NR Description: 5-methylthioribose kinase
MGMRYIEPPHIILRKGLVAGVEYPLLADHMSDYMAKTLFFTSLLYNNTTDHKNGVAKYSANVEMCRLTEQVVFSDPYRVSKFNRWTSPYLDKDAEAVREDDELKLEVAGLKSMFIERAQALIHGDLHTGSIMVTEGSTQVIDPEFGFYGPMGFDIGAFLGNLILAYYAQNGHADQANDRKAYKKWILKTIEESWNLFQKKFVELWNKHKESNGEAYLPDIYNKPKLLSVVQKKYMTNLFHDSLGFGSAKMIRRIVGIAHVEDLESIKDASKRAECERAALNCAKTILKGRHQFETIEQVVEHIQSFDQD

SEQ ID NO: 24572 - protein, 307 aa, Zea mays subsp. mays
  peptide (1)..(307): Ceres Seq. ID no. 12410525
  misc_feature (1)..(302): NCBI GI NO: 18402794 NR Description: expressed protein; protein id: At1g49820
  misc_feature (1)..(297): NCBI GI NO: 27380009 NR Description: bll4898 [Bradyrhizobium japonicum]
  misc_feature (1)..(297): NCBI GI NO: 16265283 NR Description: conserved hypothetical protein
  misc_feature (1)..(304): NCBI GI NO: 18921366 NR Description: 5-methylthioribose kinase [Klebsiella pneumoniae]
  misc_feature (1)..(203): NCBI GI NO: 21402086 NR Description: Choline_kinase, Choline/ethanolamine kinase
  misc_feature (188)..(286): NCBI GI NO: 21402086 NR Description: Choline_kinase, Choline/ethanolamine kinase
  misc_feature (1)..(297): NCBI GI NO: 13476069 NR Description: hypothetical protein [Mesorhizobium loti]
  misc_feature (1)..(217): NCBI GI NO: 16078420 NR Description: ykrT [Bacillus subtilis]
  misc_feature (1)..(217): NCBI GI NO: 37999472 NR Description: Methylthioribose kinase (MTR kinase)
  misc_feature (1)..(203): NCBI GI NO: 30022120 NR Description: 5-methylthioribose kinase
MRYIEPPHIILRKGLVAGVEYPLLADHMSDYMAKTLFFTSLLYNNTTDHKNGVAKYSANVEMCRLTEQVVFSDPYRVSKFNRWTSPYLDKDAEAVREDDELKLEVAGLKSMFIERAQALIHGDLHTGSIMVTEGSTQVIDPEFGFYGPMGFDIGAFLGNLILAYYAQNGHADQANDRKAYKKWILKTIEESWNLFQKKFVELWNKHKESNGEAYLPDIYNKPKLLSVVQKKYMTNLFHDSLGFGSAKMIRRIVGIAHVEDLESIKDASKRAECERAALNCAKTILKGRHQFETIEQVVEHIQSFDQD

SEQ ID NO: 24573 - protein, 280 aa, Zea mays subsp. mays
  peptide (1)..(280): Ceres Seq. ID no. 12410526
  misc_feature (1)..(275): NCBI GI NO: 18402794 NR Description: expressed protein; protein id: At1g49820
  misc_feature (1)..(270): NCBI GI NO: 27380009 NR Description: bll4898 [Bradyrhizobium japonicum]
  misc_feature (1)..(270): NCBI GI NO: 16265283 NR Description: conserved hypothetical protein
  misc_feature (1)..(277): NCBI GI NO: 18921366 NR Description: 5-methylthioribose kinase [Klebsiella pneumoniae]
  misc_feature (1)..(176): NCBI GI NO: 21402086 NR Description: Choline_kinase, Choline/ethanolamine kinase
  misc_feature (161)..(259): NCBI GI NO: 21402086 NR Description: Choline_kinase, Choline/ethanolamine kinase
  misc_feature (1)..(270): NCBI GI NO: 13476069 NR Description: hypothetical protein [Mesorhizobium loti]
  misc_feature (1)..(190): NCBI GI NO: 16078420 NR Description: ykrT [Bacillus subtilis]
  misc_feature (1)..(190): NCBI GI NO: 37999472 NR Description: Methylthioribose kinase (MTR kinase)
  misc_feature (1)..(176): NCBI GI NO: 30022120 NR Description: 5-methylthioribose kinase
MSDYMAKTLFFTSLLYNNTTDHKNGVAKYSANVEMCRLTEQVVFSDPYRVSKFNRWTSPYLDKDAEAVREDDELKLEVAGLKSMFIERAQALIHGDLHTGSIMVTEGSTQVIDPEFGFYGPMGFDIGAFLGNLILAYYAQNGHADQANDRKAYKKWILKTIEESWNLFQKKFVELWNKHKESNGEAYLPDIYNKPKLLSVVQKKYMTNLFHDSLGFGSAKMIRRIVGIAHVEDLESIKDASKRAECERAALNCAKTILKGRHQFETIEQVVEHIQSFDQD

SEQ ID NO: 24574 - DNA, 1346 bp, Zea mays subsp. mays
  misc_feature (1)..(1346): Ceres Seq. ID no. 12356016
gactcgtcctcttccctcgccgcgagctccgggttcccctgcgcatagctaggccaagccaggtataccccaaccatcgcatgggagccgcgactgccccgacgaagcggagacgcggccccagcaagacgcaggaggaggccatggcgcgcgcgagcccggaggcgcggcggcgaccgcggccgcgcctggtgggctatgaggagctgccggagtacctcaaggacaacgagtacatccgcgggcactaccgcgccgagtggcccgtccgcgacgcgctcctcagcgccttcgcctggcacaacgagacgctcaacgtctggacgcatctgggagggttcctgttcttcctagcgctcgcggtcgccggaggacggaaggaggccgccgacggtgccgctccgggtatcatgaggttcgttgtgagactagattcatggggcagcgaccatccgggccagccgaggcacgacgacgccggggcatcgctgcccagtgtgccgcggtggccgcggacggtgttcctggtgggggccatgtcgtgcctcgccatcagcgcggcggcgcacctgctggcgtgccactcgcggcgcgccagcgcggtgttctggcagctggactacgcgggcatctccgtgatgatcgtcgcctccttcgtgccgccggtgtactacgccttcctctgccacccgccggcgcgggcggcctacctgtgcgccatcgcggcgctgggcgcgctggtggtggccgcgctgctctccccgtcctgctcgtccccgcgctaccgccgcctccgcgcggcgctgttcctggccatgggcctgtcgggcgtcgtcccggcgctgcacgcgctctggctcaactggggccacgccgcctgctacctggcgctgggcatcgaggtcgtcatgggcctcacctacgccacgggcgcctggttctacgtcagccgcgtgccggagaagtggcgacccggggtgttcgacgtcgtcggccacagccaccagatcttccacgtcctcgtgctcgtcggcgccgtcacgcactacgtcgccgtcgccgtgctcatccactggcgggagaaggtggccgtcgcctgtggcgccgcgtcggcgtaggctcacctgtttggttggctcactcaacaaccattcgaatggcaaaccaagtagtcgcaacatagatcagctctagagtttgagtgtgaccttcgacgatttataatttaattgatggggtgattgagtatggtggttcattagttcatgagatttatctgtcgagtgagtgcgtgcctcagatttccagaccttttgtttccagcctactcaactttttgtcccgtc

SEQ ID NO: 24575 - protein, 371 aa, Zea mays subsp. mays
  peptide (1)..(371): Ceres Seq. ID no. 12356017
  misc_feature (97)..(350): Pfam Name: Hly-III / UPF0073 Pfam Description: Uncharacterised protein family
  misc_feature (165)..(366): NCBI GI NO: 18377749 NR Description: unknown protein [Arabidopsis thaliana]
  misc_feature (35)..(133): NCBI GI NO: 18377749 NR Description: unknown protein [Arabidopsis thaliana]
  misc_feature (165)..(366): NCBI GI NO: 30688829 NR Description: expressed protein [Arabidopsis thaliana]
  misc_feature (35)..(133): NCBI GI NO: 30688829 NR Description: expressed protein [Arabidopsis thaliana]
  misc_feature (62)..(367): NCBI GI NO: 13272399 NR Description: hypothetical protein [Arabidopsis thaliana]
  misc_feature (62)..(367): NCBI GI NO: 18400468 NR Description: expressed protein; protein id: At2g24150
  misc_feature (165)..(362): NCBI GI NO: 15241302 NR Description: putative protein; protein id: At5g20270
  misc_feature (19)..(122): NCBI GI NO: 15241302 NR Description: putative protein; protein id: At5g20270
  misc_feature (185)..(367): NCBI GI NO: 25309925 NR Description: hypothetical protein At2g24150
  misc_feature (62)..(108): NCBI GI NO: 25309925 NR Description: hypothetical protein At2g24150
LVLFPRRELRVPLRIARPSQVYPNHRMGAATAPTKRRRGPSKTQEEAMARASPEARRRPRPRLVGYEELPEYLKDNEYIRGHYRAEWPVRDALLSAFAWHNETLNVWTHLGGFLFFLALAVAGGRKEAADGAAPGIMRFVVRLDSWGSDHPGQPRHDDAGASLPSVPRWPRTVFLVGAMSCLAISAAAHLLACHSRRASAVFWQLDYAGISVMIVASFVPPVYYAFLCHPPARAAYLCAIAALGALVVAALLSPSCSSPRYRRLRAALFLAMGLSGVVPALHALWLNWGHAACYLALGIEVVMGLTYATGAWFYVSRVPEKWRPGVFDVVGHSHQIFHVLVLVGAVTHYVAVAVLIHWREKVAVACGAASA

SEQ ID NO: 24576 - protein, 345 aa, Zea mays subsp. mays
  peptide (1)..(345): Ceres Seq. ID no. 12356018
  misc_feature (71)..(324): Pfam Name: Hly-III / UPF0073 Pfam Description: Uncharacterised protein family
  misc_feature (139)..(340): NCBI GI NO: 18377749 NR Description: unknown protein [Arabidopsis thaliana]
  misc_feature (9)..(107): NCBI GI NO: 18377749 NR Description: unknown protein [Arabidopsis thaliana]
  misc_feature (139)..(340): NCBI GI NO: 30688829 NR Description: expressed protein [Arabidopsis thaliana]
  misc_feature (9)..(107): NCBI GI NO: 30688829 NR Description: expressed protein [Arabidopsis thaliana]
  misc_feature (36)..(341): NCBI GI NO: 13272399 NR Description: hypothetical protein [Arabidopsis thaliana]
  misc_feature (36)..(341): NCBI GI NO: 18400468 NR Description: expressed protein; protein id: At2g24150
  misc_feature (139)..(336): NCBI GI NO: 15241302 NR Description: putative protein; protein id: At5g20270
  misc_feature (1)..(96): NCBI GI NO: 15241302 NR Description: putative protein; protein id: At5g20270
  misc_feature (159)..(341): NCBI GI NO: 25309925 NR Description: hypothetical protein At2g24150
  misc_feature (36)..(82): NCBI GI NO: 25309925 NR Description: hypothetical protein At2g24150
MGAATAPTKRRRGPSKTQEEAMARASPEARRRPRPRLVGYEELPEYLKDNEYIRGHYRAEWPVRDALLSAFAWHNETLNVWTHLGGFLFFLALAVAGGRKEAADGAAPGIMRFVVRLDSWGSDHPGQPRHDDAGASLPSVPRWPRTVFLVGAMSCLAISAAAHLLACHSRRASAVFWQLDYAGISVMIVASFVPPVYYAFLCHPPARAAYLCAIAALGALVVAALLSPSCSSPRYRRLRAALFLAMGLSGVVPALHALWLNWGHAACYLALGIEVVMGLTYATGAWFYVSRVPEKWRPGVFDVVGHSHQIFHVLVLVGAVTHYVAVAVLIHWREKVAVACGAASA

SEQ ID NO: 24577 - protein, 324 aa, Zea mays subsp. mays
  peptide (1)..(324): Ceres Seq. ID no. 12356019
  misc_feature (50)..(303): Pfam Name: Hly-III / UPF0073 Pfam Description: Uncharacterised protein family
  misc_feature (118)..(319): NCBI GI NO: 18377749 NR Description: unknown protein [Arabidopsis thaliana]
  misc_feature (1)..(86): NCBI GI NO: 18377749 NR Description: unknown protein [Arabidopsis thaliana]
  misc_feature (118)..(319): NCBI GI NO: 30688829 NR Description: expressed protein [Arabidopsis thaliana]
  misc_feature (1)..(86): NCBI GI NO: 30688829 NR Description: expressed protein [Arabidopsis thaliana]
  misc_feature (15)..(320): NCBI GI NO: 13272399 NR Description: hypothetical protein [Arabidopsis thaliana]
  misc_feature (15)..(320): NCBI GI NO: 18400468 NR Description: expressed protein; protein id: At2g24150
  misc_feature (118)..(315): NCBI GI NO: 15241302 NR Description: putative protein; protein id: At5g20270
  misc_feature (1)..(75): NCBI GI NO: 15241302 NR Description: putative protein; protein id: At5g20270
  misc_feature (138)..(320): NCBI GI NO: 25309925 NR Description: hypothetical protein At2g24150
  misc_feature (15)..(61): NCBI GI NO: 25309925 NR Description: hypothetical protein At2g24150
MARASPEARRRPRPRLVGYEELPEYLKDNEYIRGHYRAEWPVRDALLSAFAWHNETLNVWTHLGGFLFFLALAVAGGRKEAADGAAPGIMRFVVRLDSWGSDHPGQPRHDDAGASLPSVPRWPRTVFLVGAMSCLAISAAAHLLACHSRRASAVFWQLDYAGISVMIVASFVPPVYYAFLCHPPARAAYLCAIAALGALVVAALLSPSCSSPRYRRLRAALFLAMGLSGVVPALHALWLNWGHAACYLALGIEVVMGLTYATGAWFYVSRVPEKWRPGVFDVVGHSHQIFHVLVLVGAVTHYVAVAVLIHWREKVAVACGAASA

SEQ ID NO: 24578 - DNA, 2015 bp, Zea mays subsp. mays
  misc_feature (1)..(2015): Ceres Seq. ID no. 12359708
agccaaatcggcctatagatcaaacgctgcactgtagggagcgtgaagccagcggcgaatggaatccctagccgccacctccgtgttcgcgccctcccgcgtcgccgtcccggcggcgcgggccctggttagggcggggacggtggtaccaaccaggcggacgagcagccggagcggaaccagcggggtgaaatgctctgctgccgtgacgccgcaggcgagcccagtgattagcaggagcgctgcggcggcgaaggcggcggaggaggacaagaggcggttcttcgaggcggcggcgcgggggagcgggaaggggaacctggtgcccatgtgggagtgcatcgtgtcggaccatctcacccccgtgctcgcctaccgctgcctcgtccccgaggacaacgtcgacgcccccagcttcctcttcgagtccgtcgagcaggggccccagggcaccaccaacgtcggccgctacagcatggtgggagcccacccagtgatggagattgtggccaaagaccacaaggttacgatcatggaccacgagaagagccaagtgacagagcaggtagtggacgacccgatgcagatcccgaggaccatgatggagggatggcacccacagcagatcgacgagctccctgaatccttctccggtggatgggttgggttcttttcctatgatacggttaggtatgttgagaagaagaagctaccgttctccagtgctcctcaggacgataggaaccttcctgatgtgcacttgggactctatgatgatgttctagtcttcgataatgttgagaagaaagtatatgttatccattgggtcaatgtggaccggcatgcatctgttgaggaagcataccaagatggcaggtcccgactaaacatgttgctatctaaagtgcacaattccaatgtccccacactctctcctggatttgtgaagctgcacacacgcaagtttggtacacctttgaacaagtcgaccatgacaagtgatgagtataagaatgctgttctgcaggctaaggaacatattatggctggggatatcttccagattgttttaagccagaggttcgagagacgaacatatgccaacccatttgaggtttatcgagcattacggattgtgaatcctagcccatacatggcgtatgtacaggcaagaggctgtgtattggttgcgtctagtcctgaaattcttacacgagtcagtaaggggaagattattaatcgaccacttgctggaactgttcgaaggggcaagacagagaaggaagatcaaatgcaagagcagcaactgttaagtgatgaaaaacagtgtgccgagcacataatgcttgtggacttgggaaggaatgatgttggcaaggtatccaaaccaggatcagtgaaggtggagaagttgatgaacattgagagatactcccatgttatgcacatcagctcaacggttagtggacagttggatgatcatctccagagttgggatgccttgagagctgccttgcccgttggaacagtcagtggtgcaccaaaggtgaaggccatggagttgattgataagttggaagttacgaggcgaggaccatatagtggtggtctaggaggaatatcgtttgatggtgacatgcaaattgcactttctctccgcaccatcgtattctcaacagcgccgagccacaacacgatgtactcatacaaagacgcagataggcgtcgggagtgggtcgctcatcttcaggctggtgcaggcattgttgccgacagtagcccagatgacgaacaacgtgaatgcgagaataaggctgctgcactagctcgggccatcgatcttgcagagtcagcttttgtagacaaagaatagtgtgctatggttatcgtttagttcttgttcatgtttcttttacccactttccgttaaaaaaagatgtcattagtgggtggagaaaagcaataagactgttctctagagaaccgaagaaatatggaaattgaggttatggctc

SEQ ID NO: 24579 - protein, 604 aa, Zea mays subsp. mays
  peptide (1)..(604): Ceres Seq. ID no. 12359709
  misc_feature (313)..(593): Pfam Name: Pfam Description:  chorismate binding enzyme
  misc_feature (1)..(604): NCBI GI NO: 5360659 NR Description: anthranilate synthase alpha 2 subunit
  misc_feature (1)..(604): NCBI GI NO: 34901980 NR Description: putative anthraniliate synthase alpha 2 subunit
  misc_feature (35)..(603): NCBI GI NO: 960289 NR Description: anthranilate synthase alpha subunit
  misc_feature (1)..(603): NCBI GI NO: 11268466 NR Description: anthranilate synthase (EC 4.1.3.27) alpha chain
  misc_feature (46)..(603): NCBI GI NO: 12830362 NR Description: anthranilate synthase alpha subunit
  misc_feature (65)..(603): NCBI GI NO: 34897346 NR Description: anthranilate synthase alpha 1 subunit
  misc_feature (65)..(603): NCBI GI NO: 5360657 NR Description: anthranilate synthase alpha 1 subunit
  misc_feature (76)..(602): NCBI GI NO: 15227604 NR Description: anthranilate synthase, alpha subunit
  misc_feature (76)..(602): NCBI GI NO: 320553 NR Description: anthranilate synthase (EC 4
  misc_feature (29)..(601): NCBI GI NO: 7436743 NR Description: anthranilate synthase (EC 4
MESLAATSVFAPSRVAVPAARALVRAGTVVPTRRTSSRSGTSGVKCSAAVTPQASPVISRSAAAAKAAEEDKRRFFEAAARGSGKGNLVPMWECIVSDHLTPVLAYRCLVPEDNVDAPSFLFESVEQGPQGTTNVGRYSMVGAHPVMEIVAKDHKVTIMDHEKSQVTEQVVDDPMQIPRTMMEGWHPQQIDELPESFSGGWVGFFSYDTVRYVEKKKLPFSSAPQDDRNLPDVHLGLYDDVLVFDNVEKKVYVIHWVNVDRHASVEEAYQDGRSRLNMLLSKVHNSNVPTLSPGFVKLHTRKFGTPLNKSTMTSDEYKNAVLQAKEHIMAGDIFQIVLSQRFERRTYANPFEVYRALRIVNPSPYMAYVQARGCVLVASSPEILTRVSKGKIINRPLAGTVRRGKTEKEDQMQEQQLLSDEKQCAEHIMLVDLGRNDVGKVSKPGSVKVEKLMNIERYSHVMHISSTVSGQLDDHLQSWDALRAALPVGTVSGAPKVKAMELIDKLEVTRRGPYSGGLGGISFDGDMQIALSLRTIVFSTAPSHNTMYSYKDADRRREWVAHLQAGAGIVADSSPDDEQRECENKAAALARAIDLAESAFVDKE

SEQ ID NO: 24580 - protein, 514 aa, Zea mays subsp. mays
  peptide (1)..(514): Ceres Seq. ID no. 12359710
  misc_feature (223)..(503): Pfam Name: Pfam Description:  chorismate binding enzyme
  misc_feature (1)..(514): NCBI GI NO: 5360659 NR Description: anthranilate synthase alpha 2 subunit
  misc_feature (1)..(514): NCBI GI NO: 34901980 NR Description: putative anthraniliate synthase alpha 2 subunit
  misc_feature (1)..(513): NCBI GI NO: 960289 NR Description: anthranilate synthase alpha subunit
  misc_feature (1)..(513): NCBI GI NO: 11268466 NR Description: anthranilate synthase (EC 4.1.3.27) alpha chain
  misc_feature (1)..(513): NCBI GI NO: 12830362 NR Description: anthranilate synthase alpha subunit
  misc_feature (1)..(513): NCBI GI NO: 34897346 NR Description: anthranilate synthase alpha 1 subunit
  misc_feature (1)..(513): NCBI GI NO: 5360657 NR Description: anthranilate synthase alpha 1 subunit
  misc_feature (1)..(512): NCBI GI NO: 15227604 NR Description: anthranilate synthase, alpha subunit
  misc_feature (1)..(512): NCBI GI NO: 320553 NR Description: anthranilate synthase (EC 4
  misc_feature (1)..(511): NCBI GI NO: 7436743 NR Description: anthranilate synthase (EC 4
MWECIVSDHLTPVLAYRCLVPEDNVDAPSFLFESVEQGPQGTTNVGRYSMVGAHPVMEIVAKDHKVTIMDHEKSQVTEQVVDDPMQIPRTMMEGWHPQQIDELPESFSGGWVGFFSYDTVRYVEKKKLPFSSAPQDDRNLPDVHLGLYDDVLVFDNVEKKVYVIHWVNVDRHASVEEAYQDGRSRLNMLLSKVHNSNVPTLSPGFVKLHTRKFGTPLNKSTMTSDEYKNAVLQAKEHIMAGDIFQIVLSQRFERRTYANPFEVYRALRIVNPSPYMAYVQARGCVLVASSPEILTRVSKGKIINRPLAGTVRRGKTEKEDQMQEQQLLSDEKQCAEHIMLVDLGRNDVGKVSKPGSVKVEKLMNIERYSHVMHISSTVSGQLDDHLQSWDALRAALPVGTVSGAPKVKAMELIDKLEVTRRGPYSGGLGGISFDGDMQIALSLRTIVFSTAPSHNTMYSYKDADRRREWVAHLQAGAGIVADSSPDDEQRECENKAAALARAIDLAESAFVDKE

SEQ ID NO: 24581 - protein, 465 aa, Zea mays subsp. mays
  peptide (1)..(465): Ceres Seq. ID no. 12359711
  misc_feature (174)..(454): Pfam Name: Pfam Description:  chorismate binding enzyme
  misc_feature (1)..(465): NCBI GI NO: 5360659 NR Description: anthranilate synthase alpha 2 subunit
  misc_feature (1)..(465): NCBI GI NO: 34901980 NR Description: putative anthraniliate synthase alpha 2 subunit
  misc_feature (1)..(464): NCBI GI NO: 960289 NR Description: anthranilate synthase alpha subunit
  misc_feature (1)..(464): NCBI GI NO: 11268466 NR Description: anthranilate synthase (EC 4.1.3.27) alpha chain
  misc_feature (1)..(464): NCBI GI NO: 12830362 NR Description: anthranilate synthase alpha subunit
  misc_feature (1)..(464): NCBI GI NO: 34897346 NR Description: anthranilate synthase alpha 1 subunit
  misc_feature (1)..(464): NCBI GI NO: 5360657 NR Description: anthranilate synthase alpha 1 subunit
  misc_feature (1)..(463): NCBI GI NO: 15227604 NR Description: anthranilate synthase, alpha subunit
  misc_feature (1)..(463): NCBI GI NO: 320553 NR Description: anthranilate synthase (EC 4
  misc_feature (1)..(462): NCBI GI NO: 7436743 NR Description: anthranilate synthase (EC 4
MVGAHPVMEIVAKDHKVTIMDHEKSQVTEQVVDDPMQIPRTMMEGWHPQQIDELPESFSGGWVGFFSYDTVRYVEKKKLPFSSAPQDDRNLPDVHLGLYDDVLVFDNVEKKVYVIHWVNVDRHASVEEAYQDGRSRLNMLLSKVHNSNVPTLSPGFVKLHTRKFGTPLNKSTMTSDEYKNAVLQAKEHIMAGDIFQIVLSQRFERRTYANPFEVYRALRIVNPSPYMAYVQARGCVLVASSPEILTRVSKGKIINRPLAGTVRRGKTEKEDQMQEQQLLSDEKQCAEHIMLVDLGRNDVGKVSKPGSVKVEKLMNIERYSHVMHISSTVSGQLDDHLQSWDALRAALPVGTVSGAPKVKAMELIDKLEVTRRGPYSGGLGGISFDGDMQIALSLRTIVFSTAPSHNTMYSYKDADRRREWVAHLQAGAGIVADSSPDDEQRECENKAAALARAIDLAESAFVDKE

SEQ ID NO: 24582 - DNA, 1906 bp, Zea mays subsp. mays
  misc_feature (1)..(1906): Ceres Seq. ID no. 12352137
aactaaccaccacacacacaggcaggaagaagccgactgaggctggccggtcgtgctttgttcttcttcttttctccgattcttttttttttactgacggctttggcagtagcgggcgcacacacttatactgccatttaacattgattgaggttgttttgaggtggcctcgtggtgaagaaaggcgggagctggagagcaacgagacaagcacggcggtgtgcgtgcgcacaggcactagagtgagacagctctagaagagagcaagccgccgccgccgccgcatcatcgtcagaagcggccactcctacctctgatcctgatacaaaatccaggccagaaggcaggagcctccaaaagagatccactcccccggatggcttcttgcttctgcttccgcagacgccgccgcccaatcattgcctcctctgtccccttattcctcctcctcgtctccttcctcgcctcggcctcggcctcttccgcgacgacgacgaagctgctaggcagcggcaataatgccacgcggcgggtggcgttcagctcggaggagctgcgcgggttgcggagcatcacggcccggcttgcgcggctcagggacgcgtccgtcaagacgatccagagccccgacggcgacgtcatcgactgcgtgccggcgcacctgcagccggcgttcgagcaccccaagctgaggagccagaagccagaggaggagcccgaagagaggccgaggagcagcgctggccgcttctccgacgctggccaggacgaggacgacgacccgttgccgcaggtgtggcggcgctccggcgagtcctgcccggaggggaccataccagtgcggcgaaccacggaggacgacgtgctcagggccaccgcctcttccgccacccggttcgggatgaaggcccgcggtgcggggctcgggttcgcgcggcgcgactccaccggtggcggccacgagcacgcggtggggtacgtgaccggcgggcagttctacggcgccaaggcgagcctgaacgtgtggccggcgcaggtggcgtcgccggcggagttcagcctctcgcagatctgggtcatctccggcgccttcggcaacgacctcaacaccatcgaggccggctggcaggtcagccctcagttgtacggcgacaacagccccaggttcttcacctactggacagacgacgcgtaccaggagacgggctgctacaacctccactgctcgggcttcgtgcagaccagcagccgcgtggccatcggcgccgccatctcgcccgtctcctcctacgccggccgccagttcgacgtcacgcttctcatctggaaggacccgcgccggggccactggtggctgcagctcggctccggcgcgctcgtcggctactggccctccgcgctcttcacgcacctcggctcgcgcgccgacatggtgcagttcgggggcgaggtcgtcaacgcgcgccccgccggcgcgccgcacacgcccacgcagatgggctccggccgcttccccgccgagggatacgcgcgcgccgcatacttccgcaacgtgcagctcgtcgactgggacaacaacctcgtcccggcccgccgggctccgcctgctcgccgaccggccgggatgctatgacatcgccggcggcagcggcggcgcgtggggcacctacttctattacggcgggcccggcaggaacgcacggtgcccgtagctttatagtattagctaggaactgaatcgagtgcatgggatgggtgttgtacgtgtttttcgtacgtgcgcactcaagcacacattagcagaggctgatttctatatattactccaaatgagtctgcgttcacttttttttatctctccatgtgaatatgatgccgttgtgatcatctaactatttgctcattt

SEQ ID NO: 24583 - protein, 418 aa, Zea mays subsp. mays
  peptide (1)..(418): Ceres Seq. ID no. 12352138
  misc_feature (207)..(403): Pfam Name: Pfam Description:  Arabidopsis proteins of unknown function
  misc_feature (8)..(405): NCBI GI NO: 15220207 NR Description: putative carboxyl-terminal peptidase
  misc_feature (6)..(405): NCBI GI NO: 30698726 NR Description: expressed protein [Arabidopsis thaliana]
  misc_feature (42)..(406): NCBI GI NO: 15240622 NR Description: putative protein; protein id: At5g50150
  misc_feature (134)..(405): NCBI GI NO: 6573746 NR Description: F20B24.18 [Arabidopsis thaliana]
  misc_feature (8)..(115): NCBI GI NO: 6573746 NR Description: F20B24.18 [Arabidopsis thaliana]
  misc_feature (18)..(404): NCBI GI NO: 21389708 NR Description: putative carboxyl-terminal proteinase
  misc_feature (16)..(404): NCBI GI NO: 34913794 NR Description: OSJNBa0026J14.25
  misc_feature (35)..(405): NCBI GI NO: 25345697 NR Description: unknown protein F5A18.27
  misc_feature (35)..(405): NCBI GI NO: 28416687 NR Description: At1g70550 [Arabidopsis thaliana]
  misc_feature (24)..(405): NCBI GI NO: 15528706 NR Description: P0583G08.7
MASCFCFRRRRRPIIASSVPLFLLLVSFLASASASSATTTKLLGSGNNATRRVAFSSEELRGLRSITARLARLRDASVKTIQSPDGDVIDCVPAHLQPAFEHPKLRSQKPEEEPEERPRSSAGRFSDAGQDEDDDPLPQVWRRSGESCPEGTIPVRRTTEDDVLRATASSATRFGMKARGAGLGFARRDSTGGGHEHAVGYVTGGQFYGAKASLNVWPAQVASPAEFSLSQIWVISGAFGNDLNTIEAGWQVSPQLYGDNSPRFFTYWTDDAYQETGCYNLHCSGFVQTSSRVAIGAAISPVSSYAGRQFDVTLLIWKDPRRGHWWLQLGSGALVGYWPSALFTHLGSRADMVQFGGEVVNARPAGAPHTPTQMGSGRFPAEGYARAAYFRNVQLVDWDNNLVPARRAPPARRPAGML

SEQ ID NO: 24584 - protein, 243 aa, Zea mays subsp. mays
  peptide (1)..(243): Ceres Seq. ID no. 12352139
  misc_feature (32)..(228): Pfam Name: Pfam Description:  Arabidopsis proteins of unknown function
  misc_feature (1)..(230): NCBI GI NO: 15220207 NR Description: putative carboxyl-terminal peptidase
  misc_feature (1)..(230): NCBI GI NO: 30698726 NR Description: expressed protein [Arabidopsis thaliana]
  misc_feature (1)..(231): NCBI GI NO: 15240622 NR Description: putative protein; protein id: At5g50150
  misc_feature (1)..(230): NCBI GI NO: 6573746 NR Description: F20B24.18 [Arabidopsis thaliana]
  misc_feature (1)..(229): NCBI GI NO: 21389708 NR Description: putative carboxyl-terminal proteinase
  misc_feature (1)..(229): NCBI GI NO: 34913794 NR Description: OSJNBa0026J14.25
  misc_feature (1)..(230): NCBI GI NO: 25345697 NR Description: unknown protein F5A18.27
  misc_feature (1)..(230): NCBI GI NO: 28416687 NR Description: At1g70550 [Arabidopsis thaliana]
  misc_feature (1)..(230): NCBI GI NO: 15528706 NR Description: P0583G08.7
  misc_feature (1)..(229): NCBI GI NO: 30688348 NR Description: expressed protein [Arabidopsis thaliana]
MKARGAGLGFARRDSTGGGHEHAVGYVTGGQFYGAKASLNVWPAQVASPAEFSLSQIWVISGAFGNDLNTIEAGWQVSPQLYGDNSPRFFTYWTDDAYQETGCYNLHCSGFVQTSSRVAIGAAISPVSSYAGRQFDVTLLIWKDPRRGHWWLQLGSGALVGYWPSALFTHLGSRADMVQFGGEVVNARPAGAPHTPTQMGSGRFPAEGYARAAYFRNVQLVDWDNNLVPARRAPPARRPAGML

SEQ ID NO: 24585 - DNA, 804 bp, Zea mays subsp. mays
  misc_feature (1)..(804): Ceres Seq. ID no. 12351411
attcagtccggccacgcactcaagcaatcatcgttctttcgaaacgcaacagcaagaagaacaaccacgcacatcgccgttccatcgattcatgggtcgcctcggcaccgcgacgacgctggtggccctcgcggcctgcctcctctactgctctgcttcgtcggcgacgctggcctacgccggcgctgcgccgacggaccttggggcgctgcggccgacgtgcgacgggacgcttgggcagtgcgcggtggggagcgacgaggagcaggaggtgggcggcagcgacgcgttcctgcggcgggcgctggcgcagcggcagcccaccaaccggtacatcagctacgcggcgctgcgcgcggatcaggtgccgtgcaaccagcgcggccgctcttactacagcaactgcgcgtcgcagaagcccgccaacccctaccgccgcggatgctccgccatcacccgatgcgcacgcaacaccaactgacccatccgatttatcattcctagctaaattctcatccatgacggttgacggcgtgaccgtatgatttgaggattatatataaatatattgggcgcatccaagagatccagccatggcagatgtggatccatccattgacgtgcaggtccatccagaggtagaggaggaagacagggaacacatgtccaagtgttgtttggattgacatggatgtttccacttttttgtgttaatttatctttttgtgatgaatgatcgacgtctacgtatgtaccataagtactagtagttccattattgttttgattttttatggcttttgc

SEQ ID NO: 24586 - protein, 180 aa, Zea mays subsp. mays
  peptide (1)..(180): Ceres Seq. ID no. 12351412
SVRPRTQAIIVLSKRNSKKNNHAHRRSIDSWVASAPRRRWWPSRPASSTALLRRRRWPTPALRRRTLGRCGRRATGRLGSARWGATRSRRWAAATRSCGGRWRSGSPPTGTSATRRCARIRCRATSAAALTTATARRRSPPTPTAADAPPSPDAHATPTDPSDLSFLAKFSSMTVDGVTV

SEQ ID NO: 24587 - protein, 167 aa, Zea mays subsp. mays
  peptide (1)..(167): Ceres Seq. ID no. 12351413
IQSGHALKQSSFFRNATARRTTTHIAVPSIHGSPRHRDDAGGPRGLPPLLLCFVGDAGLRRRCADGPWGAAADVRRDAWAVRGGERRGAGGGRQRRVPAAGAGAAAAHQPVHQLRGAARGSGAVQPARPLLLQQLRVAEARQPLPPRMLRHHPMRTQHQLTHPIYHS

SEQ ID NO: 24588 - protein, 159 aa, Zea mays subsp. mays
  peptide (1)..(159): Ceres Seq. ID no. 12351414
  misc_feature (95)..(156): Pfam Name: RALF Pfam Description: Rapid ALkalinization Factor
  misc_feature (40)..(159): NCBI GI NO: 34903676 NR Description: B1015E06.23
  misc_feature (40)..(154): NCBI GI NO: 34902918 NR Description: unnamed protein product
  misc_feature (35)..(156): NCBI GI NO: 18414528 NR Description: Expressed protein; protein id: At4g15800
  misc_feature (41)..(154): NCBI GI NO: 16566316 NR Description: RALF precursor [Nicotiana tabacum]
  misc_feature (56)..(159): NCBI GI NO: 30685837 NR Description: expressed protein [Arabidopsis thaliana]
  misc_feature (59)..(154): NCBI GI NO: 28628205 NR Description: rapid alkalinization factor 2 precursor
  misc_feature (74)..(156): NCBI GI NO: 18397246 NR Description: expressed protein; protein id: At3g05490
  misc_feature (29)..(157): NCBI GI NO: 18401177 NR Description: expressed protein; protein id: At3g16570
  misc_feature (43)..(154): NCBI GI NO: 28628203 NR Description: rapid alkalinization factor 1 precursor
  misc_feature (79)..(156): NCBI GI NO: 15217877 NR Description: hypothetical protein; protein id: At1g28270.1
FSPATHSSNHRSFETQQQEEQPRTSPFHRFMGRLGTATTLVALAACLLYCSASSATLAYAGAAPTDLGALRPTCDGTLGQCAVGSDEEQEVGGSDAFLRRALAQRQPTNRYISYAALRADQVPCNQRGRSYYSNCASQKPANPYRRGCSAITRCARNTN

SEQ ID NO: 24589 - protein, 129 aa, Zea mays subsp. mays
  peptide (1)..(129): Ceres Seq. ID no. 12351415
  misc_feature (65)..(126): Pfam Name: RALF Pfam Description: Rapid ALkalinization Factor
  misc_feature (10)..(129): NCBI GI NO: 34903676 NR Description: B1015E06.23
  misc_feature (10)..(124): NCBI GI NO: 34902918 NR Description: unnamed protein product
  misc_feature (5)..(126): NCBI GI NO: 18414528 NR Description: Expressed protein; protein id: At4g15800
  misc_feature (11)..(124): NCBI GI NO: 16566316 NR Description: RALF precursor [Nicotiana tabacum]
  misc_feature (26)..(129): NCBI GI NO: 30685837 NR Description: expressed protein [Arabidopsis thaliana]
  misc_feature (29)..(124): NCBI GI NO: 28628205 NR Description: rapid alkalinization factor 2 precursor
  misc_feature (44)..(126): NCBI GI NO: 18397246 NR Description: expressed protein; protein id: At3g05490
  misc_feature (1)..(127): NCBI GI NO: 18401177 NR Description: expressed protein; protein id: At3g16570
  misc_feature (13)..(124): NCBI GI NO: 28628203 NR Description: rapid alkalinization factor 1 precursor
  misc_feature (49)..(126): NCBI GI NO: 15217877 NR Description: hypothetical protein; protein id: At1g28270.1
MGRLGTATTLVALAACLLYCSASSATLAYAGAAPTDLGALRPTCDGTLGQCAVGSDEEQEVGGSDAFLRRALAQRQPTNRYISYAALRADQVPCNQRGRSYYSNCASQKPANPYRRGCSAITRCARNTN

SEQ ID NO: 24590 - DNA, 1401 bp, Zea mays subsp. mays
  misc_feature (1)..(1401): Ceres Seq. ID no. 13493590
aatcgaaaaccaccacaggcacacacacctccctttttcattcgagttcgaggagaaggcggcggaggcggccatggagctcgacgagcaggccttcctggaggagatcctctccctgcgcagggacgcctgggactgcaatgtgtccatgggggacctcttcgccccggcggcggccgccgccattgactgctccttccacaaccagcaggcgcccaccgtcagcgtcctccccaccttcaccgcctcctgcgccgagccgccggccttcgactgcctcagcgaggtctacggcgccgccgccgcgttcggcgggcccaatgccggcgacgagatggcgttcctccacgtcgcggagcccaaggaggcgctgcagctggacgacaacgccggcctcggggtgtgcaaggtggagcccggcctggtggagagcgacggcggcggcgccgccgcgccgacgcccgcccctgcggcgtccaagaagaagaggaccgaggggatgccgtctaagaacctcatggccgagcgccgccgccgcaagcgcctcaacgaccgcctctccatgctgcgctccgtcgtgcccaagatcagcaagatggaccggacgtcgatcctgggcgacacgatcgactacatgaaggagctgctggagaggatcaagctgctgcaggaggagatcgagcagcagggggaggcgccggcgggcatgctcagcgtcttccgggagctcaaccccaacgagatggtggccaggaacacccccaagttggacgtggagcggaaggagggcggcgacacacgggtggagatctactgcggcgccaggccggggctgctgctgtccacggtgagcacgctggacgcgctagggctggacatccagcagtgcgtcgtcagctgcttcaacgacttcggcatgcacgcctcctgctccgagatgcagagggacatgatcagcgccgacgcgataaagcaggagctgttgaagaccgctggctatggcggaggctgcatgtagagggcatggcgcggctgtagcctggaggaaggagaagaagaggaggagcaggaggaggcggcaataaattcagctctattagacgacagcgctagtaacaaggagcagcagcagtatcggttcaggtccagtccagtagctgaaaaggcaggcagggcatgaggccagtgaagatatggcatgggggaactttttgcaatccaatctccccatcagaacccacttcgagttagcagtgtgtgtccgcctgaatctttctcctatatactgctgtatttaattagcaagagcaaagctctcactgcctttctaatgattgatcagaagtgcctttggcgaccccttgtctttctgggacatctatatataatgttcttcattct

SEQ ID NO: 24591 - protein, 338 aa, Zea mays subsp. mays
  peptide (1)..(338): Ceres Seq. ID no. 13493591
  misc_feature (168)..(216): Pfam Name: Pfam Description:  Helix-loop-helix DNA-binding domain
  misc_feature (160)..(338): NCBI GI NO: 18424973 NR Description: bHLH protein [Arabidopsis thaliana]
  misc_feature (160)..(338): NCBI GI NO: 21537346 NR Description: unknown [Arabidopsis thaliana]
  misc_feature (90)..(335): NCBI GI NO: 22758263 NR Description: Putative bHLH transcription protein
  misc_feature (162)..(338): NCBI GI NO: 15238199 NR Description: bHLH protein [Arabidopsis thaliana]
  misc_feature (162)..(338): NCBI GI NO: 20127062 NR Description: putative bHLH transcription factor
  misc_feature (136)..(310): NCBI GI NO: 37536566 NR Description: hypothetical protein
  misc_feature (159)..(335): NCBI GI NO: 25513489 NR Description: F13K23.12 protein - Arabidopsis thaliana
  misc_feature (159)..(335): NCBI GI NO: 15222101 NR Description: bHLH protein [Arabidopsis thaliana]
  misc_feature (128)..(245): NCBI GI NO: 22331357 NR Description: bHLH protein family [Arabidopsis thaliana]
  misc_feature (239)..(335): NCBI GI NO: 22331357 NR Description: bHLH protein family [Arabidopsis thaliana]
IENHHRHTHLPFSFEFEEKAAEAAMELDEQAFLEEILSLRRDAWDCNVSMGDLFAPAAAAAIDCSFHNQQAPTVSVLPTFTASCAEPPAFDCLSEVYGAAAAFGGPNAGDEMAFLHVAEPKEALQLDDNAGLGVCKVEPGLVESDGGGAAAPTPAPAASKKKRTEGMPSKNLMAERRRRKRLNDRLSMLRSVVPKISKMDRTSILGDTIDYMKELLERIKLLQEEIEQQGEAPAGMLSVFRELNPNEMVARNTPKLDVERKEGGDTRVEIYCGARPGLLLSTVSTLDALGLDIQQCVVSCFNDFGMHASCSEMQRDMISADAIKQELLKTAGYGGGCM

SEQ ID NO: 24592 - protein, 314 aa, Zea mays subsp. mays
  peptide (1)..(314): Ceres Seq. ID no. 13493592
  misc_feature (144)..(192): Pfam Name: Pfam Description:  Helix-loop-helix DNA-binding domain
  misc_feature (136)..(314): NCBI GI NO: 18424973 NR Description: bHLH protein [Arabidopsis thaliana]
  misc_feature (136)..(314): NCBI GI NO: 21537346 NR Description: unknown [Arabidopsis thaliana]
  misc_feature (66)..(311): NCBI GI NO: 22758263 NR Description: Putative bHLH transcription protein
  misc_feature (138)..(314): NCBI GI NO: 15238199 NR Description: bHLH protein [Arabidopsis thaliana]
  misc_feature (138)..(314): NCBI GI NO: 20127062 NR Description: putative bHLH transcription factor
  misc_feature (112)..(286): NCBI GI NO: 37536566 NR Description: hypothetical protein
  misc_feature (135)..(311): NCBI GI NO: 25513489 NR Description: F13K23.12 protein - Arabidopsis thaliana
  misc_feature (135)..(311): NCBI GI NO: 15222101 NR Description: bHLH protein [Arabidopsis thaliana]
  misc_feature (104)..(221): NCBI GI NO: 22331357 NR Description: bHLH protein family [Arabidopsis thaliana]
  misc_feature (215)..(311): NCBI GI NO: 22331357 NR Description: bHLH protein family [Arabidopsis thaliana]
MELDEQAFLEEILSLRRDAWDCNVSMGDLFAPAAAAAIDCSFHNQQAPTVSVLPTFTASCAEPPAFDCLSEVYGAAAAFGGPNAGDEMAFLHVAEPKEALQLDDNAGLGVCKVEPGLVESDGGGAAAPTPAPAASKKKRTEGMPSKNLMAERRRRKRLNDRLSMLRSVVPKISKMDRTSILGDTIDYMKELLERIKLLQEEIEQQGEAPAGMLSVFRELNPNEMVARNTPKLDVERKEGGDTRVEIYCGARPGLLLSTVSTLDALGLDIQQCVVSCFNDFGMHASCSEMQRDMISADAIKQELLKTAGYGGGCM

SEQ ID NO: 24593 - protein, 289 aa, Zea mays subsp. mays
  peptide (1)..(289): Ceres Seq. ID no. 13493593
  misc_feature (119)..(167): Pfam Name: Pfam Description:  Helix-loop-helix DNA-binding domain
  misc_feature (111)..(289): NCBI GI NO: 18424973 NR Description: bHLH protein [Arabidopsis thaliana]
  misc_feature (111)..(289): NCBI GI NO: 21537346 NR Description: unknown [Arabidopsis thaliana]
  misc_feature (41)..(286): NCBI GI NO: 22758263 NR Description: Putative bHLH transcription protein
  misc_feature (113)..(289): NCBI GI NO: 15238199 NR Description: bHLH protein [Arabidopsis thaliana]
  misc_feature (113)..(289): NCBI GI NO: 20127062 NR Description: putative bHLH transcription factor
  misc_feature (87)..(261): NCBI GI NO: 37536566 NR Description: hypothetical protein
  misc_feature (110)..(286): NCBI GI NO: 25513489 NR Description: F13K23.12 protein - Arabidopsis thaliana
  misc_feature (110)..(286): NCBI GI NO: 15222101 NR Description: bHLH protein [Arabidopsis thaliana]
  misc_feature (79)..(196): NCBI GI NO: 22331357 NR Description: bHLH protein family [Arabidopsis thaliana]
  misc_feature (190)..(286): NCBI GI NO: 22331357 NR Description: bHLH protein family [Arabidopsis thaliana]
MGDLFAPAAAAAIDCSFHNQQAPTVSVLPTFTASCAEPPAFDCLSEVYGAAAAFGGPNAGDEMAFLHVAEPKEALQLDDNAGLGVCKVEPGLVESDGGGAAAPTPAPAASKKKRTEGMPSKNLMAERRRRKRLNDRLSMLRSVVPKISKMDRTSILGDTIDYMKELLERIKLLQEEIEQQGEAPAGMLSVFRELNPNEMVARNTPKLDVERKEGGDTRVEIYCGARPGLLLSTVSTLDALGLDIQQCVVSCFNDFGMHASCSEMQRDMISADAIKQELLKTAGYGGGCM

SEQ ID NO: 24594 - DNA, 1121 bp, Zea mays subsp. mays
  misc_feature (1)..(1121): Ceres Seq. ID no. 12373836
gttcggcttcggtcctaccgccgccgcgtcgtgggaggataatcgaactgcttcccttctcgtcttccctaacctttccgtccttcccggattatttccatcaccagagcgtatcgcgtcgtctcctctctatccgattccgcccgcggacccaggctcccgcatggacgctgccggcggggtggaggccgccgccaacggcgggatcgagggctccgccgacccctgcagctcaggcggtgccggcgggtacaggcgctccgtccaccagatcgccggcggcgggaaagctgctgatatcatcttatggaggcgagcgcgtgttacatttggtgttatatttggtgctactctggcatggtggttgtttgagaagtctggactatcattattaactatctgctctgatatacttctcatcttgatagttctgcagttcataagggttaaaatagctggactgctagataggcagcctaggccactacctgagttagttttatcagaggagatggttagcaatgctgcggcttcattccgtgtgaaagtgaacagcatgctgatgatagcgcatgacattactcttggcaaggacttcaggctatttttccaggtcgtgattgtcttgtggctgttatctgtcattggaaatttctgctcgtctatcactcttgcttacataggaaccgttgctttggtcacaatgcctgcattgtacaacaagtaccagaggcctgttgataggtatgctgggatggtctaccggaacatttcgaggcattacaagatagttgatgagaatgtgatcagtagactaccgagaaggtttatcagagataaagaggactgatactctgaaaaatgaactcgctaagctagtcaggtaatcttttacctacattgtcagaccttacatggtgtgaaactatagagctacgaaaacagagaacggcatggaacctacagtagataccgttgcagtgtactcttgggcaaaggtttgagacgaaattaaaatgtatagctttctgtgttagctctttgcaacgaactggctaaatgttgttaaaaataacaaaagcaattgtcatgggaagttgaaaatgaagtggttgtaactg

SEQ ID NO: 24595 - protein, 282 aa, Zea mays subsp. mays
  peptide (1)..(282): Ceres Seq. ID no. 12373837
  misc_feature (55)..(281): NCBI GI NO: 26450318 NR Description: unknown protein [Arabidopsis thaliana]
  misc_feature (98)..(281): NCBI GI NO: 30681541 NR Description: reticulon family [Arabidopsis thaliana]
  misc_feature (45)..(281): NCBI GI NO: 34904202 NR Description: P0492F05.25
  misc_feature (85)..(260): NCBI GI NO: 38345298 NR Description: OSJNBa0043A12.26
  misc_feature (83)..(281): NCBI GI NO: 34909318 NR Description: OSJNBb0021A09.5
  misc_feature (83)..(281): NCBI GI NO: 15237093 NR Description: putative protein; protein id: At4g11220
  misc_feature (83)..(272): NCBI GI NO: 15222616 NR Description: hypothetical protein; protein id: At1g64090
  misc_feature (85)..(281): NCBI GI NO: 18401821 NR Description: expressed protein; protein id: At3g18260
  misc_feature (85)..(281): NCBI GI NO: 21592845 NR Description: unknown [Arabidopsis thaliana]
  misc_feature (83)..(281): NCBI GI NO: 15236556 NR Description: putative protein; protein id: At4g23630
FGFGPTAAASWEDNRTASLLVFPNLSVLPGLFPSPERIASSPLYPIPPADPGSRMDAAGGVEAAANGGIEGSADPCSSGGAGGYRRSVHQIAGGGKAADIILWRRARVTFGVIFGATLAWWLFEKSGLSLLTICSDILLILIVLQFIRVKIAGLLDRQPRPLPELVLSEEMVSNAAASFRVKVNSMLMIAHDITLGKDFRLFFQVVIVLWLLSVIGNFCSSITLAYIGTVALVTMPALYNKYQRPVDRYAGMVYRNISRHYKIVDENVISRLPRRFIRDKED

SEQ ID NO: 24596 - protein, 228 aa, Zea mays subsp. mays
  peptide (1)..(228): Ceres Seq. ID no. 12373838
  misc_feature (1)..(227): NCBI GI NO: 26450318 NR Description: unknown protein [Arabidopsis thaliana]
  misc_feature (44)..(227): NCBI GI NO: 30681541 NR Description: reticulon family [Arabidopsis thaliana]
  misc_feature (1)..(227): NCBI GI NO: 34904202 NR Description: P0492F05.25
  misc_feature (31)..(206): NCBI GI NO: 38345298 NR Description: OSJNBa0043A12.26
  misc_feature (29)..(227): NCBI GI NO: 34909318 NR Description: OSJNBb0021A09.5
  misc_feature (29)..(227): NCBI GI NO: 15237093 NR Description: putative protein; protein id: At4g11220
  misc_feature (29)..(218): NCBI GI NO: 15222616 NR Description: hypothetical protein; protein id: At1g64090
  misc_feature (31)..(227): NCBI GI NO: 18401821 NR Description: expressed protein; protein id: At3g18260
  misc_feature (31)..(227): NCBI GI NO: 21592845 NR Description: unknown [Arabidopsis thaliana]
  misc_feature (29)..(227): NCBI GI NO: 15236556 NR Description: putative protein; protein id: At4g23630
MDAAGGVEAAANGGIEGSADPCSSGGAGGYRRSVHQIAGGGKAADIILWRRARVTFGVIFGATLAWWLFEKSGLSLLTICSDILLILIVLQFIRVKIAGLLDRQPRPLPELVLSEEMVSNAAASFRVKVNSMLMIAHDITLGKDFRLFFQVVIVLWLLSVIGNFCSSITLAYIGTVALVTMPALYNKYQRPVDRYAGMVYRNISRHYKIVDENVISRLPRRFIRDKED

SEQ ID NO: 24597 - DNA, 1621 bp, Zea mays subsp. mays
  misc_feature (1)..(1621): Ceres Seq. ID no. 12368052
gtttttcttttattcccctccactgctttgcgcttgcgcctacgcatcgccgccccgcctctagttctctctgtcctcgtcttcctactgtaaaccacctcgtccctatccgcggcaaccgttcaccgcgccgcgaggcctgctgatccgaccgacctccaccgtcatggctcccctgcgccgcgcgtctcgcctccttcgatcagccgtctgccggctgaggtctccagcgccggctcgggccttctccagcgccgcggcgaccgagacgggtgccgtgatcgccgctgctgccgtggcggtggccagctccgggctcgggctgtggctgaaaccgccgtcgcttgccgactccggcgaggcgcccggcgaccagatctcggtcgcctgcgccggcgccacggaggcgcgggaggagaaggggtggttcctgttcgcagactcatttcgtagaagggtcttcttcaactacgagaagaggatacggcttctcagtcctcctgagaagatttttgagtactttgcgtctgtgaggaatcgagaagggaaagtttacatgttgcctgctgacttgatgagagcagtagtccctgtttttcctccatcagagtccacggtagttcgtgaaggaagattaaggggggagcggagccctggagaattgcactgtgctccatcagagttctttatgcagttcgacacaaataatgatggcctcatctcctttgctgagtacattttttttgtgacattgctcagcattcatgagtcaaatttcactgtggccttcaaaatgttcgacatcgaccacagtggttaatttatctcgccaagaaaaaagacctgctcgttatgagcatgttcaatcatctgacttgtttgttgatggtaaaagaaggggtgatagacagagaagagtttaagaaaataatggcactgatgcggtcctttaacagacaagggtcgactcataaggatggtttacgtattggacttaaagttggcaagcctgtggaaaatggtggggtggtcgagtacttctttgggagtgatgggaatgaacctctacactttgacaagttttctaaaattttgaaggaattgcatgatgagattattcaactggagttcagtcattatgatgtcaagtcgtctaaaacaataccagcaaaggattttgcattgtccatggttgcttctgctgacatgaaccatatcaacaaactgcttgatagagttgatagtttggtcaaggagccagatctgaaggacatacgcatcacctttgaggagtttaaggcatttgctgatttgcgacgaagattggagccactgtcgatggctatctttgcttacggtaaattgaatgggttattgacgaaggaggatctaaaacgtgcagcgcaacatgcgcagaaggtaatcaccaagcagtgcattgctgatcgttacaacggacttcactgtatgtcgtcttggtggccgaagcttgactagcagtaacagctgtaattgtaaatcgtgtcctctgtagccctaggactgagtgatatacattgttattctcacgtgtaaattaaaccccatatggccatatggcttcaatatatgaaacattgcc

SEQ ID NO: 24598 - protein, 217 aa, Zea mays subsp. mays
  peptide (1)..(217): Ceres Seq. ID no. 12368053
  misc_feature (169)..(197): Pfam Name: Pfam Description:  EF hand
  misc_feature (10)..(217): NCBI GI NO: 38345151 NR Description: OSJNBa0014K14.5
  misc_feature (88)..(217): NCBI GI NO: 15236653 NR Description: putative protein; protein id: At4g32060
  misc_feature (94)..(217): NCBI GI NO: 17543982 NR Description: EF hand calcium binding protein (65.2 kD)
  misc_feature (94)..(217): NCBI GI NO: 39587689 NR Description: Hypothetical protein CBG01795
  misc_feature (94)..(217): NCBI GI NO: 19920872 NR Description: CG4495-PA [Drosophila melanogaster]
  misc_feature (94)..(217): NCBI GI NO: 29841284 NR Description: similar to GenBank Accession Number AE003616calcium binding atopy-related autoantigen 1
  misc_feature (62)..(217): NCBI GI NO: 21450201 NR Description: calcium binding atopy-related autoantigen 1
  misc_feature (62)..(217): NCBI GI NO: 26346488 NR Description: unnamed protein product [Mus musculus]
  misc_feature (62)..(217): NCBI GI NO: 40786511 NR Description: calcium binding atopy-related autoantigen 1
  misc_feature (62)..(217): NCBI GI NO: 18605991 NR Description: Unknown (protein for MGC:36503) [Mus musculus]
MAPLRRASRLLRSAVCRLRSPAPARAFSSAAATETGAVIAAAAVAVASSGLGLWLKPPSLADSGEAPGDQISVACAGATEAREEKGWFLFADSFRRRVFFNYEKRIRLLSPPEKIFEYFASVRNREGKVYMLPADLMRAVVPVFPPSESTVVREGRLRGERSPGELHCAPSEFFMQFDTNNDGLISFAEYIFFVTLLSIHESNFTVAFKMFDIDHSG

SEQ ID NO: 24599 - protein, 214 aa, Zea mays subsp. mays
  peptide (1)..(214): Ceres Seq. ID no. 12368054
  misc_feature (16)..(186): NCBI GI NO: 38345151 NR Description: OSJNBa0014K14.5
  misc_feature (16)..(184): NCBI GI NO: 15236653 NR Description: putative protein; protein id: At4g32060
  misc_feature (16)..(184): NCBI GI NO: 17543982 NR Description: EF hand calcium binding protein (65.2 kD)
  misc_feature (16)..(184): NCBI GI NO: 39587689 NR Description: Hypothetical protein CBG01795
  misc_feature (15)..(198): NCBI GI NO: 19920872 NR Description: CG4495-PA [Drosophila melanogaster]
  misc_feature (15)..(184): NCBI GI NO: 29841284 NR Description: similar to GenBank Accession Number AE003616calcium binding atopy-related autoantigen 1
  misc_feature (62)..(183): NCBI GI NO: 23271302 NR Description: Unknown (protein for IMAGE:5261983) [Homo sapiens]
  misc_feature (6)..(187): NCBI GI NO: 34874232 NR Description: similar to Smhs2 homolog [Rattus norvegicus]
MSMFNHLTCLLMVKEGVIDREEFKKIMALMRSFNRQGSTHKDGLRIGLKVGKPVENGGVVEYFFGSDGNEPLHFDKFSKILKELHDEIIQLEFSHYDVKSSKTIPAKDFALSMVASADMNHINKLLDRVDSLVKEPDLKDIRITFEEFKAFADLRRRLEPLSMAIFAYGKLNGLLTKEDLKRAAQHAQKVITKQCIADRYNGLHCMSSWWPKLD

SEQ ID NO: 24600 - protein, 212 aa, Zea mays subsp. mays
  peptide (1)..(212): Ceres Seq. ID no. 12368055
  misc_feature (14)..(184): NCBI GI NO: 38345151 NR Description: OSJNBa0014K14.5
  misc_feature (14)..(182): NCBI GI NO: 15236653 NR Description: putative protein; protein id: At4g32060
  misc_feature (14)..(182): NCBI GI NO: 17543982 NR Description: EF hand calcium binding protein (65.2 kD)
  misc_feature (14)..(182): NCBI GI NO: 39587689 NR Description: Hypothetical protein CBG01795
  misc_feature (13)..(196): NCBI GI NO: 19920872 NR Description: CG4495-PA [Drosophila melanogaster]
  misc_feature (13)..(182): NCBI GI NO: 29841284 NR Description: similar to GenBank Accession Number AE003616calcium binding atopy-related autoantigen 1
  misc_feature (60)..(181): NCBI GI NO: 23271302 NR Description: Unknown (protein for IMAGE:5261983) [Homo sapiens]
  misc_feature (4)..(185): NCBI GI NO: 34874232 NR Description: similar to Smhs2 homolog [Rattus norvegicus]
MFNHLTCLLMVKEGVIDREEFKKIMALMRSFNRQGSTHKDGLRIGLKVGKPVENGGVVEYFFGSDGNEPLHFDKFSKILKELHDEIIQLEFSHYDVKSSKTIPAKDFALSMVASADMNHINKLLDRVDSLVKEPDLKDIRITFEEFKAFADLRRRLEPLSMAIFAYGKLNGLLTKEDLKRAAQHAQKVITKQCIADRYNGLHCMSSWWPKLD

SEQ ID NO: 24601 - DNA, 1341 bp, Zea mays subsp. mays
  misc_feature (1)..(1341): Ceres Seq. ID no. 12366729
gtccagacatcaggcagagcaggaacacaaggagagttcagagttcagacagcagggctttctctccgatcgctgttctgagcgatggcagcgcgcggcggtggtacgaggatgacgtctgctgctgctgccgcggcgccatgggttagcgtctgcagcttcttgctctgcttggcggccttccagggcgctgagggtgcgattggcgtgaactacggcatggtcgctaacaacctgccggcgccggagcaggtcgtctccatgtacaaggccaagaacatcagctacgtgcggctcttccacccggacaaggacgcgttgaacgcgctccgcggctccggcgtcggcgtcgtcctgggcacgctgaacgaggacctcccgcgcctggcgtccgacctgtccttcgccgcgtcgtgggtggccacgaacgtgcagcccttcgccggcgccgtccagttccggtacatcaacgccggcaacgaggtcatcccgggggacgccgcggcgcgggtgctcccggccatgcagaacctggagtcggcgctccggtccgcgggggtcacgggcgtccccgtcaccacggccgtggccaccagcgtgctcggcgcctcgtacccgccgtcccagggcgccttctccgaggcggccgcgccggtgatggcgcccatcgtctcgtacctgtcgtcgaagggcgcgccgctgctggtcaacgtatacccgtacttcgcctactcgagcagcggcgggcaggtggcgctcgggtacgcgctgctgtcggcggacgccggcgcggcgtcgtcggtcacggacgccggggtggtctacaccaacatgttcgacgctatcgtggacgcgacgcacgccgcggtggagaaagccggggtccaggggctggagctggtggtgtcggagaccggctggccgtcggccggcggcgagggcgccaccgtggagaatgccgcggcgtacaacaacaacgtggtgcggcacgtcggcggcggtaccccgcggcgaccagggaaggccgtggagacgtaccttttcgccatgttcaacgagaacggcaaggccgagggcgtggagcagcacttcggcctcttccagccggacatgagcgaggtctaccacgtcgacttcacggcgggatccccctaggtctagggaggaggcggcttacccgcttcttcacttttagtagtaggctcatccttcattcccctgatctacttcgttttgttggagtagcaaaactgccgcacgtcacgtttactgtttattttttaatatcttatatagaaaaataatatcaacatttattctttaaataagtttatgtttact

SEQ ID NO: 24602 - protein, 356 aa, Zea mays subsp. mays
  peptide (1)..(356): Ceres Seq. ID no. 12366730
  misc_feature (42)..(351): Pfam Name: Pfam Description:  Glycosyl hydrolases family 17
  misc_feature (42)..(355): NCBI GI NO: 4884532 NR Description: beta-1,3-glucanase [Oryza sativa]
  misc_feature (36)..(350): NCBI GI NO: 4097946 NR Description: beta-1,3-glucanase precursor [Oryza sativa]
  misc_feature (39)..(355): NCBI GI NO: 7447972 NR Description: glucan endo-1,3-beta-D-glucosidase (EC 3
  misc_feature (22)..(353): NCBI GI NO: 34908958 NR Description: beta-1,3-glucanase precursor
  misc_feature (22)..(353): NCBI GI NO: 4097944 NR Description: beta-1,3-glucanase precursor [Oryza sativa]
  misc_feature (35)..(355): NCBI GI NO: 585078 NR Description: PUTATIVE GLUCAN ENDO-1
  misc_feature (40)..(355): NCBI GI NO: 322839 NR Description: glucan endo-1,3-beta-D-glucosidase (EC 3
  misc_feature (39)..(351): NCBI GI NO: 6073860 NR Description: beta-1, 3-glucananse [Musa acuminata]
  misc_feature (39)..(351): NCBI GI NO: 6448757 NR Description: beta-1,3-glucanase [Musa acuminata]
  misc_feature (23)..(351): NCBI GI NO: 34906502 NR Description: putative beta 1,3-glucanase
MAARGGGTRMTSAAAAAAPWVSVCSFLLCLAAFQGAEGAIGVNYGMVANNLPAPEQVVSMYKAKNISYVRLFHPDKDALNALRGSGVGVVLGTLNEDLPRLASDLSFAASWVATNVQPFAGAVQFRYINAGNEVIPGDAAARVLPAMQNLESALRSAGVTGVPVTTAVATSVLGASYPPSQGAFSEAAAPVMAPIVSYLSSKGAPLLVNVYPYFAYSSSGGQVALGYALLSADAGAASSVTDAGVVYTNMFDAIVDATHAAVEKAGVQGLELVVSETGWPSAGGEGATVENAAAYNNNVVRHVGGGTPRRPGKAVETYLFAMFNENGKAEGVEQHFGLFQPDMSEVYHVDFTAGSP

SEQ ID NO: 24603 - protein, 347 aa, Zea mays subsp. mays
  peptide (1)..(347): Ceres Seq. ID no. 12366731
  misc_feature (33)..(342): Pfam Name: Pfam Description:  Glycosyl hydrolases family 17
  misc_feature (33)..(346): NCBI GI NO: 4884532 NR Description: beta-1,3-glucanase [Oryza sativa]
  misc_feature (27)..(341): NCBI GI NO: 4097946 NR Description: beta-1,3-glucanase precursor [Oryza sativa]
  misc_feature (30)..(346): NCBI GI NO: 7447972 NR Description: glucan endo-1,3-beta-D-glucosidase (EC 3
  misc_feature (13)..(344): NCBI GI NO: 34908958 NR Description: beta-1,3-glucanase precursor
  misc_feature (13)..(344): NCBI GI NO: 4097944 NR Description: beta-1,3-glucanase precursor [Oryza sativa]
  misc_feature (26)..(346): NCBI GI NO: 585078 NR Description: PUTATIVE GLUCAN ENDO-1
  misc_feature (31)..(346): NCBI GI NO: 322839 NR Description: glucan endo-1,3-beta-D-glucosidase (EC 3
  misc_feature (30)..(342): NCBI GI NO: 6073860 NR Description: beta-1, 3-glucananse [Musa acuminata]
  misc_feature (30)..(342): NCBI GI NO: 6448757 NR Description: beta-1,3-glucanase [Musa acuminata]
  misc_feature (14)..(342): NCBI GI NO: 34906502 NR Description: putative beta 1,3-glucanase
MTSAAAAAAPWVSVCSFLLCLAAFQGAEGAIGVNYGMVANNLPAPEQVVSMYKAKNISYVRLFHPDKDALNALRGSGVGVVLGTLNEDLPRLASDLSFAASWVATNVQPFAGAVQFRYINAGNEVIPGDAAARVLPAMQNLESALRSAGVTGVPVTTAVATSVLGASYPPSQGAFSEAAAPVMAPIVSYLSSKGAPLLVNVYPYFAYSSSGGQVALGYALLSADAGAASSVTDAGVVYTNMFDAIVDATHAAVEKAGVQGLELVVSETGWPSAGGEGATVENAAAYNNNVVRHVGGGTPRRPGKAVETYLFAMFNENGKAEGVEQHFGLFQPDMSEVYHVDFTAGSP

SEQ ID NO: 24604 - protein, 311 aa, Zea mays subsp. mays
  peptide (1)..(311): Ceres Seq. ID no. 12366732
  misc_feature (1)..(306): Pfam Name: Pfam Description:  Glycosyl hydrolases family 17
  misc_feature (1)..(310): NCBI GI NO: 4884532 NR Description: beta-1,3-glucanase [Oryza sativa]
  misc_feature (1)..(305): NCBI GI NO: 4097946 NR Description: beta-1,3-glucanase precursor [Oryza sativa]
  misc_feature (1)..(310): NCBI GI NO: 7447972 NR Description: glucan endo-1,3-beta-D-glucosidase (EC 3
  misc_feature (1)..(308): NCBI GI NO: 34908958 NR Description: beta-1,3-glucanase precursor
  misc_feature (1)..(308): NCBI GI NO: 4097944 NR Description: beta-1,3-glucanase precursor [Oryza sativa]
  misc_feature (1)..(310): NCBI GI NO: 585078 NR Description: PUTATIVE GLUCAN ENDO-1
  misc_feature (1)..(310): NCBI GI NO: 322839 NR Description: glucan endo-1,3-beta-D-glucosidase (EC 3
  misc_feature (1)..(306): NCBI GI NO: 6073860 NR Description: beta-1, 3-glucananse [Musa acuminata]
  misc_feature (1)..(306): NCBI GI NO: 6448757 NR Description: beta-1,3-glucanase [Musa acuminata]
  misc_feature (1)..(306): NCBI GI NO: 34906502 NR Description: putative beta 1,3-glucanase
MVANNLPAPEQVVSMYKAKNISYVRLFHPDKDALNALRGSGVGVVLGTLNEDLPRLASDLSFAASWVATNVQPFAGAVQFRYINAGNEVIPGDAAARVLPAMQNLESALRSAGVTGVPVTTAVATSVLGASYPPSQGAFSEAAAPVMAPIVSYLSSKGAPLLVNVYPYFAYSSSGGQVALGYALLSADAGAASSVTDAGVVYTNMFDAIVDATHAAVEKAGVQGLELVVSETGWPSAGGEGATVENAAAYNNNVVRHVGGGTPRRPGKAVETYLFAMFNENGKAEGVEQHFGLFQPDMSEVYHVDFTAGSP

SEQ ID NO: 24605 - DNA, 1359 bp, Zea mays subsp. mays
  misc_feature (1)..(1359): Ceres Seq. ID no. 12410500
gctcggcgctcgctcgctcgttcgcgcttcgctcccttccttccgtttcgctcgctgccgcggacacgccgcacacggtcgaggagacgacagctgccgcgcggcactgggctcgggggagctggaccgccgggcgaggacaagagacggtatcgatggcctacgcgcgcaccgtgatggcggcggccgcctctgcgctgctgatggccgtgggcgtgcggttcctgggccccgcggcggcggcgttcgtggaggaagagctgccgcgcgcccgcgcggtggccgccacctggctcacgccgccgtacctgtacctcgtcatcaacgccatcatcatctccatcgccgcgtcgtcccgcttccagtcgagcggcggcgccggcggacgtccgtcagccccgtcgtatgcgcccgccgcggaccccgacgccgacgccatcggaggagaaggagcgggcgaggagatagcagcagcaggatgggatccagccggcggttgcgtcgttgcaggtgcctgcggcggtgcccgtggtggcagcgaaggccgcggaggttgctgctgtcgtcgaggagccagtggtggtggagatccacactgtagcggtggcgccggagggcgaggtggacgaggactattcggtttcgaggtcgacatggacgccgcgtcggaggggcgcggagccggaggtggcggcggaggtgccgccgttcgcggacctgaccaactccaggaagaagccgctcgtgtcggcgaggttcagcaggaaggcgaccaaaccaagccccgaaggtagcagggctctgcgggtggcgcggccgcggaaggaggagacgctggagagcacgtggaaggccatcacggagggccgggggccgacgctagctcggcacctcaagaagtccgacacctgggacaccccgtccccgggcgccgcccgtccggcggcggcagcagcggggaggtcgatccagcggccgcggcaccggcggggacgatgcggaaggccgagactttcaacgacggtggcgccggaaggagcagacctgctcccgctgcgctggtgcggcgggagccgtcgctggggcaggacgagctgaaccgccgcgtggaggcgttcatccacaagttcaacatggagatgcggctgcagcggcaggagtcgctcaagcactacaacgacatgattggcaggggcaggggcagccgttagtgggaagtcttgctgcaaatagctgcggctccgcaagaaggattctgcttttttgttccgtgatatttctcgattttggttcttggtctctgtaagatatggttttgtgtaaatggttttatcaagtaacgaggacaagttcgatcgc

SEQ ID NO: 24606 - protein, 263 aa, Zea mays subsp. mays
  peptide (1)..(263): Ceres Seq. ID no. 12410501
  misc_feature (61)..(141): Pfam Name: Pfam Description:  Cotton fibre expressed protein
  misc_feature (52)..(141): NCBI GI NO: 34898720 NR Description: putative fiber protein
  misc_feature (58)..(125): NCBI GI NO: 7484716 NR Description: fiber protein 1 [imported] - upland cotton
  misc_feature (62)..(123): NCBI GI NO: 25373438 NR Description: hypothetical protein F11P17.2
  misc_feature (62)..(123): NCBI GI NO: 30696552 NR Description: cotton fiber expressed protein -related
  misc_feature (58)..(161): NCBI GI NO: 7484717 NR Description: fiber protein 2 [imported] - upland cotton
  misc_feature (49)..(119): NCBI GI NO: 15239605 NR Description: cotton fiber expressed protein 1-like protein
  misc_feature (58)..(125): NCBI GI NO: 7484718 NR Description: fiber protein 3 [imported] - upland cotton
  misc_feature (115)..(263): NCBI GI NO: 15610480 NR Description: PE_PGRS [Mycobacterium tuberculosis H37Rv]
  misc_feature (123)..(263): NCBI GI NO: 9625624 NR Description: nuclear antigen EBNA1 [Human herpesvirus 4]
  misc_feature (125)..(263): NCBI GI NO: 15609627 NR Description: PE_PGRS [Mycobacterium tuberculosis H37Rv]
SALARSFALRSLPSVSLAAADTPHTVEETTAAARHWARGSWTAGRGQETVSMAYARTVMAAAASALLMAVGVRFLGPAAAAFVEEELPRARAVAATWLTPPYLYLVINAIIISIAASSRFQSSGGAGGRPSAPSYAPAADPDADAIGGEGAGEEIAAAGWDPAGGCVVAGACGGARGGSEGRGGCCCRRGASGGGDPHCSGGAGGRGGRGLFGFEVDMDAASEGRGAGGGGGGAAVRGPDQLQEEAARVGEVQQEGDQTKPRR

SEQ ID NO: 24607 - protein, 212 aa, Zea mays subsp. mays
  peptide (1)..(212): Ceres Seq. ID no. 12410502
  misc_feature (10)..(90): Pfam Name: Pfam Description:  Cotton fibre expressed protein
  misc_feature (1)..(90): NCBI GI NO: 34898720 NR Description: putative fiber protein
  misc_feature (7)..(74): NCBI GI NO: 7484716 NR Description: fiber protein 1 [imported] - upland cotton
  misc_feature (11)..(72): NCBI GI NO: 25373438 NR Description: hypothetical protein F11P17.2
  misc_feature (11)..(72): NCBI GI NO: 30696552 NR Description: cotton fiber expressed protein -related
  misc_feature (7)..(110): NCBI GI NO: 7484717 NR Description: fiber protein 2 [imported] - upland cotton
  misc_feature (1)..(68): NCBI GI NO: 15239605 NR Description: cotton fiber expressed protein 1-like protein
  misc_feature (7)..(74): NCBI GI NO: 7484718 NR Description: fiber protein 3 [imported] - upland cotton
  misc_feature (64)..(212): NCBI GI NO: 15610480 NR Description: PE_PGRS [Mycobacterium tuberculosis H37Rv]
  misc_feature (72)..(212): NCBI GI NO: 9625624 NR Description: nuclear antigen EBNA1 [Human herpesvirus 4]
  misc_feature (74)..(212): NCBI GI NO: 15609627 NR Description: PE_PGRS [Mycobacterium tuberculosis H37Rv]
MAYARTVMAAAASALLMAVGVRFLGPAAAAFVEEELPRARAVAATWLTPPYLYLVINAIIISIAASSRFQSSGGAGGRPSAPSYAPAADPDADAIGGEGAGEEIAAAGWDPAGGCVVAGACGGARGGSEGRGGCCCRRGASGGGDPHCSGGAGGRGGRGLFGFEVDMDAASEGRGAGGGGGGAAVRGPDQLQEEAARVGEVQQEGDQTKPRR

SEQ ID NO: 24608 - protein, 205 aa, Zea mays subsp. mays
  peptide (1)..(205): Ceres Seq. ID no. 12410503
  misc_feature (3)..(83): Pfam Name: Pfam Description:  Cotton fibre expressed protein
  misc_feature (1)..(83): NCBI GI NO: 34898720 NR Description: putative fiber protein
  misc_feature (1)..(67): NCBI GI NO: 7484716 NR Description: fiber protein 1 [imported] - upland cotton
  misc_feature (4)..(65): NCBI GI NO: 25373438 NR Description: hypothetical protein F11P17.2
  misc_feature (4)..(65): NCBI GI NO: 30696552 NR Description: cotton fiber expressed protein -related
  misc_feature (1)..(103): NCBI GI NO: 7484717 NR Description: fiber protein 2 [imported] - upland cotton
  misc_feature (1)..(61): NCBI GI NO: 15239605 NR Description: cotton fiber expressed protein 1-like protein
  misc_feature (1)..(67): NCBI GI NO: 7484718 NR Description: fiber protein 3 [imported] - upland cotton
  misc_feature (57)..(205): NCBI GI NO: 15610480 NR Description: PE_PGRS [Mycobacterium tuberculosis H37Rv]
  misc_feature (65)..(205): NCBI GI NO: 9625624 NR Description: nuclear antigen EBNA1 [Human herpesvirus 4]
  misc_feature (67)..(205): NCBI GI NO: 15609627 NR Description: PE_PGRS [Mycobacterium tuberculosis H37Rv]
MAAAASALLMAVGVRFLGPAAAAFVEEELPRARAVAATWLTPPYLYLVINAIIISIAASSRFQSSGGAGGRPSAPSYAPAADPDADAIGGEGAGEEIAAAGWDPAGGCVVAGACGGARGGSEGRGGCCCRRGASGGGDPHCSGGAGGRGGRGLFGFEVDMDAASEGRGAGGGGGGAAVRGPDQLQEEAARVGEVQQEGDQTKPRR

SEQ ID NO: 24609 - DNA, 884 bp, Zea mays subsp. mays
  misc_feature (1)..(884): Ceres Seq. ID no. 12405757
aaccaactgagctgagcaagaaggcaagcaccaatcagccagcagtccagcacaatatcatgaacaagcgtcaggtcgccgcggcggtggctgccctcctggcgctgctagccgcatcatcgacggccggcgccgtgacgttcgacgcgacgaacacggcgtccgatacccccggcgggcagcggttcgaccaggccgtcggcctcgactacgccaagcaggtcctgtccgacgcgtccacgttcatctggaacaccttcgaccagcccagccccgccgaccgcaagcccgtcgacgcggtgaccctcgtcgtcgaggacatcggcggcgtggccttcacgagcgccaacgggatccacctcagcgcgcagtacgtcggcggctactccggcgacgtcaagaccgaagtcaccggcgtgctgtaccacgagacaacgcacgtgtggcagtgggacgggcagggccaggcgaacggcggcctcatcgagggcatcgccgactacgtccggctgaaggcggggtacgcgccgggccactgggtgcagccggggcagggggaccggtgggaccaggggtacgacgtcacggcgaggttcctggactactgcgactcgctcaagccgggcttcgtcgcgctgctcaacgccaagatgaaggacggctacaccgacgacttcttcgcccagatcctgggcaagaccgtgcagcagctgtggcaggactacaaggctaagtacgggggctgatgatggtgatgcaaattggtggcggtgcgaagtcaacgcgtcaatggctcaatgcgtttggtatgagatgctattatgtgctagtacgtacactctgtgtgtaaaatatatagagaaaataaaagggatcggataatt

SEQ ID NO: 24610 - protein, 247 aa, Zea mays subsp. mays
  peptide (1)..(247): Ceres Seq. ID no. 12405758
  misc_feature (22)..(247): Pfam Name: Pfam Description:  Plant Basic Secretory Protein
  misc_feature (22)..(247): NCBI GI NO: 7489381 NR Description: hypothetical protein pBH6-17 - barley
  misc_feature (22)..(247): NCBI GI NO: 5669008 NR Description: secretory protein [Triticum aestivum]
  misc_feature (63)..(247): NCBI GI NO: 37535608 NR Description: putative secretory protein
  misc_feature (27)..(246): NCBI GI NO: 37535606 NR Description: putative secretory protein
  misc_feature (22)..(245): NCBI GI NO: 7489663 NR Description: benzothiadiazole-induced protein
  misc_feature (29)..(246): NCBI GI NO: 27803890 NR Description: NtPRp27-like protein [Solanum tuberosum]
  misc_feature (31)..(245): NCBI GI NO: 5360263 NR Description: NtPRp27 [Nicotiana tabacum]
  misc_feature (30)..(245): NCBI GI NO: 14329814 NR Description: putative NtPRp27-like protein [Atropa belladonna]
  misc_feature (24)..(245): NCBI GI NO: 7489380 NR Description: hypothetical protein pBH6-12 - barley
  misc_feature (29)..(246): NCBI GI NO: 37535610 NR Description: putative basic secretory protein
PTELSKKASTNQPAVQHNIMNKRQVAAAVAALLALLAASSTAGAVTFDATNTASDTPGGQRFDQAVGLDYAKQVLSDASTFIWNTFDQPSPADRKPVDAVTLVVEDIGGVAFTSANGIHLSAQYVGGYSGDVKTEVTGVLYHETTHVWQWDGQGQANGGLIEGIADYVRLKAGYAPGHWVQPGQGDRWDQGYDVTARFLDYCDSLKPGFVALLNAKMKDGYTDDFFAQILGKTVQQLWQDYKAKYGG

SEQ ID NO: 24611 - protein, 228 aa, Zea mays subsp. mays
  peptide (1)..(228): Ceres Seq. ID no. 12405759
  misc_feature (3)..(228): Pfam Name: Pfam Description:  Plant Basic Secretory Protein
  misc_feature (3)..(228): NCBI GI NO: 7489381 NR Description: hypothetical protein pBH6-17 - barley
  misc_feature (3)..(228): NCBI GI NO: 5669008 NR Description: secretory protein [Triticum aestivum]
  misc_feature (44)..(228): NCBI GI NO: 37535608 NR Description: putative secretory protein
  misc_feature (8)..(227): NCBI GI NO: 37535606 NR Description: putative secretory protein
  misc_feature (3)..(226): NCBI GI NO: 7489663 NR Description: benzothiadiazole-induced protein
  misc_feature (10)..(227): NCBI GI NO: 27803890 NR Description: NtPRp27-like protein [Solanum tuberosum]
  misc_feature (12)..(226): NCBI GI NO: 5360263 NR Description: NtPRp27 [Nicotiana tabacum]
  misc_feature (11)..(226): NCBI GI NO: 14329814 NR Description: putative NtPRp27-like protein [Atropa belladonna]
  misc_feature (5)..(226): NCBI GI NO: 7489380 NR Description: hypothetical protein pBH6-12 - barley
  misc_feature (10)..(227): NCBI GI NO: 37535610 NR Description: putative basic secretory protein
MNKRQVAAAVAALLALLAASSTAGAVTFDATNTASDTPGGQRFDQAVGLDYAKQVLSDASTFIWNTFDQPSPADRKPVDAVTLVVEDIGGVAFTSANGIHLSAQYVGGYSGDVKTEVTGVLYHETTHVWQWDGQGQANGGLIEGIADYVRLKAGYAPGHWVQPGQGDRWDQGYDVTARFLDYCDSLKPGFVALLNAKMKDGYTDDFFAQILGKTVQQLWQDYKAKYGG

SEQ ID NO: 24612 - DNA, 1713 bp, Zea mays subsp. mays
  misc_feature (1)..(1713): Ceres Seq. ID no. 13498435
gcacgagaccattacctagaacatcctaatcgaaaagtccgtcgtctcgcgctctcgtttcgtcgctacgctagcttccagtcccgggcttagcaactgtgctgctgttgcactgcacccggcgcacgcagagatgcgccgtgtcgggacgggtgtgaggatgctttgcggcgcggcgctgtcggtgcttctgcttctcgcgggcggcgcggcggcgtcgcactcgcgctcgtcgtgccccgccacgccgccggacgcggggaacacgctgcaggtgtcgcacgcgttcgggccgtgctcgccgctgggccccgggacggcggcgccgtcgtgggcggggttcctggcggaccaggcgtcgcgtgacgcgtcgcggctgctgtacctggactcgctggcggtgcgtggccgcgcccgcgcgtacgcgcccatcgcgtcggggcggcagctgctgcagacgctgacgtacgtggtgcgggccagcctcggcacgccgccgcagcagctgctcctggccgtcgacaccagcaacgacgcctcgtggatcccttgcgccggctgcgcgggctgccccacgtcgtccgcggcgcccttcgacccggccgcgtccgcctcgtaccgcacggtgccctgcgggtcgccgctgtgcgcgcaggcacccaacgcggcgtgcccgcccggcggcaaggcctgcggcttcagcctcacctacgccgactcctcgctgcaggccgcgctgtcgcaggactccctcgccgtcgcaggcaacgccgtgaaggcctacaccttcgggtgcctgcagagggccactggcacggctgcgccgccgcaggggctgctgggtctcggccgcggcccgctgtcgttcctttcgcagaccaaggacatgtacgaggccaccttctcgtactgtctccccagcttcaagtcgctcaacttctctggaacgctccggctcgggcgcaacggccagccgcagcgcatcaagacgacgccgctgctggccaacccgcaccggtcgtcgctctactacgtgaacatgaccggcgtccgcgtgggcaggaaggtggtgcccatcccggcgttcgacccggcgacgggcgcgggcaccgtgctggactctggcaccatgttcacccggctggtggcgccggcgtacgtggccgtgcgggacgaggtccggcgccgcgtcggcgcgcccgtatcctcgctgggagggttcgacacgtgcttcaacaccaccgccgtcgcgtggccgcccatgacgctgctgttcgacggcatgcaggtgacgttgccggaggagaacgtggtcatccacagcacgtacgggaccatcagctgcctggccatggccgcggcgcccgacggcgtcaacaccgtgctcaacgtcatcgccagcatgcagcagcagaaccaccgtgtgctcttcgacgtgcccaacggacgcgtcggcttcgcgcgcgagcgctgcactgccgcttgatcagcttgctcgcgcgcctgcgcgcgggctcggattcgggttatatttagttaaacctacgttctacggttgtggacgtcatgcactgctgtcggagtgggtgattaataatttaactttccttttctttttaatctcgttgctcttcagatttaccatatgtgtttcacattcaccgcgttatgtggtttaggggctgaatgattggggtctaaataatgtactgt

SEQ ID NO: 24613 - protein, 450 aa, Zea mays subsp. mays
  peptide (1)..(450): Ceres Seq. ID no. 13498436
  misc_feature (71)..(445): Pfam Name: Pfam Description:  Eukaryotic aspartyl protease
  misc_feature (15)..(450): NCBI GI NO: 34899068 NR Description: similar to nucleoid DNA-binding-like protein
  misc_feature (38)..(449): NCBI GI NO: 20161865 NR Description: putative nucleoid DNA-binding-like protein
  misc_feature (46)..(448): NCBI GI NO: 21617933 NR Description: nucleoid DNA-binding-like protein
  misc_feature (34)..(448): NCBI GI NO: 15240680 NR Description: nucleoid DNA-binding-related protein
  misc_feature (46)..(448): NCBI GI NO: 15232503 NR Description: nucleoid DNA-binding - like protein
  misc_feature (19)..(447): NCBI GI NO: 18391062 NR Description: expressed protein [Arabidopsis thaliana]
  misc_feature (82)..(447): NCBI GI NO: 21450872 NR Description: unknown protein [Arabidopsis thaliana]
  misc_feature (72)..(447): NCBI GI NO: 15223368 NR Description: chloroplast nucleoid DNA binding protein -related
  misc_feature (72)..(447): NCBI GI NO: 21594980 NR Description: chloroplast nucleoid DNA binding protein, putative
  misc_feature (112)..(447): NCBI GI NO: 15231010 NR Description: expressed protein [Arabidopsis thaliana]
MRRVGTGVRMLCGAALSVLLLLAGGAAASHSRSSCPATPPDAGNTLQVSHAFGPCSPLGPGTAAPSWAGFLADQASRDASRLLYLDSLAVRGRARAYAPIASGRQLLQTLTYVVRASLGTPPQQLLLAVDTSNDASWIPCAGCAGCPTSSAAPFDPAASASYRTVPCGSPLCAQAPNAACPPGGKACGFSLTYADSSLQAALSQDSLAVAGNAVKAYTFGCLQRATGTAAPPQGLLGLGRGPLSFLSQTKDMYEATFSYCLPSFKSLNFSGTLRLGRNGQPQRIKTTPLLANPHRSSLYYVNMTGVRVGRKVVPIPAFDPATGAGTVLDSGTMFTRLVAPAYVAVRDEVRRRVGAPVSSLGGFDTCFNTTAVAWPPMTLLFDGMQVTLPEENVVIHSTYGTISCLAMAAAPDGVNTVLNVIASMQQQNHRVLFDVPNGRVGFARERCTAA

SEQ ID NO: 24614 - protein, 441 aa, Zea mays subsp. mays
  peptide (1)..(441): Ceres Seq. ID no. 13498437
  misc_feature (62)..(436): Pfam Name: Pfam Description:  Eukaryotic aspartyl protease
  misc_feature (6)..(441): NCBI GI NO: 34899068 NR Description: similar to nucleoid DNA-binding-like protein
  misc_feature (29)..(440): NCBI GI NO: 20161865 NR Description: putative nucleoid DNA-binding-like protein
  misc_feature (37)..(439): NCBI GI NO: 21617933 NR Description: nucleoid DNA-binding-like protein
  misc_feature (25)..(439): NCBI GI NO: 15240680 NR Description: nucleoid DNA-binding-related protein
  misc_feature (37)..(439): NCBI GI NO: 15232503 NR Description: nucleoid DNA-binding - like protein
  misc_feature (10)..(438): NCBI GI NO: 18391062 NR Description: expressed protein [Arabidopsis thaliana]
  misc_feature (73)..(438): NCBI GI NO: 21450872 NR Description: unknown protein [Arabidopsis thaliana]
  misc_feature (63)..(438): NCBI GI NO: 15223368 NR Description: chloroplast nucleoid DNA binding protein -related
  misc_feature (63)..(438): NCBI GI NO: 21594980 NR Description: chloroplast nucleoid DNA binding protein, putative
  misc_feature (103)..(438): NCBI GI NO: 15231010 NR Description: expressed protein [Arabidopsis thaliana]
MLCGAALSVLLLLAGGAAASHSRSSCPATPPDAGNTLQVSHAFGPCSPLGPGTAAPSWAGFLADQASRDASRLLYLDSLAVRGRARAYAPIASGRQLLQTLTYVVRASLGTPPQQLLLAVDTSNDASWIPCAGCAGCPTSSAAPFDPAASASYRTVPCGSPLCAQAPNAACPPGGKACGFSLTYADSSLQAALSQDSLAVAGNAVKAYTFGCLQRATGTAAPPQGLLGLGRGPLSFLSQTKDMYEATFSYCLPSFKSLNFSGTLRLGRNGQPQRIKTTPLLANPHRSSLYYVNMTGVRVGRKVVPIPAFDPATGAGTVLDSGTMFTRLVAPAYVAVRDEVRRRVGAPVSSLGGFDTCFNTTAVAWPPMTLLFDGMQVTLPEENVVIHSTYGTISCLAMAAAPDGVNTVLNVIASMQQQNHRVLFDVPNGRVGFARERCTAA

SEQ ID NO: 24615 - DNA, 1433 bp, Zea mays subsp. mays
  misc_feature (1)..(1433): Ceres Seq. ID no. 12350246
gacacacgaaattctcaggtcccggtcccgggtccaggcacccttctcgctcggttgctcgggagctttccccttcctgttcctgaagcttccgacatccgaccgcctcctcctcctcgttctactcgccgccccttctaggatcatccagaggcgtgccggtgaaacgcgagagcggtgaggcatggcgatgcagacgggggtcgcgacctccaaggtcctcatcctcgtcggtgcagggatgacgggctcgatcctgctgcggaatggccgcttatctgatgtgttgggagaactccaggagattatgaagggtgtaaatcaaggaactgcttcgggtccctatgacattgcacttattcaagctcagattcggaatttagcccaagaagtcagagatttgacattgtcaaagcccattaccatactgaatggcaaatctgactcgggaggcagtttatcatcctacatactgccagcagcagcagttggagcaatgggttattgctacatgtgggaaggggttgtctctctcagatgtcatgtttgtcacaaaacacaacatggcaaatgctgttcagagcatgtcaaagcagttggagcaagtttcatcagcactagctgcaacaaaaagacatctaactcaacggcttgagaatttggatggcaaaatggatgaacaagtagaggtctccaaagctattagaaatgaggtcaatgatgttaaagatgacctgtctcaaattggatttgatgtcgaatcaattcagaaaatggttgctggattggagggaaagatcgagttacttgagaacaaacaggacgtggctaatactggtatctggtacctctgccaagtagcaggcggtttaaaagatggaataaacaccaggtttttccaggaaaccagtgagaagctgaagctctcacattcagctcaacctgaaaacaagccagtgaaggggcttgaatttttttcggaaagcgccatggaacagaaagtagctgactccaaaccaattgcggtgacagtcgacgctgagaagcctgagaaaaccgctgctgtaatgggcaccacagtgcacaggtctatcaggttctcatatcggaaggcaggccttgctttgtgatcaaatcctctccgcttgagatgcacgtggccttcctggttgcttttcttttttggcaacaaccttcctggttgctttgtctgatggtcagaaaacatggaagaataacctgcaactggagtgacagaatttcttttccccgcagtagcacaggtgtgcgttatttggtctgatttgaaactatcttcagtccgctatcaatttttttccttggattttgattcattttatgtttcgacttgttgccttgtatactgtaaaggcattggaaagaatacataaaacacgaatgttttttttgtc

SEQ ID NO: 24616 - protein, 232 aa, Zea mays subsp. mays
  peptide (1)..(232): Ceres Seq. ID no. 12350247
  misc_feature (30)..(220): NCBI GI NO: 18390460 NR Description: expressed protein; protein id: At1g04960
  misc_feature (30)..(146): NCBI GI NO: 18396143 NR Description: bZIP family transcription factor
  misc_feature (30)..(146): NCBI GI NO: 21537323 NR Description: unknown [Arabidopsis thaliana]
  misc_feature (30)..(146): NCBI GI NO: 25361065 NR Description: protein T7N9.6 [imported] - Arabidopsis thaliana
  misc_feature (30)..(166): NCBI GI NO: 15227027 NR Description: expressed protein; protein id: At2g02730
  misc_feature (30)..(166): NCBI GI NO: 7487252 NR Description: hypothetical protein At2g02730
  misc_feature (30)..(142): NCBI GI NO: 34906300 NR Description: unnamed protein product
  misc_feature (30)..(130): NCBI GI NO: 15128438 NR Description: contains EST D16001
  misc_feature (30)..(130): NCBI GI NO: 34894218 NR Description: P0439B06.30
MANLTREAVYHPTYCQQQQLEQWVIATCGKGLSLSDVMFVTKHNMANAVQSMSKQLEQVSSALAATKRHLTQRLENLDGKMDEQVEVSKAIRNEVNDVKDDLSQIGFDVESIQKMVAGLEGKIELLENKQDVANTGIWYLCQVAGGLKDGINTRFFQETSEKLKLSHSAQPENKPVKGLEFFSESAMEQKVADSKPIAVTVDAEKPEKTAAVMGTTVHRSIRFSYRKAGLAL

SEQ ID NO: 24617 - protein, 195 aa, Zea mays subsp. mays
  peptide (1)..(195): Ceres Seq. ID no. 12350248
  misc_feature (1)..(183): NCBI GI NO: 18390460 NR Description: expressed protein; protein id: At1g04960
  misc_feature (1)..(109): NCBI GI NO: 18396143 NR Description: bZIP family transcription factor
  misc_feature (1)..(109): NCBI GI NO: 21537323 NR Description: unknown [Arabidopsis thaliana]
  misc_feature (1)..(109): NCBI GI NO: 25361065 NR Description: protein T7N9.6 [imported] - Arabidopsis thaliana
  misc_feature (1)..(129): NCBI GI NO: 15227027 NR Description: expressed protein; protein id: At2g02730
  misc_feature (1)..(129): NCBI GI NO: 7487252 NR Description: hypothetical protein At2g02730
  misc_feature (1)..(105): NCBI GI NO: 34906300 NR Description: unnamed protein product
  misc_feature (1)..(93): NCBI GI NO: 15128438 NR Description: contains EST D16001
  misc_feature (1)..(93): NCBI GI NO: 34894218 NR Description: P0439B06.30
MFVTKHNMANAVQSMSKQLEQVSSALAATKRHLTQRLENLDGKMDEQVEVSKAIRNEVNDVKDDLSQIGFDVESIQKMVAGLEGKIELLENKQDVANTGIWYLCQVAGGLKDGINTRFFQETSEKLKLSHSAQPENKPVKGLEFFSESAMEQKVADSKPIAVTVDAEKPEKTAAVMGTTVHRSIRFSYRKAGLAL

SEQ ID NO: 24618 - protein, 188 aa, Zea mays subsp. mays
  peptide (1)..(188): Ceres Seq. ID no. 12350249
  misc_feature (1)..(176): NCBI GI NO: 18390460 NR Description: expressed protein; protein id: At1g04960
  misc_feature (1)..(102): NCBI GI NO: 18396143 NR Description: bZIP family transcription factor
  misc_feature (1)..(102): NCBI GI NO: 21537323 NR Description: unknown [Arabidopsis thaliana]
  misc_feature (1)..(102): NCBI GI NO: 25361065 NR Description: protein T7N9.6 [imported] - Arabidopsis thaliana
  misc_feature (1)..(122): NCBI GI NO: 15227027 NR Description: expressed protein; protein id: At2g02730
  misc_feature (1)..(122): NCBI GI NO: 7487252 NR Description: hypothetical protein At2g02730
  misc_feature (1)..(98): NCBI GI NO: 34906300 NR Description: unnamed protein product
  misc_feature (1)..(86): NCBI GI NO: 15128438 NR Description: contains EST D16001
  misc_feature (1)..(86): NCBI GI NO: 34894218 NR Description: P0439B06.30
MANAVQSMSKQLEQVSSALAATKRHLTQRLENLDGKMDEQVEVSKAIRNEVNDVKDDLSQIGFDVESIQKMVAGLEGKIELLENKQDVANTGIWYLCQVAGGLKDGINTRFFQETSEKLKLSHSAQPENKPVKGLEFFSESAMEQKVADSKPIAVTVDAEKPEKTAAVMGTTVHRSIRFSYRKAGLAL

SEQ ID NO: 24619 - DNA, 1385 bp, Zea mays subsp. mays; identical to SEQ ID NO: 23142
  misc_feature (1)..(1385): Ceres Seq. ID no. 12349947

SEQ ID NO: 24620 - protein, 364 aa, Zea mays subsp. mays; identical to SEQ ID NO: 23143
  peptide (1)..(364): Ceres Seq. ID no. 12349948
  misc_feature (58)..(364): NCBI GI NO: 15226489 NR Description: mannose 6-phosphate reductase
  misc_feature (58)..(364): NCBI GI NO: 21592829 NR Description: putative NADPH dependent mannose 6-phosphatereductase
  misc_feature (58)..(364): NCBI GI NO: 15226502 NR Description: mannose 6-phosphate reductase
  misc_feature (58)..(364): NCBI GI NO: 10334991 NR Description: NADPH-dependent mannose 6-phosphate reductase
  misc_feature (58)..(364): NCBI GI NO: 21554266 NR Description: putative NADPH dependent mannose 6-phosphatereductase
  misc_feature (57)..(364): NCBI GI NO: 1835701 NR Description: NADPH-dependent mannose 6-phosphate reductase
  misc_feature (56)..(364): NCBI GI NO: 134153 NR Description: NADP-dependent D-sorbitol-6-phosphate dehydrogenase
  misc_feature (50)..(275): NCBI GI NO: 32400786 NR Description: NADPH-dependent mannose 6-phosphate reductase
  misc_feature (100)..(364): NCBI GI NO: 19310926 NR Description: NADP dependent sorbitol 6-phosphate dehydrogenase
  misc_feature (100)..(364): NCBI GI NO: 19310928 NR Description: NADP dependent sorbitol 6-phosphate dehydrogenase

SEQ ID NO: 24621 - protein, 311 aa, Zea mays subsp. mays; identical to SEQ ID NO: 23144
  peptide (1)..(311): Ceres Seq. ID no. 12349949
  misc_feature (5)..(311): NCBI GI NO: 15226489 NR Description: mannose 6-phosphate reductase
  misc_feature (5)..(311): NCBI GI NO: 21592829 NR Description: putative NADPH dependent mannose 6-phosphatereductase
  misc_feature (5)..(311): NCBI GI NO: 15226502 NR Description: mannose 6-phosphate reductase
  misc_feature (5)..(311): NCBI GI NO: 10334991 NR Description: NADPH-dependent mannose 6-phosphate reductase
  misc_feature (5)..(311): NCBI GI NO: 21554266 NR Description: putative NADPH dependent mannose 6-phosphatereductase
  misc_feature (4)..(311): NCBI GI NO: 1835701 NR Description: NADPH-dependent mannose 6-phosphate reductase
  misc_feature (3)..(311): NCBI GI NO: 134153 NR Description: NADP-dependent D-sorbitol-6-phosphate dehydrogenase
  misc_feature (1)..(222): NCBI GI NO: 32400786 NR Description: NADPH-dependent mannose 6-phosphate reductase
  misc_feature (47)..(311): NCBI GI NO: 19310926 NR Description: NADP dependent sorbitol 6-phosphate dehydrogenase
  misc_feature (47)..(311): NCBI GI NO: 19310928 NR Description: NADP dependent sorbitol 6-phosphate dehydrogenase

SEQ ID NO: 24622 - protein, 299 aa, Zea mays subsp. mays; identical to SEQ ID NO: 23145
  peptide (1)..(299): Ceres Seq. ID no. 12349950
  misc_feature (1)..(299): NCBI GI NO: 15226489 NR Description: mannose 6-phosphate reductase
  misc_feature (1)..(299): NCBI GI NO: 21592829 NR Description: putative NADPH dependent mannose 6-phosphatereductase
  misc_feature (1)..(299): NCBI GI NO: 15226502 NR Description: mannose 6-phosphate reductase
  misc_feature (1)..(299): NCBI GI NO: 10334991 NR Description: NADPH-dependent mannose 6-phosphate reductase
  misc_feature (1)..(299): NCBI GI NO: 21554266 NR Description: putative NADPH dependent mannose 6-phosphatereductase
  misc_feature (1)..(299): NCBI GI NO: 1835701 NR Description: NADPH-dependent mannose 6-phosphate reductase
  misc_feature (1)..(299): NCBI GI NO: 134153 NR Description: NADP-dependent D-sorbitol-6-phosphate dehydrogenase
  misc_feature (1)..(210): NCBI GI NO: 32400786 NR Description: NADPH-dependent mannose 6-phosphate reductase
  misc_feature (35)..(299): NCBI GI NO: 19310926 NR Description: NADP dependent sorbitol 6-phosphate dehydrogenase
  misc_feature (35)..(299): NCBI GI NO: 19310928 NR Description: NADP dependent sorbitol 6-phosphate dehydrogenase

SEQ ID NO: 24623 - DNA, 1496 bp, Zea mays subsp. mays
  misc_feature (1)..(1496): Ceres Seq. ID no. 12374344
aacccaaacaccacaatccccttcaacaaacgcaccgcactccacggcagccagaaaacacaatccacagagtctccgtgaggtctgagcgaggtaggactagctctgagcgagttcttccgtcttccaggtataatcctagcaactctcactatcctcttcgcatcgctcgtctctttttgagaccagttggatttctcttatttttccttggatcctactacctaatagaacagagctccggagccttttagtttctggtctctgatctactcattttcttttcttccccttttggtgacataggtaggtctagttaagatctgtcgtgcctgttctttgattttagctaagaaccaggcgatttagtcttcttcttccttacaaaaaaaatccccagaaaaaaaaagttgtgagtagtatattcttgtaccatttgatggccgctgctataaatctccccgggcccagcgaggatctgatgcgagcgatggagtccttcatgcaagacgacgccccatcccctctggccatgccgccggcgccgtctttcccagcggccgcagcccacggggcccagtacccggcgacccacctgagcccggcgcagatgcagttcatccaggcccagctccacctgcagcggaacccggggctgggcccgcgggcgcagcccatgaagcccgccgtcccagtgccgccggcgccggcgccgcagcggcctgtgaagctgtaccgcggcgtgcggcagcgtcactggggcaagtgggtggccgagatccggctcccccggaaccgcacccgcctgtggctcgggaccttcgacaccgccgagcaggcggcgctggcctacgaccaggcggcgtaccgcctccgcggggacgcggcgcggctcaacttccccgacaacgcggagtccagggcgccgctcgaccccgccgtggacgccaagctgcaggccatctgcgccaccatcgccgccgcgtcgtcgtcatccaagaattccaaggccaagagcaaggcgatgccaatcaacgcgtccgttctggaagcggcagcggcgtctccgagcaacagctcctccgacgaaggttccggctccgggttcgggtcggacgacgagatgtcctcgtcctccccgacgccggtggtggcgccgccggtggcggacatgggacagctggatttcagcgaggttccgtgggacgaggacgagagcttcgtgctccgcaagtacccgtcctacgagatcgactgggacgcgctgctctccaactagtcgcccttcgccgacagatgtgctgttgtagttcagtagtggcagtatctctggccgccgcagatgaggttttaggcaatctgcaggccgccggcccatgtgtattaagtaggttttgctcagttgttggccctggacttcgccggcgtttttgtgaccggcgtccccgagtgcactgcattggtgtactggtctgtctgtaaaaaaaatggatctg

SEQ ID NO: 24624 - protein, 279 aa, Zea mays subsp. mays
  peptide (1)..(279): Ceres Seq. ID no. 12374345
  misc_feature (96)..(160): Pfam Name: Pfam Description:  AP2 domain
  misc_feature (58)..(279): NCBI GI NO: 21908036 NR Description: DRE binding factor 1 [Zea mays]
  misc_feature (1)..(279): NCBI GI NO: 37572971 NR Description: AP2-domain DRE binding factor DBF1
  misc_feature (81)..(277): NCBI GI NO: 15219839 NR Description: AP2 domain transcription factor RAP2, putative
  misc_feature (92)..(278): NCBI GI NO: 2281633 NR Description: AP2 domain containing protein RAP2.4
  misc_feature (92)..(278): NCBI GI NO: 6573771 NR Description: F28K19.29 [Arabidopsis thaliana]
  misc_feature (92)..(278): NCBI GI NO: 13877779 NR Description: putative AP2 domain-containing protein
  misc_feature (92)..(278): NCBI GI NO: 15218204 NR Description: AP2 domain protein RAP2
  misc_feature (37)..(278): NCBI GI NO: 18400001 NR Description: AP2 domain transcription factor RAP2, putative
  misc_feature (53)..(276): NCBI GI NO: 27436378 NR Description: dehydration-responsive element binding protein 3
  misc_feature (97)..(278): NCBI GI NO: 12324244 NR Description: putative AP2 domain transcriptional regulator
MAAAINLPGPSEDLMRAMESFMQDDAPSPLAMPPAPSFPAAAAHGAQYPATHLSPAQMQFIQAQLHLQRNPGLGPRAQPMKPAVPVPPAPAPQRPVKLYRGVRQRHWGKWVAEIRLPRNRTRLWLGTFDTAEQAALAYDQAAYRLRGDAARLNFPDNAESRAPLDPAVDAKLQAICATIAAASSSSKNSKAKSKAMPINASVLEAAAASPSNSSSDEGSGSGFGSDDEMSSSSPTPVVAPPVADMGQLDFSEVPWDEDESFVLRKYPSYEIDWDALLSN

SEQ ID NO: 24625 - protein, 265 aa, Zea mays subsp. mays
  peptide (1)..(265): Ceres Seq. ID no. 12374346
  misc_feature (82)..(146): Pfam Name: Pfam Description:  AP2 domain
  misc_feature (44)..(265): NCBI GI NO: 21908036 NR Description: DRE binding factor 1 [Zea mays]
  misc_feature (1)..(265): NCBI GI NO: 37572971 NR Description: AP2-domain DRE binding factor DBF1
  misc_feature (67)..(263): NCBI GI NO: 15219839 NR Description: AP2 domain transcription factor RAP2, putative
  misc_feature (78)..(264): NCBI GI NO: 2281633 NR Description: AP2 domain containing protein RAP2.4
  misc_feature (78)..(264): NCBI GI NO: 6573771 NR Description: F28K19.29 [Arabidopsis thaliana]
  misc_feature (78)..(264): NCBI GI NO: 13877779 NR Description: putative AP2 domain-containing protein
  misc_feature (78)..(264): NCBI GI NO: 15218204 NR Description: AP2 domain protein RAP2
  misc_feature (23)..(264): NCBI GI NO: 18400001 NR Description: AP2 domain transcription factor RAP2, putative
  misc_feature (39)..(262): NCBI GI NO: 27436378 NR Description: dehydration-responsive element binding protein 3
  misc_feature (83)..(264): NCBI GI NO: 12324244 NR Description: putative AP2 domain transcriptional regulator
MRAMESFMQDDAPSPLAMPPAPSFPAAAAHGAQYPATHLSPAQMQFIQAQLHLQRNPGLGPRAQPMKPAVPVPPAPAPQRPVKLYRGVRQRHWGKWVAEIRLPRNRTRLWLGTFDTAEQAALAYDQAAYRLRGDAARLNFPDNAESRAPLDPAVDAKLQAICATIAAASSSSKNSKAKSKAMPINASVLEAAAASPSNSSSDEGSGSGFGSDDEMSSSSPTPVVAPPVADMGQLDFSEVPWDEDESFVLRKYPSYEIDWDALLSN

SEQ ID NO: 24626 - protein, 262 aa, Zea mays subsp. mays
  peptide (1)..(262): Ceres Seq. ID no. 12374347
  misc_feature (79)..(143): Pfam Name: Pfam Description:  AP2 domain
  misc_feature (41)..(262): NCBI GI NO: 21908036 NR Description: DRE binding factor 1 [Zea mays]
  misc_feature (1)..(262): NCBI GI NO: 37572971 NR Description: AP2-domain DRE binding factor DBF1
  misc_feature (64)..(260): NCBI GI NO: 15219839 NR Description: AP2 domain transcription factor RAP2, putative
  misc_feature (75)..(261): NCBI GI NO: 2281633 NR Description: AP2 domain containing protein RAP2.4
  misc_feature (75)..(261): NCBI GI NO: 6573771 NR Description: F28K19.29 [Arabidopsis thaliana]
  misc_feature (75)..(261): NCBI GI NO: 13877779 NR Description: putative AP2 domain-containing protein
  misc_feature (75)..(261): NCBI GI NO: 15218204 NR Description: AP2 domain protein RAP2
  misc_feature (20)..(261): NCBI GI NO: 18400001 NR Description: AP2 domain transcription factor RAP2, putative
  misc_feature (36)..(259): NCBI GI NO: 27436378 NR Description: dehydration-responsive element binding protein 3
  misc_feature (80)..(261): NCBI GI NO: 12324244 NR Description: putative AP2 domain transcriptional regulator
MESFMQDDAPSPLAMPPAPSFPAAAAHGAQYPATHLSPAQMQFIQAQLHLQRNPGLGPRAQPMKPAVPVPPAPAPQRPVKLYRGVRQRHWGKWVAEIRLPRNRTRLWLGTFDTAEQAALAYDQAAYRLRGDAARLNFPDNAESRAPLDPAVDAKLQAICATIAAASSSSKNSKAKSKAMPINASVLEAAAASPSNSSSDEGSGSGFGSDDEMSSSSPTPVVAPPVADMGQLDFSEVPWDEDESFVLRKYPSYEIDWDALLSN

SEQ ID NO: 24627 - DNA, 1642 bp, Zea mays subsp. mays
  misc_feature (1)..(1642): Ceres Seq. ID no. 12423800
  misc_feature (219)..(219): n is a, c, t, g, unknown, or other
  misc_feature (223)..(223): n is a, c, t, g, unknown, or other
atttctgggctggccggaaagcgagcgctcgagagcgaggggaaatcaggtggaggaagcttaaaattagaagtccagcgcaataattgagcaggcggcggcaggcccctcctaatcactgccctaaacacatgtgtgccgggccgaggtcacaatcgatgcacggaggaggatgccgccgtagctgcggagattgataatataaagcgggcggagacncggncccctctggcctcgctgctcctccccccttcctccccccacatgcgctgcccccgcccggccctgccctgccctgccctgctgcgcccaagcagctgaatctccgcacagacaattagagtagctgcattggcggggaaagcgcaagaagctcagcagaaatggcggagcaggcaggcgccggaaggtactggtgccacatgtgcgccgcggtcgtgagccccgcggagggcgaggcggaggtgaagtgcccgcattgccacagcggcttccttgaggagatggagaccgtccgcggcacgcccgcggccgatgacggcgacggtgacggcgcggtggctcaagtgtaccccggcgccgaccgcccgagctccatctgggcgcacgctatcctcagcacggtcgacagctccgtccgccgccgccgcaaccggcggcagacggaggccgccggcgacgtctacgacgggaacgaccccgagttcgccctgcgccggcgtcgcgtcaccgcgttcctgcggctcctgcacgagctccgggaccgccagctgcagcggctggaggctgctgccggggtcgccctcgaaggcgaccagctgacccctttcggccggagcctcttcatcggcgcagctggcggcggcgagcatggcgtggcgctgggcgactacttcctcggccccagcctcgacgcactggtgcagcagctcgccgagaacgacgcgggacggcacgggacgccgccggccaagaaggaggccgtggaggcaatgccgaccgtggaaatcgccggtggcaatggcaacgatgacgacacggccagctgccccgtctgcctggaggactacgcggccggcgagcgcgctcgggagatgccctgcaggcacaggttccactccaattgcatcgttccgtggctcgagatgcacagctcctgccctgtctgccggttgcagctgccggccaccgacgacaagggctcatgcagcagcggcgacggtggttttgtcagtgtcgatgcggatggtgaaggcaatgacaacggcggcggtgatggtagggcaagtattccaggcaatgcggagccagccgaagccgaagagaacggcagccggttgccgccatccttgcagtggctcaacagcctgttctcgccatcggcgcagtcctccggtagcggcagcggcagttcgcatcattgggagaattgagcaataatgcaatataaggatggatgattgttgctgcttgagcccattggtgccaatgtacataggaagagcaggagcatgccggcatgaaaatttggagcctttttttcagtgtgtcaatttggctcatgtaacgttctctctgatatagttgtcatggctataaaaagaacaaaaattggcaagtatatgaacttgcctcttgcgtg

SEQ ID NO: 24628 - protein, 349 aa, Zea mays subsp. mays
  peptide (1)..(349): Ceres Seq. ID no. 12423801
  misc_feature (222)..(262): Pfam Name: RING finger Pfam Description: Zinc finger, C3HC4 type
  misc_feature (1)..(346): NCBI GI NO: 34903272 NR Description: unnamed protein product
  misc_feature (89)..(343): NCBI GI NO: 15241188 NR Description: putative protein; protein id: At5g56340
  misc_feature (3)..(104): NCBI GI NO: 15241188 NR Description: putative protein; protein id: At5g56340
  misc_feature (3)..(344): NCBI GI NO: 18405411 NR Description: expressed protein; protein id: At1g55530
  misc_feature (9)..(344): NCBI GI NO: 37535546 NR Description: putative zinc finger protein
  misc_feature (166)..(317): NCBI GI NO: 15231238 NR Description: unknown protein; protein id: At3g13430.1
  misc_feature (166)..(317): NCBI GI NO: 38454178 NR Description: At3g13430 [Arabidopsis thaliana]
  misc_feature (168)..(320): NCBI GI NO: 11994207 NR Description: gene_id:MPN9.20~unknown protein
  misc_feature (168)..(320): NCBI GI NO: 15231003 NR Description: unknown protein; protein id: At3g19950
  misc_feature (81)..(271): NCBI GI NO: 7486783 NR Description: hypothetical protein M3E9
MAEQAGAGRYWCHMCAAVVSPAEGEAEVKCPHCHSGFLEEMETVRGTPAADDGDGDGAVAQVYPGADRPSSIWAHAILSTVDSSVRRRRNRRQTEAAGDVYDGNDPEFALRRRRVTAFLRLLHELRDRQLQRLEAAAGVALEGDQLTPFGRSLFIGAAGGGEHGVALGDYFLGPSLDALVQQLAENDAGRHGTPPAKKEAVEAMPTVEIAGGNGNDDDTASCPVCLEDYAAGERAREMPCRHRFHSNCIVPWLEMHSSCPVCRLQLPATDDKGSCSSGDGGFVSVDADGEGNDNGGGDGRASIPGNAEPAEAEENGSRLPPSLQWLNSLFSPSAQSSGSGSGSSHHWEN

SEQ ID NO: 24629 - protein, 336 aa, Zea mays subsp. mays
  peptide (1)..(336): Ceres Seq. ID no. 12423802
  misc_feature (209)..(249): Pfam Name: RING finger Pfam Description: Zinc finger, C3HC4 type
  misc_feature (1)..(333): NCBI GI NO: 34903272 NR Description: unnamed protein product
  misc_feature (76)..(330): NCBI GI NO: 15241188 NR Description: putative protein; protein id: At5g56340
  misc_feature (1)..(91): NCBI GI NO: 15241188 NR Description: putative protein; protein id: At5g56340
  misc_feature (1)..(331): NCBI GI NO: 18405411 NR Description: expressed protein; protein id: At1g55530
  misc_feature (1)..(331): NCBI GI NO: 37535546 NR Description: putative zinc finger protein
  misc_feature (153)..(304): NCBI GI NO: 15231238 NR Description: unknown protein; protein id: At3g13430.1
  misc_feature (153)..(304): NCBI GI NO: 38454178 NR Description: At3g13430 [Arabidopsis thaliana]
  misc_feature (155)..(307): NCBI GI NO: 11994207 NR Description: gene_id:MPN9.20~unknown protein
  misc_feature (155)..(307): NCBI GI NO: 15231003 NR Description: unknown protein; protein id: At3g19950
  misc_feature (68)..(258): NCBI GI NO: 7486783 NR Description: hypothetical protein M3E9
MCAAVVSPAEGEAEVKCPHCHSGFLEEMETVRGTPAADDGDGDGAVAQVYPGADRPSSIWAHAILSTVDSSVRRRRNRRQTEAAGDVYDGNDPEFALRRRRVTAFLRLLHELRDRQLQRLEAAAGVALEGDQLTPFGRSLFIGAAGGGEHGVALGDYFLGPSLDALVQQLAENDAGRHGTPPAKKEAVEAMPTVEIAGGNGNDDDTASCPVCLEDYAAGERAREMPCRHRFHSNCIVPWLEMHSSCPVCRLQLPATDDKGSCSSGDGGFVSVDADGEGNDNGGGDGRASIPGNAEPAEAEENGSRLPPSLQWLNSLFSPSAQSSGSGSGSSHHWEN

SEQ ID NO: 24630 - protein, 309 aa, Zea mays subsp. mays
  peptide (1)..(309): Ceres Seq. ID no. 12423803
  misc_feature (182)..(222): Pfam Name: RING finger Pfam Description: Zinc finger, C3HC4 type
  misc_feature (1)..(306): NCBI GI NO: 34903272 NR Description: unnamed protein product
  misc_feature (49)..(303): NCBI GI NO: 15241188 NR Description: putative protein; protein id: At5g56340
  misc_feature (1)..(64): NCBI GI NO: 15241188 NR Description: putative protein; protein id: At5g56340
  misc_feature (1)..(304): NCBI GI NO: 18405411 NR Description: expressed protein; protein id: At1g55530
  misc_feature (1)..(304): NCBI GI NO: 37535546 NR Description: putative zinc finger protein
  misc_feature (126)..(277): NCBI GI NO: 15231238 NR Description: unknown protein; protein id: At3g13430.1
  misc_feature (126)..(277): NCBI GI NO: 38454178 NR Description: At3g13430 [Arabidopsis thaliana]
  misc_feature (128)..(280): NCBI GI NO: 11994207 NR Description: gene_id:MPN9.20~unknown protein
  misc_feature (128)..(280): NCBI GI NO: 15231003 NR Description: unknown protein; protein id: At3g19950
  misc_feature (41)..(231): NCBI GI NO: 7486783 NR Description: hypothetical protein M3E9
METVRGTPAADDGDGDGAVAQVYPGADRPSSIWAHAILSTVDSSVRRRRNRRQTEAAGDVYDGNDPEFALRRRRVTAFLRLLHELRDRQLQRLEAAAGVALEGDQLTPFGRSLFIGAAGGGEHGVALGDYFLGPSLDALVQQLAENDAGRHGTPPAKKEAVEAMPTVEIAGGNGNDDDTASCPVCLEDYAAGERAREMPCRHRFHSNCIVPWLEMHSSCPVCRLQLPATDDKGSCSSGDGGFVSVDADGEGNDNGGGDGRASIPGNAEPAEAEENGSRLPPSLQWLNSLFSPSAQSSGSGSGSSHHWEN

SEQ ID NO: 24631 - DNA, 1507 bp, Zea mays subsp. mays
  misc_feature (1)..(1507): Ceres Seq. ID no. 12410492
cttctagggtttctctctgtttcgtcctcatcgaatcggagtttcgcatggagtcatcgcggtctcggaagcggacgcgccaggcgcatgactgtgccgccgcgccgccaccagagcgagaagtggtagcgaggggtggcgcgtcgccaccatggagggaggatgaccgtgatggacacttcgtattcgaccttggcgagaacttgacccgccgatataaaatcttgagcaaaatgggagaaggtacatttgggcgtgttttggaatgctgggaccgtgaaacacatgaatatgttgccataaaagttgttcgcagtatccgcaagtaccgtgatgctgcaatgattgagatagatgtgctcaatcgccttgcagaaaatgaaaagtacagatctctttgtgttcaaattcagagatggtttgactatcgtaatcatatatgcattgtttttgagaagcttgggccaagcttgtatgattttctaaagagaaatagataccaacctttccctgtggaacttgtgcgggagtttggacggcaactgttggaatctgtagcatatatgcatgagttgcggcttatccacactgatctgaagccagaaaacatactacttgtctcttctgagtatataaaagttccaagtacaaagaagaattcgcaaggtgagatgcatttcaagtgcttgccgaagtccagtgccataaagctgatagattttggcagtaccgcctttgataatcgggaccataactcgattgtttctacgaggcattatagggcacctgaaataatattaggtttaggctggagttttccatgtgatatttggagtgttggctgtattcttgttgagctatgctctggggaagcattgtttcagacacacgagaatctggaacacctagcaatgatggagagggttttgggacctctaccagaggatatgatacggaaagcaagctcttcagctcagaaatattttaggagagcaacacgattaaattggcctgaaggtgctgtttcaagagaaagcatcagagctgtgaggaaactggatcgactaaaggacttggtatcgaggaacgctgaccattcaaaggtggcactggtggacttgctatacggtctcctacggttcgagccatcggaacgcctgacagcagaagaagctctggaccatccattcttcaggaacccaacatgacttgttgagcaggcttgactcatgtgtaactctactgaaggtggtggtgggaagcaggcagagctgtccattgcaaagctgaaagcattttgctcctctataccagagagtttgtgtaaggcctgtcaatggggcttcttgtggtgataaaactgatggctttagtcacccaatgtcatgtacactagcatttttcctagggagcttagttcgccagatggcgcttgtatgttgttaaccgggatacactatgagctgtgccccgatgccctggtgccataatccaatcgcaaatgttg

SEQ ID NO: 24632 - protein, 401 aa, Zea mays subsp. mays
  peptide (1)..(401): Ceres Seq. ID no. 12410493
  misc_feature (72)..(397): Pfam Name: Pfam Description:  Protein kinase domain
  misc_feature (10)..(401): NCBI GI NO: 34912246 NR Description: putative protein kinase AFC3
  misc_feature (9)..(399): NCBI GI NO: 15233872 NR Description: protein kinase AME3; protein id: At4g32660
  misc_feature (16)..(399): NCBI GI NO: 601791 NR Description: protein kinase
  misc_feature (35)..(397): NCBI GI NO: 34908100 NR Description: putative protein kinase AFC1
  misc_feature (48)..(397): NCBI GI NO: 15231839 NR Description: protein kinase (AME2/AFC1); protein id:At3g53570
  misc_feature (48)..(397): NCBI GI NO: 30693861 NR Description: protein kinase (AME2/AFC1) [Arabidopsis thaliana]
  misc_feature (48)..(397): NCBI GI NO: 601787 NR Description: protein kinase
  misc_feature (42)..(397): NCBI GI NO: 15233948 NR Description: protein kinase (AFC2); protein id: At4g24740
  misc_feature (42)..(397): NCBI GI NO: 7489189 NR Description: protein kinase PK12 (EC 2
  misc_feature (42)..(397): NCBI GI NO: 7211773 NR Description: protein kinase MK5 [Mesembryanthemum crystallinum]
SRVSLCFVLIESEFRMESSRSRKRTRQAHDCAAAPPPEREVVARGGASPPWREDDRDGHFVFDLGENLTRRYKILSKMGEGTFGRVLECWDRETHEYVAIKVVRSIRKYRDAAMIEIDVLNRLAENEKYRSLCVQIQRWFDYRNHICIVFEKLGPSLYDFLKRNRYQPFPVELVREFGRQLLESVAYMHELRLIHTDLKPENILLVSSEYIKVPSTKKNSQGEMHFKCLPKSSAIKLIDFGSTAFDNRDHNSIVSTRHYRAPEIILGLGWSFPCDIWSVGCILVELCSGEALFQTHENLEHLAMMERVLGPLPEDMIRKASSSAQKYFRRATRLNWPEGAVSRESIRAVRKLDRLKDLVSRNADHSKVALVDLLYGLLRFEPSERLTAEEALDHPFFRNPT

SEQ ID NO: 24633 - protein, 386 aa, Zea mays subsp. mays
  peptide (1)..(386): Ceres Seq. ID no. 12410494
  misc_feature (57)..(382): Pfam Name: Pfam Description:  Protein kinase domain
  misc_feature (1)..(386): NCBI GI NO: 34912246 NR Description: putative protein kinase AFC3
  misc_feature (1)..(384): NCBI GI NO: 15233872 NR Description: protein kinase AME3; protein id: At4g32660
  misc_feature (1)..(384): NCBI GI NO: 601791 NR Description: protein kinase
  misc_feature (20)..(382): NCBI GI NO: 34908100 NR Description: putative protein kinase AFC1
  misc_feature (33)..(382): NCBI GI NO: 15231839 NR Description: protein kinase (AME2/AFC1); protein id:At3g53570
  misc_feature (33)..(382): NCBI GI NO: 30693861 NR Description: protein kinase (AME2/AFC1) [Arabidopsis thaliana]
  misc_feature (33)..(382): NCBI GI NO: 601787 NR Description: protein kinase
  misc_feature (27)..(382): NCBI GI NO: 15233948 NR Description: protein kinase (AFC2); protein id: At4g24740
  misc_feature (27)..(382): NCBI GI NO: 7489189 NR Description: protein kinase PK12 (EC 2
  misc_feature (27)..(382): NCBI GI NO: 7211773 NR Description: protein kinase MK5 [Mesembryanthemum crystallinum]
MESSRSRKRTRQAHDCAAAPPPEREVVARGGASPPWREDDRDGHFVFDLGENLTRRYKILSKMGEGTFGRVLECWDRETHEYVAIKVVRSIRKYRDAAMIEIDVLNRLAENEKYRSLCVQIQRWFDYRNHICIVFEKLGPSLYDFLKRNRYQPFPVELVREFGRQLLESVAYMHELRLIHTDLKPENILLVSSEYIKVPSTKKNSQGEMHFKCLPKSSAIKLIDFGSTAFDNRDHNSIVSTRHYRAPEIILGLGWSFPCDIWSVGCILVELCSGEALFQTHENLEHLAMMERVLGPLPEDMIRKASSSAQKYFRRATRLNWPEGAVSRESIRAVRKLDRLKDLVSRNADHSKVALVDLLYGLLRFEPSERLTAEEALDHPFFRNPT

SEQ ID NO: 24634 - protein, 324 aa, Zea mays subsp. mays
  peptide (1)..(324): Ceres Seq. ID no. 12410495
  misc_feature (1)..(320): Pfam Name: Pfam Description:  Protein kinase domain
  misc_feature (1)..(324): NCBI GI NO: 34912246 NR Description: putative protein kinase AFC3
  misc_feature (1)..(322): NCBI GI NO: 15233872 NR Description: protein kinase AME3; protein id: At4g32660
  misc_feature (1)..(322): NCBI GI NO: 601791 NR Description: protein kinase
  misc_feature (1)..(320): NCBI GI NO: 34908100 NR Description: putative protein kinase AFC1
  misc_feature (1)..(320): NCBI GI NO: 15231839 NR Description: protein kinase (AME2/AFC1); protein id:At3g53570
  misc_feature (1)..(320): NCBI GI NO: 30693861 NR Description: protein kinase (AME2/AFC1) [Arabidopsis thaliana]
  misc_feature (1)..(320): NCBI GI NO: 601787 NR Description: protein kinase
  misc_feature (1)..(320): NCBI GI NO: 15233948 NR Description: protein kinase (AFC2); protein id: At4g24740
  misc_feature (1)..(320): NCBI GI NO: 7489189 NR Description: protein kinase PK12 (EC 2
  misc_feature (1)..(320): NCBI GI NO: 7211773 NR Description: protein kinase MK5 [Mesembryanthemum crystallinum]
MGEGTFGRVLECWDRETHEYVAIKVVRSIRKYRDAAMIEIDVLNRLAENEKYRSLCVQIQRWFDYRNHICIVFEKLGPSLYDFLKRNRYQPFPVELVREFGRQLLESVAYMHELRLIHTDLKPENILLVSSEYIKVPSTKKNSQGEMHFKCLPKSSAIKLIDFGSTAFDNRDHNSIVSTRHYRAPEIILGLGWSFPCDIWSVGCILVELCSGEALFQTHENLEHLAMMERVLGPLPEDMIRKASSSAQKYFRRATRLNWPEGAVSRESIRAVRKLDRLKDLVSRNADHSKVALVDLLYGLLRFEPSERLTAEEALDHPFFRNPT

SEQ ID NO: 24635 - DNA, 1536 bp, Zea mays subsp. mays
  misc_feature (1)..(1536): Ceres Seq. ID no. 12361389
gcacgagaccattacctagaacatcctaatcgaaaacccctcatcgccttcgtggcctggcctgcccgtcgtgtgcggctctgcgcctctccctccctccctcccttccccgatcgtaaccgccgcctccgatcgatcgccacgatgcggctcttctgacgtaccgccgggcgtcaccgtcaccgaccgagacccgcgcccctcgcctggactccatggccgcgtcctccccgctggtgctgtcgctgctcctcttcgcgtcgctgacggcgctgctggtcctcgcgccgcgcctatccccgccgcagccgccggcggccgccggtggtggtggtggcgaggaggccgacgacctccgcctgttccgccgcgcgactctggagtcgtcggcggcggacggccctcccaaggtggccttcctgttcctgaccaactccgacctcaccttcgcccctctctgggagcgcttcttcgcggggaacgaggcgcggctgcgcgtgtacgtccacgcggacccgtccgcgcgcctgcttcttccacgcgtgcacgcagcagctacatcgaggtgctggagggcgagccgcagatggcgtcgcgctacgcggcgcgcggcggcgaggagggcatgctcccggaggtgccgtacgagcggttccgcatcgggtcgcagttcttcgcgctggcccggcgccacgccgtgctggtggtccgggagcgccggctgtggcgcaagttccgcgcgccctgcgtccccgagatggcgcaggactcgtgctaccccgaggagcactacttcccgacgctgctggacatggcggaccccggcggcgtggcgcggtacacgctcacgcgcgtcaactggacgggtagcgtcgcgggccacccgcacacgtacgccgcgccggaggtctcgccaaggctcatcgcagacctccgcgcctccaaccacacccaccacccccacatgttcgcgcgcaagttcgcgcccgactgcctcggcccgctcctcgccatcgccgacaccgtcatcttcaaggactgatggcgggcggctccatccaggtactacttactactcggcagcagagggctgggcctggggctagtcaaggccgccgacgacggacggcgcggcaccggaatcagtggcgttcttctcccgtttggaccccccctgcagcgtcatgcatgttcatcagctccagtgtttctgtgtagtagattaggagtgtagagaagaggaggacgacgacgacgacagcacgcggcgacctaatgcgaagcggcaggttgtggttgcgtgcgtgtacgcgtcctcgatcgtcgtccatccgtgaaaaaaaaagaagaaaaaatatcgcgcgcgtgtgtggcttttgcctagcgtagccagccaaataaggttctactgcaagtaataaatcctagtgttgtacagcataggtagccgccactcctgctctgtgggtttcgtgtctcgatgtttttgtgctttgcagtgtactacgtacatactaatacgtgcttccaacttcc

SEQ ID NO: 24636 - protein, 296 aa, Zea mays subsp. mays
  peptide (1)..(296): Ceres Seq. ID no. 12361390
  misc_feature (7)..(134): NCBI GI NO: 30688302 NR Description: expressed protein [Arabidopsis thaliana]
  misc_feature (3)..(136): NCBI GI NO: 34394888 NR Description: unknown protein
  misc_feature (64)..(99): NCBI GI NO: 26452247 NR Description: unknown protein [Arabidopsis thaliana]
  misc_feature (26)..(105): NCBI GI NO: 38344090 NR Description: OSJNBb0056F09.13
  misc_feature (40)..(108): NCBI GI NO: 21554566 NR Description: unknown [Arabidopsis thaliana]
  misc_feature (40)..(108): NCBI GI NO: 18402952 NR Description: expressed protein; protein id: At3g21310
  misc_feature (46)..(101): NCBI GI NO: 34907318 NR Description: contains ESTsAU096118
  misc_feature (45)..(101): NCBI GI NO: 15218485 NR Description: unknown protein; protein id: At1g10280.1
  misc_feature (64)..(99): NCBI GI NO: 38637182 NR Description: unknown protein
  misc_feature (65)..(136): NCBI GI NO: 17065016 NR Description: Unknown protein [Arabidopsis thaliana]
MAASSPLVLSLLLFASLTALLVLAPRLSPPQPPAAAGGGGGEEADDLRLFRRATLESSAADGPPKVAFLFLTNSDLTFAPLWERFFAGNEARLRVYVHADPSARLLLPRVHAAATSRCWRASRRWRRATRRAAARRACSRRCRTSGSASGRSSSRWPGATPCWWSGSAGCGASSARPASPRWRRTRATPRSTTSRRCWTWRTPAAWRGTRSRASTGRVASRATRTRTPRRRSRQGSSQTSAPPTTPTTPTCSRASSRPTASARSSPSPTPSSSRTDGGRLHPGTTYYSAAEGWAWG

SEQ ID NO: 24637 - protein, 151 aa, Zea mays subsp. mays
  peptide (1)..(151): Ceres Seq. ID no. 12361391
  misc_feature (1)..(151): NCBI GI NO: 30688302 NR Description: expressed protein [Arabidopsis thaliana]
  misc_feature (1)..(151): NCBI GI NO: 34394888 NR Description: unknown protein
  misc_feature (1)..(151): NCBI GI NO: 15231121 NR Description: putative protein; protein id: At3g52060
  misc_feature (1)..(151): NCBI GI NO: 15236739 NR Description: putative protein; protein id: At4g32290.1
  misc_feature (1)..(151): NCBI GI NO: 15239393 NR Description: putative protein; protein id: At5g25330.1
  misc_feature (1)..(124): NCBI GI NO: 26452247 NR Description: unknown protein [Arabidopsis thaliana]
  misc_feature (1)..(148): NCBI GI NO: 38344090 NR Description: OSJNBb0056F09.13
  misc_feature (1)..(148): NCBI GI NO: 21554566 NR Description: unknown [Arabidopsis thaliana]
  misc_feature (1)..(148): NCBI GI NO: 18402952 NR Description: expressed protein; protein id: At3g21310
  misc_feature (1)..(148): NCBI GI NO: 34907318 NR Description: contains ESTsAU096118
MASRYAARGGEEGMLPEVPYERFRIGSQFFALARRHAVLVVRERRLWRKFRAPCVPEMAQDSCYPEEHYFPTLLDMADPGGVARYTLTRVNWTGSVAGHPHTYAAPEVSPRLIADLRASNHTHHPHMFARKFAPDCLGPLLAIADTVIFKD

SEQ ID NO: 24638 - DNA, 1736 bp, Zea mays subsp. mays
  misc_feature (1)..(1736): Ceres Seq. ID no. 12374455
gcatcggcggacatggtggtggccgtgcagctggccgctcttctcgcgctgctgctcgcgctgtggcgcctggtgtggcggccgcacgccgtggcgcggtcgttcgccaggcagggcatccggggcccgccctacacgttcctggcagggtccttgccggaggcgaagcggctgctgatggctggccggagagggacggcgcccctggacgccggctgccacgacatcatgcccgtactcctgccgcagtttctcagatgggtcgcggactatgggagaacgttgctgttctggatcgggccgattcccgctgtcttgtctactgatctacagctgattaagcaggttctgacagacaggacgggcctgtatcagaaggacttcatgatccccgtgctcaagttcctcttcggcaacggtgtcatattgataaacggagacgattggaagcggcaccgcaaagtggtcctccctgcgttcaaccatgagacgatcaagagcatgtcggcggtgacggcagaggtaacggagcagatgatgcagcaatggcgcggccagatacacggaagcgaagaggaatccgccgagatagacatgatccacgccttcaacgacctgacctccaaggtcaacggccgcgtcgccttcggcaccagccaccgggaagtcgaggaggtcatcgtactgatgcgggagatgcagaagctcgccactgcggccacgctcgatgctccaatactctggtatctgccaactcggcgtaacctgcacgtccggcgtctgaacaaacagctgagaagcaagatcatgtccatcatgcaggcgcggctggccgccgacggagctgataggcgtggtgggcgcggcggcgccgtttccggcggaggcgacctacttgggctgttgctagaggcgtggacgccgcagccgcagcagcacgggaacggcggcgagacgctgacaaccgacgaggtgatcgacgagtgcaagaccttcttcgccgcggggcaggaaaccacagctaccctcctggtctgggccatgttcctgctcgccgtgcacccggaatggcaggacaaagtcagggaggaggtcgtcagggaattctgcaccggcgacgacggcgaggttccccatgccgatgtcctcgccaagctcaagctgctatacatggtgttgctggagacgtcgcgcctctacccgccgatcgtgtacatacagcggagggctgcctgggacgccgtccttggaggcatcaaggtgccccagggcaccgtcatctccatccccattgccatgctgcaccgggacaagcaggtctggggccccgacgccgatgagttcaacccgatgaggttcgagcatggcctcacaaaggccgccaaggatcccaaggcgctgctgtctttctccctgggcccaagagtgtgcactggccagagcttcggcatcgtagaagtgcaggtcgtcatggcgatgatcctcaggaggttctccttctccctctccccaaagtatgttcacaagcccaagtatctcctgtccttgacacccaagcttgggatgcctctcatcgtcaggaatgtggatggctgagagagataatattgtaagagctcgttttgtgtgtgaaaatgaatacatgactagtgtgtgataaatggtactctctttgttttaaagtataaattgtttcaatttttctatgtatattgctttaacgactatacatttag

SEQ ID NO: 24639 - protein, 531 aa, Zea mays subsp. mays
  peptide (1)..(531): Ceres Seq. ID no. 12374456
  misc_feature (6)..(531): NCBI GI NO: 34895168 NR Description: putative cytochrome P450
  misc_feature (11)..(529): NCBI GI NO: 34913362 NR Description: putative cytochrome P450
  misc_feature (69)..(529): NCBI GI NO: 34913354 NR Description: putative cytochrome P450
  misc_feature (69)..(529): NCBI GI NO: 22324446 NR Description: putative cytochrome P450
  misc_feature (6)..(527): NCBI GI NO: 14719280 NR Description: cytochrome P450 [Zea mays]
  misc_feature (5)..(530): NCBI GI NO: 34896952 NR Description: putative cytochrome P450-related protein
  misc_feature (69)..(529): NCBI GI NO: 34913346 NR Description: putative cytochrome P450
  misc_feature (69)..(529): NCBI GI NO: 34913350 NR Description: putative cytochrome P450
  misc_feature (5)..(530): NCBI GI NO: 18407219 NR Description: cytochrome P450, putative; protein id: At2g46960
  misc_feature (88)..(527): NCBI GI NO: 34896248 NR Description: OSJNBb0008D07.14
ASADMVVAVQLAALLALLLALWRLVWRPHAVARSFARQGIRGPPYTFLAGSLPEAKRLLMAGRRGTAPLDAGCHDIMPVLLPQFLRWVADYGRTLLFWIGPIPAVLSTDLQLIKQVLTDRTGLYQKDFMIPVLKFLFGNGVILINGDDWKRHRKVVLPAFNHETIKSMSAVTAEVTEQMMQQWRGQIHGSEEESAEIDMIHAFNDLTSKVNGRVAFGTSHREVEEVIVLMREMQKLATAATLDAPILWYLPTRRNLHVRRLNKQLRSKIMSIMQARLAADGADRRGGRGGAVSGGGDLLGLLLEAWTPQPQQHGNGGETLTTDEVIDECKTFFAAGQETTATLLVWAMFLLAVHPEWQDKVREEVVREFCTGDDGEVPHADVLAKLKLLYMVLLETSRLYPPIVYIQRRAAWDAVLGGIKVPQGTVISIPIAMLHRDKQVWGPDADEFNPMRFEHGLTKAAKDPKALLSFSLGPRVCTGQSFGIVEVQVVMAMILRRFSFSLSPKYVHKPKYLLSLTPKLGMPLIVRNVDG

SEQ ID NO: 24640 - protein, 527 aa, Zea mays subsp. mays
  peptide (1)..(527): Ceres Seq. ID no. 12374457
  misc_feature (2)..(527): NCBI GI NO: 34895168 NR Description: putative cytochrome P450
  misc_feature (7)..(525): NCBI GI NO: 34913362 NR Description: putative cytochrome P450
  misc_feature (65)..(525): NCBI GI NO: 34913354 NR Description: putative cytochrome P450
  misc_feature (65)..(525): NCBI GI NO: 22324446 NR Description: putative cytochrome P450
  misc_feature (2)..(523): NCBI GI NO: 14719280 NR Description: cytochrome P450 [Zea mays]
  misc_feature (1)..(526): NCBI GI NO: 34896952 NR Description: putative cytochrome P450-related protein
  misc_feature (65)..(525): NCBI GI NO: 34913346 NR Description: putative cytochrome P450
  misc_feature (65)..(525): NCBI GI NO: 34913350 NR Description: putative cytochrome P450
  misc_feature (1)..(526): NCBI GI NO: 18407219 NR Description: cytochrome P450, putative; protein id: At2g46960
  misc_feature (84)..(523): NCBI GI NO: 34896248 NR Description: OSJNBb0008D07.14
MVVAVQLAALLALLLALWRLVWRPHAVARSFARQGIRGPPYTFLAGSLPEAKRLLMAGRRGTAPLDAGCHDIMPVLLPQFLRWVADYGRTLLFWIGPIPAVLSTDLQLIKQVLTDRTGLYQKDFMIPVLKFLFGNGVILINGDDWKRHRKVVLPAFNHETIKSMSAVTAEVTEQMMQQWRGQIHGSEEESAEIDMIHAFNDLTSKVNGRVAFGTSHREVEEVIVLMREMQKLATAATLDAPILWYLPTRRNLHVRRLNKQLRSKIMSIMQARLAADGADRRGGRGGAVSGGGDLLGLLLEAWTPQPQQHGNGGETLTTDEVIDECKTFFAAGQETTATLLVWAMFLLAVHPEWQDKVREEVVREFCTGDDGEVPHADVLAKLKLLYMVLLETSRLYPPIVYIQRRAAWDAVLGGIKVPQGTVISIPIAMLHRDKQVWGPDADEFNPMRFEHGLTKAAKDPKALLSFSLGPRVCTGQSFGIVEVQVVMAMILRRFSFSLSPKYVHKPKYLLSLTPKLGMPLIVRNVDG

SEQ ID NO: 24641 - protein, 472 aa, Zea mays subsp. mays
  peptide (1)..(472): Ceres Seq. ID no. 12374458
  misc_feature (1)..(472): NCBI GI NO: 34895168 NR Description: putative cytochrome P450
  misc_feature (1)..(470): NCBI GI NO: 34913362 NR Description: putative cytochrome P450
  misc_feature (10)..(470): NCBI GI NO: 34913354 NR Description: putative cytochrome P450
  misc_feature (10)..(470): NCBI GI NO: 22324446 NR Description: putative cytochrome P450
  misc_feature (1)..(468): NCBI GI NO: 14719280 NR Description: cytochrome P450 [Zea mays]
  misc_feature (1)..(471): NCBI GI NO: 34896952 NR Description: putative cytochrome P450-related protein
  misc_feature (10)..(470): NCBI GI NO: 34913346 NR Description: putative cytochrome P450
  misc_feature (10)..(470): NCBI GI NO: 34913350 NR Description: putative cytochrome P450
  misc_feature (1)..(471): NCBI GI NO: 18407219 NR Description: cytochrome P450, putative; protein id: At2g46960
  misc_feature (29)..(468): NCBI GI NO: 34896248 NR Description: OSJNBb0008D07.14
MAGRRGTAPLDAGCHDIMPVLLPQFLRWVADYGRTLLFWIGPIPAVLSTDLQLIKQVLTDRTGLYQKDFMIPVLKFLFGNGVILINGDDWKRHRKVVLPAFNHETIKSMSAVTAEVTEQMMQQWRGQIHGSEEESAEIDMIHAFNDLTSKVNGRVAFGTSHREVEEVIVLMREMQKLATAATLDAPILWYLPTRRNLHVRRLNKQLRSKIMSIMQARLAADGADRRGGRGGAVSGGGDLLGLLLEAWTPQPQQHGNGGETLTTDEVIDECKTFFAAGQETTATLLVWAMFLLAVHPEWQDKVREEVVREFCTGDDGEVPHADVLAKLKLLYMVLLETSRLYPPIVYIQRRAAWDAVLGGIKVPQGTVISIPIAMLHRDKQVWGPDADEFNPMRFEHGLTKAAKDPKALLSFSLGPRVCTGQSFGIVEVQVVMAMILRRFSFSLSPKYVHKPKYLLSLTPKLGMPLIVRNVDG

SEQ ID NO: 24642 - DNA, 1785 bp, Zea mays subsp. mays
  misc_feature (1)..(1785): Ceres Seq. ID no. 12408251
atatttaattatttattgctgcgaacatatgggatgccagagtcgcagcaaaccacggttcggcggcgtccaattccccttcctcgccgatgccgatgccgatgccgatgccgatgccgatgccacgggcgcggacgcggtggtcggcgctagccgccagcgcgctcatccaatgctgcgcggggagctcctactgcttcggcgtctactctcagacgctcaaggcctcgcagcgctacgaccagtccgcgctcgacgccgtcgccttcttcaaggacgtcggcgccaacgccggggtcctctcgggcttcctcgtcgcttgggcgccggggggccgcaggcgcccctggattgtcctcctcgccggctccctgctctgcgccgcgggctacctccccatgtggctagccgtcgcgggggtcgcgcccgcgccgctcccgctcgtctgcctctacatgctgctcgccgcgcaggcgcagaccttcttcaacaccgccgatgttgtctccgccgtcgagaacttccccgaccgacgaggcactgtcatcggcatcatgaagggttttctaggcctaagtggggcaatacttgtcgaaatttaccgcactcttggcattgatcccagctctttcatactgatgctggcagttttacccacgtccgtcaccttggtgctcatgtattttgtggatgtccacaatccacatgaacggtatgagaagaaattcctagacgctttctccctcattgctgttactgttgctggatacttgatgattctcataatctatggtcaagttttcccaataagctcagctgtgcagagcgtttgtttcgtggtactcctgctactagtgatgtctccaatagctgtggctgcaaaggcccagacgccagaatcaatagctcatcaaggatcaatctcagaacaaagggctggactgctccgcaaagaggtcacagaggattctgaaaatgctagctcaagcactactgcgcttgggggatctaaccaagacctgtcttcaggcaaagaaaacctgaacgtattacaggccatgtgcaagctcaacttctggttgctcttcctggcaatggcttgtggaatgggatcaggtctggccacggtgaacaatatcagccagatcggcggctcccttggctacacgaccaaggagaccagcacactcgtgtctctatggagcatatggaacttttcagggcggtttggtgcaggcttcatatccgaccatttccttcgcctgcgaggagttggcaggccattctttataagcatcacgctgctggtcatgagcgtcggccatgccatcatctcctccggtctccctgcgtcgctctacattgggtcggtgctcatcggcatgtgctatgggtgtcagtgggccctgatgccgagcataacatctgagatctttgggctgagccatttcggcaccatattcaacatggtggctgttgcaagccctgttgggtcctacatcctctcggtgcgcatcgtgggctacatatacgatattgaatcgccaccggacgagcactcttgtgtaggtaagcaatgctttgcactctctttcatgatcatggccggtgtctgtatgtttgggtccgctgtggcatttgtgttgtttatcagaacaaggacgttctataggcgtgtcgtatatgcaaggttgcaatcttttctagacaagtaacaagtctttatgtaagatggctatataacttggaataatgtttgtacatgtatattatgtcagtgtttcc

SEQ ID NO: 24643 - protein, 541 aa, Zea mays subsp. mays
  peptide (1)..(541): Ceres Seq. ID no. 12408252
  misc_feature (322)..(479): Pfam Name: and other Pfam Description: Sugar
  misc_feature (15)..(535): NCBI GI NO: 15221382 NR Description: hypothetical protein; protein id: At1g74780.1
  misc_feature (15)..(535): NCBI GI NO: 29824365 NR Description: unknown protein [Arabidopsis thaliana]
  misc_feature (11)..(535): NCBI GI NO: 30686019 NR Description: nodulin-related protein [Arabidopsis thaliana]
  misc_feature (15)..(530): NCBI GI NO: 15221898 NR Description: hypothetical protein; protein id: At1g18940.1
  misc_feature (11)..(535): NCBI GI NO: 7485467 NR Description: nodulin-like protein
  misc_feature (11)..(534): NCBI GI NO: 30686022 NR Description: 68409.m03800 nodulin-related protein
  misc_feature (11)..(540): NCBI GI NO: 7485467 NR Description: nodulin-like protein
  misc_feature (1)..(536): NCBI GI NO: 34394606 NR Description: putative nodule-specific protein
  misc_feature (17)..(267): NCBI GI NO: 34897160 NR Description: putative nodule-specific protein
  misc_feature (316)..(536): NCBI GI NO: 34897160 NR Description: putative nodule-specific protein
MPMPMPMPMPMPRARTRWSALAASALIQCCAGSSYCFGVYSQTLKASQRYDQSALDAVAFFKDVGANAGVLSGFLVAWAPGGRRRPWIVLLAGSLLCAAGYLPMWLAVAGVAPAPLPLVCLYMLLAAQAQTFFNTADVVSAVENFPDRRGTVIGIMKGFLGLSGAILVEIYRTLGIDPSSFILMLAVLPTSVTLVLMYFVDVHNPHERYEKKFLDAFSLIAVTVAGYLMILIIYGQVFPISSAVQSVCFVVLLLLVMSPIAVAAKAQTPESIAHQGSISEQRAGLLRKEVTEDSENASSSTTALGGSNQDLSSGKENLNVLQAMCKLNFWLLFLAMACGMGSGLATVNNISQIGGSLGYTTKETSTLVSLWSIWNFSGRFGAGFISDHFLRLRGVGRPFFISITLLVMSVGHAIISSGLPASLYIGSVLIGMCYGCQWALMPSITSEIFGLSHFGTIFNMVAVASPVGSYILSVRIVGYIYDIESPPDEHSCVGKQCFALSFMIMAGVCMFGSAVAFVLFIRTRTFYRRVVYARLQSFLDK

SEQ ID NO: 24644 - protein, 539 aa, Zea mays subsp. mays
  peptide (1)..(539): Ceres Seq. ID no. 12408253
  misc_feature (320)..(477): Pfam Name: and other Pfam Description: Sugar
  misc_feature (13)..(533): NCBI GI NO: 15221382 NR Description: hypothetical protein; protein id: At1g74780.1
  misc_feature (13)..(533): NCBI GI NO: 29824365 NR Description: unknown protein [Arabidopsis thaliana]
  misc_feature (9)..(533): NCBI GI NO: 30686019 NR Description: nodulin-related protein [Arabidopsis thaliana]
  misc_feature (13)..(528): NCBI GI NO: 15221898 NR Description: hypothetical protein; protein id: At1g18940.1
  misc_feature (9)..(533): NCBI GI NO: 7485467 NR Description: nodulin-like protein
  misc_feature (9)..(532): NCBI GI NO: 30686022 NR Description: 68409.m03800 nodulin-related protein
  misc_feature (9)..(538): NCBI GI NO: 7485467 NR Description: nodulin-like protein
  misc_feature (1)..(534): NCBI GI NO: 34394606 NR Description: putative nodule-specific protein
  misc_feature (15)..(265): NCBI GI NO: 34897160 NR Description: putative nodule-specific protein
  misc_feature (314)..(534): NCBI GI NO: 34897160 NR Description: putative nodule-specific protein
MPMPMPMPMPRARTRWSALAASALIQCCAGSSYCFGVYSQTLKASQRYDQSALDAVAFFKDVGANAGVLSGFLVAWAPGGRRRPWIVLLAGSLLCAAGYLPMWLAVAGVAPAPLPLVCLYMLLAAQAQTFFNTADVVSAVENFPDRRGTVIGIMKGFLGLSGAILVEIYRTLGIDPSSFILMLAVLPTSVTLVLMYFVDVHNPHERYEKKFLDAFSLIAVTVAGYLMILIIYGQVFPISSAVQSVCFVVLLLLVMSPIAVAAKAQTPESIAHQGSISEQRAGLLRKEVTEDSENASSSTTALGGSNQDLSSGKENLNVLQAMCKLNFWLLFLAMACGMGSGLATVNNISQIGGSLGYTTKETSTLVSLWSIWNFSGRFGAGFISDHFLRLRGVGRPFFISITLLVMSVGHAIISSGLPASLYIGSVLIGMCYGCQWALMPSITSEIFGLSHFGTIFNMVAVASPVGSYILSVRIVGYIYDIESPPDEHSCVGKQCFALSFMIMAGVCMFGSAVAFVLFIRTRTFYRRVVYARLQSFLDK

SEQ ID NO: 24645 - protein, 537 aa, Zea mays subsp. mays
  peptide (1)..(537): Ceres Seq. ID no. 12408254
  misc_feature (318)..(475): Pfam Name: and other Pfam Description: Sugar
  misc_feature (11)..(531): NCBI GI NO: 15221382 NR Description: hypothetical protein; protein id: At1g74780.1
  misc_feature (11)..(531): NCBI GI NO: 29824365 NR Description: unknown protein [Arabidopsis thaliana]
  misc_feature (7)..(531): NCBI GI NO: 30686019 NR Description: nodulin-related protein [Arabidopsis thaliana]
  misc_feature (11)..(526): NCBI GI NO: 15221898 NR Description: hypothetical protein; protein id: At1g18940.1
  misc_feature (7)..(531): NCBI GI NO: 7485467 NR Description: nodulin-like protein
  misc_feature (7)..(530): NCBI GI NO: 30686022 NR Description: 68409.m03800 nodulin-related protein
  misc_feature (7)..(536): NCBI GI NO: 7485467 NR Description: nodulin-like protein
  misc_feature (1)..(532): NCBI GI NO: 34394606 NR Description: putative nodule-specific protein
  misc_feature (13)..(263): NCBI GI NO: 34897160 NR Description: putative nodule-specific protein
  misc_feature (312)..(532): NCBI GI NO: 34897160 NR Description: putative nodule-specific protein
MPMPMPMPRARTRWSALAASALIQCCAGSSYCFGVYSQTLKASQRYDQSALDAVAFFKDVGANAGVLSGFLVAWAPGGRRRPWIVLLAGSLLCAAGYLPMWLAVAGVAPAPLPLVCLYMLLAAQAQTFFNTADVVSAVENFPDRRGTVIGIMKGFLGLSGAILVEIYRTLGIDPSSFILMLAVLPTSVTLVLMYFVDVHNPHERYEKKFLDAFSLIAVTVAGYLMILIIYGQVFPISSAVQSVCFVVLLLLVMSPIAVAAKAQTPESIAHQGSISEQRAGLLRKEVTEDSENASSSTTALGGSNQDLSSGKENLNVLQAMCKLNFWLLFLAMACGMGSGLATVNNISQIGGSLGYTTKETSTLVSLWSIWNFSGRFGAGFISDHFLRLRGVGRPFFISITLLVMSVGHAIISSGLPASLYIGSVLIGMCYGCQWALMPSITSEIFGLSHFGTIFNMVAVASPVGSYILSVRIVGYIYDIESPPDEHSCVGKQCFALSFMIMAGVCMFGSAVAFVLFIRTRTFYRRVVYARLQSFLDK

SEQ ID NO: 24646 - DNA, 1513 bp, Zea mays subsp. mays
  misc_feature (1)..(1513): Ceres Seq. ID no. 12408247
gtccgaacactgggccggccggttgtccgccgcatccccttgcgttgcgttcacggttctcctctctgtctctcgcgcaagggatctcgttctccgcggcagctggtgtttcgctcccttctcgccctccgacggctggttggcagccggcgccggcgccgccaaacgctaggtgctgaggccttcgccagtgtcttcgacggcgacgagcacgtaccagcatcatgtcggaaagaggtcgcctggcaggacgattgattgataaccgcagcagagggtaccatgtagtccctctagttgaggatcccagaggccatcctgaagtcctcgtggatggggatcggaggggctactctgacattcgtggggttcagcaacgtcggggctaccctgacacccatctgcttgaggaacctaggggctaccctggtgttcgtgtggtcgaccataggggctatcctggcagtcgtggggttgatgaacgcagggcctatcctgagctccatcaaggctcacgcatgagggcggctcctcccccttacccagctgccttcgaggatgagctcgagttacaggaagttgaactccggaggctttcggcacataaccgcgctctagttgaggagcgtgaactgttaagcagggaaatacaagctggaaaagatgaggtccgccacttgaatgtgatcattgctgacattaacactgagaaagaagcttatatcagtaagcttatggacaagaggaggaagcttgaagctgaacttggagcaagtgagcacttgcgtgatgaggtcaggcatcttcgtggtgaaattgacaagctcgttaccgctcggaaagaactatctgcagaggctgcatctctcgtggaagagctgaacagggagcaatctgttaaacagcagctacctgtgctgaaaacagaaattgacggtctgcaacaggaacttgttcacgtgaggactgcttgcgggttagagcagaaggggaatttggaattgctggaacaaaggaaggcaatggagaagaatatgctttctatggcacaagagatcgagcagatgcgaggcgaattagctaattttgaagttagaccaaggggcccaggtggagcatatgggatgcagattgggagttcggaagtgaccttcactaagaacccatatgaagatggttataatgcttatgtgggggttcctgagaaagatcctttgcatcctcctgaatatgcttcatgggggacatatgacaggagtcgccttcagtaccgctaagaccagaacttagtcattggagaaagaattgccttctaggttttaatggacatgtcttgtcgtttacagtaccgaagctttatgcctgctgcttggttttccattaagagttgtcctttttaatgcttctaatcgtaactttttccattacaaactggctagattattaaactattggtaccaagatgtccagcaatgtgcggaaagcaccttacatacatgtgattttgcgtgtc

SEQ ID NO: 24647 - protein, 350 aa, Zea mays subsp. mays
  peptide (1)..(350): Ceres Seq. ID no. 12408248
  misc_feature (103)..(347): NCBI GI NO: 18405242 NR Description: expressed protein; protein id: At1g55170
  misc_feature (103)..(310): NCBI GI NO: 25405799 NR Description: myosin-like protein, 97843-94399
  misc_feature (84)..(348): NCBI GI NO: 18400511 NR Description: expressed protein; protein id: At3g14750
  misc_feature (85)..(319): NCBI GI NO: 38175471 NR Description: myosin-like protein
  misc_feature (84)..(319): NCBI GI NO: 9294396 NR Description: gb|AAD10662
  misc_feature (53)..(319): NCBI GI NO: 30697468 NR Description: expressed protein [Arabidopsis thaliana]
  misc_feature (104)..(319): NCBI GI NO: 25404669 NR Description: hypothetical protein F5A8.8
  misc_feature (84)..(346): NCBI GI NO: 33146484 NR Description: myosin-like protein
  misc_feature (102)..(291): NCBI GI NO: 28876008 NR Description: hypothetical protein
  misc_feature (111)..(309): NCBI GI NO: 38605778 NR Description: OSJNBa0044K18.21
MSERGRLAGRLIDNRSRGYHVVPLVEDPRGHPEVLVDGDRRGYSDIRGVQQRRGYPDTHLLEEPRGYPGVRVVDHRGYPGSRGVDERRAYPELHQGSRMRAAPPPYPAAFEDELELQEVELRRLSAHNRALVEERELLSREIQAGKDEVRHLNVIIADINTEKEAYISKLMDKRRKLEAELGASEHLRDEVRHLRGEIDKLVTARKELSAEAASLVEELNREQSVKQQLPVLKTEIDGLQQELVHVRTACGLEQKGNLELLEQRKAMEKNMLSMAQEIEQMRGELANFEVRPRGPGGAYGMQIGSSEVTFTKNPYEDGYNAYVGVPEKDPLHPPEYASWGTYDRSRLQYR

SEQ ID NO: 24648 - protein, 252 aa, Zea mays subsp. mays
  peptide (1)..(252): Ceres Seq. ID no. 12408249
  misc_feature (5)..(249): NCBI GI NO: 18405242 NR Description: expressed protein; protein id: At1g55170
  misc_feature (5)..(212): NCBI GI NO: 25405799 NR Description: myosin-like protein, 97843-94399
  misc_feature (1)..(250): NCBI GI NO: 18400511 NR Description: expressed protein; protein id: At3g14750
  misc_feature (1)..(221): NCBI GI NO: 38175471 NR Description: myosin-like protein
  misc_feature (1)..(221): NCBI GI NO: 9294396 NR Description: gb|AAD10662
  misc_feature (1)..(221): NCBI GI NO: 30697468 NR Description: expressed protein [Arabidopsis thaliana]
  misc_feature (6)..(221): NCBI GI NO: 25404669 NR Description: hypothetical protein F5A8.8
  misc_feature (1)..(248): NCBI GI NO: 33146484 NR Description: myosin-like protein
  misc_feature (4)..(193): NCBI GI NO: 28876008 NR Description: hypothetical protein
  misc_feature (13)..(211): NCBI GI NO: 38605778 NR Description: OSJNBa0044K18.21
MRAAPPPYPAAFEDELELQEVELRRLSAHNRALVEERELLSREIQAGKDEVRHLNVIIADINTEKEAYISKLMDKRRKLEAELGASEHLRDEVRHLRGEIDKLVTARKELSAEAASLVEELNREQSVKQQLPVLKTEIDGLQQELVHVRTACGLEQKGNLELLEQRKAMEKNMLSMAQEIEQMRGELANFEVRPRGPGGAYGMQIGSSEVTFTKNPYEDGYNAYVGVPEKDPLHPPEYASWGTYDRSRLQYR

SEQ ID NO: 24649 - protein, 180 aa, Zea mays subsp. mays
  peptide (1)..(180): Ceres Seq. ID no. 12408250
  misc_feature (1)..(177): NCBI GI NO: 18405242 NR Description: expressed protein; protein id: At1g55170
  misc_feature (1)..(140): NCBI GI NO: 25405799 NR Description: myosin-like protein, 97843-94399
  misc_feature (1)..(178): NCBI GI NO: 18400511 NR Description: expressed protein; protein id: At3g14750
  misc_feature (1)..(149): NCBI GI NO: 38175471 NR Description: myosin-like protein
  misc_feature (1)..(149): NCBI GI NO: 9294396 NR Description: gb|AAD10662
  misc_feature (1)..(149): NCBI GI NO: 30697468 NR Description: expressed protein [Arabidopsis thaliana]
  misc_feature (1)..(149): NCBI GI NO: 25404669 NR Description: hypothetical protein F5A8.8
  misc_feature (1)..(176): NCBI GI NO: 33146484 NR Description: myosin-like protein
  misc_feature (1)..(121): NCBI GI NO: 28876008 NR Description: hypothetical protein
  misc_feature (1)..(139): NCBI GI NO: 38605778 NR Description: OSJNBa0044K18.21
MDKRRKLEAELGASEHLRDEVRHLRGEIDKLVTARKELSAEAASLVEELNREQSVKQQLPVLKTEIDGLQQELVHVRTACGLEQKGNLELLEQRKAMEKNMLSMAQEIEQMRGELANFEVRPRGPGGAYGMQIGSSEVTFTKNPYEDGYNAYVGVPEKDPLHPPEYASWGTYDRSRLQYR

SEQ ID NO: 24650 - DNA, 1869 bp, Zea mays subsp. mays
  misc_feature (1)..(1869): Ceres Seq. ID no. 12364442
gcacgagaccattacctagaacatcctaatcgcaaaataaagcgacggggcccttgcgctgggcgcggagactggagagggcgagagtcctcccatccacaagttcttagcttttgcgagattgagatccggctggggacagaccgacagaggaaggtgaattgtgggaaagaggacagaaaaatggggattggagatggatcttcaaatgggaaccagcaaccggtgcataaggaaatacgagatgagaccacaccacttcttccagtcaaggtggaggaggacgaggggtttcatgagttcaatggagcttcattctctggggcagttttcaatctgtcgaccaccatagttggggctggaattatggctcttccagcaagtatcaagatgctgggcatcatcccggggattctgttgatcatccttgtggcactgctcacagaggcatccatcgacatgcttgtaaggtgcagccaccagggcaagattacatcatatgggtggctgatgggcgaggttttcgggcagtgggggagaattgcgctgcaggcctccgtcatcataaacaatgttggcgtgctaattgtttacatgattatcattggtgatgtattatctggaacaacatcaggcgatgttcatcatcgtggtatattggagggctggtttggagctcatttgtggaattctcgtgccattgttcttcttgccacagctcttttggtgttcgctccgttggtgagctttaagcgcttggattcattaagatacacatctgcgctatcagttgccctggcagtagtttttgtcgtaattactgctgggattgccatcatcaaactcttcaatggaactgtagcgatgcccaaactttttccagaattagatggtcttaattctatctggaatctttttacagctgtccctgttcttgttacggcctatatctgccactataacgttcacagcattgacaatgaacttgaagacagaacacagatcaagccgattgtgcgaacatcgctgttcctgtgctccagtgtttacattgccacaagtttctttgcttatctcctcttcggtgaaggcacactggacgacgtgctcgccaactttgacgcaaatcttggcattccattcagttcagtcttcgatgacatagtgcgagtgagctatgcagcacatgtcatgcttgtctttcccattgtcttctttgccctccggctcaacttggatgggttgctcttccccacgtcaaggcacatctctcgtgacaacaagagattcgccatcatcaccgtctctctcctcgcagtaatttatcttgctgccattctcataccaagcatctgggacgcgttccagtttactggtgccacagctgctgtcctgattggttttatatttcctgccatggtcatacttagggattcttacggaatcgcgagcaagcgcgacaagattctggctgtaaccatgatcgtgcttgctgtcctgtcaaattctgtcgccctatacagtgacgcgatgaacatcttccgtaagaaggaagtggcctgatctcagatttcaaaagtagtcagtgctggatgaagaatggtctcgcaatgcaagactcgatggtacgaaggaaaacgatgcgcttggattccgtgaaggaacgatttctttgtcagcacctcagaatttggccacttgaaagaatctgatgcttgaagtttcctggttctgtgtacacaagtcggctcaatgtcagaattgagccgcttgaaatatatttagttatattctatgcggagagtaggtcttggaaacagccttttccacaataatgtacagttattatgccaatttctgagttcagtt

SEQ ID NO: 24651 - protein, 520 aa, Zea mays subsp. mays
  peptide (1)..(520): Ceres Seq. ID no. 12364443
  misc_feature (86)..(517): NCBI GI NO: 34898706 NR Description: hypothetical protein
  misc_feature (82)..(516): NCBI GI NO: 18406463 NR Description: expressed protein; protein id: At3g30390
  misc_feature (72)..(516): NCBI GI NO: 9758059 NR Description: amino acid transporter-like protein
  misc_feature (72)..(516): NCBI GI NO: 15241555 NR Description: transporter -like protein; protein id: At5g38820.1
  misc_feature (85)..(512): NCBI GI NO: 15228851 NR Description: putative protein; protein id: At3g56200
  misc_feature (86)..(506): NCBI GI NO: 30688270 NR Description: amino acid transporter family
  misc_feature (104)..(477): NCBI GI NO: 34907894 NR Description: P0439E11.11
  misc_feature (103)..(518): NCBI GI NO: 18412864 NR Description: expressed protein; protein id: At1g80510
  misc_feature (155)..(506): NCBI GI NO: 25408697 NR Description: hypothetical protein At2g40420
  misc_feature (86)..(132): NCBI GI NO: 25408697 NR Description: hypothetical protein At2g40420
ARDHYLEHPNRKIKRRGPCAGRGDWRGRESSHPQVLSFCEIEIRLGTDRQRKVNCGKEDRKMGIGDGSSNGNQQPVHKEIRDETTPLLPVKVEEDEGFHEFNGASFSGAVFNLSTTIVGAGIMALPASIKMLGIIPGILLIILVALLTEASIDMLVRCSHQGKITSYGWLMGEVFGQWGRIALQASVIINNVGVLIVYMIIIGDVLSGTTSGDVHHRGILEGWFGAHLWNSRAIVLLATALLVFAPLVSFKRLDSLRYTSALSVALAVVFVVITAGIAIIKLFNGTVAMPKLFPELDGLNSIWNLFTAVPVLVTAYICHYNVHSIDNELEDRTQIKPIVRTSLFLCSSVYIATSFFAYLLFGEGTLDDVLANFDANLGIPFSSVFDDIVRVSYAAHVMLVFPIVFFALRLNLDGLLFPTSRHISRDNKRFAIITVSLLAVIYLAAILIPSIWDAFQFTGATAAVLIGFIFPAMVILRDSYGIASKRDKILAVTMIVLAVLSNSVALYSDAMNIFRKKEVA

SEQ ID NO: 24652 - protein, 459 aa, Zea mays subsp. mays
  peptide (1)..(459): Ceres Seq. ID no. 12364444
  misc_feature (25)..(456): NCBI GI NO: 34898706 NR Description: hypothetical protein
  misc_feature (21)..(455): NCBI GI NO: 18406463 NR Description: expressed protein; protein id: At3g30390
  misc_feature (11)..(455): NCBI GI NO: 9758059 NR Description: amino acid transporter-like protein
  misc_feature (11)..(455): NCBI GI NO: 15241555 NR Description: transporter -like protein; protein id: At5g38820.1
  misc_feature (24)..(451): NCBI GI NO: 15228851 NR Description: putative protein; protein id: At3g56200
  misc_feature (25)..(445): NCBI GI NO: 30688270 NR Description: amino acid transporter family
  misc_feature (43)..(416): NCBI GI NO: 34907894 NR Description: P0439E11.11
  misc_feature (42)..(457): NCBI GI NO: 18412864 NR Description: expressed protein; protein id: At1g80510
  misc_feature (94)..(445): NCBI GI NO: 25408697 NR Description: hypothetical protein At2g40420
  misc_feature (25)..(71): NCBI GI NO: 25408697 NR Description: hypothetical protein At2g40420
MGIGDGSSNGNQQPVHKEIRDETTPLLPVKVEEDEGFHEFNGASFSGAVFNLSTTIVGAGIMALPASIKMLGIIPGILLIILVALLTEASIDMLVRCSHQGKITSYGWLMGEVFGQWGRIALQASVIINNVGVLIVYMIIIGDVLSGTTSGDVHHRGILEGWFGAHLWNSRAIVLLATALLVFAPLVSFKRLDSLRYTSALSVALAVVFVVITAGIAIIKLFNGTVAMPKLFPELDGLNSIWNLFTAVPVLVTAYICHYNVHSIDNELEDRTQIKPIVRTSLFLCSSVYIATSFFAYLLFGEGTLDDVLANFDANLGIPFSSVFDDIVRVSYAAHVMLVFPIVFFALRLNLDGLLFPTSRHISRDNKRFAIITVSLLAVIYLAAILIPSIWDAFQFTGATAAVLIGFIFPAMVILRDSYGIASKRDKILAVTMIVLAVLSNSVALYSDAMNIFRKKEVA

SEQ ID NO: 24653 - protein, 398 aa, Zea mays subsp. mays
  peptide (1)..(398): Ceres Seq. ID no. 12364445
  misc_feature (1)..(395): NCBI GI NO: 34898706 NR Description: hypothetical protein
  misc_feature (1)..(394): NCBI GI NO: 18406463 NR Description: expressed protein; protein id: At3g30390
  misc_feature (1)..(394): NCBI GI NO: 9758059 NR Description: amino acid transporter-like protein
  misc_feature (1)..(394): NCBI GI NO: 15241555 NR Description: transporter -like protein; protein id: At5g38820.1
  misc_feature (1)..(390): NCBI GI NO: 15228851 NR Description: putative protein; protein id: At3g56200
  misc_feature (1)..(384): NCBI GI NO: 30688270 NR Description: amino acid transporter family
  misc_feature (1)..(355): NCBI GI NO: 34907894 NR Description: P0439E11.11
  misc_feature (1)..(396): NCBI GI NO: 18412864 NR Description: expressed protein; protein id: At1g80510
  misc_feature (33)..(384): NCBI GI NO: 25408697 NR Description: hypothetical protein At2g40420
  misc_feature (1)..(270): NCBI GI NO: 24461850 NR Description: CTV.3 [Poncirus trifoliata]
MALPASIKMLGIIPGILLIILVALLTEASIDMLVRCSHQGKITSYGWLMGEVFGQWGRIALQASVIINNVGVLIVYMIIIGDVLSGTTSGDVHHRGILEGWFGAHLWNSRAIVLLATALLVFAPLVSFKRLDSLRYTSALSVALAVVFVVITAGIAIIKLFNGTVAMPKLFPELDGLNSIWNLFTAVPVLVTAYICHYNVHSIDNELEDRTQIKPIVRTSLFLCSSVYIATSFFAYLLFGEGTLDDVLANFDANLGIPFSSVFDDIVRVSYAAHVMLVFPIVFFALRLNLDGLLFPTSRHISRDNKRFAIITVSLLAVIYLAAILIPSIWDAFQFTGATAAVLIGFIFPAMVILRDSYGIASKRDKILAVTMIVLAVLSNSVALYSDAMNIFRKKEVA

SEQ ID NO: 24654 - DNA, 1596 bp, Zea mays subsp. mays
  misc_feature (1)..(1596): Ceres Seq. ID no. 12345281
acgaactggaatcatctccgcctcgccacctcttcatcttcttccccagtagccgccgccaccaccactgcagcagccaaaccacgtgacacctcccgcgccgctcaaccccacagcatccgttgccaccgccgctcacctccccggcgctcccggctacaaccactgcaagcatgaggcagccaaccagcgcgggcggcgacgctgggttcttgcgcgcggaccagatcgacctcaagagcctggacgagcagctcgagcgccacctcggacatcccgcggagcgggtagttggcccagtctctgggacagggagccgccgcggcgaaacggccaagctgggtccggaggagctgacgccactgcagcggtgccgtgaggactgggagatcgaccctaccaagctcatcatcaagggcgtcatcgcgcgcggcacctttggcaccgtccaccgcggcgtctacgacggccaggacgtcgctgtaaaattgcttgactggggcgaagatggccatagatcagaacaagaaattggtgcactaagagcagcgtttgcacaagaggtcgctgtctggcataagcttgagcatccaaacgttactaagtttattggggctataatgggcgcaagagatttaaatatacaaacggaacatggacagcttggcatgccaagcaatatttgctgtgttgttgttgagtaccttgctggaggtgcgctgaaaaattttctgataaagaacaggagaaggaaacttgcctttaaagttgtggtccaaatagctcttgaccttgccaggggattatgctacctccactcaaagaaaatagtgcaccgtgatgtcaagactgaaaacatgcttctggacaagacgagaacggtaaagatcgctgattttggtgttgctcgagtcgaggcttcaaatcctagcgatatgacgggagaaacagggacgcttggttacatggctcctgaggttctcaatggccatgcttacaacaggaagtgtgacgtgtacagctttgggatctgcctgtgggagatatactgctgtgacatgccgtaccctgatctcagtttttctgaggtcacctctgccgtcgttcgccagaatctgaggcctgagataccgcgctgctgcccgagctcgctagcgaatgtgatgaagcgatgctgggacgcgaacccggacaagcgtcccgagatggcggaggtggtgtccatgctggaggcgatcgacacgtccaagggtggcggcatgatccctaaggaccagacgcagggctgcctctcgtgcttccgccagtaccgaggtccctaacgcagggttgtttatttatacccggtgaaatgatgatattggtctctacactacaactcagtgtaatctaatcgcagaagtggctatataatggagaagcttatcattgcttgccatgggtgtaaatggatggggcggggtggttgacgattggtgtgcttgtatgctcgcttcgagttataatgcttgctgtaagttaaggtgtggacggagttgctgttgccgtttgctcacatcgttaaattcgtgggcgtgacatgaagcaaggttatgt

SEQ ID NO: 24655 - protein, 382 aa, Zea mays subsp. mays
  peptide (1)..(382): Ceres Seq. ID no. 12345282
  misc_feature (78)..(352): Pfam Name: Pfam Description:  Protein kinase domain
  misc_feature (1)..(382): NCBI GI NO: 34911620 NR Description: protein kinase -like
  misc_feature (8)..(382): NCBI GI NO: 29367399 NR Description: putative protein kinase
  misc_feature (29)..(382): NCBI GI NO: 15232131 NR Description: putative protein kinase; protein id: At3g01490
  misc_feature (1)..(32): NCBI GI NO: 15232131 NR Description: putative protein kinase; protein id: At3g01490
  misc_feature (9)..(382): NCBI GI NO: 15240597 NR Description: protein kinase; protein id: At5g50000
  misc_feature (9)..(382): NCBI GI NO: 21553402 NR Description: protein kinase [Arabidopsis thaliana]
  misc_feature (60)..(382): NCBI GI NO: 15233574 NR Description: kinase like protein; protein id: At4g14780.1
  misc_feature (15)..(32): NCBI GI NO: 15233574 NR Description: kinase like protein; protein id: At4g14780.1
  misc_feature (68)..(382): NCBI GI NO: 18403507 NR Description: expressed protein; protein id: At3g22750
  misc_feature (69)..(382): NCBI GI NO: 15229398 NR Description: ATMRK1; protein id: At3g63260
MRQPTSAGGDAGFLRADQIDLKSLDEQLERHLGHPAERVVGPVSGTGSRRGETAKLGPEELTPLQRCREDWEIDPTKLIIKGVIARGTFGTVHRGVYDGQDVAVKLLDWGEDGHRSEQEIGALRAAFAQEVAVWHKLEHPNVTKFIGAIMGARDLNIQTEHGQLGMPSNICCVVVEYLAGGALKNFLIKNRRRKLAFKVVVQIALDLARGLCYLHSKKIVHRDVKTENMLLDKTRTVKIADFGVARVEASNPSDMTGETGTLGYMAPEVLNGHAYNRKCDVYSFGICLWEIYCCDMPYPDLSFSEVTSAVVRQNLRPEIPRCCPSSLANVMKRCWDANPDKRPEMAEVVSMLEAIDTSKGGGMIPKDQTQGCLSCFRQYRGP

SEQ ID NO: 24656 - protein, 233 aa, Zea mays subsp. mays
  peptide (1)..(233): Ceres Seq. ID no. 12345283
  misc_feature (1)..(203): Pfam Name: Pfam Description:  Protein kinase domain
  misc_feature (1)..(233): NCBI GI NO: 34911620 NR Description: protein kinase -like
  misc_feature (1)..(233): NCBI GI NO: 29367399 NR Description: putative protein kinase
  misc_feature (1)..(233): NCBI GI NO: 15232131 NR Description: putative protein kinase; protein id: At3g01490
  misc_feature (1)..(233): NCBI GI NO: 15240597 NR Description: protein kinase; protein id: At5g50000
  misc_feature (1)..(233): NCBI GI NO: 21553402 NR Description: protein kinase [Arabidopsis thaliana]
  misc_feature (1)..(233): NCBI GI NO: 15233574 NR Description: kinase like protein; protein id: At4g14780.1
  misc_feature (1)..(233): NCBI GI NO: 18403507 NR Description: expressed protein; protein id: At3g22750
  misc_feature (1)..(233): NCBI GI NO: 15229398 NR Description: ATMRK1; protein id: At3g63260
  misc_feature (1)..(233): NCBI GI NO: 21554375 NR Description: ATMRK1 [Arabidopsis thaliana]
  misc_feature (1)..(232): NCBI GI NO: 14626298 NR Description: putative protein kinase
MGARDLNIQTEHGQLGMPSNICCVVVEYLAGGALKNFLIKNRRRKLAFKVVVQIALDLARGLCYLHSKKIVHRDVKTENMLLDKTRTVKIADFGVARVEASNPSDMTGETGTLGYMAPEVLNGHAYNRKCDVYSFGICLWEIYCCDMPYPDLSFSEVTSAVVRQNLRPEIPRCCPSSLANVMKRCWDANPDKRPEMAEVVSMLEAIDTSKGGGMIPKDQTQGCLSCFRQYRGP

SEQ ID NO: 24657 - protein, 217 aa, Zea mays subsp. mays
  peptide (1)..(217): Ceres Seq. ID no. 12345284
  misc_feature (1)..(187): Pfam Name: Pfam Description:  Protein kinase domain
  misc_feature (1)..(217): NCBI GI NO: 34911620 NR Description: protein kinase -like
  misc_feature (1)..(217): NCBI GI NO: 29367399 NR Description: putative protein kinase
  misc_feature (1)..(217): NCBI GI NO: 15232131 NR Description: putative protein kinase; protein id: At3g01490
  misc_feature (1)..(217): NCBI GI NO: 15240597 NR Description: protein kinase; protein id: At5g50000
  misc_feature (1)..(217): NCBI GI NO: 21553402 NR Description: protein kinase [Arabidopsis thaliana]
  misc_feature (1)..(217): NCBI GI NO: 15233574 NR Description: kinase like protein; protein id: At4g14780.1
  misc_feature (1)..(217): NCBI GI NO: 18403507 NR Description: expressed protein; protein id: At3g22750
  misc_feature (1)..(217): NCBI GI NO: 15229398 NR Description: ATMRK1; protein id: At3g63260
  misc_feature (1)..(217): NCBI GI NO: 21554375 NR Description: ATMRK1 [Arabidopsis thaliana]
  misc_feature (1)..(216): NCBI GI NO: 14626298 NR Description: putative protein kinase
MPSNICCVVVEYLAGGALKNFLIKNRRRKLAFKVVVQIALDLARGLCYLHSKKIVHRDVKTENMLLDKTRTVKIADFGVARVEASNPSDMTGETGTLGYMAPEVLNGHAYNRKCDVYSFGICLWEIYCCDMPYPDLSFSEVTSAVVRQNLRPEIPRCCPSSLANVMKRCWDANPDKRPEMAEVVSMLEAIDTSKGGGMIPKDQTQGCLSCFRQYRGP

SEQ ID NO: 24658 - DNA, 2062 bp, Zea mays subsp. mays
  misc_feature (1)..(2062): Ceres Seq. ID no. 12373375
ctctcactaccaccaccactgccccggatccataccagctgcagcagcagcgcgcgcgagctagcttcggtcggtcgatagatcgatcgatcgctcggccatcatggcgcgggaggagcaggcgctgctgtcgacggagatcgtgaaccgcggcgtggagccgtcgggcccggacgccggctcgccggccttctcggtgcgcgtgcgccgccgcctgccggacttcctgcagtcggtgaacctcaagtacgtgcgcctcgggtaccactacctcatcagccacggcgtgtacctggccaccatccccgtcatcgtgctggtgtgcggcgccgagctgggcagcctcagccgcgacgagctgtggcgcaaggtgtggggggaggccacctacgacctcgccaccgtgctcgccttcctcgccgtcctcgccttcaccatctccgtctacatcatgtccaggcccaggcccgtgtacctcatcgacttcgcatgctacaagccggccgacgagctcaaggtgtccaaggcggagttcatcgacctggcgcgcaagtccggcaagttcgacgaggacagcctggcgttccagtcgcgtctgctggccaagtccggcatcggcgacgagtcgtacatgccgcgctgcgtgttcgagcccaacgccagctgcgccaccatgaaggagggccgcgccgaggcgtccacggccatgttcgcggcgctggacgagctgttcgacaagtgccgcgtccggcccaaggacgtgggcgtgctggtggtcaactgcagcctcttcaacccgacgccctccctgtccgccatgatcgtcaaccactacaagatgcgcggcaacatcctgagctacaacctgggggggcatgggctgcagcggcgggcgtcatcgccatcgatctggcccgcgacatgctccaggccagcggcgcgggcctggccgtggtggtcagcacggaggccgtctccttcacgtggtaccccgggaagcggcgctccatgctcatcccgaacgccttcttccgggccggctgcgcggcggtgctgctgtccaaccggcgccgcgacttccaccgcgccaagtaccagctggagcacgtggtgcgcacgcacaagggcgcggacgaccgcgccttccgctccgtgtaccaggaggaggacgagcagcggatcaagggcctgtccatcagccgcgacctgctggaggtgggcggccacgcgctcaagaccaacatcaccacgctggggcccctggtgctgcccttctccgagcagctgctcttcttcgcgggcgtgctgttccgccacctgttcccgtccaaggcctccacgccggcgccgccgaccaccccaggggacgcctcggccgccgcgccctacatcccggacttcaagcgcgcgttcgagcacttctgcatgcacgcggccagccgcgacgtgctggagcacctgcagagcaacctgggcctgcgcaacgccgacctggaggcctcccgcgccgcgctgcaccgcttcggcaacacctcaagcagcagcatctggtacgagctggcgtacctggaggccaagggccgcgtccgccgcggcgaccgcgtctggcagctcgccttcgggtcgggcttcaagtgcaacagcgcggtgtggcgcgccgtccgccgcgtgcgccgccccgcgcgcagcccctggctgggactgcgtcgaccagtacccggcgcgcatggacgcctagcacgtacctgcaatgcagtggctgctatctatctatcgctcgcttcgctaccactaccagtgcagtgctgcacttcaccgatggatgatggatcggatatgatatggtataggacgcggtcggtcgatttgcatgcatgcacaagtgttagtataccgttctgaaggtacgtttgaactttgttcgtttgtattgcactattgcttgttgtttaagtagcggttaagggaggcatacgtacgctgtactaccataatggaagtactccggtccggtcctgtcctgtgtgagccttatgtacgtgcaattttaatgtgttttggt

SEQ ID NO: 24659 - protein, 544 aa, Zea mays subsp. mays
  peptide (1)..(544): Ceres Seq. ID no. 12373376
  misc_feature (293)..(522): Pfam Name: Pfam Description:  Equine herpesvirus glycoprotein gp2
  misc_feature (1)..(259): NCBI GI NO: 24960748 NR Description: Putative fiddlehead-like protein
  misc_feature (1)..(259): NCBI GI NO: 18447765 NR Description: fiddlehead-like protein [Gossypium hirsutum]
  misc_feature (1)..(259): NCBI GI NO: 15225270 NR Description: beta-ketoacyl-CoA synthase
  misc_feature (1)..(259): NCBI GI NO: 8177727 NR Description: fiddlehead protein [Arabidopsis thaliana]
  misc_feature (1)..(257): NCBI GI NO: 8177723 NR Description: fiddlehead protein [Arabidopsis thaliana]
  misc_feature (1)..(259): NCBI GI NO: 8177711 NR Description: fiddlehead protein [Arabidopsis thaliana]
  misc_feature (1)..(259): NCBI GI NO: 28864534 NR Description: fiddlehead-like protein [Tropaeolum majus]
  misc_feature (5)..(259): NCBI GI NO: 19351907 NR Description: putative beta-ketoacyl-CoA synthase
  misc_feature (1)..(259): NCBI GI NO: 8177719 NR Description: fiddlehead protein [Arabidopsis thaliana]
  misc_feature (1)..(259): NCBI GI NO: 8177715 NR Description: fiddlehead protein [Arabidopsis thaliana]
MAREEQALLSTEIVNRGVEPSGPDAGSPAFSVRVRRRLPDFLQSVNLKYVRLGYHYLISHGVYLATIPVIVLVCGAELGSLSRDELWRKVWGEATYDLATVLAFLAVLAFTISVYIMSRPRPVYLIDFACYKPADELKVSKAEFIDLARKSGKFDEDSLAFQSRLLAKSGIGDESYMPRCVFEPNASCATMKEGRAEASTAMFAALDELFDKCRVRPKDVGVLVVNCSLFNPTPSLSAMIVNHYKMRGNILSYNLGGHGLQRRASSPSIWPATCSRPAARAWPWWSARRPSPSRGTPGSGAPCSSRTPSSGPAARRCCCPTGAATSTAPSTSWSTWCARTRARTTAPSAPCTRRRTSSGSRACPSAATCWRWAATRSRPTSPRWGPWCCPSPSSCSSSRACCSATCSRPRPPRRRRRPPQGTPRPPRPTSRTSSARSSTSACTRPAATCWSTCRATWACATPTWRPPAPRCTASATPQAAASGTSWRTWRPRAASAAATASGSSPSGRASSATARCGAPSAACAAPRAAPGWDCVDQYPARMDA

SEQ ID NO: 24660 - protein, 470 aa, Zea mays subsp. mays
  peptide (1)..(470): Ceres Seq. ID no. 12373377
  misc_feature (206)..(392): Pfam Name: Pfam Description:  Chalcone and stilbene synthases
  misc_feature (128)..(403): NCBI GI NO: 24960748 NR Description: Putative fiddlehead-like protein
  misc_feature (128)..(409): NCBI GI NO: 18447765 NR Description: fiddlehead-like protein [Gossypium hirsutum]
  misc_feature (128)..(410): NCBI GI NO: 15225270 NR Description: beta-ketoacyl-CoA synthase
  misc_feature (128)..(410): NCBI GI NO: 8177727 NR Description: fiddlehead protein [Arabidopsis thaliana]
  misc_feature (128)..(410): NCBI GI NO: 8177723 NR Description: fiddlehead protein [Arabidopsis thaliana]
  misc_feature (128)..(410): NCBI GI NO: 8177711 NR Description: fiddlehead protein [Arabidopsis thaliana]
  misc_feature (128)..(403): NCBI GI NO: 28864534 NR Description: fiddlehead-like protein [Tropaeolum majus]
  misc_feature (128)..(403): NCBI GI NO: 19351907 NR Description: putative beta-ketoacyl-CoA synthase
  misc_feature (128)..(372): NCBI GI NO: 8177719 NR Description: fiddlehead protein [Arabidopsis thaliana]
  misc_feature (128)..(264): NCBI GI NO: 8177715 NR Description: fiddlehead protein [Arabidopsis thaliana]
MLQAGRRAQGVQGGVHRPGAQVRQVRRGQPGVPVASAGQVRHRRRVVHAALRVRAQRQLRHHEGGPRRGVHGHVRGAGRAVRQVPRPAQGRGRAGGQLQPLQPDALPVRHDRQPLQDARQHPELQPGGAWAAAAGVIAIDLARDMLQASGAGLAVVVSTEAVSFTWYPGKRRSMLIPNAFFRAGCAAVLLSNRRRDFHRAKYQLEHVVRTHKGADDRAFRSVYQEEDEQRIKGLSISRDLLEVGGHALKTNITTLGPLVLPFSEQLLFFAGVLFRHLFPSKASTPAPPTTPGDASAAAPYIPDFKRAFEHFCMHAASRDVLEHLQSNLGLRNADLEASRAALHRFGNTSSSSIWYELAYLEAKGRVRRGDRVWQLAFGSGFKCNSAVWRAVRRVRRPARSPWLGLRRPVPGAHGRLARTCNAVAAIYLSLASLPLPVQCCTSPMDDGSDMIWYRTRSVDLHACTSVSIPF

SEQ ID NO: 24661 - protein, 428 aa, Zea mays subsp. mays
  peptide (1)..(428): Ceres Seq. ID no. 12373378
  misc_feature (177)..(406): Pfam Name: Pfam Description:  Equine herpesvirus glycoprotein gp2
  misc_feature (1)..(143): NCBI GI NO: 24960748 NR Description: Putative fiddlehead-like protein
  misc_feature (1)..(143): NCBI GI NO: 18447765 NR Description: fiddlehead-like protein [Gossypium hirsutum]
  misc_feature (1)..(143): NCBI GI NO: 15225270 NR Description: beta-ketoacyl-CoA synthase
  misc_feature (1)..(143): NCBI GI NO: 8177727 NR Description: fiddlehead protein [Arabidopsis thaliana]
  misc_feature (1)..(141): NCBI GI NO: 8177723 NR Description: fiddlehead protein [Arabidopsis thaliana]
  misc_feature (1)..(143): NCBI GI NO: 8177711 NR Description: fiddlehead protein [Arabidopsis thaliana]
  misc_feature (1)..(143): NCBI GI NO: 28864534 NR Description: fiddlehead-like protein [Tropaeolum majus]
  misc_feature (1)..(143): NCBI GI NO: 19351907 NR Description: putative beta-ketoacyl-CoA synthase
  misc_feature (1)..(143): NCBI GI NO: 8177719 NR Description: fiddlehead protein [Arabidopsis thaliana]
  misc_feature (1)..(143): NCBI GI NO: 8177715 NR Description: fiddlehead protein [Arabidopsis thaliana]
MSRPRPVYLIDFACYKPADELKVSKAEFIDLARKSGKFDEDSLAFQSRLLAKSGIGDESYMPRCVFEPNASCATMKEGRAEASTAMFAALDELFDKCRVRPKDVGVLVVNCSLFNPTPSLSAMIVNHYKMRGNILSYNLGGHGLQRRASSPSIWPATCSRPAARAWPWWSARRPSPSRGTPGSGAPCSSRTPSSGPAARRCCCPTGAATSTAPSTSWSTWCARTRARTTAPSAPCTRRRTSSGSRACPSAATCWRWAATRSRPTSPRWGPWCCPSPSSCSSSRACCSATCSRPRPPRRRRRPPQGTPRPPRPTSRTSSARSSTSACTRPAATCWSTCRATWACATPTWRPPAPRCTASATPQAAASGTSWRTWRPRAASAAATASGSSPSGRASSATARCGAPSAACAAPRAAPGWDCVDQYPARMDA

SEQ ID NO: 24662 - DNA, 1624 bp, Zea mays subsp. mays
  misc_feature (1)..(1624): Ceres Seq. ID no. 13492681
aacttggccccaaatcgtggagtggaaaccctactcgtccccttccgcatcgccgcccaattcccccacccaattcccactctccgctcgacagatccatacatgatgggagaggccaaggagaacgacgtttatgaggaggagctcctggactacgaggaggacgacgacaagacggtcgatggctccgctgctaagcccaccggagaggtcgcaaagaagggctacgtcgggatccacagttccggtttcagagacttcctgctcaagccagagctgctccgtgctatccaggattgtggttttgagcatccttccgaagtgcaacacgagtgtatccctcaagccattcttggaatggatgtcatctgtcaagctaaatctgggatggggaaaactgctgtttttgtcctttcatccctccaacaaattgaccctgttgcgggtcaggtagcagcacttgtactgtgccacacaagggaactggcttatcagatatgccacgaatttgagaggttcagcaaatatcttactgaagttaaagttgctgtcttctatggaggtgttcacatcaggaagcataaagatttgttgaagaatgaatgccctcatattgtggttggcacgcctggtaggatacttgctcttgccagggataaggatctctccttgaagaatgtgaggcacttcattcttgatgaatgtgacaaaatgctggaatcacttgacatgcggagagatgttcaggagatcttcaaaatgactcctcatgataagcaagtcatgatgttttcagcaacgctcagcaaggagatccgtcctgtatgcaagaaatttatgcaagatccgatggaaatatatgttgatgatgaggcaaagttgaccctccatggtcttgtacagcactatataaaacttagcgaggcagagaagaaccggaaactgaatgatctcttggacgctcttgatttcaaccaagttgtgatattcgtgaagagtgttagcagagctgccgaactgaataagttactttgtgaatgcaacttcccatcaatctgcattcattctggaatgactcaggaagaaaggctaacaagatataagaacttcaaggaaggccacaagaaaattcttgtggctacagatttagttggcaggggcattgacattgagcgtgtcaacattgtgataaactatgacatgccagactcagctgatacttatttgcacagggttggaagggctggacgttttggcacgaagggacttgcaattacctttgtttcctctgcttcggattctgatgttcttaaccaggtgcaagaaaggtttgaggtagacataaaggaactgcctgagcaaattgacacctcgacctacatgccatcataaatgggaaggacaactgagaagagaggaggataggggagtgagcagccgtctggagatggttacctttgaactatccgatctggaggatttgatttgcctcctttgtgtactttaaaaagggcagccaggatgatgatctgtattttaagacaatgctgtctgtttgggtttaggattttgctttgtcgaaaactagcacacttattgtactactgagcagcatatttgtttt

SEQ ID NO: 24663 - protein, 463 aa, Zea mays subsp. mays
  peptide (1)..(463): Ceres Seq. ID no. 13492682
  misc_feature (95)..(302): Pfam Name: Pfam Description:  DEAD/DEAH box helicase
  misc_feature (36)..(463): NCBI GI NO: 18416493 NR Description: DEAD/DEAH box helicase, putative
  misc_feature (36)..(463): NCBI GI NO: 18416486 NR Description: DEAD/DEAH box helicase, putative
  misc_feature (15)..(463): NCBI GI NO: 11358797 NR Description: RNA helicase RH15
  misc_feature (36)..(460): NCBI GI NO: 8953382 NR Description: DEAD BOX RNA helicase RH15 [Arabidopsis thaliana]
  misc_feature (36)..(460): NCBI GI NO: 8953379 NR Description: DEAD BOX RNA helicase RH15-like protein
  misc_feature (36)..(439): NCBI GI NO: 34913868 NR Description: putative DEAD BOX RNA helicase
  misc_feature (120)..(463): NCBI GI NO: 30683509 NR Description: DEAD/DEAH box helicase, putative
  misc_feature (41)..(461): NCBI GI NO: 28278325 NR Description: Unknown (protein for MGC:55433) [Danio rerio]
  misc_feature (41)..(461): NCBI GI NO: 4758112 NR Description: HLA-B associated transcript 1
  misc_feature (41)..(282): NCBI GI NO: 21040373 NR Description: DEAD/H
NLAPNRGVETLLVPFRIAAQFPHPIPTLRSTDPYMMGEAKENDVYEEELLDYEEDDDKTVDGSAAKPTGEVAKKGYVGIHSSGFRDFLLKPELLRAIQDCGFEHPSEVQHECIPQAILGMDVICQAKSGMGKTAVFVLSSLQQIDPVAGQVAALVLCHTRELAYQICHEFERFSKYLTEVKVAVFYGGVHIRKHKDLLKNECPHIVVGTPGRILALARDKDLSLKNVRHFILDECDKMLESLDMRRDVQEIFKMTPHDKQVMMFSATLSKEIRPVCKKFMQDPMEIYVDDEAKLTLHGLVQHYIKLSEAEKNRKLNDLLDALDFNQVVIFVKSVSRAAELNKLLCECNFPSICIHSGMTQEERLTRYKNFKEGHKKILVATDLVGRGIDIERVNIVINYDMPDSADTYLHRVGRAGRFGTKGLAITFVSSASDSDVLNQVQERFEVDIKELPEQIDTSTYMPS

SEQ ID NO: 24664 - protein, 429 aa, Zea mays subsp. mays
  peptide (1)..(429): Ceres Seq. ID no. 13492683
  misc_feature (61)..(268): Pfam Name: Pfam Description:  DEAD/DEAH box helicase
  misc_feature (2)..(429): NCBI GI NO: 18416493 NR Description: DEAD/DEAH box helicase, putative
  misc_feature (2)..(429): NCBI GI NO: 18416486 NR Description: DEAD/DEAH box helicase, putative
  misc_feature (1)..(429): NCBI GI NO: 11358797 NR Description: RNA helicase RH15
  misc_feature (2)..(426): NCBI GI NO: 8953382 NR Description: DEAD BOX RNA helicase RH15 [Arabidopsis thaliana]
  misc_feature (2)..(426): NCBI GI NO: 8953379 NR Description: DEAD BOX RNA helicase RH15-like protein
  misc_feature (2)..(405): NCBI GI NO: 34913868 NR Description: putative DEAD BOX RNA helicase
  misc_feature (86)..(429): NCBI GI NO: 30683509 NR Description: DEAD/DEAH box helicase, putative
  misc_feature (7)..(427): NCBI GI NO: 28278325 NR Description: Unknown (protein for MGC:55433) [Danio rerio]
  misc_feature (7)..(427): NCBI GI NO: 4758112 NR Description: HLA-B associated transcript 1
  misc_feature (7)..(248): NCBI GI NO: 21040373 NR Description: DEAD/H
MMGEAKENDVYEEELLDYEEDDDKTVDGSAAKPTGEVAKKGYVGIHSSGFRDFLLKPELLRAIQDCGFEHPSEVQHECIPQAILGMDVICQAKSGMGKTAVFVLSSLQQIDPVAGQVAALVLCHTRELAYQICHEFERFSKYLTEVKVAVFYGGVHIRKHKDLLKNECPHIVVGTPGRILALARDKDLSLKNVRHFILDECDKMLESLDMRRDVQEIFKMTPHDKQVMMFSATLSKEIRPVCKKFMQDPMEIYVDDEAKLTLHGLVQHYIKLSEAEKNRKLNDLLDALDFNQVVIFVKSVSRAAELNKLLCECNFPSICIHSGMTQEERLTRYKNFKEGHKKILVATDLVGRGIDIERVNIVINYDMPDSADTYLHRVGRAGRFGTKGLAITFVSSASDSDVLNQVQERFEVDIKELPEQIDTSTYMPS

SEQ ID NO: 24665 - protein, 428 aa, Zea mays subsp. mays
  peptide (1)..(428): Ceres Seq. ID no. 13492684
  misc_feature (60)..(267): Pfam Name: Pfam Description:  DEAD/DEAH box helicase
  misc_feature (1)..(428): NCBI GI NO: 18416493 NR Description: DEAD/DEAH box helicase, putative
  misc_feature (1)..(428): NCBI GI NO: 18416486 NR Description: DEAD/DEAH box helicase, putative
  misc_feature (1)..(428): NCBI GI NO: 11358797 NR Description: RNA helicase RH15
  misc_feature (1)..(425): NCBI GI NO: 8953382 NR Description: DEAD BOX RNA helicase RH15 [Arabidopsis thaliana]
  misc_feature (1)..(425): NCBI GI NO: 8953379 NR Description: DEAD BOX RNA helicase RH15-like protein
  misc_feature (1)..(404): NCBI GI NO: 34913868 NR Description: putative DEAD BOX RNA helicase
  misc_feature (85)..(428): NCBI GI NO: 30683509 NR Description: DEAD/DEAH box helicase, putative
  misc_feature (6)..(426): NCBI GI NO: 28278325 NR Description: Unknown (protein for MGC:55433) [Danio rerio]
  misc_feature (6)..(426): NCBI GI NO: 4758112 NR Description: HLA-B associated transcript 1
  misc_feature (6)..(247): NCBI GI NO: 21040373 NR Description: DEAD/H
MGEAKENDVYEEELLDYEEDDDKTVDGSAAKPTGEVAKKGYVGIHSSGFRDFLLKPELLRAIQDCGFEHPSEVQHECIPQAILGMDVICQAKSGMGKTAVFVLSSLQQIDPVAGQVAALVLCHTRELAYQICHEFERFSKYLTEVKVAVFYGGVHIRKHKDLLKNECPHIVVGTPGRILALARDKDLSLKNVRHFILDECDKMLESLDMRRDVQEIFKMTPHDKQVMMFSATLSKEIRPVCKKFMQDPMEIYVDDEAKLTLHGLVQHYIKLSEAEKNRKLNDLLDALDFNQVVIFVKSVSRAAELNKLLCECNFPSICIHSGMTQEERLTRYKNFKEGHKKILVATDLVGRGIDIERVNIVINYDMPDSADTYLHRVGRAGRFGTKGLAITFVSSASDSDVLNQVQERFEVDIKELPEQIDTSTYMPS

SEQ ID NO: 24666 - DNA, 1748 bp, Zea mays subsp. mays
  misc_feature (1)..(1748): Ceres Seq. ID no. 12384166
attgcgctgcactgctcccacacgctcggattcctgctcgctttctcctcccacgattccatcgccagccgccccttttcccttcctttttcccttgctcgcccgcccgcccgcccaggactcgtccttcgcgcttcttcgccagctcgtccttcgcgcttcttcgccagccgtcggcgagagagggtgagaggatcctacgtgccttgtacgctcgctcgggagccggccgggatcgcgccgcgccaccgtaccccgccccggacatgtgcgtggaggggctggacgacgcagcagggaggctcggcttcggagaccaggagaccgacaggcgcgccggtgatgcgatggagagagtttgtgagaacacagtggctgttgacttcaagcagactaagctgaacaactttgtgccattcatccggtcaggggaatggtctgatattggaggtcgcgattacatggaagatgcccatgtgtgcatctctgatctggcaaagaattttggctatgactcagtcgaagatgaagtaatttctttctatggggtgtttgatggccataatggcaaagatgctgctcattatgtccgtgataacttgccacgggtcatcgtggaagacgctgattttcctcttgagcttgaaaaggtagtaaagaggtcatttgtgcaaactgatagtaagtttgcagagaaattctctcaccacaggggactttcttctggaacgacagcacttacagcaatgatttttggaaggtcccttctggttgcgaatgccggtgactgcagagcggtgctctcgcggcgtggcactgccattgagatgtccaaggaccacaggccttgctgcatgaatgaaaggaagcgcgtagagtcacttggcggctacgttgacgacggttacctgaacggtcagctggcagtgaccagagcgctcggtgactggcatctggagggcatgaaagaggtgggcgagccaggagggcccctgagcgccgaaccagagctgaagatggtcacgctgacgaaggacgacgagttcctgataatcggcagcgacggcatctgggacttcttctcgagccagaacgccgtggacttcgcgcggcggaggctccaggaccacaacgacctgaggctgtgctgcagggagatcgtggacgaggcggtgcggcggggcgccagcgacaacttgacggcggtgatggtctcgttccactcggacgcccctcccccgagccgtgccaacaagaggaccggcagggtcacgcggagcatatcggctgaggggcttcacagcctcagagtgctcctggaaggccagtgacgtcgcccggcggcgccattgctgcccgttcgtccctgatgctgtgctacgttgctgatgaggtgttaactgtaagtagcggtttccggtatcttggtgcttgctcttcttcttccgctgagggcgggcgactattcttgtccttcctccgacaataaaccaacgagcctgagatctcactgtgagacgctgtaaataagcaaatatggaagttggagctcgtcattaaggacgagttagcggtgtgcatccagggggcttttgtggctcagtatgtgatgccttttcgcccctcctgattttctgtaaataaaacgatgctgggagccatcggtgtgattgaactagtgttctgttatgcgtgctccccatcgattcaagacctacagtttttatttactactagtacaagtcttt

SEQ ID NO: 24667 - protein, 442 aa, Zea mays subsp. mays
  peptide (1)..(442): Ceres Seq. ID no. 12384167
  misc_feature (140)..(399): Pfam Name: Pfam Description:  Protein phosphatase 2C
  misc_feature (71)..(442): NCBI GI NO: 24413992 NR Description: putative DNA-binding protein phosphatase 2C
  misc_feature (116)..(441): NCBI GI NO: 21693562 NR Description: DNA-binding protein phosphatase 2C
  misc_feature (134)..(441): NCBI GI NO: 20146108 NR Description: protein phosphatase 2C
  misc_feature (134)..(441): NCBI GI NO: 15224766 NR Description: protein phosphatase 2C
  misc_feature (53)..(440): NCBI GI NO: 37536524 NR Description: putative protein phosphatase-2C
  misc_feature (134)..(441): NCBI GI NO: 15226152 NR Description: protein phosphatase 2C
  misc_feature (136)..(440): NCBI GI NO: 10140768 NR Description: putative protein phosphatase-2C [Oryza sativa]
  misc_feature (134)..(439): NCBI GI NO: 15230495 NR Description: protein phosphatase 2C
  misc_feature (117)..(441): NCBI GI NO: 25352221 NR Description: phosphoprotein phosphatase (EC 3.1.3.16) 2C
  misc_feature (91)..(440): NCBI GI NO: 34894410 NR Description: putative protein phosphatase
CAALLPHARIPARFLLPRFHRQPPLFPSFFPCSPARPPRTRPSRFFASSSFALLRQPSAREGERILRALYARSGAGRDRAAPPYPAPDMCVEGLDDAAGRLGFGDQETDRRAGDAMERVCENTVAVDFKQTKLNNFVPFIRSGEWSDIGGRDYMEDAHVCISDLAKNFGYDSVEDEVISFYGVFDGHNGKDAAHYVRDNLPRVIVEDADFPLELEKVVKRSFVQTDSKFAEKFSHHRGLSSGTTALTAMIFGRSLLVANAGDCRAVLSRRGTAIEMSKDHRPCCMNERKRVESLGGYVDDGYLNGQLAVTRALGDWHLEGMKEVGEPGGPLSAEPELKMVTLTKDDEFLIIGSDGIWDFFSSQNAVDFARRRLQDHNDLRLCCREIVDEAVRRGASDNLTAVMVSFHSDAPPPSRANKRTGRVTRSISAEGLHSLRVLLEGQ

SEQ ID NO: 24668 - protein, 354 aa, Zea mays subsp. mays
  peptide (1)..(354): Ceres Seq. ID no. 12384168
  misc_feature (52)..(311): Pfam Name: Pfam Description:  Protein phosphatase 2C
  misc_feature (1)..(354): NCBI GI NO: 24413992 NR Description: putative DNA-binding protein phosphatase 2C
  misc_feature (28)..(353): NCBI GI NO: 21693562 NR Description: DNA-binding protein phosphatase 2C
  misc_feature (46)..(353): NCBI GI NO: 20146108 NR Description: protein phosphatase 2C
  misc_feature (46)..(353): NCBI GI NO: 15224766 NR Description: protein phosphatase 2C
  misc_feature (1)..(352): NCBI GI NO: 37536524 NR Description: putative protein phosphatase-2C
  misc_feature (46)..(353): NCBI GI NO: 15226152 NR Description: protein phosphatase 2C
  misc_feature (48)..(352): NCBI GI NO: 10140768 NR Description: putative protein phosphatase-2C [Oryza sativa]
  misc_feature (46)..(351): NCBI GI NO: 15230495 NR Description: protein phosphatase 2C
  misc_feature (29)..(353): NCBI GI NO: 25352221 NR Description: phosphoprotein phosphatase (EC 3.1.3.16) 2C
  misc_feature (3)..(352): NCBI GI NO: 34894410 NR Description: putative protein phosphatase
MCVEGLDDAAGRLGFGDQETDRRAGDAMERVCENTVAVDFKQTKLNNFVPFIRSGEWSDIGGRDYMEDAHVCISDLAKNFGYDSVEDEVISFYGVFDGHNGKDAAHYVRDNLPRVIVEDADFPLELEKVVKRSFVQTDSKFAEKFSHHRGLSSGTTALTAMIFGRSLLVANAGDCRAVLSRRGTAIEMSKDHRPCCMNERKRVESLGGYVDDGYLNGQLAVTRALGDWHLEGMKEVGEPGGPLSAEPELKMVTLTKDDEFLIIGSDGIWDFFSSQNAVDFARRRLQDHNDLRLCCREIVDEAVRRGASDNLTAVMVSFHSDAPPPSRANKRTGRVTRSISAEGLHSLRVLLEGQ

SEQ ID NO: 24669 - protein, 327 aa, Zea mays subsp. mays
  peptide (1)..(327): Ceres Seq. ID no. 12384169
  misc_feature (25)..(284): Pfam Name: Pfam Description:  Protein phosphatase 2C
  misc_feature (1)..(327): NCBI GI NO: 24413992 NR Description: putative DNA-binding protein phosphatase 2C
  misc_feature (1)..(326): NCBI GI NO: 21693562 NR Description: DNA-binding protein phosphatase 2C
  misc_feature (19)..(326): NCBI GI NO: 20146108 NR Description: protein phosphatase 2C
  misc_feature (19)..(326): NCBI GI NO: 15224766 NR Description: protein phosphatase 2C
  misc_feature (1)..(325): NCBI GI NO: 37536524 NR Description: putative protein phosphatase-2C
  misc_feature (19)..(326): NCBI GI NO: 15226152 NR Description: protein phosphatase 2C
  misc_feature (21)..(325): NCBI GI NO: 10140768 NR Description: putative protein phosphatase-2C [Oryza sativa]
  misc_feature (19)..(324): NCBI GI NO: 15230495 NR Description: protein phosphatase 2C
  misc_feature (2)..(326): NCBI GI NO: 25352221 NR Description: phosphoprotein phosphatase (EC 3.1.3.16) 2C
  misc_feature (1)..(325): NCBI GI NO: 34894410 NR Description: putative protein phosphatase
MERVCENTVAVDFKQTKLNNFVPFIRSGEWSDIGGRDYMEDAHVCISDLAKNFGYDSVEDEVISFYGVFDGHNGKDAAHYVRDNLPRVIVEDADFPLELEKVVKRSFVQTDSKFAEKFSHHRGLSSGTTALTAMIFGRSLLVANAGDCRAVLSRRGTAIEMSKDHRPCCMNERKRVESLGGYVDDGYLNGQLAVTRALGDWHLEGMKEVGEPGGPLSAEPELKMVTLTKDDEFLIIGSDGIWDFFSSQNAVDFARRRLQDHNDLRLCCREIVDEAVRRGASDNLTAVMVSFHSDAPPPSRANKRTGRVTRSISAEGLHSLRVLLEGQ

SEQ ID NO: 24670 - DNA, 1613 bp, Zea mays subsp. mays
  misc_feature (1)..(1613): Ceres Seq. ID no. 12408053
acctggccgctccatctcgcgtccaacaatcaattcggcgtcgctctcgtctcatcagtcatcactccgcgactgcgagcgagcgagcgaggcccttccgcgccacgcgcaatggacgctgctctgctcgtgaccgtcctcgtccccgcggtggcggcgctcctcgtcctcgggtccggggccgcgtccgcctcgccgccgcgcgccttcttcgtgttcggggactccctcgtggacaacggcaacaacaactacctcatgaccacggcgcgggccgacgcgccgccctacgggatcgacttccccacgcacctgcccacggggcggttctcccaacgggctcaacatccccgacatcatcagcgagcacctcggctcccagcccgcgctgccgtacctcagccccgacctccgcggcgaccagctgctcgtcggcgccaacttcgcgtccgccggcgtcggcatcctcaacgacaccggcatacagttcgtgaacatcatcgggatcgggcagcagctgcacaacttccaggactaccagcagaggctggccgcgttcgtcggcgacgacgcggcgaggcaggtcgtgagcaatgcgctcgtcctcatcacgctcggcggcaacgacttcgtcaacaactactacctggtgcccttctccttccgctcccgccagttcgccatccaagactacgtcccgtacctcatctccgagtacaggaaaatcctcacgcggctgtacgagctcggggcccgtcgcgtggtggtgacgggcaccgggatgatcgggtgcgtgccggcggagctggccatgcacagcatcgacggcgagtgcgcgcgcgacctcacggaggcggccgacctcttcaacccgcagctggtgcagatgctctccgacctcaacgcggccatcggcggcgacgtcttcatcgccgccaacaccaaccgcctcagcttcgacttcatgttcaacccgcaggactacgggttcgtgacggccaaggtggcgtgctgcgggcagggcccgtacaacgggatcgggctgtgcacgccggcgtccaacgtgtgccccaaccgggacgtgtacgcgtactgggacgcgttccaccccacggagcgcgccaaccggatcatcgtcgcccagttcatgcacggctccaccgaccacatcagccccatgaacatcagcaccatcctcgccatggacaacaggggggactaactagtcccgccgcgtgctgcctccacccatctcgtcattggttggttcacgccaagaggttttgctgcattgcatgtgtcatggagctggtggataacaagttttcgttgcacctttttgtgatttattagatgacgtgaattagtggtgaattgagccttattagagtgggttaaattaatacagctgtcccaagtttctttgctccagcagattgtttggggacagggctagctaggaacttcagaaattgctaagcggtactacctagccagtccgtccgatcatttcaagaaaattctcttgcactttgtagtgtgatcctgaacttttgggtacaaggtaccgacgattcaatgccaatgtatattttggtggctggggcacagtg

SEQ ID NO: 24671 - protein, 450 aa, Zea mays subsp. mays
  peptide (1)..(450): Ceres Seq. ID no. 12408054
  misc_feature (38)..(117): NCBI GI NO: 32489520 NR Description: OSJNBa0043L24.11
  misc_feature (68)..(128): NCBI GI NO: 15229265 NR Description: putative GDSL-motif lipase/acylhydrolase
  misc_feature (50)..(127): NCBI GI NO: 37535146 NR Description: putative early nodulin gene (Enod) related protein
  misc_feature (50)..(127): NCBI GI NO: 22758315 NR Description: putative early nodulin gene (Enod) related protein
  misc_feature (68)..(117): NCBI GI NO: 15242808 NR Description: putative protein; protein id: At5g33370
  misc_feature (40)..(117): NCBI GI NO: 28071322 NR Description: P0705A05.30
  misc_feature (40)..(117): NCBI GI NO: 15235421 NR Description: Proline-rich APG - like protein
  misc_feature (42)..(117): NCBI GI NO: 15238814 NR Description: putative protein; protein id: At5g18430.1
  misc_feature (69)..(111): NCBI GI NO: 15227849 NR Description: putative GDSL-motif lipase/hydrolase
  misc_feature (38)..(111): NCBI GI NO: 34910808 NR Description: GDSL-motif lipase/hydrolase-like protein
TWPLHLASNNQFGVALVSSVITPRLRASERGPSAPRAMDAALLVTVLVPAVAALLVLGSGAASASPPRAFFVFGDSLVDNGNNNYLMTTARADAPPYGIDFPTHLPTGRFSQRAQHPRHHQRAPRLPARAAVPQPRPPRRPAARRRQLRVRRRRHPQRHRHTVREHHRDRAAAAQLPGLPAEAGRVRRRRRGEAGREQCARPHHARRQRLRQQLLPGALLLPLPPVRHPRLRPVPHLRVQENPHAAVRARGPSRGGDGHRDDRVRAGGAGHAQHRRRVRARPHGGGRPLQPAAGADALRPQRGHRRRRLHRRQHQPPQLRLHVQPAGLRVRDGQGGVLRAGPVQRDRAVHAGVQRVPQPGRVRVLGRVPPHGARQPDHRRPVHARLHRPHQPHEHQHHPRHGQQGGLTSPAACCLHPSRHWLVHAKRFCCIACVMELVDNKFSLHLFVIY

SEQ ID NO: 24672 - protein, 413 aa, Zea mays subsp. mays
  peptide (1)..(413): Ceres Seq. ID no. 12408055
  misc_feature (1)..(80): NCBI GI NO: 32489520 NR Description: OSJNBa0043L24.11
  misc_feature (31)..(91): NCBI GI NO: 15229265 NR Description: putative GDSL-motif lipase/acylhydrolase
  misc_feature (13)..(90): NCBI GI NO: 37535146 NR Description: putative early nodulin gene (Enod) related protein
  misc_feature (13)..(90): NCBI GI NO: 22758315 NR Description: putative early nodulin gene (Enod) related protein
  misc_feature (31)..(80): NCBI GI NO: 15242808 NR Description: putative protein; protein id: At5g33370
  misc_feature (3)..(80): NCBI GI NO: 28071322 NR Description: P0705A05.30
  misc_feature (3)..(80): NCBI GI NO: 15235421 NR Description: Proline-rich APG - like protein
  misc_feature (5)..(80): NCBI GI NO: 15238814 NR Description: putative protein; protein id: At5g18430.1
  misc_feature (32)..(74): NCBI GI NO: 15227849 NR Description: putative GDSL-motif lipase/hydrolase
  misc_feature (1)..(74): NCBI GI NO: 34910808 NR Description: GDSL-motif lipase/hydrolase-like protein
MDAALLVTVLVPAVAALLVLGSGAASASPPRAFFVFGDSLVDNGNNNYLMTTARADAPPYGIDFPTHLPTGRFSQRAQHPRHHQRAPRLPARAAVPQPRPPRRPAARRRQLRVRRRRHPQRHRHTVREHHRDRAAAAQLPGLPAEAGRVRRRRRGEAGREQCARPHHARRQRLRQQLLPGALLLPLPPVRHPRLRPVPHLRVQENPHAAVRARGPSRGGDGHRDDRVRAGGAGHAQHRRRVRARPHGGGRPLQPAAGADALRPQRGHRRRRLHRRQHQPPQLRLHVQPAGLRVRDGQGGVLRAGPVQRDRAVHAGVQRVPQPGRVRVLGRVPPHGARQPDHRRPVHARLHRPHQPHEHQHHPRHGQQGGLTSPAACCLHPSRHWLVHAKRFCCIACVMELVDNKFSLHLFVIY

SEQ ID NO: 24673 - protein, 364 aa, Zea mays subsp. mays
  peptide (1)..(364): Ceres Seq. ID no. 12408056
  misc_feature (1)..(31): NCBI GI NO: 32489520 NR Description: OSJNBa0043L24.11
  misc_feature (1)..(42): NCBI GI NO: 15229265 NR Description: putative GDSL-motif lipase/acylhydrolase
  misc_feature (1)..(41): NCBI GI NO: 37535146 NR Description: putative early nodulin gene (Enod) related protein
  misc_feature (1)..(41): NCBI GI NO: 22758315 NR Description: putative early nodulin gene (Enod) related protein
  misc_feature (1)..(31): NCBI GI NO: 15242808 NR Description: putative protein; protein id: At5g33370
  misc_feature (1)..(31): NCBI GI NO: 28071322 NR Description: P0705A05.30
  misc_feature (1)..(31): NCBI GI NO: 15235421 NR Description: Proline-rich APG - like protein
  misc_feature (1)..(31): NCBI GI NO: 15238814 NR Description: putative protein; protein id: At5g18430.1
  misc_feature (1)..(25): NCBI GI NO: 15227849 NR Description: putative GDSL-motif lipase/hydrolase
  misc_feature (1)..(25): NCBI GI NO: 34910808 NR Description: GDSL-motif lipase/hydrolase-like protein
MTTARADAPPYGIDFPTHLPTGRFSQRAQHPRHHQRAPRLPARAAVPQPRPPRRPAARRRQLRVRRRRHPQRHRHTVREHHRDRAAAAQLPGLPAEAGRVRRRRRGEAGREQCARPHHARRQRLRQQLLPGALLLPLPPVRHPRLRPVPHLRVQENPHAAVRARGPSRGGDGHRDDRVRAGGAGHAQHRRRVRARPHGGGRPLQPAAGADALRPQRGHRRRRLHRRQHQPPQLRLHVQPAGLRVRDGQGGVLRAGPVQRDRAVHAGVQRVPQPGRVRVLGRVPPHGARQPDHRRPVHARLHRPHQPHEHQHHPRHGQQGGLTSPAACCLHPSRHWLVHAKRFCCIACVMELVDNKFSLHLFVIY

SEQ ID NO: 24674 - DNA, 1467 bp, Zea mays subsp. mays
  misc_feature (1)..(1467): Ceres Seq. ID no. 12378238
agcatagcagcagcccattgcctgcctttcgcctctctctctctctctctctctctctctcacacacacaaccactcacactgccggttggtttcccttccgttgtggttggtgcgtacttagtggcggccggccatggcgcggaggaggggcttctcggcggtggtgccgccggcgtggctgccggcggtgctcctgtgcctggcaggcgcggcgtcgggcgagccgctgccgcagtactacaatgccatcttcagcttcggcgactccttctccgacacgggcaacttcgtcatcatcaactcgggcaagctgcccaacatgcccaagttcccgccgccgtacgcgaggtgctccaacggccgcctcgtcatcgacttcctggccgaggcgttcggtctcccgctgctccctccgtcggcgaacaagggcaccaacttcagccagggcgccaacttcgcggtgatgggcgcgacggcgcttgacctcaagtacttcaaggacaacaacgtgtggagcatcccgcccttcaacacgtccatgggcgtgcagctggagtggttccaggaggtgaagcgcagcatctgccccgacgaccccgccgcgtgccgcgccctgttcgggagggccctgttcgtgttcggcgagttcggcggcaacgactacagcttcgcgtggaaggcggactggtcgctggagaaggtgaagacgatggtgccggcggtggtggcgtcgctggtgggcggcgtggagcggctgctggacgagggcgcccgccacgtcgtggtgccgggcaacctccccgccggatgcatccccatcacgctcaccatgtacccgtccgaggaccgctccgagtacgacccgcgcaccggctgcctcaagaagtacaacagcgtcgcgctctaccacaacgccatgctccgcgtcgcgctcgaccgcctgcagcgccgccgcccggagtcccgcgtcgtctacgccgactactacacgccctacatacagttcgcgcgcacaccgcacctctacggctacaagcgcggcgctctgcgggcttgctgcggcggcggcgggccgtacaactacaacgtgagcgcgtcgtgcgggctccccggcgccaccacctgcgaggaccccgacgcgcacgtcagctgggacggcatccacctcaccgaggcgccctaccgcttcatcgccaacacctgggtcaagggcccctacgcgcacccgccgctcgccaccgtcgtgctcgaggacatggtcgactgatcctcttgtggtttggcacaagggaagagctgatatgtaacgtgaattccattcgttcatgtccatgtatattgggtaactaccggagcggagtaacaaaaaaaaatatatatgttagtcttttctgtttttttttcgtcgtgcacctgtgtgccgtgcagtcgcatagatcaatgaagaaaccactccagctgtttg

SEQ ID NO: 24675 - protein, 377 aa, Zea mays subsp. mays
  peptide (1)..(377): Ceres Seq. ID no. 12378239
  misc_feature (39)..(357): Pfam Name: Pfam Description:  GDSL-like Lipase/Acylhydrolase
  misc_feature (24)..(371): NCBI GI NO: 34903994 NR Description: unnamed protein product
  misc_feature (12)..(371): NCBI GI NO: 34903996 NR Description: unnamed protein product
  misc_feature (19)..(371): NCBI GI NO: 34903986 NR Description: unnamed protein product
  misc_feature (107)..(354): NCBI GI NO: 15237586 NR Description: lipase -like protein; protein id: At5g03980.1
  misc_feature (78)..(361): NCBI GI NO: 25405682 NR Description: hypothetical protein F15I1.7
  misc_feature (11)..(357): NCBI GI NO: 7486718 NR Description: hypothetical protein F8M12
  misc_feature (11)..(357): NCBI GI NO: 7486138 NR Description: hypothetical protein F25I24
  misc_feature (37)..(361): NCBI GI NO: 15220995 NR Description: lipase, putative; protein id: At1g53940.1
  misc_feature (240)..(365): NCBI GI NO: 15228721 NR Description: putative protein; protein id: At3g62280.1
  misc_feature (38)..(351): NCBI GI NO: 25404994 NR Description: protein T4O12.13 [imported] - Arabidopsis thaliana
MARRRGFSAVVPPAWLPAVLLCLAGAASGEPLPQYYNAIFSFGDSFSDTGNFVIINSGKLPNMPKFPPPYARCSNGRLVIDFLAEAFGLPLLPPSANKGTNFSQGANFAVMGATALDLKYFKDNNVWSIPPFNTSMGVQLEWFQEVKRSICPDDPAACRALFGRALFVFGEFGGNDYSFAWKADWSLEKVKTMVPAVVASLVGGVERLLDEGARHVVVPGNLPAGCIPITLTMYPSEDRSEYDPRTGCLKKYNSVALYHNAMLRVALDRLQRRRPESRVVYADYYTPYIQFARTPHLYGYKRGALRACCGGGGPYNYNVSASCGLPGATTCEDPDAHVSWDGIHLTEAPYRFIANTWVKGPYAHPPLATVVLEDMVD

SEQ ID NO: 24676 - protein, 315 aa, Zea mays subsp. mays
  peptide (1)..(315): Ceres Seq. ID no. 12378240
  misc_feature (1)..(295): Pfam Name: Pfam Description:  GDSL-like Lipase/Acylhydrolase
  misc_feature (1)..(309): NCBI GI NO: 34903994 NR Description: unnamed protein product
  misc_feature (1)..(309): NCBI GI NO: 34903996 NR Description: unnamed protein product
  misc_feature (1)..(309): NCBI GI NO: 34903986 NR Description: unnamed protein product
  misc_feature (45)..(292): NCBI GI NO: 15237586 NR Description: lipase -like protein; protein id: At5g03980.1
  misc_feature (16)..(299): NCBI GI NO: 25405682 NR Description: hypothetical protein F15I1.7
  misc_feature (1)..(295): NCBI GI NO: 7486718 NR Description: hypothetical protein F8M12
  misc_feature (1)..(295): NCBI GI NO: 7486138 NR Description: hypothetical protein F25I24
  misc_feature (1)..(299): NCBI GI NO: 15220995 NR Description: lipase, putative; protein id: At1g53940.1
  misc_feature (178)..(303): NCBI GI NO: 15228721 NR Description: putative protein; protein id: At3g62280.1
  misc_feature (1)..(289): NCBI GI NO: 25404994 NR Description: protein T4O12.13 [imported] - Arabidopsis thaliana
MPKFPPPYARCSNGRLVIDFLAEAFGLPLLPPSANKGTNFSQGANFAVMGATALDLKYFKDNNVWSIPPFNTSMGVQLEWFQEVKRSICPDDPAACRALFGRALFVFGEFGGNDYSFAWKADWSLEKVKTMVPAVVASLVGGVERLLDEGARHVVVPGNLPAGCIPITLTMYPSEDRSEYDPRTGCLKKYNSVALYHNAMLRVALDRLQRRRPESRVVYADYYTPYIQFARTPHLYGYKRGALRACCGGGGPYNYNVSASCGLPGATTCEDPDAHVSWDGIHLTEAPYRFIANTWVKGPYAHPPLATVVLEDMVD

SEQ ID NO: 24677 - protein, 267 aa, Zea mays subsp. mays
  peptide (1)..(267): Ceres Seq. ID no. 12378241
  misc_feature (1)..(247): Pfam Name: Pfam Description:  GDSL-like Lipase/Acylhydrolase
  misc_feature (1)..(261): NCBI GI NO: 34903994 NR Description: unnamed protein product
  misc_feature (1)..(261): NCBI GI NO: 34903996 NR Description: unnamed protein product
  misc_feature (1)..(261): NCBI GI NO: 34903986 NR Description: unnamed protein product
  misc_feature (1)..(244): NCBI GI NO: 15237586 NR Description: lipase -like protein; protein id: At5g03980.1
  misc_feature (1)..(251): NCBI GI NO: 25405682 NR Description: hypothetical protein F15I1.7
  misc_feature (1)..(247): NCBI GI NO: 7486718 NR Description: hypothetical protein F8M12
  misc_feature (1)..(247): NCBI GI NO: 7486138 NR Description: hypothetical protein F25I24
  misc_feature (1)..(251): NCBI GI NO: 15220995 NR Description: lipase, putative; protein id: At1g53940.1
  misc_feature (130)..(255): NCBI GI NO: 15228721 NR Description: putative protein; protein id: At3g62280.1
  misc_feature (1)..(241): NCBI GI NO: 25404994 NR Description: protein T4O12.13 [imported] - Arabidopsis thaliana
MGATALDLKYFKDNNVWSIPPFNTSMGVQLEWFQEVKRSICPDDPAACRALFGRALFVFGEFGGNDYSFAWKADWSLEKVKTMVPAVVASLVGGVERLLDEGARHVVVPGNLPAGCIPITLTMYPSEDRSEYDPRTGCLKKYNSVALYHNAMLRVALDRLQRRRPESRVVYADYYTPYIQFARTPHLYGYKRGALRACCGGGGPYNYNVSASCGLPGATTCEDPDAHVSWDGIHLTEAPYRFIANTWVKGPYAHPPLATVVLEDMVD

SEQ ID NO: 24678 - DNA, 1532 bp, Zea mays subsp. mays
  misc_feature (1)..(1532): Ceres Seq. ID no. 12410481
agagagtcagagactgagagactggaagcgcccgcgcgtgccggcgatggagagggacgtcgtgctctccgcacccgaggccgctgggtcctcgtcctcccccgcctcctcgtcgtactcctccttcgccgagaccagggtcatctgccgcgtgtgtcagaagcagttcgcgcagtacacttgcccccgctgtaacgcccggtactgctcgctctcgtgctacaagggtcatagtgttcaatgcactgaatccttcatgcgtgagaatgttatggacgagcttaagcagatgcaacctgaggatgaatcaaagaaaaagatgctagatatcctcaagcggctccacttggaagaagagatggcatcagatggtgaagatgagtccatgctatcagaggagcttattcaaaaagttatgtctggggaagagataaagctggaagacctctctgattgtgaaatcaaacgattccgtcaagctctggcctcaggtgagctcagtaagatgattgaaccgtggacaccttggtggaaaaaaccctcagccagatctatttcccttggcccggatggaagccagcttatcagacaagtaaacgcagaagacactgctgtaccatatccagatgcaaatactgaccaagaggctagcatcaacgaaatccctgaagggccagaatctcctctcccgtcactgaaacagttaacaaggacagagccatctcctttgcttgctgtccacttggttgacattctgtacagttactgcttcacacttcggctctacaacggtgattggcactcagatcctttgggtgcttccactgtcgccctgtcgatgtcgaaagtcatgggccaggatgctaaacctgagactgtacctgaagcactcgcagcctgcatcgaggagacatgctcaccagcttacaggcatactggtggtttcaggtttgctattggactcgtggacgatatcatcgccattctctccttgggacagaacgcacttatttgtgccctatgcgacttccatcgactcgttgaagttggtaagagcatgctcaaagtggagaaggtgggcaagacggagagggcacagggctctccaaagcttcgcagtgcagctaggaagctattcttcatgacttgttgggtccatgagcagccagatgaggcgtggccatctttagctcacatcgtccaggtgcagaaagcatctatggaggagttggagaccgggaattggaaggcggatagaaagagcaaaccacaatccgcggttcttatcgaggagctgtaggcatatggatgtaccactggaaactggatcgcgaagctctgtacccttgtgtatcgctcaggatgaatccaacgagagaccttgtccttgtaatgcagttagttgcttttgtgtacacttttttttttgaaaaaaattgtatttgttgaaatcctggttgaagcgatcctgctttactttgcttgttaagttgcgggctgatttaatccatgcgttggagcttatgcagttc

SEQ ID NO: 24679 - protein, 432 aa, Zea mays subsp. mays
  peptide (1)..(432): Ceres Seq. ID no. 12410482
  misc_feature (45)..(75): Pfam Name: Pfam Description:  HIT zinc finger
  misc_feature (25)..(432): NCBI GI NO: 15237537 NR Description: unknown protein; protein id: At5g63830.1
  misc_feature (291)..(432): NCBI GI NO: 37536148 NR Description: hypothetical protein
  misc_feature (16)..(107): NCBI GI NO: 37536148 NR Description: hypothetical protein
  misc_feature (14)..(432): NCBI GI NO: 34861831 NR Description: similar to Protein C11orf5 homolog (Protein FON)
  misc_feature (57)..(432): NCBI GI NO: 18044459 NR Description: open reading frame 6 [Mus musculus]
  misc_feature (57)..(432): NCBI GI NO: 7305357 NR Description: open reading frame 6
  misc_feature (57)..(432): NCBI GI NO: 26352237 NR Description: unnamed protein product [Mus musculus]
  misc_feature (49)..(432): NCBI GI NO: 7656936 NR Description: chromosome 11 open reading frame 5 [Homo sapiens]
  misc_feature (49)..(177): NCBI GI NO: 27469505 NR Description: Similar to chromosome 11 open reading frame 5
  misc_feature (46)..(128): NCBI GI NO: 23613640 NR Description: hypothetical protein [Plasmodium falciparum 3D7]
ESQRLRDWKRPRVPAMERDVVLSAPEAAGSSSSPASSSYSSFAETRVICRVCQKQFAQYTCPRCNARYCSLSCYKGHSVQCTESFMRENVMDELKQMQPEDESKKKMLDILKRLHLEEEMASDGEDESMLSEELIQKVMSGEEIKLEDLSDCEIKRFRQALASGELSKMIEPWTPWWKKPSARSISLGPDGSQLIRQVNAEDTAVPYPDANTDQEASINEIPEGPESPLPSLKQLTRTEPSPLLAVHLVDILYSYCFTLRLYNGDWHSDPLGASTVALSMSKVMGQDAKPETVPEALAACIEETCSPAYRHTGGFRFAIGLVDDIIAILSLGQNALICALCDFHRLVEVGKSMLKVEKVGKTERAQGSPKLRSAARKLFFMTCWVHEQPDEAWPSLAHIVQVQKASMEELETGNWKADRKSKPQSAVLIEEL

SEQ ID NO: 24680 - protein, 417 aa, Zea mays subsp. mays
  peptide (1)..(417): Ceres Seq. ID no. 12410483
  misc_feature (30)..(60): Pfam Name: Pfam Description:  HIT zinc finger
  misc_feature (10)..(417): NCBI GI NO: 15237537 NR Description: unknown protein; protein id: At5g63830.1
  misc_feature (276)..(417): NCBI GI NO: 37536148 NR Description: hypothetical protein
  misc_feature (1)..(92): NCBI GI NO: 37536148 NR Description: hypothetical protein
  misc_feature (1)..(417): NCBI GI NO: 34861831 NR Description: similar to Protein C11orf5 homolog (Protein FON)
  misc_feature (42)..(417): NCBI GI NO: 18044459 NR Description: open reading frame 6 [Mus musculus]
  misc_feature (42)..(417): NCBI GI NO: 7305357 NR Description: open reading frame 6
  misc_feature (42)..(417): NCBI GI NO: 26352237 NR Description: unnamed protein product [Mus musculus]
  misc_feature (34)..(417): NCBI GI NO: 7656936 NR Description: chromosome 11 open reading frame 5 [Homo sapiens]
  misc_feature (34)..(162): NCBI GI NO: 27469505 NR Description: Similar to chromosome 11 open reading frame 5
  misc_feature (31)..(113): NCBI GI NO: 23613640 NR Description: hypothetical protein [Plasmodium falciparum 3D7]
MERDVVLSAPEAAGSSSSPASSSYSSFAETRVICRVCQKQFAQYTCPRCNARYCSLSCYKGHSVQCTESFMRENVMDELKQMQPEDESKKKMLDILKRLHLEEEMASDGEDESMLSEELIQKVMSGEEIKLEDLSDCEIKRFRQALASGELSKMIEPWTPWWKKPSARSISLGPDGSQLIRQVNAEDTAVPYPDANTDQEASINEIPEGPESPLPSLKQLTRTEPSPLLAVHLVDILYSYCFTLRLYNGDWHSDPLGASTVALSMSKVMGQDAKPETVPEALAACIEETCSPAYRHTGGFRFAIGLVDDIIAILSLGQNALICALCDFHRLVEVGKSMLKVEKVGKTERAQGSPKLRSAARKLFFMTCWVHEQPDEAWPSLAHIVQVQKASMEELETGNWKADRKSKPQSAVLIEEL

SEQ ID NO: 24681 - protein, 347 aa, Zea mays subsp. mays
  peptide (1)..(347): Ceres Seq. ID no. 12410484
  misc_feature (1)..(347): NCBI GI NO: 15237537 NR Description: unknown protein; protein id: At5g63830.1
  misc_feature (206)..(347): NCBI GI NO: 37536148 NR Description: hypothetical protein
  misc_feature (1)..(22): NCBI GI NO: 37536148 NR Description: hypothetical protein
  misc_feature (1)..(347): NCBI GI NO: 34861831 NR Description: similar to Protein C11orf5 homolog (Protein FON)
  misc_feature (1)..(347): NCBI GI NO: 18044459 NR Description: open reading frame 6 [Mus musculus]
  misc_feature (1)..(347): NCBI GI NO: 7305357 NR Description: open reading frame 6
  misc_feature (1)..(347): NCBI GI NO: 26352237 NR Description: unnamed protein product [Mus musculus]
  misc_feature (1)..(347): NCBI GI NO: 7656936 NR Description: chromosome 11 open reading frame 5 [Homo sapiens]
  misc_feature (1)..(92): NCBI GI NO: 27469505 NR Description: Similar to chromosome 11 open reading frame 5
  misc_feature (1)..(43): NCBI GI NO: 23613640 NR Description: hypothetical protein [Plasmodium falciparum 3D7]
MRENVMDELKQMQPEDESKKKMLDILKRLHLEEEMASDGEDESMLSEELIQKVMSGEEIKLEDLSDCEIKRFRQALASGELSKMIEPWTPWWKKPSARSISLGPDGSQLIRQVNAEDTAVPYPDANTDQEASINEIPEGPESPLPSLKQLTRTEPSPLLAVHLVDILYSYCFTLRLYNGDWHSDPLGASTVALSMSKVMGQDAKPETVPEALAACIEETCSPAYRHTGGFRFAIGLVDDIIAILSLGQNALICALCDFHRLVEVGKSMLKVEKVGKTERAQGSPKLRSAARKLFFMTCWVHEQPDEAWPSLAHIVQVQKASMEELETGNWKADRKSKPQSAVLIEEL

SEQ ID NO: 24682 - DNA, 1228 bp, Zea mays subsp. mays
  misc_feature (1)..(1228): Ceres Seq. ID no. 12352148
ctattcctcagctcctggaccggccatggccgcaccttccggcacgatgcgcgccgtgcagtacgacagatacggcggaggagcacgggggctcaagcatgtggaggtgccgatcccgtcgccgaagaaaggcgaggtgctcatcaggatggaggccaccagcatcaacgtcgtcgactggaagttccagaacggcttcgcgcggcccttcatgcccaggaggttccctttcatctctggtttcgacctagcaggagaggtcgtagagttgggtgctggagtgagcagcttcaaaccaggggataaggtgatcgccatcaacttcccgaacggcggagggctcgccgagtacgcggtcgcgtcagcgtctcgtacagccgcaaggccgccggaggtgtcggccgtcgaaggtgtctgcgtgccgatcgccgcagtcaccgcgctcgggtcgctgcggacagccggggtcacagtcacactggacgacccggctcgcgcccccgccacgcccaagaacgtgctggtcaccgcggcctccggcgccgtcggccacttcgccgtgcagctcgccaggatgggcggccacaacgtcacggccacctgcggcgcgcgcaacctcggcctggtccggagcctcggcgccgacgaggcgctggactacaagacccccgagggcgccaagctgcggagcccctccggcaggaagtacgacgcggtggtgcactgcgccgcgaaggggctcccgtggtccgtgttcaggcccgtgctcgccgcctcgggcacggtcgtcgacatcacgccagggttcgtggccgtcgtcaccgcgatcctccaggtggcgaccttctccaagaagaggctggtgccgctcatagtgacgcccaagaaggaggagatggagctgctgctgggcatgctgaagcagggtaggctcaagacggtcatagattcccggcacccgctgggcagcgctcacgaaggctgggccaagagcatgagcggccacgccaccggcaaggtcgtcatagagatcggagccgcgcaaccataataatagtgcagcaatatattgattcaaaaaataattatgaattttgtaatttttagatctataatttctatatttttttgttcatgaattatgtatttttatttaaaatttatgaatcatgtatttttatttttatatgaattatgtatttttactagatgaatgcacgtgcgttgc

SEQ ID NO: 24683 - protein, 349 aa, Zea mays subsp. mays
  peptide (1)..(349): Ceres Seq. ID no. 12352149
  misc_feature (16)..(343): NCBI GI NO: 12484050 NR Description: quinone-oxidoreductase QR1
  misc_feature (16)..(343): NCBI GI NO: 15235549 NR Description: putative protein; protein id: At4g13010
  misc_feature (16)..(343): NCBI GI NO: 38016531 NR Description: fiber quinone-oxidoreductase
  misc_feature (16)..(343): NCBI GI NO: 24370984 NR Description: quinone-oxidoreductase homologue
  misc_feature (15)..(344): NCBI GI NO: 38346442 NR Description: OSJNBa0018J19.3
  misc_feature (9)..(344): NCBI GI NO: 38346453 NR Description: OSJNBa0018J19.14
  misc_feature (15)..(344): NCBI GI NO: 38346450 NR Description: OSJNBa0018J19.11
  misc_feature (16)..(298): NCBI GI NO: 5701738 NR Description: LEDI-4 protein [Lithospermum erythrorhizon]
  misc_feature (16)..(342): NCBI GI NO: 23039352 NR Description: hypothetical protein
  misc_feature (2)..(344): NCBI GI NO: 21223777 NR Description: putative zinc-binding oxidoreductase
YSSAPGPAMAAPSGTMRAVQYDRYGGGARGLKHVEVPIPSPKKGEVLIRMEATSINVVDWKFQNGFARPFMPRRFPFISGFDLAGEVVELGAGVSSFKPGDKVIAINFPNGGGLAEYAVASASRTAARPPEVSAVEGVCVPIAAVTALGSLRTAGVTVTLDDPARAPATPKNVLVTAASGAVGHFAVQLARMGGHNVTATCGARNLGLVRSLGADEALDYKTPEGAKLRSPSGRKYDAVVHCAAKGLPWSVFRPVLAASGTVVDITPGFVAVVTAILQVATFSKKRLVPLIVTPKKEEMELLLGMLKQGRLKTVIDSRHPLGSAHEGWAKSMSGHATGKVVIEIGAAQP

SEQ ID NO: 24684 - protein, 341 aa, Zea mays subsp. mays
  peptide (1)..(341): Ceres Seq. ID no. 12352150
  misc_feature (8)..(335): NCBI GI NO: 12484050 NR Description: quinone-oxidoreductase QR1
  misc_feature (8)..(335): NCBI GI NO: 15235549 NR Description: putative protein; protein id: At4g13010
  misc_feature (8)..(335): NCBI GI NO: 38016531 NR Description: fiber quinone-oxidoreductase
  misc_feature (8)..(335): NCBI GI NO: 24370984 NR Description: quinone-oxidoreductase homologue
  misc_feature (7)..(336): NCBI GI NO: 38346442 NR Description: OSJNBa0018J19.3
  misc_feature (1)..(336): NCBI GI NO: 38346453 NR Description: OSJNBa0018J19.14
  misc_feature (7)..(336): NCBI GI NO: 38346450 NR Description: OSJNBa0018J19.11
  misc_feature (8)..(290): NCBI GI NO: 5701738 NR Description: LEDI-4 protein [Lithospermum erythrorhizon]
  misc_feature (8)..(334): NCBI GI NO: 23039352 NR Description: hypothetical protein
  misc_feature (1)..(336): NCBI GI NO: 21223777 NR Description: putative zinc-binding oxidoreductase
MAAPSGTMRAVQYDRYGGGARGLKHVEVPIPSPKKGEVLIRMEATSINVVDWKFQNGFARPFMPRRFPFISGFDLAGEVVELGAGVSSFKPGDKVIAINFPNGGGLAEYAVASASRTAARPPEVSAVEGVCVPIAAVTALGSLRTAGVTVTLDDPARAPATPKNVLVTAASGAVGHFAVQLARMGGHNVTATCGARNLGLVRSLGADEALDYKTPEGAKLRSPSGRKYDAVVHCAAKGLPWSVFRPVLAASGTVVDITPGFVAVVTAILQVATFSKKRLVPLIVTPKKEEMELLLGMLKQGRLKTVIDSRHPLGSAHEGWAKSMSGHATGKVVIEIGAAQP

SEQ ID NO: 24685 - protein, 334 aa, Zea mays subsp. mays
  peptide (1)..(334): Ceres Seq. ID no. 12352151
  misc_feature (1)..(328): NCBI GI NO: 12484050 NR Description: quinone-oxidoreductase QR1
  misc_feature (1)..(328): NCBI GI NO: 15235549 NR Description: putative protein; protein id: At4g13010
  misc_feature (1)..(328): NCBI GI NO: 38016531 NR Description: fiber quinone-oxidoreductase
  misc_feature (1)..(328): NCBI GI NO: 24370984 NR Description: quinone-oxidoreductase homologue
  misc_feature (1)..(329): NCBI GI NO: 38346442 NR Description: OSJNBa0018J19.3
  misc_feature (1)..(329): NCBI GI NO: 38346453 NR Description: OSJNBa0018J19.14
  misc_feature (1)..(329): NCBI GI NO: 38346450 NR Description: OSJNBa0018J19.11
  misc_feature (1)..(283): NCBI GI NO: 5701738 NR Description: LEDI-4 protein [Lithospermum erythrorhizon]
  misc_feature (1)..(327): NCBI GI NO: 23039352 NR Description: hypothetical protein
  misc_feature (1)..(329): NCBI GI NO: 21223777 NR Description: putative zinc-binding oxidoreductase
MRAVQYDRYGGGARGLKHVEVPIPSPKKGEVLIRMEATSINVVDWKFQNGFARPFMPRRFPFISGFDLAGEVVELGAGVSSFKPGDKVIAINFPNGGGLAEYAVASASRTAARPPEVSAVEGVCVPIAAVTALGSLRTAGVTVTLDDPARAPATPKNVLVTAASGAVGHFAVQLARMGGHNVTATCGARNLGLVRSLGADEALDYKTPEGAKLRSPSGRKYDAVVHCAAKGLPWSVFRPVLAASGTVVDITPGFVAVVTAILQVATFSKKRLVPLIVTPKKEEMELLLGMLKQGRLKTVIDSRHPLGSAHEGWAKSMSGHATGKVVIEIGAAQP

SEQ ID NO: 24686 - DNA, 1768 bp, Zea mays subsp. mays
  misc_feature (1)..(1768): Ceres Seq. ID no. 12381060
  misc_feature (57)..(57): n is a, c, t, g, unknown, or other
aagccaggccactctaccaccgcacgctcaactcaaacccccgtcccgaacgcagangaccggcggcagcggcggggtgtgtgtggactggactgaaaccaattgccatcaatccaggcatccatccatccacccgcacccgccccgctgacggcggcaatggcccggctcgtgctctccgagtgctgcggcctcgcgccgctccgccgcctgcgcgccggccggggcgccattgcggcgccgtcaccccccgcgctctccgcggcgccgcgccgtcgtcccgcgtccgcgtccatccaccgcgactgggcgctccgcgtctccgcgcccacccgcctcgcctccgccgccgtcgaggaggacaagccgagcgccgcgccggggcaggaggagggcgcggcggccggcggggagttcgacccgggggcgccgccgccgttcgggctggccgagatccgcgccgccatccccaagcactgctgggtcaaggacccctggcgctccatgagctacgtgctgcgcgacgtcgccgtcgtcctgggcctcgccgcagcggccgcgcgcctcgacagctggctcgtctggccgctctactgggccgcgcagggcaccatgttctgggcgctcttcgtcctcggccacgactgtggacacgggagcttctcgaacaaccccaagttaaacagcgtcgtcggccacatactccattcctccattcttgtgccataccacggatggaggattagccacaggacgcaccatcaaaaccacggtcacgttgagaaggacgagtcctggcacccgctaccagagaggctgtacaaaagcctggactttatgactaggaaactgcggttcaccatgccgttccccttgctcgcgttcccgttatacttgtttgcgaggagtccagggaagtcaggatcacacttcaacccaggcagtgatctgttccaacctactgaaaagaatgatatcataacatccacggcgtcctggctggccatggttggtgttctggccggtctcacctttctgatgggtcctgttccgatgctaaagctctacggagtcccatacttggtatttgttgcttggctagatatggtcacatacttgcaccatcatggccacgaagacaagcttccctggtaccgtggaaaggagtggagttatctgcgtggaggactgacgacgctcgaccgggactacggatggatcaacaacatccatcacgacatcggaactcatgtcatccatcacctcttccctcagatcccgcattaccatctcatcgaggcgaccgaggcagcaaagccggttcttggcaagtactacaaagagccgaagaactcgggtgctctgccgtggcatctattccgggtgctggcacagagcttgaagcaagaccactatgtcagtcacaccggagatgtggtctactaccaagctgagtcgaaaacgagcacctctgcacaaaaatccgattgacagggagtatagagcgtgtagagtgttcttcatttttctcggggagggcctgtgcctgaagacctgaccagcctccacctctgattagcgtgagtacatgggtacgtcgactcaagaacgtaagctggcgaagtagtgccatgtatgtatggagagggttaaatgtaattctttccaatggtccaaggcggatgctgcttccgatgtagcagcatgcgattctttggacaagatgtatactattacagtgaagagtgaaaaaaagagagagttagct

SEQ ID NO: 24687 - protein, 443 aa, Zea mays subsp. mays
  peptide (1)..(443): Ceres Seq. ID no. 12381061
  misc_feature (145)..(389): Pfam Name: Pfam Description:  Fatty acid desaturase
  misc_feature (1)..(443): NCBI GI NO: 7433277 NR Description: omega-3 fatty acid desaturase (EC 1
  misc_feature (50)..(443): NCBI GI NO: 7433278 NR Description: omega-3 fatty acid desaturase (EC 1
  misc_feature (10)..(440): NCBI GI NO: 1345971 NR Description: Omega-3 fatty acid desaturase
  misc_feature (71)..(443): NCBI GI NO: 21668465 NR Description: plastid omega-3 fatty acid desaturase
  misc_feature (1)..(432): NCBI GI NO: 1754795 NR Description: omega-3 fatty acid desaturase
  misc_feature (1)..(442): NCBI GI NO: 1345970 NR Description: Omega-3 fatty acid desaturase
  misc_feature (1)..(436): NCBI GI NO: 7433276 NR Description: omega-3 fatty acid desaturase (EC 1
  misc_feature (1)..(432): NCBI GI NO: 7433274 NR Description: omega-3 fatty acid desaturase (EC 1
  misc_feature (1)..(430): NCBI GI NO: 6752907 NR Description: omega-3 fatty acid desaturase [Capsicum annuum]
  misc_feature (1)..(435): NCBI GI NO: 23345023 NR Description: omega-3 fatty acid desaturase [Betula pendula]
MARLVLSECCGLAPLRRLRAGRGAIAAPSPPALSAAPRRRPASASIHRDWALRVSAPTRLASAAVEEDKPSAAPGQEEGAAAGGEFDPGAPPPFGLAEIRAAIPKHCWVKDPWRSMSYVLRDVAVVLGLAAAAARLDSWLVWPLYWAAQGTMFWALFVLGHDCGHGSFSNNPKLNSVVGHILHSSILVPYHGWRISHRTHHQNHGHVEKDESWHPLPERLYKSLDFMTRKLRFTMPFPLLAFPLYLFARSPGKSGSHFNPGSDLFQPTEKNDIITSTASWLAMVGVLAGLTFLMGPVPMLKLYGVPYLVFVAWLDMVTYLHHHGHEDKLPWYRGKEWSYLRGGLTTLDRDYGWINNIHHDIGTHVIHHLFPQIPHYHLIEATEAAKPVLGKYYKEPKNSGALPWHLFRVLAQSLKQDHYVSHTGDVVYYQAESKTSTSAQKSD

SEQ ID NO: 24688 - protein, 328 aa, Zea mays subsp. mays
  peptide (1)..(328): Ceres Seq. ID no. 12381062
  misc_feature (30)..(274): Pfam Name: Pfam Description:  Fatty acid desaturase
  misc_feature (1)..(328): NCBI GI NO: 7433277 NR Description: omega-3 fatty acid desaturase (EC 1
  misc_feature (1)..(328): NCBI GI NO: 7433278 NR Description: omega-3 fatty acid desaturase (EC 1
  misc_feature (1)..(325): NCBI GI NO: 1345971 NR Description: Omega-3 fatty acid desaturase
  misc_feature (1)..(328): NCBI GI NO: 21668465 NR Description: plastid omega-3 fatty acid desaturase
  misc_feature (1)..(317): NCBI GI NO: 1754795 NR Description: omega-3 fatty acid desaturase
  misc_feature (1)..(327): NCBI GI NO: 1345970 NR Description: Omega-3 fatty acid desaturase
  misc_feature (1)..(321): NCBI GI NO: 7433276 NR Description: omega-3 fatty acid desaturase (EC 1
  misc_feature (1)..(317): NCBI GI NO: 7433274 NR Description: omega-3 fatty acid desaturase (EC 1
  misc_feature (1)..(315): NCBI GI NO: 6752907 NR Description: omega-3 fatty acid desaturase [Capsicum annuum]
  misc_feature (1)..(320): NCBI GI NO: 23345023 NR Description: omega-3 fatty acid desaturase [Betula pendula]
MSYVLRDVAVVLGLAAAAARLDSWLVWPLYWAAQGTMFWALFVLGHDCGHGSFSNNPKLNSVVGHILHSSILVPYHGWRISHRTHHQNHGHVEKDESWHPLPERLYKSLDFMTRKLRFTMPFPLLAFPLYLFARSPGKSGSHFNPGSDLFQPTEKNDIITSTASWLAMVGVLAGLTFLMGPVPMLKLYGVPYLVFVAWLDMVTYLHHHGHEDKLPWYRGKEWSYLRGGLTTLDRDYGWINNIHHDIGTHVIHHLFPQIPHYHLIEATEAAKPVLGKYYKEPKNSGALPWHLFRVLAQSLKQDHYVSHTGDVVYYQAESKTSTSAQKSD

SEQ ID NO: 24689 - protein, 292 aa, Zea mays subsp. mays
  peptide (1)..(292): Ceres Seq. ID no. 12381063
  misc_feature (1)..(238): Pfam Name: Pfam Description:  Fatty acid desaturase
  misc_feature (1)..(292): NCBI GI NO: 7433277 NR Description: omega-3 fatty acid desaturase (EC 1
  misc_feature (1)..(292): NCBI GI NO: 7433278 NR Description: omega-3 fatty acid desaturase (EC 1
  misc_feature (1)..(289): NCBI GI NO: 1345971 NR Description: Omega-3 fatty acid desaturase
  misc_feature (1)..(292): NCBI GI NO: 21668465 NR Description: plastid omega-3 fatty acid desaturase
  misc_feature (1)..(281): NCBI GI NO: 1754795 NR Description: omega-3 fatty acid desaturase
  misc_feature (1)..(291): NCBI GI NO: 1345970 NR Description: Omega-3 fatty acid desaturase
  misc_feature (1)..(285): NCBI GI NO: 7433276 NR Description: omega-3 fatty acid desaturase (EC 1
  misc_feature (1)..(281): NCBI GI NO: 7433274 NR Description: omega-3 fatty acid desaturase (EC 1
  misc_feature (1)..(279): NCBI GI NO: 6752907 NR Description: omega-3 fatty acid desaturase [Capsicum annuum]
  misc_feature (1)..(284): NCBI GI NO: 23345023 NR Description: omega-3 fatty acid desaturase [Betula pendula]
MFWALFVLGHDCGHGSFSNNPKLNSVVGHILHSSILVPYHGWRISHRTHHQNHGHVEKDESWHPLPERLYKSLDFMTRKLRFTMPFPLLAFPLYLFARSPGKSGSHFNPGSDLFQPTEKNDIITSTASWLAMVGVLAGLTFLMGPVPMLKLYGVPYLVFVAWLDMVTYLHHHGHEDKLPWYRGKEWSYLRGGLTTLDRDYGWINNIHHDIGTHVIHHLFPQIPHYHLIEATEAAKPVLGKYYKEPKNSGALPWHLFRVLAQSLKQDHYVSHTGDVVYYQAESKTSTSAQKSD

SEQ ID NO: 24690 - DNA, 1298 bp, Zea mays subsp. mays
  misc_feature (1)..(1298): Ceres Seq. ID no. 12410473
acaatattattggactattcctaacacaacggaggccataggatgggatggtcatctataaatacgtagcccggcgcagccttctttggagcagggagaagaacacagggcacacgcacggcacgcagatacatatagagagaggttagctatagcttgcacatctatttaactaactaactaactggctagctagctcgatcggcagagcaaagcgaaagcagcaagaagcaaagcaatggagaaccctgcgagtgtgctagttctaccagcgcagttcaccaaactcaccttccgaaacctgtacatccgccgggccgggccgggcagcagggagataaccgaggagggcaggtgcgacctggacaagagatacgtgagtgacttccccgtctacgacggccgcggccccgacgccagccttgtggcccgcgtgcaggggatcaccagcgaaatcgggaacgcgcaccaactgttcgtcgttgttttcgacaccgacaggctcaagggctccacgctcgtcaccaatggcgtgataacggccgggtctgacgagtgggcgatctacggcggaaccggggtgtttgccatggcgaggggcgtcataaggagaaggtatctcgccgacagggccggcgggaacactgatgagctcaacatggatgtcttctgccggccgtttggctcacagtcagagctgcaagataagatgcaggtgcaggggcagggctctagcgtcaccaagattggactatggggtggaccgggagggtcggcacaggacatcacggcggagcggccgccgcagcgtctgcacagcgtcaccgttcgtgctggcgtcgccgtcgactccatcgagttcacctatactgacagcgcttggcagaggcgcgccgctgggcgatggggtggactcgggggcaatgttcgaacgatcgaccttggcgacgccgaggatgtcagggaagtctcgggaacatacggcgcatttgaaggtgccactacgctgacctcgctcaggctcgtcaccagcagcagaacctggggcccctggggtgtcgagaacgggacgcgtttctccgtcacggcgcccatcggcagcagcatcgtgggattctatgcgcgggcgggaaccaggctcgtcgatgctatcggtgtttacttgcgtcagatttaattcgaataatagcaggggagctactgctagctacgtacctgctccatcctccattatcctttatttcaattcgctcatcatcgtcgtgtgtaaattaaataaataaagctcttgtgcccat

SEQ ID NO: 24691 - protein, 312 aa, Zea mays subsp. mays
  peptide (1)..(312): Ceres Seq. ID no. 12410474
  misc_feature (178)..(310): Pfam Name: Pfam Description:  Jacalin-like lectin domain
  misc_feature (5)..(312): NCBI GI NO: 9313027 NR Description: beta-glucosidase aggregating factor precursor
  misc_feature (13)..(312): NCBI GI NO: 7489383 NR Description: jacalin homolog - barley
  misc_feature (13)..(312): NCBI GI NO: 7489385 NR Description: jakalin homolog - barley
  misc_feature (13)..(298): NCBI GI NO: 7489384 NR Description: jacalin homolog - barley
  misc_feature (15)..(308): NCBI GI NO: 16151819 NR Description: VER2 [Triticum aestivum]
  misc_feature (48)..(309): NCBI GI NO: 7489661 NR Description: benzothiadiazole-induced protein
  misc_feature (48)..(310): NCBI GI NO: 21311647 NR Description: hessian fly response gene 1 protein
  misc_feature (166)..(310): NCBI GI NO: 34915016 NR Description: putative Mannose-Binding Rice Lectin
  misc_feature (166)..(309): NCBI GI NO: 134190 NR Description: Salt-stress induced protein (Salt protein)
  misc_feature (166)..(309): NCBI GI NO: 34895152 NR Description: Mannose-Binding Rice Lectin
MENPASVLVLPAQFTKLTFRNLYIRRAGPGSREITEEGRCDLDKRYVSDFPVYDGRGPDASLVARVQGITSEIGNAHQLFVVVFDTDRLKGSTLVTNGVITAGSDEWAIYGGTGVFAMARGVIRRRYLADRAGGNTDELNMDVFCRPFGSQSELQDKMQVQGQGSSVTKIGLWGGPGGSAQDITAERPPQRLHSVTVRAGVAVDSIEFTYTDSAWQRRAAGRWGGLGGNVRTIDLGDAEDVREVSGTYGAFEGATTLTSLRLVTSSRTWGPWGVENGTRFSVTAPIGSSIVGFYARAGTRLVDAIGVYLRQI

SEQ ID NO: 24692 - protein, 195 aa, Zea mays subsp. mays
  peptide (1)..(195): Ceres Seq. ID no. 12410475
  misc_feature (61)..(193): Pfam Name: Pfam Description:  Jacalin-like lectin domain
  misc_feature (1)..(195): NCBI GI NO: 9313027 NR Description: beta-glucosidase aggregating factor precursor
  misc_feature (1)..(195): NCBI GI NO: 7489383 NR Description: jacalin homolog - barley
  misc_feature (1)..(195): NCBI GI NO: 7489385 NR Description: jakalin homolog - barley
  misc_feature (1)..(181): NCBI GI NO: 7489384 NR Description: jacalin homolog - barley
  misc_feature (1)..(191): NCBI GI NO: 16151819 NR Description: VER2 [Triticum aestivum]
  misc_feature (1)..(192): NCBI GI NO: 7489661 NR Description: benzothiadiazole-induced protein
  misc_feature (1)..(193): NCBI GI NO: 21311647 NR Description: hessian fly response gene 1 protein
  misc_feature (49)..(193): NCBI GI NO: 34915016 NR Description: putative Mannose-Binding Rice Lectin
  misc_feature (49)..(192): NCBI GI NO: 134190 NR Description: Salt-stress induced protein (Salt protein)
  misc_feature (49)..(192): NCBI GI NO: 34895152 NR Description: Mannose-Binding Rice Lectin
MARGVIRRRYLADRAGGNTDELNMDVFCRPFGSQSELQDKMQVQGQGSSVTKIGLWGGPGGSAQDITAERPPQRLHSVTVRAGVAVDSIEFTYTDSAWQRRAAGRWGGLGGNVRTIDLGDAEDVREVSGTYGAFEGATTLTSLRLVTSSRTWGPWGVENGTRFSVTAPIGSSIVGFYARAGTRLVDAIGVYLRQI

SEQ ID NO: 24693 - protein, 172 aa, Zea mays subsp. mays
  peptide (1)..(172): Ceres Seq. ID no. 12410476
  misc_feature (38)..(170): Pfam Name: Pfam Description:  Jacalin-like lectin domain
  misc_feature (1)..(172): NCBI GI NO: 9313027 NR Description: beta-glucosidase aggregating factor precursor
  misc_feature (1)..(172): NCBI GI NO: 7489383 NR Description: jacalin homolog - barley
  misc_feature (1)..(172): NCBI GI NO: 7489385 NR Description: jakalin homolog - barley
  misc_feature (1)..(158): NCBI GI NO: 7489384 NR Description: jacalin homolog - barley
  misc_feature (1)..(168): NCBI GI NO: 16151819 NR Description: VER2 [Triticum aestivum]
  misc_feature (1)..(169): NCBI GI NO: 7489661 NR Description: benzothiadiazole-induced protein
  misc_feature (1)..(170): NCBI GI NO: 21311647 NR Description: hessian fly response gene 1 protein
  misc_feature (26)..(170): NCBI GI NO: 34915016 NR Description: putative Mannose-Binding Rice Lectin
  misc_feature (26)..(169): NCBI GI NO: 134190 NR Description: Salt-stress induced protein (Salt protein)
  misc_feature (26)..(169): NCBI GI NO: 34895152 NR Description: Mannose-Binding Rice Lectin
MDVFCRPFGSQSELQDKMQVQGQGSSVTKIGLWGGPGGSAQDITAERPPQRLHSVTVRAGVAVDSIEFTYTDSAWQRRAAGRWGGLGGNVRTIDLGDAEDVREVSGTYGAFEGATTLTSLRLVTSSRTWGPWGVENGTRFSVTAPIGSSIVGFYARAGTRLVDAIGVYLRQI

SEQ ID NO: 24694 - DNA, 1654 bp, Zea mays subsp. mays
  misc_feature (1)..(1654): Ceres Seq. ID no. 12367905
aaaccacgcgaacaagaacaaccaagatgacgcgctctcctctggctctcgccctactgctcctctgcgccgccggcgccgcggcggccgtgccgcggtaccgcgaggcgccgcacttcaccaactcggcggcggcgcagtgcccgccgccgctgcagccgtcggacgcggacgcggcgtgctcgccgcacgcggcggtgcacgtcgccatgacgctggacgcgtcgtacctgcgcggcaccatggcggccgtgctctccgtgctgcgccacgcgtcgtgcccggagtccatccacttccacttcatcgcctccgcctcctccgggtccagtgcgacggcggaggcgctcagggccacggtgcgcgcgtcgttcccgtcgctggcgttccgggtgtacccgttcgccgacgaggcccgcgtggcggggctcatctccacctccatccggggcgcgctggaccgcccgctcaactacgcgcgctcctacctcgcgtccacgctgcccgcctgcgtgcgccgcgtcgtgtacctcgactccgacgtcgtgctcaccgacgacatcgccgccctcgccgccaccccgctcccgggggaggagggcacggccgtggcggcgccccagtactgcggcgccaacttcaccgcctacttcacgccgggcttctgggcgtcccccgcgctctcctccgccttcgccggccgccgcgcctgctacttcaacacgggcgtcatggtgctcgacctcgcgcgctggcgccgcgcgggatacacggcgcagatcgaggagtggatggagctgcagaagcgggtgcgcatctacgagctgggctcgctgccgcccttcctgctcgtcttcgccggcaggatcgcgtccgtcgaccaccgatggaaccagcacggcctcggcggggacaactaccgcggcctctgccgcggcctgcacgccggcgccgtcagcctgctgcactggagcggcaaggggaagccctgggaccgcctggacgccggaaggccgtgcccgctcgacgccgtctgggccaagtacgacctgctccggccggccgccgacatcgagacctcgtgaacacaacgacggcgttcgatcgaccgctcgtttcactttttgttcggtttagaagcacgtgctcttcgttgttttgttgatctaggctagatattggtagatcgatcatcagggtgttcatgtgaactgtacatattgttgctaactttctcggaaaagtttagaccgcttgcacaaattctagattcagaaaaaaaatagtactactcaaaagttggccaaatggtattgctccaagaaatctagatataacaaattggtggatctaaggtcagaatcaaggtgaagctctcaagtggcgcttcgctagcacaaaattagtggacttggtgaaaattgtacgaagaaaaaagatggtcaagaatagaagagactattagcaccaaaattgtcctccactagatctaaacaaaaaacatagtcattgcctcattggtagaagggactattagccaaaaagttttttttcccattgaatcttagatccggtagtgcatctgttctaaacaagctcttgagttttcagtttcgctctattaccttcgataagaaattcagaagcatcgttt

SEQ ID NO: 24695 - protein, 387 aa, Zea mays subsp. mays
  peptide (1)..(387): Ceres Seq. ID no. 12367906
  misc_feature (18)..(334): NCBI GI NO: 29247944 NR Description: GLP_26_54603_52153 [Giardia lamblia ATCC 50803]
NHANKNNQDDALSSGSRPTAPLRRRRRGGRAAVPRGAALHQLGGGAVPAAAAAVGRGRGVLAARGGARRHDAGRVVPARHHGGRALRAAPRVVPGVHPLPLHRLRLLRVQCDGGGAQGHGARVVPVAGVPGVPVRRRGPRGGAHLHLHPGRAGPPAQLRALLPRVHAARLRAPRRVPRLRRRAHRRHRRPRRHPAPGGGGHGRGGAPVLRRQLHRLLHAGLLGVPRALLRLRRPPRLLLQHGRHGARPRALAPRGIHGADRGVDGAAEAGAHLRAGLAAALPARLRRQDRVRRPPMEPARPRRGQLPRPLPRPARRRRQPAALERQGEALGPPGRRKAVPARRRLGQVRPAPAGRRHRDLVNTTTAFDRPLVSLFVRFRSTCSSLFC

SEQ ID NO: 24696 - protein, 360 aa, Zea mays subsp. mays
  peptide (1)..(360): Ceres Seq. ID no. 12367907
  misc_feature (5)..(360): NCBI GI NO: 29150386 NR Description: putative glycosyl transferase
  misc_feature (14)..(352): NCBI GI NO: 18394719 NR Description: glycosyltransferase family; protein id:At1g19300
  misc_feature (14)..(352): NCBI GI NO: 20466660 NR Description: unknown protein [Arabidopsis thaliana]
  misc_feature (14)..(352): NCBI GI NO: 21537193 NR Description: Avr9/Cf-9 rapidly elicited protein 231
  misc_feature (14)..(357): NCBI GI NO: 15230299 NR Description: glycosyltransferase family; protein id: At3g50760
  misc_feature (14)..(352): NCBI GI NO: 38346630 NR Description: OSJNBa0074L08.24
  misc_feature (60)..(352): NCBI GI NO: 21554300 NR Description: putative glycosyl transferase
  misc_feature (60)..(352): NCBI GI NO: 15235247 NR Description: predicted glycosyl transferase
  misc_feature (32)..(352): NCBI GI NO: 12003394 NR Description: Avr9/Cf-9 rapidly elicited protein 231
  misc_feature (54)..(350): NCBI GI NO: 11281926 NR Description: hypothetical protein F26K9
TTRTRTTKMTRSPLALALLLLCAAGAAAAVPRYREAPHFTNSAAAQCPPPLQPSDADAACSPHAAVHVAMTLDASYLRGTMAAVLSVLRHASCPESIHFHFIASASSGSSATAEALRATVRASFPSLAFRVYPFADEARVAGLISTSIRGALDRPLNYARSYLASTLPACVRRVVYLDSDVVLTDDIAALAATPLPGEEGTAVAAPQYCGANFTAYFTPGFWASPALSSAFAGRRACYFNTGVMVLDLARWRRAGYTAQIEEWMELQKRVRIYELGSLPPFLLVFAGRIASVDHRWNQHGLGGDNYRGLCRGLHAGAVSLLHWSGKGKPWDRLDAGRPCPLDAVWAKYDLLRPAADIETS

SEQ ID NO: 24697 - protein, 352 aa, Zea mays subsp. mays
  peptide (1)..(352): Ceres Seq. ID no. 12367908
  misc_feature (1)..(352): NCBI GI NO: 29150386 NR Description: putative glycosyl transferase
  misc_feature (6)..(344): NCBI GI NO: 18394719 NR Description: glycosyltransferase family; protein id:At1g19300
  misc_feature (6)..(344): NCBI GI NO: 20466660 NR Description: unknown protein [Arabidopsis thaliana]
  misc_feature (6)..(344): NCBI GI NO: 21537193 NR Description: Avr9/Cf-9 rapidly elicited protein 231
  misc_feature (6)..(349): NCBI GI NO: 15230299 NR Description: glycosyltransferase family; protein id: At3g50760
  misc_feature (6)..(344): NCBI GI NO: 38346630 NR Description: OSJNBa0074L08.24
  misc_feature (52)..(344): NCBI GI NO: 21554300 NR Description: putative glycosyl transferase
  misc_feature (52)..(344): NCBI GI NO: 15235247 NR Description: predicted glycosyl transferase
  misc_feature (24)..(344): NCBI GI NO: 12003394 NR Description: Avr9/Cf-9 rapidly elicited protein 231
  misc_feature (46)..(342): NCBI GI NO: 11281926 NR Description: hypothetical protein F26K9
MTRSPLALALLLLCAAGAAAAVPRYREAPHFTNSAAAQCPPPLQPSDADAACSPHAAVHVAMTLDASYLRGTMAAVLSVLRHASCPESIHFHFIASASSGSSATAEALRATVRASFPSLAFRVYPFADEARVAGLISTSIRGALDRPLNYARSYLASTLPACVRRVVYLDSDVVLTDDIAALAATPLPGEEGTAVAAPQYCGANFTAYFTPGFWASPALSSAFAGRRACYFNTGVMVLDLARWRRAGYTAQIEEWMELQKRVRIYELGSLPPFLLVFAGRIASVDHRWNQHGLGGDNYRGLCRGLHAGAVSLLHWSGKGKPWDRLDAGRPCPLDAVWAKYDLLRPAADIETS

SEQ ID NO: 24698 - DNA, 1634 bp, Zea mays subsp. mays
  misc_feature (1)..(1634): Ceres Seq. ID no. 12410453
  misc_feature (112)..(112): n is a, c, t, g, unknown, or other
acacttcaattacgattattccagataagcacgatccgatgatggccccaccgatatccgccgatgccttggtggaggctgcctcggccgtcgccgcgtacccagccatcgngccgaacagaatgctttgcaaggacgcgccggcgccggccatctctgtcgtctcgaagcagacggtccggcccgccggcgcgtcggcggcggtcggcagtggagacctcaggctctcggtgtcggacatgccgatgctatcgtgccactacatccagaaggggctgttcttcccgccgcctcctcccggcgtgctggcggcctcgctggtgtcgtcgctcgtggcggcgctctcccgcgcgctcggcgtcttccccgcgctcgccggccgcctcgtcacgctccacgacgacagcatcgtgatacggtgcggcggcgacgacgccgccgtcgagttctaccacgcggtggcgccgtctctgtcgctcggcgacttcctggtgcccggcgccgacgtgccgacccgtttgacgaacggcctgttccccatggaccggacggtgagctacggcggccacggccgcccgctcacggcgttccagctcaccgtgctcggcgacggcgccgtgttcgtcggcttcgtcgccaaccacgccgtcgtggacggcacctccttctggcacttcttcaacacgtgggcggggctgtgccgcggcgcgccggtccgggagcccgacttccgccgcaacttcttcggcgactccaccgccgtcctacgcttccccggaggcgcgagccccgccgtgacgttcgacgccgacgcgccgctccgcgagcggatcctccacttcagtgctgccgcaatcagcgagctgaaggcgacggccaaccgctcgaaaagagcaggtcaggaagccgtgctaacggcaagctcgcgcacgacgactccagacttgaagggcgttccggtgaaatctcgtcgtttcagtcgctgtgcgcgcacatctggagggcggtgacgcgcgcgcgccggctgctggctgccgacaagacgacgacgttccgcatggccgtgaactgccggcaccgtctgcgcccggcgatctccccgctctacttcggcaacgcgatccagagcgtggcgacgacggccaccgtagccgagctggcgtccaacgacctgggctgggcggccgcccggctgaacgccaccgtggcgtcgcacaaggacggcgcgatccggcgcgccgcggcggagtgggaggccgcgccccgttgcttcccgctaggcaaccccgacggggcggccctcacgatggggagctcgcctcggttcccgatgtacgacgggaacgacttcgggtggggccgcgcgctcgccgtgcggagcggccgcgcgaacaaattcgacggcaagatgtcttcgttccccggacaggctggggacggtagcatcgacgtggaggtgtgcctcgcgccagacaccatggcgcatctcctcctcgacaaggagttcttgcagtacgtgtcctcccctgcaccgtgaggcggtgacagagtgaatgtgtggcttgttgctgcgcagctacatatagtaactggatttgtaccctttcagcagatatcaagtgcttgccaacttt

SEQ ID NO: 24699 - protein, 335 aa, Zea mays subsp. mays
  peptide (1)..(335): Ceres Seq. ID no. 12410454
  misc_feature (50)..(303): Pfam Name: Pfam Description:  Transferase family
  misc_feature (14)..(330): NCBI GI NO: 34908396 NR Description: P0529E05.24
  misc_feature (47)..(303): NCBI GI NO: 15240918 NR Description: anthranilate N-benzoyltransferase - like protein
  misc_feature (47)..(293): NCBI GI NO: 21666314 NR Description: AER [Nicotiana tabacum]
  misc_feature (50)..(296): NCBI GI NO: 15225603 NR Description: putative anthocyanin 5-aromatic acyltransferase
  misc_feature (48)..(309): NCBI GI NO: 24413968 NR Description: N-hydroxycinnamoyl/benzoyltransferase-like protein~contains EST AU096989
  misc_feature (47)..(309): NCBI GI NO: 34899602 NR Description: N-hydroxycinnamoyl benzoyltransferase-like protein
  misc_feature (48)..(293): NCBI GI NO: 15240227 NR Description: anthranilate N-hydroxycinnamoyl/ benzoyltransferase-like
  misc_feature (51)..(308): NCBI GI NO: 21636163 NR Description: HCBT-like putative defense response protein
  misc_feature (51)..(301): NCBI GI NO: 38346680 NR Description: OSJNBa0069D17.11
  misc_feature (50)..(294): NCBI GI NO: 15239072 NR Description: N-hydroxycinnamoyl benzoyltransferase-like protein
  misc_feature (37)..(37): Xaa is any aa, unknown or other
TSITIIPDKHDPMMAPPISADALVEAASAVAAYPAIXPNRMLCKDAPAPAISVVSKQTVRPAGASAAVGSGDLRLSVSDMPMLSCHYIQKGLFFPPPPPGVLAASLVSSLVAALSRALGVFPALAGRLVTLHDDSIVIRCGGDDAAVEFYHAVAPSLSLGDFLVPGADVPTRLTNGLFPMDRTVSYGGHGRPLTAFQLTVLGDGAVFVGFVANHAVVDGTSFWHFFNTWAGLCRGAPVREPDFRRNFFGDSTAVLRFPGGASPAVTFDADAPLRERILHFSAAAISELKATANRSKRAGQEAVLTASSRTTTPDLKGVPVKSRRFSRCARTSGGR

SEQ ID NO: 24700 - protein, 323 aa, Zea mays subsp. mays
  peptide (1)..(323): Ceres Seq. ID no. 12410455
  misc_feature (38)..(291): Pfam Name: Pfam Description:  Transferase family
  misc_feature (2)..(318): NCBI GI NO: 34908396 NR Description: P0529E05.24
  misc_feature (35)..(291): NCBI GI NO: 15240918 NR Description: anthranilate N-benzoyltransferase - like protein
  misc_feature (35)..(281): NCBI GI NO: 21666314 NR Description: AER [Nicotiana tabacum]
  misc_feature (38)..(284): NCBI GI NO: 15225603 NR Description: putative anthocyanin 5-aromatic acyltransferase
  misc_feature (36)..(297): NCBI GI NO: 24413968 NR Description: N-hydroxycinnamoyl/benzoyltransferase-like protein~contains EST AU096989
  misc_feature (35)..(297): NCBI GI NO: 34899602 NR Description: N-hydroxycinnamoyl benzoyltransferase-like protein
  misc_feature (36)..(281): NCBI GI NO: 15240227 NR Description: anthranilate N-hydroxycinnamoyl/ benzoyltransferase-like
  misc_feature (39)..(296): NCBI GI NO: 21636163 NR Description: HCBT-like putative defense response protein
  misc_feature (39)..(289): NCBI GI NO: 38346680 NR Description: OSJNBa0069D17.11
  misc_feature (38)..(282): NCBI GI NO: 15239072 NR Description: N-hydroxycinnamoyl benzoyltransferase-like protein
  misc_feature (25)..(25): Xaa is any aa, unknown or other
MMAPPISADALVEAASAVAAYPAIXPNRMLCKDAPAPAISVVSKQTVRPAGASAAVGSGDLRLSVSDMPMLSCHYIQKGLFFPPPPPGVLAASLVSSLVAALSRALGVFPALAGRLVTLHDDSIVIRCGGDDAAVEFYHAVAPSLSLGDFLVPGADVPTRLTNGLFPMDRTVSYGGHGRPLTAFQLTVLGDGAVFVGFVANHAVVDGTSFWHFFNTWAGLCRGAPVREPDFRRNFFGDSTAVLRFPGGASPAVTFDADAPLRERILHFSAAAISELKATANRSKRAGQEAVLTASSRTTTPDLKGVPVKSRRFSRCARTSGGR

SEQ ID NO: 24701 - protein, 322 aa, Zea mays subsp. mays
  peptide (1)..(322): Ceres Seq. ID no. 12410456
  misc_feature (37)..(290): Pfam Name: Pfam Description:  Transferase family
  misc_feature (1)..(317): NCBI GI NO: 34908396 NR Description: P0529E05.24
  misc_feature (34)..(290): NCBI GI NO: 15240918 NR Description: anthranilate N-benzoyltransferase - like protein
  misc_feature (34)..(280): NCBI GI NO: 21666314 NR Description: AER [Nicotiana tabacum]
  misc_feature (37)..(283): NCBI GI NO: 15225603 NR Description: putative anthocyanin 5-aromatic acyltransferase
  misc_feature (35)..(296): NCBI GI NO: 24413968 NR Description: N-hydroxycinnamoyl/benzoyltransferase-like protein~contains EST AU096989
  misc_feature (34)..(296): NCBI GI NO: 34899602 NR Description: N-hydroxycinnamoyl benzoyltransferase-like protein
  misc_feature (35)..(280): NCBI GI NO: 15240227 NR Description: anthranilate N-hydroxycinnamoyl/ benzoyltransferase-like
  misc_feature (38)..(295): NCBI GI NO: 21636163 NR Description: HCBT-like putative defense response protein
  misc_feature (38)..(288): NCBI GI NO: 38346680 NR Description: OSJNBa0069D17.11
  misc_feature (37)..(281): NCBI GI NO: 15239072 NR Description: N-hydroxycinnamoyl benzoyltransferase-like protein
  misc_feature (24)..(24): Xaa is any aa, unknown or other
MAPPISADALVEAASAVAAYPAIXPNRMLCKDAPAPAISVVSKQTVRPAGASAAVGSGDLRLSVSDMPMLSCHYIQKGLFFPPPPPGVLAASLVSSLVAALSRALGVFPALAGRLVTLHDDSIVIRCGGDDAAVEFYHAVAPSLSLGDFLVPGADVPTRLTNGLFPMDRTVSYGGHGRPLTAFQLTVLGDGAVFVGFVANHAVVDGTSFWHFFNTWAGLCRGAPVREPDFRRNFFGDSTAVLRFPGGASPAVTFDADAPLRERILHFSAAAISELKATANRSKRAGQEAVLTASSRTTTPDLKGVPVKSRRFSRCARTSGGR

SEQ ID NO: 24702 - DNA, 1283 bp, Zea mays subsp. mays
  misc_feature (1)..(1283): Ceres Seq. ID no. 12356020
gcccacctaccactaccagtcgcggacgctcctcccacaactcgcgggtctcgagatgttcaggggttgcggcctgttcgccggcgcccgccgggggcgcggcggcgacctcaggaagcgcggggagcaaggcggcgcgagctcgcgggtggcgccggccgagcccgtgtgcgtggacgaggcggaggacggcggcgccgcgcggcagctggcgtgggcggaggtggagaccgccacgggcggcttctcgtccagggtggtcggccgcggcggcttcagcacggtgtacctcgcctcgctctcctcctcgcggctcggcgccgtcaaggtgcactgcagcagcgagcgcctccgccgcgcgttccgccgggagctcgacgtgctgctctccctccgccacccgcacgtcgtccgcctcctcgcctactgcgacgagcgcgacgagggcgtgctggtgttcgagtacgcgcccaacggcgacctccacgagaggctccacggcggcgcgggcgcgggcaccctcccctgggcgcgccgcgtggcggtcgcgttccaggtggcctcggcgctggagtacctccacgagggccgcgacccggccgtcgtccacggggacatcaaggcctccaacgtcctcctcgacgccagcatggacgccaagctctgcgacttcggcttcgcgcacgtcggcgtctcggccacgatgggcggccgccggccctcggaccgcgccgtcatgggctctccgggctacgtcgacccgcacctcctccgctccggagtggccaccaaggcgagcgacgtgtacagctttggcgtgctgctgctcgagctcctgacgggcaaggaggccgtctgccgcgagacagggcaccggctcacggccgcggtgaggcctaagctcagcgatggtgatcaactgccgggcgttctggaccagaggctgggaggagactacgacgccgctgaggcggccgccgtggccgagctcgccatgcagtgcgtcagtgacagccctgggctccgcccgtccatggccgacgtggtgcgcgtgctccaggagaagacctccgccgctggatcgagagtcgaccgcaagcaagatggtgtcctaagttagatgcctatggagtagtgtgtaaatatgtccttgatggtgctataattgtgttgagggtagttagccacaagaattggcgcagtgagatgaggttttagaatcactagatctctgatagaaaattttgtcatgccatcgagttgtcaatttgtcttgttgtgtt

SEQ ID NO: 24703 - protein, 354 aa, Zea mays subsp. mays
  peptide (1)..(354): Ceres Seq. ID no. 12356021
  misc_feature (68)..(334): Pfam Name: Pfam Description:  Protein kinase domain
  misc_feature (1)..(348): NCBI GI NO: 38344983 NR Description: OSJNBa0011L07.13
  misc_feature (48)..(342): NCBI GI NO: 27476081 NR Description: Hypothetical protein
  misc_feature (4)..(351): NCBI GI NO: 37536060 NR Description: putative receptor protein kinase
  misc_feature (162)..(354): NCBI GI NO: 29367339 NR Description: putative receptor protein kinase
  misc_feature (43)..(334): NCBI GI NO: 15235071 NR Description: putative protein kinase; protein id: At4g10390
  misc_feature (54)..(300): NCBI GI NO: 30692836 NR Description: protein kinase family [Arabidopsis thaliana]
  misc_feature (54)..(287): NCBI GI NO: 25403176 NR Description: probable protein kinase
  misc_feature (50)..(350): NCBI GI NO: 15227018 NR Description: putative receptor-like protein kinase
  misc_feature (50)..(344): NCBI GI NO: 15218054 NR Description: receptor-like protein kinase, putative
  misc_feature (50)..(344): NCBI GI NO: 25405505 NR Description: probable protein kinase
MFRGCGLFAGARRGRGGDLRKRGEQGGASSRVAPAEPVCVDEAEDGGAARQLAWAEVETATGGFSSRVVGRGGFSTVYLASLSSSRLGAVKVHCSSERLRRAFRRELDVLLSLRHPHVVRLLAYCDERDEGVLVFEYAPNGDLHERLHGGAGAGTLPWARRVAVAFQVASALEYLHEGRDPAVVHGDIKASNVLLDASMDAKLCDFGFAHVGVSATMGGRRPSDRAVMGSPGYVDPHLLRSGVATKASDVYSFGVLLLELLTGKEAVCRETGHRLTAAVRPKLSDGDQLPGVLDQRLGGDYDAAEAAAVAELAMQCVSDSPGLRPSMADVVRVLQEKTSAAGSRVDRKQDGVLS

SEQ ID NO: 24704 - protein, 299 aa, Zea mays subsp. mays
  peptide (1)..(299): Ceres Seq. ID no. 12356022
  misc_feature (6)..(288): NCBI GI NO: 29829093 NR Description: putative translation initiation factor IF-2
AHLPLPVADAPPTTRGSRDVQGLRPVRRRPPGARRRPQEARGARRRELAGGAGRARVRGRGGGRRRRAAAGVGGGGDRHGRLLVQGGRPRRLQHGVPRLALLLAARRRQGALQQRAPPPRVPPGARRAALPPPPARRPPPRLLRRARRGRAGVRVRAQRRPPREAPRRRGRGHPPLGAPRGGRVPGGLGAGVPPRGPRPGRRPRGHQGLQRPPRRQHGRQALRLRLRARRRLGHDGRPPALGPRRHGLSGLRRPAPPPLRSGHQGERRVQLWRAAARAPDGQGGRLPRDRAPAHGRGEA

SEQ ID NO: 24705 - protein, 372 aa, Zea mays subsp. mays
  peptide (1)..(372): Ceres Seq. ID no. 12356023
  misc_feature (86)..(352): Pfam Name: Pfam Description:  Protein kinase domain
  misc_feature (19)..(366): NCBI GI NO: 38344983 NR Description: OSJNBa0011L07.13
  misc_feature (66)..(360): NCBI GI NO: 27476081 NR Description: Hypothetical protein
  misc_feature (22)..(369): NCBI GI NO: 37536060 NR Description: putative receptor protein kinase
  misc_feature (180)..(372): NCBI GI NO: 29367339 NR Description: putative receptor protein kinase
  misc_feature (61)..(352): NCBI GI NO: 15235071 NR Description: putative protein kinase; protein id: At4g10390
  misc_feature (72)..(318): NCBI GI NO: 30692836 NR Description: protein kinase family [Arabidopsis thaliana]
  misc_feature (72)..(305): NCBI GI NO: 25403176 NR Description: probable protein kinase
  misc_feature (68)..(368): NCBI GI NO: 15227018 NR Description: putative receptor-like protein kinase
  misc_feature (68)..(362): NCBI GI NO: 15218054 NR Description: receptor-like protein kinase, putative
  misc_feature (68)..(362): NCBI GI NO: 25405505 NR Description: probable protein kinase
PTYHYQSRTLLPQLAGLEMFRGCGLFAGARRGRGGDLRKRGEQGGASSRVAPAEPVCVDEAEDGGAARQLAWAEVETATGGFSSRVVGRGGFSTVYLASLSSSRLGAVKVHCSSERLRRAFRRELDVLLSLRHPHVVRLLAYCDERDEGVLVFEYAPNGDLHERLHGGAGAGTLPWARRVAVAFQVASALEYLHEGRDPAVVHGDIKASNVLLDASMDAKLCDFGFAHVGVSATMGGRRPSDRAVMGSPGYVDPHLLRSGVATKASDVYSFGVLLLELLTGKEAVCRETGHRLTAAVRPKLSDGDQLPGVLDQRLGGDYDAAEAAAVAELAMQCVSDSPGLRPSMADVVRVLQEKTSAAGSRVDRKQDGVLS

SEQ ID NO: 24706 - DNA, 1544 bp, Zea mays subsp. mays
  misc_feature (1)..(1544): Ceres Seq. ID no. 12405741
aaaggacgggcaaagagccggagccgcgaccgacgactcatcagacatggcgaagccggcggcggcgaggaagccctctgcggcgtcgaccgtcgcactgacactggttctggccctggcttcggctgtcctcctcttcctcctgctccgcttctctccctcctccccgtcccccaacccgcacccgcaccgccgcctccgcctccgcccccgcgcgcatgcgcaccaccaccagatcccattcgaccctgtcgtcgcggacatagagcgccgcctcgaagaccacgagtgggagcgcctcgccgctgcagggctgcacgctccgggcatggaggcggcgccagtcccagaggatctcaccgacggtgaggtcgacgccgacgaggactacatcaatgacgctgcgcgcttcaacgtcacgcttcgcgtggaggcgctgttcccaaagatcgacgtcgaccctgccgatggcgccgtcacgggcgctgagctggccgcgtggaacctcgcaaatgcgcggcgggaggtgctacaccgcaccgcccgggagctcgagctgcacgaccgcgatcacgacggccgggtcgcctacggcgaatacgagcggcccagctgggcctggcgtttcgacgatcataactcaaccgatgacggagcgggatggtggaaggaggagcattttagtgctgcagatatggatggtgatggctttctaaatcttactgagtttaatgactttttacatccagctgatactaccaacccaaagctaatacattggttgtgcaaagaagaagtcagggaaagagataaagacaatgatgggaagctcaatttccaagagttcttcaacggattattttactcaattcgacactatgatgatgaaggcttaacagatgacaccggtggctctgatgcaccagctaaaaagtcattttcacaccttgatctggataatgatgggctcttatcagcagatgagctaaagcctgtaattggtaatctccatccatcagaatacttctatgccaagcaacaagccgactatgtaatatctcaggctgacacgaacaaagatggacaattgagcatgaatgagatgatcgagaacccctatgtcttttacaatgctttattcacagaagatgattatggctttcatgacgagctccgttagttcccaattcaacacaaagctttatggaatcaccactgtaggaagtcggaagactttgttatgcactgctaagaccatttccgttttctgtctgaaatcatccatcatttgacggtgattccatgtaaaacaagcatgtttttagatgcacctattctagaagctgtgttcttttgtactacccttgagccttttttatagtttgttgtttttttaatcatatatgtacggtgaggatgtgagtgagttttgttctttcaacttcttgaatcttgatacgatacaaaactagcgtcttccagaatcacaatttgtaaaccatacaaacccaggaaagcattactgtaagccatgaattgacgtt

SEQ ID NO: 24707 - protein, 392 aa, Zea mays subsp. mays
  peptide (1)..(392): Ceres Seq. ID no. 12405742
  misc_feature (222)..(250): Pfam Name: Pfam Description:  EF hand
  misc_feature (63)..(392): NCBI GI NO: 18415883 NR Description: expressed protein; protein id: At5g08580
  misc_feature (78)..(391): NCBI GI NO: 15234272 NR Description: putative calcium binding protein
  misc_feature (35)..(392): NCBI GI NO: 38345557 NR Description: OSJNBa0032F06.6
  misc_feature (75)..(259): NCBI GI NO: 34914276 NR Description: B1151A10.4
  misc_feature (267)..(392): NCBI GI NO: 34914276 NR Description: B1151A10.4
  misc_feature (142)..(390): NCBI GI NO: 2809324 NR Description: calumenin [Homo sapiens]
  misc_feature (142)..(390): NCBI GI NO: 4502551 NR Description: calumenin precursor [Homo sapiens]
  misc_feature (142)..(390): NCBI GI NO: 30583871 NR Description: Homo sapiens calumenin [synthetic construct]
  misc_feature (142)..(390): NCBI GI NO: 6680840 NR Description: calumenin [Mus musculus]
  misc_feature (142)..(390): NCBI GI NO: 37904869 NR Description: cardiac calumenin [Oryctolagus cuniculus]
KDGQRAGAATDDSSDMAKPAAARKPSAASTVALTLVLALASAVLLFLLLRFSPSSPSPNPHPHRRLRLRPRAHAHHHQIPFDPVVADIERRLEDHEWERLAAAGLHAPGMEAAPVPEDLTDGEVDADEDYINDAARFNVTLRVEALFPKIDVDPADGAVTGAELAAWNLANARREVLHRTARELELHDRDHDGRVAYGEYERPSWAWRFDDHNSTDDGAGWWKEEHFSAADMDGDGFLNLTEFNDFLHPADTTNPKLIHWLCKEEVRERDKDNDGKLNFQEFFNGLFYSIRHYDDEGLTDDTGGSDAPAKKSFSHLDLDNDGLLSADELKPVIGNLHPSEYFYAKQQADYVISQADTNKDGQLSMNEMIENPYVFYNALFTEDDYGFHDELR

SEQ ID NO: 24708 - protein, 377 aa, Zea mays subsp. mays
  peptide (1)..(377): Ceres Seq. ID no. 12405743
  misc_feature (207)..(235): Pfam Name: Pfam Description:  EF hand
  misc_feature (48)..(377): NCBI GI NO: 18415883 NR Description: expressed protein; protein id: At5g08580
  misc_feature (63)..(376): NCBI GI NO: 15234272 NR Description: putative calcium binding protein
  misc_feature (20)..(377): NCBI GI NO: 38345557 NR Description: OSJNBa0032F06.6
  misc_feature (60)..(244): NCBI GI NO: 34914276 NR Description: B1151A10.4
  misc_feature (252)..(377): NCBI GI NO: 34914276 NR Description: B1151A10.4
  misc_feature (127)..(375): NCBI GI NO: 2809324 NR Description: calumenin [Homo sapiens]
  misc_feature (127)..(375): NCBI GI NO: 4502551 NR Description: calumenin precursor [Homo sapiens]
  misc_feature (127)..(375): NCBI GI NO: 30583871 NR Description: Homo sapiens calumenin [synthetic construct]
  misc_feature (127)..(375): NCBI GI NO: 6680840 NR Description: calumenin [Mus musculus]
  misc_feature (127)..(375): NCBI GI NO: 37904869 NR Description: cardiac calumenin [Oryctolagus cuniculus]
MAKPAAARKPSAASTVALTLVLALASAVLLFLLLRFSPSSPSPNPHPHRRLRLRPRAHAHHHQIPFDPVVADIERRLEDHEWERLAAAGLHAPGMEAAPVPEDLTDGEVDADEDYINDAARFNVTLRVEALFPKIDVDPADGAVTGAELAAWNLANARREVLHRTARELELHDRDHDGRVAYGEYERPSWAWRFDDHNSTDDGAGWWKEEHFSAADMDGDGFLNLTEFNDFLHPADTTNPKLIHWLCKEEVRERDKDNDGKLNFQEFFNGLFYSIRHYDDEGLTDDTGGSDAPAKKSFSHLDLDNDGLLSADELKPVIGNLHPSEYFYAKQQADYVISQADTNKDGQLSMNEMIENPYVFYNALFTEDDYGFHDELR

SEQ ID NO: 24709 - protein, 283 aa, Zea mays subsp. mays
  peptide (1)..(283): Ceres Seq. ID no. 12405744
  misc_feature (113)..(141): Pfam Name: Pfam Description:  EF hand
  misc_feature (1)..(283): NCBI GI NO: 18415883 NR Description: expressed protein; protein id: At5g08580
  misc_feature (1)..(282): NCBI GI NO: 15234272 NR Description: putative calcium binding protein
  misc_feature (1)..(283): NCBI GI NO: 38345557 NR Description: OSJNBa0032F06.6
  misc_feature (1)..(150): NCBI GI NO: 34914276 NR Description: B1151A10.4
  misc_feature (158)..(283): NCBI GI NO: 34914276 NR Description: B1151A10.4
  misc_feature (33)..(281): NCBI GI NO: 2809324 NR Description: calumenin [Homo sapiens]
  misc_feature (33)..(281): NCBI GI NO: 4502551 NR Description: calumenin precursor [Homo sapiens]
  misc_feature (33)..(281): NCBI GI NO: 30583871 NR Description: Homo sapiens calumenin [synthetic construct]
  misc_feature (33)..(281): NCBI GI NO: 6680840 NR Description: calumenin [Mus musculus]
  misc_feature (33)..(281): NCBI GI NO: 37904869 NR Description: cardiac calumenin [Oryctolagus cuniculus]
MEAAPVPEDLTDGEVDADEDYINDAARFNVTLRVEALFPKIDVDPADGAVTGAELAAWNLANARREVLHRTARELELHDRDHDGRVAYGEYERPSWAWRFDDHNSTDDGAGWWKEEHFSAADMDGDGFLNLTEFNDFLHPADTTNPKLIHWLCKEEVRERDKDNDGKLNFQEFFNGLFYSIRHYDDEGLTDDTGGSDAPAKKSFSHLDLDNDGLLSADELKPVIGNLHPSEYFYAKQQADYVISQADTNKDGQLSMNEMIENPYVFYNALFTEDDYGFHDELR

SEQ ID NO: 24710 - DNA, 1658 bp, Zea mays subsp. mays
  misc_feature (1)..(1658): Ceres Seq. ID no. 13494433
atcaaacgcccacgcagcgccggggatggagcgcggccggcaccagatgagagctgcctcccacacatggcatcgtggccagcagcgtcaaggaggcggtccagcggcggcatgaaaagcgccgagctttcgggctccggtgcttcttacggctatggccggacgtcctcctcccctgatgcctgcggctacggccggcagctctcggcctacagcgcccgctcctcccaggtcagcaggagtggctccttcagtgcggcggcgcagcgggtcgccggcgccttcaccggctgcttcgtgccgcgccggcaggtcaaagccggggaagaggaggaggaggaggagaagaagagcaagcgctccatggattcaggatcctatcatggatggaatgaagcaaacttgagtgcagcagcaggatcatggcaggaaggcagggctctcaccatcgctgacgtgtcgaaggcaacatcaaacttcagcgaaaagaacgtgataaggcagggacgctcaagcaccatgtacagaggaaagctcagggatggttctcagatcgccgtcaaatgtgtcacgaagctgaacgaccagagtccgacggctgaactctggagggagcttgagaagatccagcacaggaatctggcgaggctctttggattcttcgaacgcgcagctgatagtctcgtcgtagtcgagtatgtcggcaatggttccttgagggaacatttggatgaatcatgtggaaatggtttagagctcgcgcaacggctcaacatcgcgatcgacgttgctcaggccatcacctacctgcacgagtacaaagagcgtccgatcatccatggcggcatccggtcgtcgggcgtgctactgaccgacgcgctgacggcgaaggtggccggctttgggctggccgggactgcggcctcggggtcgggctcaggctccgacgcaacgccggcgaggagcgccgccgggtacgtggacccggagtacctgagcacgtaccagctgaccgacaagagcgacgtgtacgccttcggcgtcctcctcgtcgagctagccaccggccggccgcccgtcgagcgcacccgcggcggcgaggcccggctcaccaccaaatgggcgttgcagaggtgcagagcaggggaagccgtggtggccatggaccccaggatgcggcggagcccggcgtcggtggccgccgtggagagggcgctggcgctggcagcgcagagcgtcgcggcggccagggatgagcggccgtccatgcggcggtgcagcgagctgctgtggaccatccggagagactaccaccgccaggaggagccgcgctgcggcgccgtcgctgaggaacgtagcgacgagtgggtcatcaggtagcttagcttgccagttgaatggatatgattctgctttggattgatcggcatggaactgtaactagcctgtaagtggatgcgaagttctaggaagctgcagattttttttagcacgtacaacttctgtgattactatcaaatgatgtagtcattgcagccaatacctgcgaatttctagaaaacagtagacgttgtaaacaatcagacgactttgctgaagtagccacttgatccctcaatcaaatataaataaccatcgaaggatgaggatgttgatgc

SEQ ID NO: 24711 - protein, 459 aa, Zea mays subsp. mays
  peptide (1)..(459): Ceres Seq. ID no. 13494434
  misc_feature (27)..(457): NCBI GI NO: 34897358 NR Description: putative receptor kinase [Oryza sativa]
  misc_feature (148)..(452): NCBI GI NO: 34908354 NR Description: P0529H11.30
  misc_feature (114)..(436): NCBI GI NO: 9759225 NR Description: contains similarity to proteinkinase~gene_id:K19M22
  misc_feature (85)..(437): NCBI GI NO: 22328175 NR Description: protein kinase family [Arabidopsis thaliana]
  misc_feature (31)..(443): NCBI GI NO: 27261468 NR Description: Hypothetical protein
  misc_feature (144)..(436): NCBI GI NO: 15237782 NR Description: protein kinase family [Arabidopsis thaliana]
  misc_feature (137)..(441): NCBI GI NO: 38345153 NR Description: OSJNBa0014K14.7
  misc_feature (148)..(440): NCBI GI NO: 18397027 NR Description: protein kinase family [Arabidopsis thaliana]
  misc_feature (148)..(440): NCBI GI NO: 25287604 NR Description: probable protein kinase
  misc_feature (248)..(437): NCBI GI NO: 7434312 NR Description: receptor-like protein kinase 5 homolog A_IG005I10
IKRPRSAGDGARPAPDESCLPHMASWPAASRRRSSGGMKSAELSGSGASYGYGRTSSSPDACGYGRQLSAYSARSSQVSRSGSFSAAAQRVAGAFTGCFVPRRQVKAGEEEEEEEKKSKRSMDSGSYHGWNEANLSAAAGSWQEGRALTIADVSKATSNFSEKNVIRQGRSSTMYRGKLRDGSQIAVKCVTKLNDQSPTAELWRELEKIQHRNLARLFGFFERAADSLVVVEYVGNGSLREHLDESCGNGLELAQRLNIAIDVAQAITYLHEYKERPIIHGGIRSSGVLLTDALTAKVAGFGLAGTAASGSGSGSDATPARSAAGYVDPEYLSTYQLTDKSDVYAFGVLLVELATGRPPVERTRGGEARLTTKWALQRCRAGEAVVAMDPRMRRSPASVAAVERALALAAQSVAAARDERPSMRRCSELLWTIRRDYHRQEEPRCGAVAEERSDEWVIR

SEQ ID NO: 24712 - protein, 437 aa, Zea mays subsp. mays
  peptide (1)..(437): Ceres Seq. ID no. 13494435
  misc_feature (5)..(435): NCBI GI NO: 34897358 NR Description: putative receptor kinase [Oryza sativa]
  misc_feature (126)..(430): NCBI GI NO: 34908354 NR Description: P0529H11.30
  misc_feature (92)..(414): NCBI GI NO: 9759225 NR Description: contains similarity to proteinkinase~gene_id:K19M22
  misc_feature (63)..(415): NCBI GI NO: 22328175 NR Description: protein kinase family [Arabidopsis thaliana]
  misc_feature (9)..(421): NCBI GI NO: 27261468 NR Description: Hypothetical protein
  misc_feature (122)..(414): NCBI GI NO: 15237782 NR Description: protein kinase family [Arabidopsis thaliana]
  misc_feature (115)..(419): NCBI GI NO: 38345153 NR Description: OSJNBa0014K14.7
  misc_feature (126)..(418): NCBI GI NO: 18397027 NR Description: protein kinase family [Arabidopsis thaliana]
  misc_feature (126)..(418): NCBI GI NO: 25287604 NR Description: probable protein kinase
  misc_feature (226)..(415): NCBI GI NO: 7434312 NR Description: receptor-like protein kinase 5 homolog A_IG005I10
MASWPAASRRRSSGGMKSAELSGSGASYGYGRTSSSPDACGYGRQLSAYSARSSQVSRSGSFSAAAQRVAGAFTGCFVPRRQVKAGEEEEEEEKKSKRSMDSGSYHGWNEANLSAAAGSWQEGRALTIADVSKATSNFSEKNVIRQGRSSTMYRGKLRDGSQIAVKCVTKLNDQSPTAELWRELEKIQHRNLARLFGFFERAADSLVVVEYVGNGSLREHLDESCGNGLELAQRLNIAIDVAQAITYLHEYKERPIIHGGIRSSGVLLTDALTAKVAGFGLAGTAASGSGSGSDATPARSAAGYVDPEYLSTYQLTDKSDVYAFGVLLVELATGRPPVERTRGGEARLTTKWALQRCRAGEAVVAMDPRMRRSPASVAAVERALALAAQSVAAARDERPSMRRCSELLWTIRRDYHRQEEPRCGAVAEERSDEWVIR

SEQ ID NO: 24713 - protein, 422 aa, Zea mays subsp. mays
  peptide (1)..(422): Ceres Seq. ID no. 13494436
  misc_feature (1)..(420): NCBI GI NO: 34897358 NR Description: putative receptor kinase [Oryza sativa]
  misc_feature (111)..(415): NCBI GI NO: 34908354 NR Description: P0529H11.30
  misc_feature (77)..(399): NCBI GI NO: 9759225 NR Description: contains similarity to proteinkinase~gene_id:K19M22
  misc_feature (48)..(400): NCBI GI NO: 22328175 NR Description: protein kinase family [Arabidopsis thaliana]
  misc_feature (1)..(406): NCBI GI NO: 27261468 NR Description: Hypothetical protein
  misc_feature (107)..(399): NCBI GI NO: 15237782 NR Description: protein kinase family [Arabidopsis thaliana]
  misc_feature (100)..(404): NCBI GI NO: 38345153 NR Description: OSJNBa0014K14.7
  misc_feature (111)..(403): NCBI GI NO: 18397027 NR Description: protein kinase family [Arabidopsis thaliana]
  misc_feature (111)..(403): NCBI GI NO: 25287604 NR Description: probable protein kinase
  misc_feature (211)..(400): NCBI GI NO: 7434312 NR Description: receptor-like protein kinase 5 homolog A_IG005I10
MKSAELSGSGASYGYGRTSSSPDACGYGRQLSAYSARSSQVSRSGSFSAAAQRVAGAFTGCFVPRRQVKAGEEEEEEEKKSKRSMDSGSYHGWNEANLSAAAGSWQEGRALTIADVSKATSNFSEKNVIRQGRSSTMYRGKLRDGSQIAVKCVTKLNDQSPTAELWRELEKIQHRNLARLFGFFERAADSLVVVEYVGNGSLREHLDESCGNGLELAQRLNIAIDVAQAITYLHEYKERPIIHGGIRSSGVLLTDALTAKVAGFGLAGTAASGSGSGSDATPARSAAGYVDPEYLSTYQLTDKSDVYAFGVLLVELATGRPPVERTRGGEARLTTKWALQRCRAGEAVVAMDPRMRRSPASVAAVERALALAAQSVAAARDERPSMRRCSELLWTIRRDYHRQEEPRCGAVAEERSDEWVIR

SEQ ID NO: 24714 - DNA, 1565 bp, Zea mays subsp. mays
  misc_feature (1)..(1565): Ceres Seq. ID no. 12410445
ggcaacgagcctgctgctccagctaccccgaaaccccgtccaacgtccatggctatccacctccgggcacacgccttcgcggccaacccgctgcgtggcgtctccgccgccaccaccgccatgtccccctccgcggccgccgaggcactccgctacctcctcgaccccagctccgccgccgccgccgccaatcccagccagtacctctccaagatccttcctttccgcaggggccgcccactcgcgcgctccactgaccctcccgcggcgccggcctggcgcctcgcgtggctcccgccgtcccgcgtccccggggtggccccggacgccttcgtcttcctgggcgcgctcgtcgagggggacggcaaggaggccgccgcgtactgggcggtcgacgtcagcgagggcgagggagccagggttggtgggccggcggacggggatgggccgtcggcgtttgtggacttgaggacgctcatggtggccacggactggagcgacaaggacgccatggcggagctcgccatcgcaggacatgctcgagcactgctagaatggcacagcacggcaaaattttgtggagcttgtggagcaaaggctgtacctactgaagccgggaggcgtaagcagtgcagcaacgattcctgcaagaagaggatataccctagaattgatccggttgtgatcatgttggtcattgataaagaaaatgatcgggcactcttaagccgccagtcaagatttgtgcctcgtatgtggagttgtcttgctggtttcatagagccaggagaaagcctggaagaggcagtgagacgagaaacatgggaggaaactggtatcgaagttgggcaagtcgtttatcacagttctcaaccatggcctgttgggccaaatactatgccgtgtcaactgatggtgggcttctttgcttatgctaaatcattggagataaacgtggaacaagcaggagcttgaagatgcccagtggcacaaccgcgaagacgtcaagaaagcgttgacgtttgctgaatacgagaaagcccagagaacaagcgctgccaaggtcgatcagatctgcaagggcgctgagaaagggcagaacccctctgccgacttcaaagttggaagcggcgagcctgctccaatgtttgtcccaggaccctacgccattgctcaccaccttatctcgtcgtgggctttcgagggagcaccgaagctgcctagttcattctcaaacctataagcctggaccctggtgttcagacagacgatgacaggaactggacccctgtgctgcgggctcatggatcacctgtgttgccgtgagtgtaattctgatagtgtgtgtccgttgccggttgtgataaaataaaatagcaatagagtactgggtacagaagacttgccggaggatttggcatcaatggacatgtatatccattgcctttttacatgttgatcctctttgtatcacacgtaatgttgcatacttgcatagatacaacaatgatatacatcacacagtgtactcatgcatttatacatgtattcagataactggattc

SEQ ID NO: 24715 - protein, 324 aa, Zea mays subsp. mays
  peptide (1)..(324): Ceres Seq. ID no. 12410446
  misc_feature (225)..(321): Pfam Name: Pfam Description:  NUDIX domain
  misc_feature (16)..(321): NCBI GI NO: 15241252 NR Description: putative protein; protein id: At5g20070
  misc_feature (17)..(185): NCBI GI NO: 5803245 NR Description: hypothetical protein
  misc_feature (256)..(278): NCBI GI NO: 5803245 NR Description: hypothetical protein
  misc_feature (173)..(321): NCBI GI NO: 21312664 NR Description: RIKEN cDNA 0610016O18 [Mus musculus]
  misc_feature (97)..(320): NCBI GI NO: 22988758 NR Description: hypothetical protein [Burkholderia fungorum]
  misc_feature (180)..(321): NCBI GI NO: 15963981 NR Description: HYPOTHETICAL PROTEIN [Sinorhizobium meliloti]
  misc_feature (72)..(307): NCBI GI NO: 22960495 NR Description: hypothetical protein [Rhodobacter sphaeroides]
  misc_feature (155)..(317): NCBI GI NO: 15887452 NR Description: AGR_C_150p [Agrobacterium tumefaciens]
  misc_feature (173)..(321): NCBI GI NO: 13899267 NR Description: nudix
  misc_feature (173)..(320): NCBI GI NO: 23109722 NR Description: hypothetical protein
GNEPAAPATPKPRPTSMAIHLRAHAFAANPLRGVSAATTAMSPSAAAEALRYLLDPSSAAAAANPSQYLSKILPFRRGRPLARSTDPPAAPAWRLAWLPPSRVPGVAPDAFVFLGALVEGDGKEAAAYWAVDVSEGEGARVGGPADGDGPSAFVDLRTLMVATDWSDKDAMAELAIAGHARALLEWHSTAKFCGACGAKAVPTEAGRRKQCSNDSCKKRIYPRIDPVVIMLVIDKENDRALLSRQSRFVPRMWSCLAGFIEPGESLEEAVRRETWEETGIEVGQVVYHSSQPWPVGPNTMPCQLMVGFFAYAKSLEINVEQAGA

SEQ ID NO: 24716 - protein, 308 aa, Zea mays subsp. mays
  peptide (1)..(308): Ceres Seq. ID no. 12410447
  misc_feature (209)..(305): Pfam Name: Pfam Description:  NUDIX domain
  misc_feature (1)..(305): NCBI GI NO: 15241252 NR Description: putative protein; protein id: At5g20070
  misc_feature (1)..(169): NCBI GI NO: 5803245 NR Description: hypothetical protein
  misc_feature (240)..(262): NCBI GI NO: 5803245 NR Description: hypothetical protein
  misc_feature (157)..(305): NCBI GI NO: 21312664 NR Description: RIKEN cDNA 0610016O18 [Mus musculus]
  misc_feature (81)..(304): NCBI GI NO: 22988758 NR Description: hypothetical protein [Burkholderia fungorum]
  misc_feature (164)..(305): NCBI GI NO: 15963981 NR Description: HYPOTHETICAL PROTEIN [Sinorhizobium meliloti]
  misc_feature (56)..(291): NCBI GI NO: 22960495 NR Description: hypothetical protein [Rhodobacter sphaeroides]
  misc_feature (139)..(301): NCBI GI NO: 15887452 NR Description: AGR_C_150p [Agrobacterium tumefaciens]
  misc_feature (157)..(305): NCBI GI NO: 13899267 NR Description: nudix
  misc_feature (157)..(304): NCBI GI NO: 23109722 NR Description: hypothetical protein
MAIHLRAHAFAANPLRGVSAATTAMSPSAAAEALRYLLDPSSAAAAANPSQYLSKILPFRRGRPLARSTDPPAAPAWRLAWLPPSRVPGVAPDAFVFLGALVEGDGKEAAAYWAVDVSEGEGARVGGPADGDGPSAFVDLRTLMVATDWSDKDAMAELAIAGHARALLEWHSTAKFCGACGAKAVPTEAGRRKQCSNDSCKKRIYPRIDPVVIMLVIDKENDRALLSRQSRFVPRMWSCLAGFIEPGESLEEAVRRETWEETGIEVGQVVYHSSQPWPVGPNTMPCQLMVGFFAYAKSLEINVEQAGA

SEQ ID NO: 24717 - protein, 284 aa, Zea mays subsp. mays
  peptide (1)..(284): Ceres Seq. ID no. 12410448
  misc_feature (185)..(281): Pfam Name: Pfam Description:  NUDIX domain
  misc_feature (1)..(281): NCBI GI NO: 15241252 NR Description: putative protein; protein id: At5g20070
  misc_feature (1)..(145): NCBI GI NO: 5803245 NR Description: hypothetical protein
  misc_feature (216)..(238): NCBI GI NO: 5803245 NR Description: hypothetical protein
  misc_feature (133)..(281): NCBI GI NO: 21312664 NR Description: RIKEN cDNA 0610016O18 [Mus musculus]
  misc_feature (57)..(280): NCBI GI NO: 22988758 NR Description: hypothetical protein [Burkholderia fungorum]
  misc_feature (140)..(281): NCBI GI NO: 15963981 NR Description: HYPOTHETICAL PROTEIN [Sinorhizobium meliloti]
  misc_feature (32)..(267): NCBI GI NO: 22960495 NR Description: hypothetical protein [Rhodobacter sphaeroides]
  misc_feature (115)..(277): NCBI GI NO: 15887452 NR Description: AGR_C_150p [Agrobacterium tumefaciens]
  misc_feature (133)..(281): NCBI GI NO: 13899267 NR Description: nudix
  misc_feature (133)..(280): NCBI GI NO: 23109722 NR Description: hypothetical protein
MSPSAAAEALRYLLDPSSAAAAANPSQYLSKILPFRRGRPLARSTDPPAAPAWRLAWLPPSRVPGVAPDAFVFLGALVEGDGKEAAAYWAVDVSEGEGARVGGPADGDGPSAFVDLRTLMVATDWSDKDAMAELAIAGHARALLEWHSTAKFCGACGAKAVPTEAGRRKQCSNDSCKKRIYPRIDPVVIMLVIDKENDRALLSRQSRFVPRMWSCLAGFIEPGESLEEAVRRETWEETGIEVGQVVYHSSQPWPVGPNTMPCQLMVGFFAYAKSLEINVEQAGA

SEQ ID NO: 24718 - DNA, 1320 bp, Zea mays subsp. mays
  misc_feature (1)..(1320): Ceres Seq. ID no. 12367593
agatgggacaaaaaaaaaatcgcgccgagtaccagagcgacgctacgcggcgtgacttctcccgaaacctccacatacccaaacccaccgaccgccgcctaggcttccacctctcccgctcaaactccggccactgaggtcgaacccgagcccgcgccgcagcggcacgatggtgaacgacgccgcggcgatggccgtcgtgagggcggcgcgcccagccctccgtggcgcccacgatggcgtcgccttcgccgcccacgccgccttcctcgccgatgggtactcgctctgcgccgtcggccctgccgcgctcgccgacccctcgcccttaggtgatgaggaggtggggattgatggttggaacatcatggagaattgttacgcctttttgtatagcaaggaggagaagggcaagaagaaaagggtactagtgaaatgtctggtgatcggtgaagtacttgcaattgatgtcttggatcttgaggcacaagataaggcgccttataatatccagattaatgtgaaagacttctttgtcgaagagcagccaaagaattatggggatatgtacaagaattttacaagtctcattgagactgtgaactcaaatgtgttgtgcaaattggatggagacggttccggtgctgaggctgctaagagcactgccgccgctgctgctaagaactctgatgggagaagttcaccaatacagagctctggagatccaggtcctagaactgctgacccttccggcctaatttatcctccaatagcaccgattggttctgatgatctctaccctgggcctggtgcaggcttctaccctcacagtggcattgggagcggtggcagcatgcatgttggtcctaatgatccgcgcttctttccttctaatcccttctctgccccatttggtgggcttgggagtgttccaccaggtagtcgctatgatccaattggcccacctgacgtcccagggtttgagccatctagctttgttaggcgtccaaggcggcctccaggcgggagcacccaccccgacctcgagttcttccagcaaggcccagacttctgagagtcgcgcagaggccggccggagcctcgccctaccctcacgaaataacttcaaaatgctgagccctcgagctagatatctcgcttggtgtgattgcaactgctgtatcaagtatagtcctagtgcgctttggctgtaaagatggatgtgaacatcgtcctagtgtatttactcttaattccaaaccatcgcctgtcatagcctaatatactcttttgtgtataatatcgggtgtaccggagccc

SEQ ID NO: 24719 - protein, 301 aa, Zea mays subsp. mays
  peptide (1)..(301): Ceres Seq. ID no. 12367594
  misc_feature (1)..(265): NCBI GI NO: 34898580 NR Description: P0534A03.16
  misc_feature (1)..(301): NCBI GI NO: 15232382 NR Description: putative protein; protein id: At3g53970
  misc_feature (196)..(299): NCBI GI NO: 34898580 NR Description: P0534A03.16
  misc_feature (237)..(301): NCBI GI NO: 7489377 NR Description: hypothetical protein - barley (fragment)
  misc_feature (1)..(165): NCBI GI NO: 15221211 NR Description: hypothetical protein; protein id: At1g48530.1
  misc_feature (141)..(283): NCBI GI NO: 7630123 NR Description: hypothetical protein [Schizosaccharomyces pombe]
MVNDAAAMAVVRAARPALRGAHDGVAFAAHAAFLADGYSLCAVGPAALADPSPLGDEEVGIDGWNIMENCYAFLYSKEEKGKKKRVLVKCLVIGEVLAIDVLDLEAQDKAPYNIQINVKDFFVEEQPKNYGDMYKNFTSLIETVNSNVLCKLDGDGSGAEAAKSTAAAAAKNSDGRSSPIQSSGDPGPRTADPSGLIYPPIAPIGSDDLYPGPGAGFYPHSGIGSGGSMHVGPNDPRFFPSNPFSAPFGGLGSVPPGSRYDPIGPPDVPGFEPSSFVRRPRRPPGGSTHPDLEFFQQGPDF

SEQ ID NO: 24720 - protein, 294 aa, Zea mays subsp. mays
  peptide (1)..(294): Ceres Seq. ID no. 12367595
  misc_feature (1)..(258): NCBI GI NO: 34898580 NR Description: P0534A03.16
  misc_feature (1)..(294): NCBI GI NO: 15232382 NR Description: putative protein; protein id: At3g53970
  misc_feature (189)..(292): NCBI GI NO: 34898580 NR Description: P0534A03.16
  misc_feature (230)..(294): NCBI GI NO: 7489377 NR Description: hypothetical protein - barley (fragment)
  misc_feature (1)..(158): NCBI GI NO: 15221211 NR Description: hypothetical protein; protein id: At1g48530.1
  misc_feature (134)..(276): NCBI GI NO: 7630123 NR Description: hypothetical protein [Schizosaccharomyces pombe]
MAVVRAARPALRGAHDGVAFAAHAAFLADGYSLCAVGPAALADPSPLGDEEVGIDGWNIMENCYAFLYSKEEKGKKKRVLVKCLVIGEVLAIDVLDLEAQDKAPYNIQINVKDFFVEEQPKNYGDMYKNFTSLIETVNSNVLCKLDGDGSGAEAAKSTAAAAAKNSDGRSSPIQSSGDPGPRTADPSGLIYPPIAPIGSDDLYPGPGAGFYPHSGIGSGGSMHVGPNDPRFFPSNPFSAPFGGLGSVPPGSRYDPIGPPDVPGFEPSSFVRRPRRPPGGSTHPDLEFFQQGPDF

SEQ ID NO: 24721 - protein, 235 aa, Zea mays subsp. mays
  peptide (1)..(235): Ceres Seq. ID no. 12367596
  misc_feature (1)..(199): NCBI GI NO: 34898580 NR Description: P0534A03.16
  misc_feature (1)..(235): NCBI GI NO: 15232382 NR Description: putative protein; protein id: At3g53970
  misc_feature (130)..(233): NCBI GI NO: 34898580 NR Description: P0534A03.16
  misc_feature (171)..(235): NCBI GI NO: 7489377 NR Description: hypothetical protein - barley (fragment)
  misc_feature (1)..(99): NCBI GI NO: 15221211 NR Description: hypothetical protein; protein id: At1g48530.1
  misc_feature (75)..(217): NCBI GI NO: 7630123 NR Description: hypothetical protein [Schizosaccharomyces pombe]
MENCYAFLYSKEEKGKKKRVLVKCLVIGEVLAIDVLDLEAQDKAPYNIQINVKDFFVEEQPKNYGDMYKNFTSLIETVNSNVLCKLDGDGSGAEAAKSTAAAAAKNSDGRSSPIQSSGDPGPRTADPSGLIYPPIAPIGSDDLYPGPGAGFYPHSGIGSGGSMHVGPNDPRFFPSNPFSAPFGGLGSVPPGSRYDPIGPPDVPGFEPSSFVRRPRRPPGGSTHPDLEFFQQGPDF

SEQ ID NO: 24722 - DNA, 1482 bp, Zea mays subsp. mays
  misc_feature (1)..(1482): Ceres Seq. ID no. 12373828
  misc_feature (1200)..(1200): n is a, c, t, g, unknown, or other
gcacgagaccattacctagaacatcctaatcaaaaaacggtctgctctctttctctctcttcccctattacgagtcccagcagctagaacaacacaaaccctctcctgtagctagatgtgtggtagtaagctctcgctgttaacctcggcaaagaacctactggaagtcggaagggaaaaagcaaagtaggagtagctagctagtatagcaaacaagctcccccgtgtgccgacgagccgccgactaggtcagccgccatggacttcgacgagcacgatgacggcgacgaggagatgacgccgatgcccgtgagctcgagctacgatgcgccgatgcagccggggctgggactgggcggaggaggcggcgagaccccgaagcacggggattctgctggagccgggagcttcaggacgccgccagcaggcggcttcgggggaggaggcgcaggcgcaggcgcaggcgcaggcggtggcggggccaccaggtaccgggagtgcctcaagaaccacgcggtcggcatcggcgggcacgcggtggacggctgcggcgaattcatggccgctggcgaggagggctccatcgacgcgctgcgctgcgcggcctgcggctgccaccgcaacttccaccgcaaggagtccgacaactcgccagcgggaggcgggggcgtcgcgccgcccgatcccgccgccgccctgtccccggccgccatcacagcctacggcgccgccgtggcggcgcaccaccaccagttctccccctactaccgcacccctgccgggtacttcctgcaccagcagctggcggccgccgccgggcacatgcagcgcccgctcgcgctgccgtccacctcccactcgctggggcgcgaagagggcgacgacgtgtccgggctgatcggccccatggtggtggcgcccatgatgggcatgtcgctgggcccgggcggcggcccgtcggggggctcgtccggcggctcggggtccggcaagaagcggttccgcaccaagttcacgcaggagcagaaggaccggatgctggcgttcgcggagcggctggggtggcgcatccagaagcacgacgaggccgccgtgcagcagttctgcgaggaggtctgcgtcaagcgccacgtgctcaaggtgtggatgcacaacaacaagcacaccctcggcaagaagccatgaccgaccgccggccanttcttcgcgccggcgcctgcactgtgtgctagctaggtacaccaccactgatcgcattgcatcatagatctcctcctctctttctcagcaccgtattgcttgctagccttttttttttgggggtactcctctccttgccttcctttttttagagttttagctagaaatgtaagctagctacttaggtcagtagcgagcagcagttcttggattttagctacgatggagaagacggccgttgttctcttgtcatcttcattattttattgtacttctttggcc

SEQ ID NO: 24723 - protein, 308 aa, Zea mays subsp. mays
  peptide (1)..(308): Ceres Seq. ID no. 12373829
  misc_feature (73)..(127): Pfam Name: Pfam Description:  ZF-HD protein dimerisation region
  misc_feature (57)..(130): NCBI GI NO: 15233925 NR Description: putative protein; protein id: At4g24660
  misc_feature (241)..(308): NCBI GI NO: 15233925 NR Description: putative protein; protein id: At4g24660
  misc_feature (216)..(308): NCBI GI NO: 15238445 NR Description: hypothetical protein common family
  misc_feature (46)..(127): NCBI GI NO: 15238445 NR Description: hypothetical protein common family
  misc_feature (43)..(308): NCBI GI NO: 19387257 NR Description: hypothetical protein
  misc_feature (222)..(308): NCBI GI NO: 18410804 NR Description: expressed protein; protein id: At1g75240
  misc_feature (77)..(129): NCBI GI NO: 18410804 NR Description: expressed protein; protein id: At1g75240
  misc_feature (229)..(307): NCBI GI NO: 15226993 NR Description: hypothetical protein; protein id: At2g02540
  misc_feature (229)..(307): NCBI GI NO: 20148768 NR Description: hypothetical protein At2g02540/T822.16
  misc_feature (77)..(129): NCBI GI NO: 15226993 NR Description: hypothetical protein; protein id: At2g02540
MDFDEHDDGDEEMTPMPVSSSYDAPMQPGLGLGGGGGETPKHGDSAGAGSFRTPPAGGFGGGGAGAGAGAGGGGATRYRECLKNHAVGIGGHAVDGCGEFMAAGEEGSIDALRCAACGCHRNFHRKESDNSPAGGGGVAPPDPAAALSPAAITAYGAAVAAHHHQFSPYYRTPAGYFLHQQLAAAAGHMQRPLALPSTSHSLGREEGDDVSGLIGPMVVAPMMGMSLGPGGGPSGGSSGGSGSGKKRFRTKFTQEQKDRMLAFAERLGWRIQKHDEAAVQQFCEEVCVKRHVLKVWMHNNKHTLGKKP

SEQ ID NO: 24724 - protein, 296 aa, Zea mays subsp. mays
  peptide (1)..(296): Ceres Seq. ID no. 12373830
  misc_feature (61)..(115): Pfam Name: Pfam Description:  ZF-HD protein dimerisation region
  misc_feature (45)..(118): NCBI GI NO: 15233925 NR Description: putative protein; protein id: At4g24660
  misc_feature (229)..(296): NCBI GI NO: 15233925 NR Description: putative protein; protein id: At4g24660
  misc_feature (204)..(296): NCBI GI NO: 15238445 NR Description: hypothetical protein common family
  misc_feature (34)..(115): NCBI GI NO: 15238445 NR Description: hypothetical protein common family
  misc_feature (31)..(296): NCBI GI NO: 19387257 NR Description: hypothetical protein
  misc_feature (210)..(296): NCBI GI NO: 18410804 NR Description: expressed protein; protein id: At1g75240
  misc_feature (65)..(117): NCBI GI NO: 18410804 NR Description: expressed protein; protein id: At1g75240
  misc_feature (217)..(295): NCBI GI NO: 15226993 NR Description: hypothetical protein; protein id: At2g02540
  misc_feature (217)..(295): NCBI GI NO: 20148768 NR Description: hypothetical protein At2g02540/T822.16
  misc_feature (65)..(117): NCBI GI NO: 15226993 NR Description: hypothetical protein; protein id: At2g02540
MTPMPVSSSYDAPMQPGLGLGGGGGETPKHGDSAGAGSFRTPPAGGFGGGGAGAGAGAGGGGATRYRECLKNHAVGIGGHAVDGCGEFMAAGEEGSIDALRCAACGCHRNFHRKESDNSPAGGGGVAPPDPAAALSPAAITAYGAAVAAHHHQFSPYYRTPAGYFLHQQLAAAAGHMQRPLALPSTSHSLGREEGDDVSGLIGPMVVAPMMGMSLGPGGGPSGGSSGGSGSGKKRFRTKFTQEQKDRMLAFAERLGWRIQKHDEAAVQQFCEEVCVKRHVLKVWMHNNKHTLGKKP

SEQ ID NO: 24725 - protein, 293 aa, Zea mays subsp. mays
  peptide (1)..(293): Ceres Seq. ID no. 12373831
  misc_feature (58)..(112): Pfam Name: Pfam Description:  ZF-HD protein dimerisation region
  misc_feature (42)..(115): NCBI GI NO: 15233925 NR Description: putative protein; protein id: At4g24660
  misc_feature (226)..(293): NCBI GI NO: 15233925 NR Description: putative protein; protein id: At4g24660
  misc_feature (201)..(293): NCBI GI NO: 15238445 NR Description: hypothetical protein common family
  misc_feature (31)..(112): NCBI GI NO: 15238445 NR Description: hypothetical protein common family
  misc_feature (28)..(293): NCBI GI NO: 19387257 NR Description: hypothetical protein
  misc_feature (207)..(293): NCBI GI NO: 18410804 NR Description: expressed protein; protein id: At1g75240
  misc_feature (62)..(114): NCBI GI NO: 18410804 NR Description: expressed protein; protein id: At1g75240
  misc_feature (214)..(292): NCBI GI NO: 15226993 NR Description: hypothetical protein; protein id: At2g02540
  misc_feature (214)..(292): NCBI GI NO: 20148768 NR Description: hypothetical protein At2g02540/T822.16
  misc_feature (62)..(114): NCBI GI NO: 15226993 NR Description: hypothetical protein; protein id: At2g02540
MPVSSSYDAPMQPGLGLGGGGGETPKHGDSAGAGSFRTPPAGGFGGGGAGAGAGAGGGGATRYRECLKNHAVGIGGHAVDGCGEFMAAGEEGSIDALRCAACGCHRNFHRKESDNSPAGGGGVAPPDPAAALSPAAITAYGAAVAAHHHQFSPYYRTPAGYFLHQQLAAAAGHMQRPLALPSTSHSLGREEGDDVSGLIGPMVVAPMMGMSLGPGGGPSGGSSGGSGSGKKRFRTKFTQEQKDRMLAFAERLGWRIQKHDEAAVQQFCEEVCVKRHVLKVWMHNNKHTLGKKP

SEQ ID NO: 24726 - DNA, 1149 bp, Zea mays subsp. mays
  misc_feature (1)..(1149): Ceres Seq. ID no. 12407816
agttcgcttcgtgagttatctcctctcgatcgatcgcttcctccatcgaggcgggaaagcgccgcccagatcgccggatagcaagctggcgacctcaccagctccgagcagcagcagggaggctcgtggaaccattagtcgttttctgtcagcggcaacagagcacaccatggaggggctgagctggagaacggtgtgttgtttatcggtgctctgtgccgtgctgttcttgcgcccggccgagggcatccgcttcgtgatcgacagggaagagtgcttctcgcataacgtggaatacgagggggatactgtccatgtatccttcgtcgtcatcaaggctgacaccccgtggcattacagcgaggagggcgtcgatcttgtggttaaggatcctaatggcgctcaagtccgtgattcccgagataagactagtgacaagtttgagttcatagttcagaagagaggcgtccatcgcttctgcttcacgaacaaatccccatatcacgaaacgatagacttcgatgttcatgttggccatttttcatatttcgagcagcatgccaaagatgagcattttgcaccactttttgatcaaataggcaagttggatgaggcactttataatattcagttcgaacagcactggctagaggcccagactgaccgtcaagcaatattgaacgagaacatgagcaggagggcagtccataaggcgctcttcgagtcagcggcgctgatcgccgccagcgtcatccaagtctacctcctgcgccggctcttcgagcgcaagctggggacgtctcgggtttaaggcaacagtagccaacttgcccttcgcagccaccatgatcacaccgacataaccgttacgaattcgaatggttgctagatcagctaaataccacatgtttgtggacttcagttacatgtaatattttttttgtgattccacagatgagaactcttcaaagtttaaaccgtcgatttagccttcattctgcctcagcattttatcgccttgtttctgtagtagcaaccagtaacaacaaggttgcctgtagtctgtacaagatagtagaggttttttttttctgtgctggttgtacgacacaactgtgaatgacttgccgtagacggatactatactgt

SEQ ID NO: 24727 - protein, 269 aa, Zea mays subsp. mays
  peptide (1)..(269): Ceres Seq. ID no. 12407817
  misc_feature (70)..(265): Pfam Name: Pfam Description:  emp24/gp25L/p24 family
  misc_feature (70)..(269): NCBI GI NO: 15231496 NR Description: putative coated vesicle membrane protein
  misc_feature (70)..(269): NCBI GI NO: 21595553 NR Description: putative coated vesicle membrane protein
  misc_feature (60)..(269): NCBI GI NO: 30017578 NR Description: putative cop-coated vesicle membrane protein
  misc_feature (87)..(269): NCBI GI NO: 17979492 NR Description: AT3g22845/MWI23_22 [Arabidopsis thaliana]
  misc_feature (156)..(269): NCBI GI NO: 22331264 NR Description: hypothetical protein; protein id: At3g22845
  misc_feature (71)..(269): NCBI GI NO: 14042242 NR Description: unnamed protein product [Homo sapiens]
  misc_feature (70)..(261): NCBI GI NO: 29477153 NR Description: Similar to coated vesicle membrane protein
  misc_feature (90)..(263): NCBI GI NO: 18921123 NR Description: CG3564-PA [Drosophila melanogaster]
  misc_feature (69)..(269): NCBI GI NO: 12585535 NR Description: Hypothetical protein CGI-109 precursor
  misc_feature (64)..(261): NCBI GI NO: 13929014 NR Description: coated vesicle membrane protein
VRFVSYLLSIDRFLHRGGKAPPRSPDSKLATSPAPSSSREARGTISRFLSAATEHTMEGLSWRTVCCLSVLCAVLFLRPAEGIRFVIDREECFSHNVEYEGDTVHVSFVVIKADTPWHYSEEGVDLVVKDPNGAQVRDSRDKTSDKFEFIVQKRGVHRFCFTNKSPYHETIDFDVHVGHFSYFEQHAKDEHFAPLFDQIGKLDEALYNIQFEQHWLEAQTDRQAILNENMSRRAVHKALFESAALIAASVIQVYLLRRLFERKLGTSRV

SEQ ID NO: 24728 - protein, 213 aa, Zea mays subsp. mays
  peptide (1)..(213): Ceres Seq. ID no. 12407818
  misc_feature (14)..(209): Pfam Name: Pfam Description:  emp24/gp25L/p24 family
  misc_feature (14)..(213): NCBI GI NO: 15231496 NR Description: putative coated vesicle membrane protein
  misc_feature (14)..(213): NCBI GI NO: 21595553 NR Description: putative coated vesicle membrane protein
  misc_feature (4)..(213): NCBI GI NO: 30017578 NR Description: putative cop-coated vesicle membrane protein
  misc_feature (31)..(213): NCBI GI NO: 17979492 NR Description: AT3g22845/MWI23_22 [Arabidopsis thaliana]
  misc_feature (100)..(213): NCBI GI NO: 22331264 NR Description: hypothetical protein; protein id: At3g22845
  misc_feature (15)..(213): NCBI GI NO: 14042242 NR Description: unnamed protein product [Homo sapiens]
  misc_feature (14)..(205): NCBI GI NO: 29477153 NR Description: Similar to coated vesicle membrane protein
  misc_feature (34)..(207): NCBI GI NO: 18921123 NR Description: CG3564-PA [Drosophila melanogaster]
  misc_feature (13)..(213): NCBI GI NO: 12585535 NR Description: Hypothetical protein CGI-109 precursor
  misc_feature (8)..(205): NCBI GI NO: 13929014 NR Description: coated vesicle membrane protein
MEGLSWRTVCCLSVLCAVLFLRPAEGIRFVIDREECFSHNVEYEGDTVHVSFVVIKADTPWHYSEEGVDLVVKDPNGAQVRDSRDKTSDKFEFIVQKRGVHRFCFTNKSPYHETIDFDVHVGHFSYFEQHAKDEHFAPLFDQIGKLDEALYNIQFEQHWLEAQTDRQAILNENMSRRAVHKALFESAALIAASVIQVYLLRRLFERKLGTSRV

SEQ ID NO: 24729 - DNA, 1597 bp, Zea mays subsp. mays
  misc_feature (1)..(1597): Ceres Seq. ID no. 12352156
tcacactctgcccagctaagctaagctccctccgtccatcggcatggcgactaccactactaccatcctcctcctcctcctcgtcgcagccacagccgtctcggcggccgacctctccgtgtaccacaacgtgcacccgccgtccccgtccccgctcgagtccatcatcgcgctcgcccgcgccgacgacgcgcggctcctcttcctctcatccaaggcggcctcgtccggcggcgtcacctccgctcccgtcgcctccggccagactccgccctcgtacgtcgtccgcgcggggctcggcaccccggtccagcagctgctcctcgcgctcgacaccagcgccgacgccacctggtcgcactgcgcgccgtgcgacacgtgccccgccggcagccgcttcatcccggccagctcctcctcgtacgcctccctcccgtgcgcctccgactggtgcccgctcttcgagggccagccgtgcccggcgaatcaggacgcctcggcgccgctgccggcgtgcgccttctccaagccgttcgcggacacctcgttccaggcgtcgctgggcagcgacacgctgcgcctgggcaaggacgccatcgccggctacgcgttcgggtgcgtgggcgcggtggccgggccgacgaccaacctgccgaagcaggggctcctcggcctcggccggggccccatgtctctgctatcccagaccgggagcacgtacaacggcgtcttctcctactgcctgcccagctacaggtcctactacttctccggctccctccggctgggagccgccgggcagcccaggaacgtccggtacacgccgctgctgaccaacccgcaccgcccgtcgctctactacgtgaacgtgacggggctcagcgtgggtcggacctgggtgaaggtccccgcggggtcgttcgcgttcgacccggccaccggcgccggcacggtgatcgactcgggcacggtgatcacgcggtggacagcacccgtgtacgcggcgctgcgcgaggagttccggcggcaggtggcggcgccgagcgggtacacgtcgctgggagcgttcgacacgtgcttcaacacggacgaggtggcggcgggcggcgcgccgcccgtgacgctgcacatggacggcggcgtggacctgacgctgccgatggagaacacgctgatccacagcagcgccacgccgctggcgtgcctggccatggccgaggcgccgcagaacgtgaacgccgtcgtgaacgtggtggccaaccttcagcagcagaacgtgcgggtcgtcgtcgacgtcgccggctcgcgcgtcgggttcgcgagggagccctgcaactgagcccctgaatccgtccgtgccctatgcacgggaggaaggaggagacgcgctgcggctgctgcatcggtcggtgtgcagttagttgtcctgttagtctatgctacgttgtctgcactctgcaataacggacgtgacccggggaaaaaaactgtttcgtcacgggtagctagagaatcacgtaaggctcttgttttcgtttgtgtcctataatgtatggctattggcctgtttcgagaggttaaaatttggaggtgctgc

SEQ ID NO: 24730 - protein, 431 aa, Zea mays subsp. mays
  peptide (1)..(431): Ceres Seq. ID no. 12352157
  misc_feature (38)..(428): Pfam Name: Pfam Description:  Eukaryotic aspartyl protease
  misc_feature (34)..(431): NCBI GI NO: 18391062 NR Description: expressed protein; protein id: At1g09750
  misc_feature (52)..(431): NCBI GI NO: 21450872 NR Description: unknown protein [Arabidopsis thaliana]
  misc_feature (20)..(430): NCBI GI NO: 34899068 NR Description: similar to nucleoid DNA-binding-like protein
  misc_feature (1)..(430): NCBI GI NO: 20161865 NR Description: putative nucleoid DNA-binding-like protein
  misc_feature (17)..(431): NCBI GI NO: 15240680 NR Description: nucleoid DNA-binding-like protein
  misc_feature (21)..(430): NCBI GI NO: 21617933 NR Description: nucleoid DNA-binding-like protein
  misc_feature (21)..(430): NCBI GI NO: 15232503 NR Description: nucleoid DNA-binding - like protein
  misc_feature (38)..(430): NCBI GI NO: 15223368 NR Description: chloroplast nucleoid DNA binding protein, putative
  misc_feature (20)..(430): NCBI GI NO: 21594980 NR Description: chloroplast nucleoid DNA binding protein, putative
  misc_feature (1)..(430): NCBI GI NO: 15228618 NR Description: putative protein; protein id: At3g61820
MATTTTTILLLLLVAATAVSAADLSVYHNVHPPSPSPLESIIALARADDARLLFLSSKAASSGGVTSAPVASGQTPPSYVVRAGLGTPVQQLLLALDTSADATWSHCAPCDTCPAGSRFIPASSSSYASLPCASDWCPLFEGQPCPANQDASAPLPACAFSKPFADTSFQASLGSDTLRLGKDAIAGYAFGCVGAVAGPTTNLPKQGLLGLGRGPMSLLSQTGSTYNGVFSYCLPSYRSYYFSGSLRLGAAGQPRNVRYTPLLTNPHRPSLYYVNVTGLSVGRTWVKVPAGSFAFDPATGAGTVIDSGTVITRWTAPVYAALREEFRRQVAAPSGYTSLGAFDTCFNTDEVAAGGAPPVTLHMDGGVDLTLPMENTLIHSSATPLACLAMAEAPQNVNAVVNVVANLQQQNVRVVVDVAGSRVGFAREPCN

SEQ ID NO: 24731 - protein, 276 aa, Zea mays subsp. mays
  peptide (1)..(276): Ceres Seq. ID no. 12352158
  misc_feature (49)..(268): Pfam Name: Pfam Description:  Extensin-like region
  misc_feature (4)..(276): NCBI GI NO: 5821145 NR Description: RNA binding protein [Homo sapiens]
  misc_feature (4)..(276): NCBI GI NO: 5821143 NR Description: RNA binding protein [Homo sapiens]
  misc_feature (4)..(276): NCBI GI NO: 19923466 NR Description: splicing coactivator subunit SRm300
  misc_feature (16)..(276): NCBI GI NO: 5821151 NR Description: RNA binding protein [Homo sapiens]
  misc_feature (16)..(276): NCBI GI NO: 6634015 NR Description: KIAA0324 protein [Homo sapiens]
  misc_feature (16)..(276): NCBI GI NO: 7512967 NR Description: hypothetical protein KIAA0324 - human (fragment)
  misc_feature (16)..(276): NCBI GI NO: 6649242 NR Description: splicing coactivator subunit SRm300 [Homo sapiens]
  misc_feature (16)..(276): NCBI GI NO: 19923466 NR Description: splicing coactivator subunit SRm300
  misc_feature (21)..(276): NCBI GI NO: 27375632 NR Description: blr0521 [Bradyrhizobium japonicum]
  misc_feature (12)..(276): NCBI GI NO: 6649242 NR Description: splicing coactivator subunit SRm300 [Homo sapiens]
TLCPAKLSSLRPSAWRLPLLPSSSSSSSQPQPSRRPTSPCTTTCTRRPRPRSSPSSRSPAPTTRGSSSSHPRRPRPAASPPLPSPPARLRPRTSSARGSAPRSSSCSSRSTPAPTPPGRTARRATRAPPAAASSRPAPPRTPPSRAPPTGARSSRASRARRIRTPRRRCRRAPSPSRSRTPRSRRRWAATRCAWARTPSPATRSGAWARWPGRRPTCRSRGSSASAGAPCLCYPRPGARTTASSPTACPATGPTTSPAPSGWEPPGSPGTSGTRRC

SEQ ID NO: 24732 - protein, 216 aa, Zea mays subsp. mays
  peptide (1)..(216): Ceres Seq. ID no. 12352159
  misc_feature (1)..(213): Pfam Name: Pfam Description:  Eukaryotic aspartyl protease
  misc_feature (1)..(216): NCBI GI NO: 18391062 NR Description: expressed protein; protein id: At1g09750
  misc_feature (1)..(216): NCBI GI NO: 21450872 NR Description: unknown protein [Arabidopsis thaliana]
  misc_feature (1)..(215): NCBI GI NO: 34899068 NR Description: similar to nucleoid DNA-binding-like protein
  misc_feature (1)..(215): NCBI GI NO: 20161865 NR Description: putative nucleoid DNA-binding-like protein
  misc_feature (1)..(216): NCBI GI NO: 15240680 NR Description: nucleoid DNA-binding-like protein
  misc_feature (1)..(215): NCBI GI NO: 21617933 NR Description: nucleoid DNA-binding-like protein
  misc_feature (1)..(215): NCBI GI NO: 15232503 NR Description: nucleoid DNA-binding - like protein
  misc_feature (1)..(215): NCBI GI NO: 15223368 NR Description: chloroplast nucleoid DNA binding protein, putative
  misc_feature (1)..(215): NCBI GI NO: 21594980 NR Description: chloroplast nucleoid DNA binding protein, putative
  misc_feature (1)..(215): NCBI GI NO: 15228618 NR Description: putative protein; protein id: At3g61820
MSLLSQTGSTYNGVFSYCLPSYRSYYFSGSLRLGAAGQPRNVRYTPLLTNPHRPSLYYVNVTGLSVGRTWVKVPAGSFAFDPATGAGTVIDSGTVITRWTAPVYAALREEFRRQVAAPSGYTSLGAFDTCFNTDEVAAGGAPPVTLHMDGGVDLTLPMENTLIHSSATPLACLAMAEAPQNVNAVVNVVANLQQQNVRVVVDVAGSRVGFAREPCN

SEQ ID NO: 24733 - DNA, 1481 bp, Zea mays subsp. mays
  misc_feature (1)..(1481): Ceres Seq. ID no. 12373824
aacaaaataccgatcgcccgaccccttcagtgccttgactcacgcccgcggcaaccggcgacgaggcggcacgaccctccagtccggagtccgccatgcctcacgccgccgccaccgccgctgcggcgctcccgcgtgcctctctgctcgttatctcggcgccgctccgcgactccctcgccgcggcgccgtacgagccccccgcgggcgcatccgcctccgtcaagtccctcctcgcctctctcctcccttcgccttcccctccccagccccagcttcaggagccggcgggtaaggagtctggggacctcctcctcttctgcgctgccgtactcgcggcctccccggagtaccccgcgctgcactgggtcccggcgagcctcgtgggcgcggccgccgccgcggtgaacgagctggcggcggcgggaggttggggcagcgttggggatatggtggtggccgtggcaccggaggtggtgcctcctctcaaggccgtggtgaaggactcgtgcgtcgatgctgacagcgacgagattggggctgtgaagccgcccaaggagcacgcagcagtcgccgcgcaccagttccggtggctggtgtctcaggtaagctaccctaagctcggggatttgtgttcgttagtcattccatgtgccctgacaaccttagatcattggtcaccagaagttaaggtacagggaatggtaagctttgtacacatagcgaagaatgtgaaagcaacggaattaagtttgtatgaagatgccatacttgatgcgtgctgtcagaacattcctgcagatgatgagttatggtaccaggttattgaggtatctgtgatgttgctgacattcacccagcggagcaatcctcgtagcccctggtatgatcgaatgcttagtgagatgttgggccacctggaacggcagccactaaataaagagcgtcgtgttgcatggttgacccttattgggccagtttttgatgctatgggcctcttcctgttggcacattttcgccgccttttctcactgtttttccaatggatgcacactgatgataataagacagttcttctgactttaaagcaaatacatgccattatcaagcttacctggatcaggaagtcaccttatactttgaggctggtggacgagcttgttctattatataaagaatcagccacaaggagcaaccgtgaaatcatgcgagatcatatcctggagatacttgtactgcttcagaactgcaagggacatcaatttgaggaagcttggaagaaacatgaactagacccagacttgacgatgctgctgtccactttcaataagctttgtataaaaaacagttcaccgtgatgttgagttcaactacatgtgttatcagtgtaaatatttcaccatcgcctatcctgtcactgaatatttcactactgcctattctgccactctcatctgctgaaggaaatcagccttgattct

SEQ ID NO: 24734 - protein, 420 aa, Zea mays subsp. mays
  peptide (1)..(420): Ceres Seq. ID no. 12373825
  misc_feature (121)..(404): NCBI GI NO: 20198306 NR Description: expressed protein [Arabidopsis thaliana]
  misc_feature (121)..(404): NCBI GI NO: 30688076 NR Description: expressed protein [Arabidopsis thaliana]
  misc_feature (121)..(404): NCBI GI NO: 26451294 NR Description: unknown protein [Arabidopsis thaliana]
  misc_feature (121)..(263): NCBI GI NO: 25370807 NR Description: hypothetical protein At2g39910
MPHAAATAAAALPRASLLVISAPLRDSLAAAPYEPPAGASASVKSLLASLLPSPSPPQPQLQEPAGKESGDLLLFCAAVLAASPEYPALHWVPASLVGAAAAAVNELAAAGGWGSVGDMVVAVAPEVVPPLKAVVKDSCVDADSDEIGAVKPPKEHAAVAAHQFRWLVSQVSYPKLGDLCSLVIPCALTTLDHWSPEVKVQGMVSFVHIAKNVKATELSLYEDAILDACCQNIPADDELWYQVIEVSVMLLTFTQRSNPRSPWYDRMLSEMLGHLERQPLNKERRVAWLTLIGPVFDAMGLFLLAHFRRLFSLFFQWMHTDDNKTVLLTLKQIHAIIKLTWIRKSPYTLRLVDELVLLYKESATRSNREIMRDHILEILVLLQNCKGHQFEEAWKKHELDPDLTMLLSTFNKLCIKNSSP

SEQ ID NO: 24735 - protein, 302 aa, Zea mays subsp. mays
  peptide (1)..(302): Ceres Seq. ID no. 12373826
  misc_feature (3)..(286): NCBI GI NO: 20198306 NR Description: expressed protein [Arabidopsis thaliana]
  misc_feature (3)..(286): NCBI GI NO: 30688076 NR Description: expressed protein [Arabidopsis thaliana]
  misc_feature (3)..(286): NCBI GI NO: 26451294 NR Description: unknown protein [Arabidopsis thaliana]
  misc_feature (3)..(145): NCBI GI NO: 25370807 NR Description: hypothetical protein At2g39910
MVVAVAPEVVPPLKAVVKDSCVDADSDEIGAVKPPKEHAAVAAHQFRWLVSQVSYPKLGDLCSLVIPCALTTLDHWSPEVKVQGMVSFVHIAKNVKATELSLYEDAILDACCQNIPADDELWYQVIEVSVMLLTFTQRSNPRSPWYDRMLSEMLGHLERQPLNKERRVAWLTLIGPVFDAMGLFLLAHFRRLFSLFFQWMHTDDNKTVLLTLKQIHAIIKLTWIRKSPYTLRLVDELVLLYKESATRSNREIMRDHILEILVLLQNCKGHQFEEAWKKHELDPDLTMLLSTFNKLCIKNSSP

SEQ ID NO: 24736 - protein, 218 aa, Zea mays subsp. mays
  peptide (1)..(218): Ceres Seq. ID no. 12373827
  misc_feature (1)..(202): NCBI GI NO: 20198306 NR Description: expressed protein [Arabidopsis thaliana]
  misc_feature (1)..(202): NCBI GI NO: 30688076 NR Description: expressed protein [Arabidopsis thaliana]
  misc_feature (1)..(202): NCBI GI NO: 26451294 NR Description: unknown protein [Arabidopsis thaliana]
  misc_feature (1)..(61): NCBI GI NO: 25370807 NR Description: hypothetical protein At2g39910
MVSFVHIAKNVKATELSLYEDAILDACCQNIPADDELWYQVIEVSVMLLTFTQRSNPRSPWYDRMLSEMLGHLERQPLNKERRVAWLTLIGPVFDAMGLFLLAHFRRLFSLFFQWMHTDDNKTVLLTLKQIHAIIKLTWIRKSPYTLRLVDELVLLYKESATRSNREIMRDHILEILVLLQNCKGHQFEEAWKKHELDPDLTMLLSTFNKLCIKNSSP

SEQ ID NO: 24737 - DNA, 1671 bp, Zea mays subsp. mays
  misc_feature (1)..(1671): Ceres Seq. ID no. 12594232
aaaaatttccccatctccgacctcccccttcctctccccctgccgctccccgcgccgagaaggagaaccccagccgccgcgcagcgcgccgcccatggcctcctcgtcggagaacgcggctgtgccgccggaggaggagccccaggccccgccgccgccggacacagagcctaccgaggcggcgcccggcgaggcggaggatgagccgcaaaccctagagcgggcgcaggagctcttcgacaggggttccaaggccatcgaggatgaggacttcgtcgacgccgtagactgtctcagccgagcgctcgagatcagggcttcacattatggagagctcgcaccggagtgtgccagcacatacttcaaatatggatgtgccctgctatacaaagctcaggaggagagtgatgttttgggaaatgttcccaagagcttgccaaatgaagactcagtgaagagtacagctactaaagatgacagtggaacctcaaaggtctctggtaccgatgcggaggatgctgcgtcatcagaaaaagttgatgctgaagaaggtcacaactcaaatggcaaaaatcaggagaatgggaatggtgaagttgagaaagatgatgacgacgtcgacgatgatgagaagatgggagatgaagaggataatgatttggatctttcttggaaaatgttggacattgctagggcaatagttgagaagagccaagataacactatggagaaagtaaaaatatattctgctcttgctgaagtggcaacggaaagagaggacatggacaactcactcagtgactatatgaaagctttatccatgttggagcatttggttgagcctgaccatcgtcgagttgtggaattaaacttccgcatttgtttggtttatgaactagtttccaagatcggagaagcaatttcatactgtgcaaaagcaatttcgctatgcaagtcacgcatacagagcctgaaaagttccaaggatgctttgttggctggtatagatggtgatgcatctgctgctgaagctgaaggaggctcagaaaaatctgccattgaaaaagagctagagcagcttactagcatattgcctgatcttgagaagaagcttgaggacctgtctgaagcaaacccaagcgctgacatggatgagatggtgaaggcaatcgtgtccagggtaactgatgtgatgccaaaagctgcatcttttacttcttcccagatggcaacctcaagcaatggattcgactcctcggttatgtctacggcagcgacaaccggaagctctggaagcaccgtgactgaccttggggttgtaggcagaggcgtcaaacgagctagcatcaagccgatctctgctgaacctgctgctaagaaacctgcacttgattcaccatctcaacaaggtgacagcagcatcaactctgaggttgttcctgcaacgcagactggagacgagtcagtatctaagtaaattacaatttcattagccctactgtaatgttaacttgctggaacatattagctgctatgtaaacgcttaagaagggactgctggggccatagactcatcgtgagctgaccattgaaatgttaaattgctgagatcatcatggcggtaaatcatgtctgctatatcaaatatgcttggtgagatgtgtactttcc

SEQ ID NO: 24738 - protein, 491 aa, Zea mays subsp. mays
  peptide (1)..(491): Ceres Seq. ID no. 12594233
  misc_feature (75)..(108): Pfam Name: Pfam Description:  TPR Domain
  misc_feature (32)..(491): NCBI GI NO: 38175649 NR Description: tetratricopeptide repeat-containing protein-like
  misc_feature (140)..(491): NCBI GI NO: 32352192 NR Description: hypothetical protein
  misc_feature (54)..(432): NCBI GI NO: 18419996 NR Description: putative protein; protein id: At4g37210.1
  misc_feature (54)..(375): NCBI GI NO: 25407799 NR Description: hypothetical protein AT4g37210
  misc_feature (61)..(330): NCBI GI NO: 4104353 NR Description: nuclear autoantigenic sperm protein autosomalvariant
  misc_feature (59)..(136): NCBI GI NO: 18129310 NR Description: hypothetical protein [Pinus pinaster]
  misc_feature (52)..(482): NCBI GI NO: 123127 NR Description: HISTONE-BINDING PROTEIN N1/N2
  misc_feature (32)..(330): NCBI GI NO: 13435642 NR Description: Unknown (protein for MGC:5829) [Mus musculus]
  misc_feature (61)..(330): NCBI GI NO: 27262630 NR Description: nuclear autoantigenic sperm protein isoform 3
  misc_feature (61)..(330): NCBI GI NO: 30584691 NR Description: Homo sapiens nuclear autoantigenic sperm protein
KISPSPTSPFLSPCRSPRREGEPQPPRSAPPMASSSENAAVPPEEEPQAPPPPDTEPTEAAPGEAEDEPQTLERAQELFDRGSKAIEDEDFVDAVDCLSRALEIRASHYGELAPECASTYFKYGCALLYKAQEESDVLGNVPKSLPNEDSVKSTATKDDSGTSKVSGTDAEDAASSEKVDAEEGHNSNGKNQENGNGEVEKDDDDVDDDEKMGDEEDNDLDLSWKMLDIARAIVEKSQDNTMEKVKIYSALAEVATEREDMDNSLSDYMKALSMLEHLVEPDHRRVVELNFRICLVYELVSKIGEAISYCAKAISLCKSRIQSLKSSKDALLAGIDGDASAAEAEGGSEKSAIEKELEQLTSILPDLEKKLEDLSEANPSADMDEMVKAIVSRVTDVMPKAASFTSSQMATSSNGFDSSVMSTAATTGSSGSTVTDLGVVGRGVKRASIKPISAEPAAKKPALDSPSQQGDSSINSEVVPATQTGDESVSK

SEQ ID NO: 24739 - protein, 460 aa, Zea mays subsp. mays
  peptide (1)..(460): Ceres Seq. ID no. 12594234
  misc_feature (44)..(77): Pfam Name: Pfam Description:  TPR Domain
  misc_feature (1)..(460): NCBI GI NO: 38175649 NR Description: tetratricopeptide repeat-containing protein-like
  misc_feature (109)..(460): NCBI GI NO: 32352192 NR Description: hypothetical protein
  misc_feature (23)..(401): NCBI GI NO: 18419996 NR Description: putative protein; protein id: At4g37210.1
  misc_feature (23)..(344): NCBI GI NO: 25407799 NR Description: hypothetical protein AT4g37210
  misc_feature (30)..(299): NCBI GI NO: 4104353 NR Description: nuclear autoantigenic sperm protein autosomalvariant
  misc_feature (28)..(105): NCBI GI NO: 18129310 NR Description: hypothetical protein [Pinus pinaster]
  misc_feature (21)..(451): NCBI GI NO: 123127 NR Description: HISTONE-BINDING PROTEIN N1/N2
  misc_feature (1)..(299): NCBI GI NO: 13435642 NR Description: Unknown (protein for MGC:5829) [Mus musculus]
  misc_feature (30)..(299): NCBI GI NO: 27262630 NR Description: nuclear autoantigenic sperm protein isoform 3
  misc_feature (30)..(299): NCBI GI NO: 30584691 NR Description: Homo sapiens nuclear autoantigenic sperm protein
MASSSENAAVPPEEEPQAPPPPDTEPTEAAPGEAEDEPQTLERAQELFDRGSKAIEDEDFVDAVDCLSRALEIRASHYGELAPECASTYFKYGCALLYKAQEESDVLGNVPKSLPNEDSVKSTATKDDSGTSKVSGTDAEDAASSEKVDAEEGHNSNGKNQENGNGEVEKDDDDVDDDEKMGDEEDNDLDLSWKMLDIARAIVEKSQDNTMEKVKIYSALAEVATEREDMDNSLSDYMKALSMLEHLVEPDHRRVVELNFRICLVYELVSKIGEAISYCAKAISLCKSRIQSLKSSKDALLAGIDGDASAAEAEGGSEKSAIEKELEQLTSILPDLEKKLEDLSEANPSADMDEMVKAIVSRVTDVMPKAASFTSSQMATSSNGFDSSVMSTAATTGSSGSTVTDLGVVGRGVKRASIKPISAEPAAKKPALDSPSQQGDSSINSEVVPATQTGDESVSK

SEQ ID NO: 24740 - protein, 280 aa, Zea mays subsp. mays; identical to SEQ ID NO: 24336
  peptide (1)..(280): Ceres Seq. ID no. 12594235
  misc_feature (1)..(280): NCBI GI NO: 38175649 NR Description: tetratricopeptide repeat-containing protein-like
  misc_feature (1)..(280): NCBI GI NO: 32352192 NR Description: hypothetical protein
  misc_feature (1)..(221): NCBI GI NO: 18419996 NR Description: putative protein; protein id: At4g37210.1
  misc_feature (1)..(164): NCBI GI NO: 25407799 NR Description: hypothetical protein AT4g37210
  misc_feature (1)..(119): NCBI GI NO: 4104353 NR Description: nuclear autoantigenic sperm protein autosomalvariant
  misc_feature (1)..(271): NCBI GI NO: 123127 NR Description: HISTONE-BINDING PROTEIN N1/N2
  misc_feature (1)..(119): NCBI GI NO: 13435642 NR Description: Unknown (protein for MGC:5829) [Mus musculus]
  misc_feature (1)..(119): NCBI GI NO: 27262630 NR Description: nuclear autoantigenic sperm protein isoform 3
  misc_feature (1)..(119): NCBI GI NO: 30584691 NR Description: Homo sapiens nuclear autoantigenic sperm protein
  misc_feature (1)..(268): NCBI GI NO: 28277791 NR Description: Unknown (protein for MGC:56007) [Danio rerio]

SEQ ID NO: 24741 - DNA, 1252 bp, Zea mays subsp. mays
  misc_feature (1)..(1252): Ceres Seq. ID no. 12412175
atgcagcagcgaacaacacaaattaagtagtggagtgtcagaacttgggaggcacaaattaagtacaaagcagtctaattaatgacgggcccgatggagattccggtgatcgatctcggcggcctcaacggcggcggcgaggagaggtcgcggaccttggcggagctccacgacgcctgcaaggactggggcttcttctgggtggagaaccacggcgtggacgcgccgctgatggacgaggtcaagcgcttcgtctacggccactacgaggagcacctggaggccaagttctacgcctccgccctcgccatggacctcgaggccgccaccagaggtgacactgatgagaagccctccgacgaggtggactgggagtccacctacttcatccagcaccaccccaagaccaacgtcgccgacttcccagagatcacgccgccgacacgagagacgctggacgcgtacgtcgcccagatggtgtccctcgcggagcgtctggcggagtgcatgagcctcaacctgggcctccccggcgcccacgtggccgccaccttcgcgccgccgttcgtgggcaccaagttcgccatgtacccgtcctgcccgcgcccggagctggtgtggggcctgcgcgcgcacaccgacgccggcggcatcatcctgctcctccaggacgacgtcgtgggcggcctcgagttcctcagggccggcgcccactgggtccccgtcggccccaccaaggggggcaggctcttcgtcaacatcggggaccagatcgaggtcctcagcgccggcgcctaccggagcgtcctgcaccgcgtcgcggccggggaccagggccgccgcctgtccgtggccacgttctacaaccctggcaccgacgccgtggtcgcgccagcgcccggcagggacgatcagggcgccggcgccgccgcgtaccccggtccctacaggttcggggactacctcgactactaccagggcaccaagttcggcgacaaggacgccaggttccaggccgtcaagaagctgctcggctaagcgaacagctgcaagtaggcagaggcagcttagctcgtggactatgcatagtttcaagcttgctgcttgcttcttgttcgatccattgtctgcatgcgtactgttgcgtgtttaaatttagcaaatcttatacgtagtcgttactggtactacgtattctgtggttgacaatacattgttgcggtttaagggcgcatccgtttggtggacttgc

SEQ ID NO: 24742 - protein, 318 aa, Zea mays subsp. mays
  peptide (1)..(318): Ceres Seq. ID no. 12412176
  misc_feature (161)..(263): Pfam Name: II Pfam Description: 2OG-Fe
  misc_feature (5)..(316): NCBI GI NO: 34913082 NR Description: putative 1-aminocyclopropane-1-carboxylate oxidase
  misc_feature (5)..(316): NCBI GI NO: 30060226 NR Description: 1-aminocyclopropane-1-carboxylic acid oxidase
  misc_feature (5)..(318): NCBI GI NO: 15224803 NR Description: 1-aminocyclopropane-1-carboxylate oxidase
  misc_feature (2)..(316): NCBI GI NO: 25989506 NR Description: ACC oxidase [Solanum tuberosum]
  misc_feature (5)..(316): NCBI GI NO: 2129503 NR Description: ACC oxidase (clone ACO2) oxidase - muskmelon
  misc_feature (1)..(316): NCBI GI NO: 12862572 NR Description: 1-aminocyclopropane-1-carboxylate oxidase
  misc_feature (8)..(316): NCBI GI NO: 2492612 NR Description: 1-aminocyclopropane-1-carboxylate oxidase 1
  misc_feature (8)..(316): NCBI GI NO: 29467012 NR Description: ACC oxidase [Striga hermonthica]
  misc_feature (5)..(316): NCBI GI NO: 7433206 NR Description: probable 1-aminocyclopropane-1-carboxylate oxidase
  misc_feature (1)..(314): NCBI GI NO: 7433198 NR Description: probable 1-aminocyclopropane-1-carboxylate oxidase
MTGPMEIPVIDLGGLNGGGEERSRTLAELHDACKDWGFFWVENHGVDAPLMDEVKRFVYGHYEEHLEAKFYASALAMDLEAATRGDTDEKPSDEVDWESTYFIQHHPKTNVADFPEITPPTRETLDAYVAQMVSLAERLAECMSLNLGLPGAHVAATFAPPFVGTKFAMYPSCPRPELVWGLRAHTDAGGIILLLQDDVVGGLEFLRAGAHWVPVGPTKGGRLFVNIGDQIEVLSAGAYRSVLHRVAAGDQGRRLSVATFYNPGTDAVVAPAPGRDDQGAGAAAYPGPYRFGDYLDYYQGTKFGDKDARFQAVKKLLG

SEQ ID NO: 24743 - protein, 314 aa, Zea mays subsp. mays
  peptide (1)..(314): Ceres Seq. ID no. 12412177
  misc_feature (157)..(259): Pfam Name: II Pfam Description: 2OG-Fe
  misc_feature (1)..(312): NCBI GI NO: 34913082 NR Description: putative 1-aminocyclopropane-1-carboxylate oxidase
  misc_feature (1)..(312): NCBI GI NO: 30060226 NR Description: 1-aminocyclopropane-1-carboxylic acid oxidase
  misc_feature (1)..(314): NCBI GI NO: 15224803 NR Description: 1-aminocyclopropane-1-carboxylate oxidase
  misc_feature (1)..(312): NCBI GI NO: 25989506 NR Description: ACC oxidase [Solanum tuberosum]
  misc_feature (1)..(312): NCBI GI NO: 2129503 NR Description: ACC oxidase (clone ACO2) oxidase - muskmelon
  misc_feature (1)..(312): NCBI GI NO: 12862572 NR Description: 1-aminocyclopropane-1-carboxylate oxidase
  misc_feature (4)..(312): NCBI GI NO: 2492612 NR Description: 1-aminocyclopropane-1-carboxylate oxidase 1
  misc_feature (4)..(312): NCBI GI NO: 29467012 NR Description: ACC oxidase [Striga hermonthica]
  misc_feature (1)..(312): NCBI GI NO: 7433206 NR Description: probable 1-aminocyclopropane-1-carboxylate oxidase
  misc_feature (1)..(310): NCBI GI NO: 7433198 NR Description: probable 1-aminocyclopropane-1-carboxylate oxidase
MEIPVIDLGGLNGGGEERSRTLAELHDACKDWGFFWVENHGVDAPLMDEVKRFVYGHYEEHLEAKFYASALAMDLEAATRGDTDEKPSDEVDWESTYFIQHHPKTNVADFPEITPPTRETLDAYVAQMVSLAERLAECMSLNLGLPGAHVAATFAPPFVGTKFAMYPSCPRPELVWGLRAHTDAGGIILLLQDDVVGGLEFLRAGAHWVPVGPTKGGRLFVNIGDQIEVLSAGAYRSVLHRVAAGDQGRRLSVATFYNPGTDAVVAPAPGRDDQGAGAAAYPGPYRFGDYLDYYQGTKFGDKDARFQAVKKLLG

SEQ ID NO: 24744 - protein, 268 aa, Zea mays subsp. mays
  peptide (1)..(268): Ceres Seq. ID no. 12412178
  misc_feature (111)..(213): Pfam Name: II Pfam Description: 2OG-Fe
  misc_feature (1)..(266): NCBI GI NO: 34913082 NR Description: putative 1-aminocyclopropane-1-carboxylate oxidase
  misc_feature (1)..(266): NCBI GI NO: 30060226 NR Description: 1-aminocyclopropane-1-carboxylic acid oxidase
  misc_feature (1)..(268): NCBI GI NO: 15224803 NR Description: 1-aminocyclopropane-1-carboxylate oxidase
  misc_feature (1)..(266): NCBI GI NO: 25989506 NR Description: ACC oxidase [Solanum tuberosum]
  misc_feature (1)..(266): NCBI GI NO: 2129503 NR Description: ACC oxidase (clone ACO2) oxidase - muskmelon
  misc_feature (1)..(266): NCBI GI NO: 12862572 NR Description: 1-aminocyclopropane-1-carboxylate oxidase
  misc_feature (1)..(266): NCBI GI NO: 2492612 NR Description: 1-aminocyclopropane-1-carboxylate oxidase 1
  misc_feature (1)..(266): NCBI GI NO: 29467012 NR Description: ACC oxidase [Striga hermonthica]
  misc_feature (1)..(266): NCBI GI NO: 7433206 NR Description: probable 1-aminocyclopropane-1-carboxylate oxidase
  misc_feature (1)..(264): NCBI GI NO: 7433198 NR Description: probable 1-aminocyclopropane-1-carboxylate oxidase
MDEVKRFVYGHYEEHLEAKFYASALAMDLEAATRGDTDEKPSDEVDWESTYFIQHHPKTNVADFPEITPPTRETLDAYVAQMVSLAERLAECMSLNLGLPGAHVAATFAPPFVGTKFAMYPSCPRPELVWGLRAHTDAGGIILLLQDDVVGGLEFLRAGAHWVPVGPTKGGRLFVNIGDQIEVLSAGAYRSVLHRVAAGDQGRRLSVATFYNPGTDAVVAPAPGRDDQGAGAAAYPGPYRFGDYLDYYQGTKFGDKDARFQAVKKLLG

SEQ ID NO: 24745 - DNA, 1189 bp, Zea mays subsp. mays
  misc_feature (1)..(1189): Ceres Seq. ID no. 12356089
accgcaccaccgcaccgggcctcctccgagtctccgacctcctcctgtcttcggtgtcgtcgcccgcctccccatgaggccgccctcgagacatgcctcgtagcctcggcgtcagtagcagcagcagcaccaggcgctccctccgcgtcgcgccccccgcctcacccccgctgcggcggccgccgtcgccggcatggccatgccgttcgcgcgccgcgacatcgaggcggcgggcgccggcgccagcagcgacgactctcctgccgctaagaagggcaagcccgagctcgcaggggcgcgcccggctttgacgaggtccgaggcgttcgcgttcgcggccgtgctcgcgctcttcaccgccgggatcttctgcgtcttcctcaccgcgccacgcggcgagtttgggcagatcctccgcctcccgcgcagccttgccgacgtccgccttctcaaagacaatcttgctgtttacgcgagagattaccaaacgaattttatattgggttattgctcaatatacatcttcatgcaaacattcatgatccctgggacaatattcatgtctttacttgctggggctctttttggagtgattaaaggtggcattttggtagttttcactgccacagccggtggatcttcttgctattttgtctccaagctgattggcaggcccttggttagttggttgtggcctgaaaaactgagatatttccaatcagagattgctaagaggaaagaaaagctgctgaattatatgctttttctgagaataactccaactttgcccaatacattcataaatatggcgtcaccgattgttgacatacctttccatattttctttgctgcaacactagttggtcttattccagcatcttatattactgtaaaggctggtagagccctaggcgatctgaaatcagttagagagttgtatgacttcaagacattagtggttctgttccttattggatctgttgttgtcgttccaacaatcctgaaaaggaagagaacatacgaatgatgtcttagagcatctacatactttctttagatgttcaaaatgtattaggatttttttaccttttgttttcttgatatcgtatacattttcaattctatacgtagagatgtaaaatcgaatcgaatgctttctaatactagatgatgccatcattgtatctgc

SEQ ID NO: 24746 - protein, 277 aa, Zea mays subsp. mays
  peptide (1)..(277): Ceres Seq. ID no. 12356090
  misc_feature (12)..(277): NCBI GI NO: 30681121 NR Description: expressed protein [Arabidopsis thaliana]
  misc_feature (8)..(277): NCBI GI NO: 18409951 NR Description: expressed protein; protein id: At1g71940
  misc_feature (43)..(274): NCBI GI NO: 18414967 NR Description: expressed protein; protein id: At4g17790
  misc_feature (43)..(274): NCBI GI NO: 21593768 NR Description: unknown [Arabidopsis thaliana]
  misc_feature (12)..(179): NCBI GI NO: 25407510 NR Description: hypothetical protein AT4g09580
  misc_feature (58)..(273): NCBI GI NO: 28850296 NR Description: similar to Mus musculus (Mouse)
  misc_feature (13)..(273): NCBI GI NO: 34858940 NR Description: similar to D7Ertd743e protein [Rattus norvegicus]
  misc_feature (1)..(273): NCBI GI NO: 436224 NR Description: KIAA0033 [Homo sapiens]
  misc_feature (15)..(273): NCBI GI NO: 20558053 NR Description: similar to KIAA0033 [Homo sapiens]
  misc_feature (13)..(277): NCBI GI NO: 22268065 NR Description: D7Ertd743e protein [Mus musculus]
MAMPFARRDIEAAGAGASSDDSPAAKKGKPELAGARPALTRSEAFAFAAVLALFTAGIFCVFLTAPRGEFGQILRLPRSLADVRLLKDNLAVYARDYQTNFILGYCSIYIFMQTFMIPGTIFMSLLAGALFGVIKGGILVVFTATAGGSSCYFVSKLIGRPLVSWLWPEKLRYFQSEIAKRKEKLLNYMLFLRITPTLPNTFINMASPIVDIPFHIFFAATLVGLIPASYITVKAGRALGDLKSVRELYDFKTLVVLFLIGSVVVVPTILKRKRTYE

SEQ ID NO: 24747 - protein, 275 aa, Zea mays subsp. mays
  peptide (1)..(275): Ceres Seq. ID no. 12356091
  misc_feature (10)..(275): NCBI GI NO: 30681121 NR Description: expressed protein [Arabidopsis thaliana]
  misc_feature (6)..(275): NCBI GI NO: 18409951 NR Description: expressed protein; protein id: At1g71940
  misc_feature (41)..(272): NCBI GI NO: 18414967 NR Description: expressed protein; protein id: At4g17790
  misc_feature (41)..(272): NCBI GI NO: 21593768 NR Description: unknown [Arabidopsis thaliana]
  misc_feature (10)..(177): NCBI GI NO: 25407510 NR Description: hypothetical protein AT4g09580
  misc_feature (56)..(271): NCBI GI NO: 28850296 NR Description: similar to Mus musculus (Mouse)
  misc_feature (11)..(271): NCBI GI NO: 34858940 NR Description: similar to D7Ertd743e protein [Rattus norvegicus]
  misc_feature (1)..(271): NCBI GI NO: 436224 NR Description: KIAA0033 [Homo sapiens]
  misc_feature (13)..(271): NCBI GI NO: 20558053 NR Description: similar to KIAA0033 [Homo sapiens]
  misc_feature (11)..(275): NCBI GI NO: 22268065 NR Description: D7Ertd743e protein [Mus musculus]
MPFARRDIEAAGAGASSDDSPAAKKGKPELAGARPALTRSEAFAFAAVLALFTAGIFCVFLTAPRGEFGQILRLPRSLADVRLLKDNLAVYARDYQTNFILGYCSIYIFMQTFMIPGTIFMSLLAGALFGVIKGGILVVFTATAGGSSCYFVSKLIGRPLVSWLWPEKLRYFQSEIAKRKEKLLNYMLFLRITPTLPNTFINMASPIVDIPFHIFFAATLVGLIPASYITVKAGRALGDLKSVRELYDFKTLVVLFLIGSVVVVPTILKRKRTYE

SEQ ID NO: 24748 - protein, 166 aa, Zea mays subsp. mays
  peptide (1)..(166): Ceres Seq. ID no. 12356092
  misc_feature (1)..(166): NCBI GI NO: 30681121 NR Description: expressed protein [Arabidopsis thaliana]
  misc_feature (1)..(166): NCBI GI NO: 18409951 NR Description: expressed protein; protein id: At1g71940
  misc_feature (1)..(163): NCBI GI NO: 18414967 NR Description: expressed protein; protein id: At4g17790
  misc_feature (1)..(163): NCBI GI NO: 21593768 NR Description: unknown [Arabidopsis thaliana]
  misc_feature (1)..(68): NCBI GI NO: 25407510 NR Description: hypothetical protein AT4g09580
  misc_feature (1)..(162): NCBI GI NO: 28850296 NR Description: similar to Mus musculus (Mouse)
  misc_feature (1)..(162): NCBI GI NO: 34858940 NR Description: similar to D7Ertd743e protein [Rattus norvegicus]
  misc_feature (1)..(162): NCBI GI NO: 436224 NR Description: KIAA0033 [Homo sapiens]
  misc_feature (1)..(162): NCBI GI NO: 20558053 NR Description: similar to KIAA0033 [Homo sapiens]
  misc_feature (1)..(166): NCBI GI NO: 22268065 NR Description: D7Ertd743e protein [Mus musculus]
MQTFMIPGTIFMSLLAGALFGVIKGGILVVFTATAGGSSCYFVSKLIGRPLVSWLWPEKLRYFQSEIAKRKEKLLNYMLFLRITPTLPNTFINMASPIVDIPFHIFFAATLVGLIPASYITVKAGRALGDLKSVRELYDFKTLVVLFLIGSVVVVPTILKRKRTYE

SEQ ID NO: 24749 - DNA, 1620 bp, Zea mays subsp. mays
  misc_feature (1)..(1620): Ceres Seq. ID no. 12352160
gacatgcccgatcccgacgccctggcggccgcggtcgccgtcgccgggtgcgagggggtcgcctctcctgtgtcctgtgcccgtagataaggtcctcaatcctgaggaaagttccggtccaatctcttccaattgacaccgtgttggtgttgttctgacttctgttgaataggatgaacctgcatttacggaaaaaattctccctttgatgacccaacccctgtgaaaacaaaacaaccctcagaagatgtccaaactccaaacacacgaaaaggggagcgtgcgacgactttccgccgacctgcagagctgaatgtgcatttttggtcgtttgcatccttcgccgccggctctttctgcgtgttcttcttcttgtcgatttccgtcttgtgtatatactatatactatgctgctgtgctgggttacaagacaagcaagtggcaactggcaatatacggacaagccgtggcgggtatatacggacgaagaggaggaccggaggaggaagcttcagtgaggccctggactgcagcgggatggcgtcgccgccgccaccacgcgtgtgcgtaaccggtggcggcgggtacgtcgcctcatggctcgtcaagctcctgctctcccgcggctacgccgtgcacgccactgtccgcgacccaagtgatcccaagaacgcccacctgcaacagctggacggggcccgggagaggttgcgcctgttcaaggccgacgtgctcgaccgcgacgccctggcgaccgcggtcgtcgcgtgcgagggcgtcttccacgtcgcctcccctgtgcccgcggacaaagtcctcgatcccgagtccgaggtgctgtctcctgctgtcaagggcactctgaacgtcctccaggcctgctcggcaaacaacgttcagaaagttgtcgtggtttcgtccacggctgctgtttactttaacccgagctggccccaaggtagaaccaaagacgagagttgctggtcagacagagatttatgcattaagaacgagaactggtactgtgctgccaagacgattgctgaagaaactgcagtggagtatggagagaagaacgggctggttgttgtcacggtctgcccttgtatcgttttaggcccactcctgcagccgctgatcaatgccagcagcgaattactcatctacattataaaaggaggtcctagggtgctgaaaaacctcccctggaacatagtcgacgtccgtgacgtagctgatgctttgctcctagtatacgagaaagtggaatcatccgggagatacatctgtgcgcctaatcggatcagcacaaacaacatggtgaacttgtttaaaaagtcctaccctaactacaattatgtgaactgcgacaacaaggactatgaatctgaaatctcaccagttacatcggagaaacttaagagtctaggctggaacccaaggacaatggagaaaactttgttggacaacattgagtatttcgagaaggcagggtttttgcgtgatgcagagggttatccttgtcgtctactacctcatatttttcatttcgcttctgactaatgaaatagattctgtaaaacaattacgacaactactataactgtctttggacaattc

SEQ ID NO: 24750 - protein, 341 aa, Zea mays subsp. mays
  peptide (1)..(341): Ceres Seq. ID no. 12352161
  misc_feature (11)..(219): Pfam Name: Pfam Description:  NAD dependent epimerase/dehydratase family
  misc_feature (1)..(318): NCBI GI NO: 15226134 NR Description: putative cinnamoyl-CoA reductase
  misc_feature (8)..(324): NCBI GI NO: 15223068 NR Description: putative cinnamoyl-CoA reductase
  misc_feature (8)..(324): NCBI GI NO: 6554472 NR Description: putative cinnamoyl-CoA reductase; 14056-15506
  misc_feature (1)..(318): NCBI GI NO: 15226135 NR Description: putative cinnamoyl-CoA reductase
  misc_feature (9)..(321): NCBI GI NO: 17978649 NR Description: cinnamoyl-CoA reductase [Pinus taeda]
  misc_feature (9)..(321): NCBI GI NO: 3341511 NR Description: cinnamoyl-CoA reductase [Saccharum officinarum]
  misc_feature (1)..(321): NCBI GI NO: 15218377 NR Description: cinnamoyl CoA reductase, puitative
  misc_feature (9)..(321): NCBI GI NO: 9964087 NR Description: cinnamoyl CoA reductase [Lolium perenne]
  misc_feature (1)..(321): NCBI GI NO: 12034897 NR Description: cinnamoyl CoA reductase isoform 1
  misc_feature (9)..(321): NCBI GI NO: 3242328 NR Description: cinnamoyl-CoA reductase [Zea mays]
MASPPPPRVCVTGGGGYVASWLVKLLLSRGYAVHATVRDPSDPKNAHLQQLDGARERLRLFKADVLDRDALATAVVACEGVFHVASPVPADKVLDPESEVLSPAVKGTLNVLQACSANNVQKVVVVSSTAAVYFNPSWPQGRTKDESCWSDRDLCIKNENWYCAAKTIAEETAVEYGEKNGLVVVTVCPCIVLGPLLQPLINASSELLIYIIKGGPRVLKNLPWNIVDVRDVADALLLVYEKVESSGRYICAPNRISTNNMVNLFKKSYPNYNYVNCDNKDYESEISPVTSEKLKSLGWNPRTMEKTLLDNIEYFEKAGFLRDAEGYPCRLLPHIFHFASD

SEQ ID NO: 24751 - DNA, 1406 bp, Zea mays subsp. mays
  misc_feature (1)..(1406): Ceres Seq. ID no. 13498652
aaatcggacacacggcaacagcacacactggacacgaatcgctagtagacacagcgcacagcggcagccggcaagcaagaacccaaacattccagtgcccttaccgttgcatgcagccatgacgaggatgagcttggcggtgtcggcgacgttctttgtgctcgcggtcgcctcggcggcgcagccggcgccgagcatgcccccgccggcggtggccgtgaacagctcccggctggagaaggcgtacgtggcgctgcaggcgctgaggcgcgccatcacggacgaccccaagaagctgacggagaactggtgcgggcccgacgtgtgcaactacttcggcgtgtactgcgcgccggcgcccgacgacccctgccagcgcaccgtggcctccgtggacctcaaccacggcgacctcgccgggacgctccccgaggagctgggcctgctgtccgacctcgccgtcttccacctcaactccaaccgcttctgcggctccctccccgagtcgctccggtccctgcacctcctccacgagatcgatgtcagcaacaacaggctgtccgggcccttcccgtcgcagctcctctgcctccccagtgtccagtacgtcgacatcaggtttaacaacttctgcggcgaggtgccggcggccatcttcgacaagaagatcgacgcgcttttcatcaacaacaaccacttcgagttcacgctgccggccagcttcaccaactcgacggcgtcggtgatcgtgctggcgaaccttccgcgggtgagcggctgcctgccgagcagcatcggcgacatggccggcacgctcaacgagctcatcctcctcaacagcggcatctcctcctgcatcccgccggagatcggcaagctggacaagctcaccgtgctcgacctcagcttcaacagcatcgccggcgcgctgccggacacgatcggcggcatgcgggcgctggagcagctggacgtcgcgcacaaccggctcaccggcgagatccccgagagcatctgcgagctgccgcacctcaagaacttcacctactcgtacaacttcttctgcggcgagccacgccggtgcctcgaggtgccgcgcgtcgacgaccggcagaactgcatcgctggccgccccgaccagcggccaggcgaggagtgcgtctcattcctacaccaaccgcaagtccactgcgacgcccacgggtgcatcgcgccaccacctccagcggtgcatgctcctccgccgcctgtatactgaattactgatcagtggtaacttgtaaatgtttcctgctcctgcctcgtggtgtgaaaacttggagggtaaacgcatacacatggtatatactgtaatttttattcatcagcagaagagagtaataatggattcatagatttacattacg

SEQ ID NO: 24752 - protein, 418 aa, Zea mays subsp. mays
  peptide (1)..(418): Ceres Seq. ID no. 13498653
  misc_feature (39)..(354): NCBI GI NO: 34393830 NR Description: extensin-like protein
  misc_feature (62)..(408): NCBI GI NO: 37718858 NR Description: putative leucine-rich receptor-like protein kinase
  misc_feature (69)..(416): NCBI GI NO: 34912294 NR Description: putative extensin-like protein
  misc_feature (75)..(416): NCBI GI NO: 34906174 NR Description: putative extensin-like protein
  misc_feature (64)..(416): NCBI GI NO: 15228861 NR Description: leucine-rich repeat extensin family
  misc_feature (69)..(416): NCBI GI NO: 15230120 NR Description: leucine-rich repeat extensin family
  misc_feature (69)..(416): NCBI GI NO: 15235668 NR Description: leucine-rich repeat extensin family
  misc_feature (69)..(416): NCBI GI NO: 15233976 NR Description: leucine-rich repeat extensin family
  misc_feature (75)..(416): NCBI GI NO: 30685162 NR Description: leucine-rich repeat extensin family
  misc_feature (393)..(418): NCBI GI NO: 30685162 NR Description: leucine-rich repeat extensin family
NRTHGNSTHWTRIASRHSAQRQPASKNPNIPVPLPLHAAMTRMSLAVSATFFVLAVASAAQPAPSMPPPAVAVNSSRLEKAYVALQALRRAITDDPKKLTENWCGPDVCNYFGVYCAPAPDDPCQRTVASVDLNHGDLAGTLPEELGLLSDLAVFHLNSNRFCGSLPESLRSLHLLHEIDVSNNRLSGPFPSQLLCLPSVQYVDIRFNNFCGEVPAAIFDKKIDALFINNNHFEFTLPASFTNSTASVIVLANLPRVSGCLPSSIGDMAGTLNELILLNSGISSCIPPEIGKLDKLTVLDLSFNSIAGALPDTIGGMRALEQLDVAHNRLTGEIPESICELPHLKNFTYSYNFFCGEPRRCLEVPRVDDRQNCIAGRPDQRPGEECVSFLHQPQVHCDAHGCIAPPPPAVHAPPPPVY

SEQ ID NO: 24753 - protein, 379 aa, Zea mays subsp. mays
  peptide (1)..(379): Ceres Seq. ID no. 13498654
  misc_feature (1)..(315): NCBI GI NO: 34393830 NR Description: extensin-like protein
  misc_feature (23)..(369): NCBI GI NO: 37718858 NR Description: putative leucine-rich receptor-like protein kinase
  misc_feature (30)..(377): NCBI GI NO: 34912294 NR Description: putative extensin-like protein
  misc_feature (36)..(377): NCBI GI NO: 34906174 NR Description: putative extensin-like protein
  misc_feature (25)..(377): NCBI GI NO: 15228861 NR Description: leucine-rich repeat extensin family
  misc_feature (30)..(377): NCBI GI NO: 15230120 NR Description: leucine-rich repeat extensin family
  misc_feature (30)..(377): NCBI GI NO: 15235668 NR Description: leucine-rich repeat extensin family
  misc_feature (30)..(377): NCBI GI NO: 15233976 NR Description: leucine-rich repeat extensin family
  misc_feature (36)..(377): NCBI GI NO: 30685162 NR Description: leucine-rich repeat extensin family
  misc_feature (354)..(379): NCBI GI NO: 30685162 NR Description: leucine-rich repeat extensin family
MTRMSLAVSATFFVLAVASAAQPAPSMPPPAVAVNSSRLEKAYVALQALRRAITDDPKKLTENWCGPDVCNYFGVYCAPAPDDPCQRTVASVDLNHGDLAGTLPEELGLLSDLAVFHLNSNRFCGSLPESLRSLHLLHEIDVSNNRLSGPFPSQLLCLPSVQYVDIRFNNFCGEVPAAIFDKKIDALFINNNHFEFTLPASFTNSTASVIVLANLPRVSGCLPSSIGDMAGTLNELILLNSGISSCIPPEIGKLDKLTVLDLSFNSIAGALPDTIGGMRALEQLDVAHNRLTGEIPESICELPHLKNFTYSYNFFCGEPRRCLEVPRVDDRQNCIAGRPDQRPGEECVSFLHQPQVHCDAHGCIAPPPPAVHAPPPPVY

SEQ ID NO: 24754 - protein, 376 aa, Zea mays subsp. mays
  peptide (1)..(376): Ceres Seq. ID no. 13498655
  misc_feature (1)..(312): NCBI GI NO: 34393830 NR Description: extensin-like protein
  misc_feature (20)..(366): NCBI GI NO: 37718858 NR Description: putative leucine-rich receptor-like protein kinase
  misc_feature (27)..(374): NCBI GI NO: 34912294 NR Description: putative extensin-like protein
  misc_feature (33)..(374): NCBI GI NO: 34906174 NR Description: putative extensin-like protein
  misc_feature (22)..(374): NCBI GI NO: 15228861 NR Description: leucine-rich repeat extensin family
  misc_feature (27)..(374): NCBI GI NO: 15230120 NR Description: leucine-rich repeat extensin family
  misc_feature (27)..(374): NCBI GI NO: 15235668 NR Description: leucine-rich repeat extensin family
  misc_feature (27)..(374): NCBI GI NO: 15233976 NR Description: leucine-rich repeat extensin family
  misc_feature (33)..(374): NCBI GI NO: 30685162 NR Description: leucine-rich repeat extensin family
  misc_feature (351)..(376): NCBI GI NO: 30685162 NR Description: leucine-rich repeat extensin family
MSLAVSATFFVLAVASAAQPAPSMPPPAVAVNSSRLEKAYVALQALRRAITDDPKKLTENWCGPDVCNYFGVYCAPAPDDPCQRTVASVDLNHGDLAGTLPEELGLLSDLAVFHLNSNRFCGSLPESLRSLHLLHEIDVSNNRLSGPFPSQLLCLPSVQYVDIRFNNFCGEVPAAIFDKKIDALFINNNHFEFTLPASFTNSTASVIVLANLPRVSGCLPSSIGDMAGTLNELILLNSGISSCIPPEIGKLDKLTVLDLSFNSIAGALPDTIGGMRALEQLDVAHNRLTGEIPESICELPHLKNFTYSYNFFCGEPRRCLEVPRVDDRQNCIAGRPDQRPGEECVSFLHQPQVHCDAHGCIAPPPPAVHAPPPPVY

SEQ ID NO: 24755 - DNA, 967 bp, Zea mays subsp. mays
  misc_feature (1)..(967): Ceres Seq. ID no. 12403890
aacgcctttttactattttttttctattcccatttccaccctcgcaccgcatccacctccaccgcgccgccgcgagagaggggaaggagggtttccgatggagaacggcgaggagacgttcgcctcccccactgccgccgccgccgcggacttcgagatctccatcaacggcggggacagcacgcccaagctccacaatttggcggacgagatggaggccctccgcgcggcgaagcgcgacctggaggagaagctcgatgccgtgggacacgagaaccggttcctgtcctctgagtcccggcgcctcgaggtcctcgtgtcccaggcccgcgaggaggtcgccgctgccgagcaagtcgccgccgccaacgagagcgaggccgccacgctccgcgccgaagtcgagcgtctccagggcctcctagccgcagagaaggccagccatgaggaggagatgcgcaggggcgcaaggctcggggaccagctgcagaccgcgtaccaggagaaggccgcccttgaggaggagatcgagaccctgaagggttccgccactgccgagggcaagggcgggaaggaggaagaggagggacgtgattccgtttctgccagggccgggacgcctaaggatgagggcgtggtgtctcccgctcttgtggctgccgcggctgctggagcagctgccacggctgccatcgcggtggtcttgctcaacctcaagagatgatgtggtggtccgatgctcgggaagttttgatctgctgctatggcctatatgagaatgggttatccgttttgtcgtggtactagtgttgctggactcagtgtggtatctttactatcagctggataatatattagaggttagaacaacctatattgcaagtacttttagtttctgcagttttccatgctaataagagttgtgaacacaaacgtgagaggtaattgaggtcaggtgtgttgtttt

SEQ ID NO: 24756 - protein, 240 aa, Zea mays subsp. mays
  peptide (1)..(240): Ceres Seq. ID no. 12403891
  misc_feature (33)..(240): NCBI GI NO: 6996142 NR Description: VIP1 protein [Avena fatua]
  misc_feature (70)..(240): NCBI GI NO: 22535574 NR Description: OJ1116_H09.21
  misc_feature (121)..(170): NCBI GI NO: 14719294 NR Description: unknown [Zea mays]
TPFYYFFSIPISTLAPHPPPPRRRERGEGGFPMENGEETFASPTAAAAADFEISINGGDSTPKLHNLADEMEALRAAKRDLEEKLDAVGHENRFLSSESRRLEVLVSQAREEVAAAEQVAAANESEAATLRAEVERLQGLLAAEKASHEEEMRRGARLGDQLQTAYQEKAALEEEIETLKGSATAEGKGGKEEEEGRDSVSARAGTPKDEGVVSPALVAAAAAGAAATAAIAVVLLNLKR

SEQ ID NO: 24757 - protein, 208 aa, Zea mays subsp. mays
  peptide (1)..(208): Ceres Seq. ID no. 12403892
  misc_feature (1)..(208): NCBI GI NO: 6996142 NR Description: VIP1 protein [Avena fatua]
  misc_feature (38)..(208): NCBI GI NO: 22535574 NR Description: OJ1116_H09.21
  misc_feature (89)..(138): NCBI GI NO: 14719294 NR Description: unknown [Zea mays]
MENGEETFASPTAAAAADFEISINGGDSTPKLHNLADEMEALRAAKRDLEEKLDAVGHENRFLSSESRRLEVLVSQAREEVAAAEQVAAANESEAATLRAEVERLQGLLAAEKASHEEEMRRGARLGDQLQTAYQEKAALEEEIETLKGSATAEGKGGKEEEEGRDSVSARAGTPKDEGVVSPALVAAAAAGAAATAAIAVVLLNLKR

SEQ ID NO: 24758 - protein, 170 aa, Zea mays subsp. mays
  peptide (1)..(170): Ceres Seq. ID no. 12403893
  misc_feature (1)..(170): NCBI GI NO: 6996142 NR Description: VIP1 protein [Avena fatua]
  misc_feature (1)..(170): NCBI GI NO: 22535574 NR Description: OJ1116_H09.21
  misc_feature (51)..(100): NCBI GI NO: 14719294 NR Description: unknown [Zea mays]
MEALRAAKRDLEEKLDAVGHENRFLSSESRRLEVLVSQAREEVAAAEQVAAANESEAATLRAEVERLQGLLAAEKASHEEEMRRGARLGDQLQTAYQEKAALEEEIETLKGSATAEGKGGKEEEEGRDSVSARAGTPKDEGVVSPALVAAAAAGAAATAAIAVVLLNLKR

SEQ ID NO: 24759 - DNA, 803 bp, Zea mays subsp. mays
  misc_feature (1)..(803): Ceres Seq. ID no. 12423776
  misc_feature (281)..(281): n is a, c, t, g, unknown, or other
  misc_feature (200)..(200): n is a, c, t, g, unknown, or other
  misc_feature (280)..(280): n is a, c, t, g, unknown, or other
  misc_feature (192)..(192): n is a, c, t, g, unknown, or other
  misc_feature (199)..(199): n is a, c, t, g, unknown, or other
  misc_feature (279)..(279): n is a, c, t, g, unknown, or other
aaatcatcacaggtccaaagcgcttccgattctctcttctcccctccgcccgcctccggttgtcttctccaattccccaacgcagccagcagcgcaaggtccagaagcccaggaccagacgacggacctccgcgccccatcgatccgcgcggccctcccccaacgcgcgtgcgtccgcaactagcgtctgcngccggtnnctttcttccgcaccccccgacgcggcaaggagcccccccgccatgagggtccacccggccccgcggaagcgcaccatcnnngtgcaacgctgcgcctccgcggcggcgggcgcgctcggcgggaagaagctgcgccgcctgccgcacatattcgacaaggtgctggagctcccgttcgcggccgacgcggacgtgtccgtcgaggaggacgcggcggcgctgcggttcgtcgccgccgccgacgagttctccctcgcgggcgcccgcgcgcacgccgtcgagatccacccaggggtcaccaaggtcgtcgtccgcggcctctcctcctcctccctcggcggcgatggcgacgacgacgacgacggggccgccgccgccgccttcgagctcgaccgctggcgcttccgcctcccgccctgcacgcgccccgccatggccaccgccacctacgccgcgggcgagctcgttgtcaccgtccccaagggcgccggccccggcgacggcggcgcggccgctgtcctcggtggcacggagcgcgtccttgtgcttgtatagtatagtaaatctagcttttccctaaattatatatcatctgctttgtgc

SEQ ID NO: 24760 - protein, 250 aa, Zea mays subsp. mays
  peptide (1)..(250): Ceres Seq. ID no. 12423777
  misc_feature (81)..(250): NCBI GI NO: 34394452 NR Description: hypothetical protein
  misc_feature (81)..(239): NCBI GI NO: 22773244 NR Description: Hypothetical protein
  misc_feature (77)..(250): NCBI GI NO: 18403425 NR Description: expressed protein; protein id: At3g22530
  misc_feature (77)..(250): NCBI GI NO: 21553463 NR Description: unknown [Arabidopsis thaliana]
  misc_feature (81)..(227): NCBI GI NO: 15233585 NR Description: hypothetical protein; protein id: At4g14830.1
  misc_feature (81)..(250): NCBI GI NO: 11994285 NR Description: emb|CAB10262
  misc_feature (64)..(64): Xaa is any aa, unknown or other
  misc_feature (66)..(66): Xaa is any aa, unknown or other
  misc_feature (93)..(93): Xaa is any aa, unknown or other
IITGPKRFRFSLLPSARLRLSSPIPQRSQQRKVQKPRTRRRTSAPHRSARPSPNARASATSVCXRXLSSAPPDAARSPPAMRVHPAPRKRTIXVQRCASAAAGALGGKKLRRLPHIFDKVLELPFAADADVSVEEDAAALRFVAAADEFSLAGARAHAVEIHPGVTKVVVRGLSSSSLGGDGDDDDDGAAAAAFELDRWRFRLPPCTRPAMATATYAAGELVVTVPKGAGPGDGGAAAVLGGTERVLVLV

SEQ ID NO: 24761 - protein, 170 aa, Zea mays subsp. mays
  peptide (1)..(170): Ceres Seq. ID no. 12423778
  misc_feature (1)..(170): NCBI GI NO: 34394452 NR Description: hypothetical protein
  misc_feature (1)..(159): NCBI GI NO: 22773244 NR Description: Hypothetical protein
  misc_feature (1)..(170): NCBI GI NO: 18403425 NR Description: expressed protein; protein id: At3g22530
  misc_feature (1)..(170): NCBI GI NO: 21553463 NR Description: unknown [Arabidopsis thaliana]
  misc_feature (1)..(147): NCBI GI NO: 15233585 NR Description: hypothetical protein; protein id: At4g14830.1
  misc_feature (1)..(170): NCBI GI NO: 11994285 NR Description: emb|CAB10262
  misc_feature (13)..(13): Xaa is any aa, unknown or other
MRVHPAPRKRTIXVQRCASAAAGALGGKKLRRLPHIFDKVLELPFAADADVSVEEDAAALRFVAAADEFSLAGARAHAVEIHPGVTKVVVRGLSSSSLGGDGDDDDDGAAAAAFELDRWRFRLPPCTRPAMATATYAAGELVVTVPKGAGPGDGGAAAVLGGTERVLVLV

SEQ ID NO: 24762 - DNA, 906 bp, Zea mays subsp. mays
  misc_feature (1)..(906): Ceres Seq. ID no. 13495259
aaaaaagaagcagaggagaggcccaagcagagtaatggccaaggtctacccaaacagcgcagccgtcgcggcagagcccgccacccgagccgctgccggcgaccaacaacctgaaccgccgacggtgctgacggtatggcgcaagtcgctgctcttcaactgcgacggcttcaccgtgtacgacgcccggggagacctcgccttccgcgtcgactgctacgccacctcccgccggcgcgccgaggtcgcgctcatggacgccgcgggggcgccgctgctcacgctccaccgcaagaggctcagcctggcggagcgctggctcatctacgaagacggcgccggcaccacgcagccgcagccgcgtcgccctctcctctccgtccaccgccacgtcggtctccgcgcctccggcgggaagacgctggcgcatgtcttcgcgccctcctcggccgcccaggaggcgttcgtggtcgaggggtcgtacggccgtcgtgactgcgccgtgcgcgacgcgcgcggcgacgtcatggccgaggtccggcgcaaggaggccgtcggcgacgacgtgttcaggctggtggtcagtccccgcttcggcgcgccgctcgccatggggcttgtcatcgtcctcgacgagatgttcggcggccgcagctcgtggtcgtggctgcacagagcgtgctaggattggataggcagtagaggccctcccccagttgtcagcgtcagcagagtttataatgcaggctgcggctgggccaaccccctaaaaactagaacgccctatcaccaattacgaaatagtgagaacaatgcaaaagcaaaaaggcacatccaattattttggatatggatgtcagttgattattttgtaatgtcatcagtcatctactgattgttttccgc

SEQ ID NO: 24763 - protein, 227 aa, Zea mays subsp. mays
  peptide (1)..(227): Ceres Seq. ID no. 13495260
  misc_feature (35)..(208): Pfam Name: DUF567 Pfam Description: Protein of unknown function
  misc_feature (12)..(227): NCBI GI NO: 27542765 NR Description: hypothetical protein-like protein
  misc_feature (12)..(223): NCBI GI NO: 27542769 NR Description: hypothetical protein-like protein
  misc_feature (14)..(226): NCBI GI NO: 27542767 NR Description: hypothetical protein-like protein
  misc_feature (12)..(221): NCBI GI NO: 34909256 NR Description: B1148D12.16
  misc_feature (12)..(219): NCBI GI NO: 15224921 NR Description: expressed protein [Arabidopsis thaliana]
  misc_feature (15)..(214): NCBI GI NO: 15238123 NR Description: hypothetical protein [Arabidopsis thaliana]
  misc_feature (43)..(215): NCBI GI NO: 15220064 NR Description: expressed protein [Arabidopsis thaliana]
  misc_feature (36)..(215): NCBI GI NO: 18400907 NR Description: expressed protein [Arabidopsis thaliana]
  misc_feature (36)..(215): NCBI GI NO: 21554362 NR Description: unknown [Arabidopsis thaliana]
  misc_feature (14)..(209): NCBI GI NO: 34907132 NR Description: P0506E04.17
KKKQRRGPSRVMAKVYPNSAAVAAEPATRAAAGDQQPEPPTVLTVWRKSLLFNCDGFTVYDARGDLAFRVDCYATSRRRAEVALMDAAGAPLLTLHRKRLSLAERWLIYEDGAGTTQPQPRRPLLSVHRHVGLRASGGKTLAHVFAPSSAAQEAFVVEGSYGRRDCAVRDARGDVMAEVRRKEAVGDDVFRLVVSPRFGAPLAMGLVIVLDEMFGGRSSWSWLHRAC

SEQ ID NO: 24764 - protein, 216 aa, Zea mays subsp. mays
  peptide (1)..(216): Ceres Seq. ID no. 13495261
  misc_feature (24)..(197): Pfam Name: DUF567 Pfam Description: Protein of unknown function
  misc_feature (1)..(216): NCBI GI NO: 27542765 NR Description: hypothetical protein-like protein
  misc_feature (1)..(212): NCBI GI NO: 27542769 NR Description: hypothetical protein-like protein
  misc_feature (3)..(215): NCBI GI NO: 27542767 NR Description: hypothetical protein-like protein
  misc_feature (1)..(210): NCBI GI NO: 34909256 NR Description: B1148D12.16
  misc_feature (1)..(208): NCBI GI NO: 15224921 NR Description: expressed protein [Arabidopsis thaliana]
  misc_feature (4)..(203): NCBI GI NO: 15238123 NR Description: hypothetical protein [Arabidopsis thaliana]
  misc_feature (32)..(204): NCBI GI NO: 15220064 NR Description: expressed protein [Arabidopsis thaliana]
  misc_feature (25)..(204): NCBI GI NO: 18400907 NR Description: expressed protein [Arabidopsis thaliana]
  misc_feature (25)..(204): NCBI GI NO: 21554362 NR Description: unknown [Arabidopsis thaliana]
  misc_feature (3)..(198): NCBI GI NO: 34907132 NR Description: P0506E04.17
MAKVYPNSAAVAAEPATRAAAGDQQPEPPTVLTVWRKSLLFNCDGFTVYDARGDLAFRVDCYATSRRRAEVALMDAAGAPLLTLHRKRLSLAERWLIYEDGAGTTQPQPRRPLLSVHRHVGLRASGGKTLAHVFAPSSAAQEAFVVEGSYGRRDCAVRDARGDVMAEVRRKEAVGDDVFRLVVSPRFGAPLAMGLVIVLDEMFGGRSSWSWLHRAC

SEQ ID NO: 24765 - protein, 143 aa, Zea mays subsp. mays
  peptide (1)..(143): Ceres Seq. ID no. 13495262
  misc_feature (1)..(124): Pfam Name: DUF567 Pfam Description: Protein of unknown function
  misc_feature (1)..(143): NCBI GI NO: 27542765 NR Description: hypothetical protein-like protein
  misc_feature (1)..(139): NCBI GI NO: 27542769 NR Description: hypothetical protein-like protein
  misc_feature (1)..(142): NCBI GI NO: 27542767 NR Description: hypothetical protein-like protein
  misc_feature (1)..(137): NCBI GI NO: 34909256 NR Description: B1148D12.16
  misc_feature (1)..(135): NCBI GI NO: 15224921 NR Description: expressed protein [Arabidopsis thaliana]
  misc_feature (1)..(130): NCBI GI NO: 15238123 NR Description: hypothetical protein [Arabidopsis thaliana]
  misc_feature (1)..(131): NCBI GI NO: 15220064 NR Description: expressed protein [Arabidopsis thaliana]
  misc_feature (1)..(131): NCBI GI NO: 18400907 NR Description: expressed protein [Arabidopsis thaliana]
  misc_feature (1)..(131): NCBI GI NO: 21554362 NR Description: unknown [Arabidopsis thaliana]
  misc_feature (1)..(125): NCBI GI NO: 34907132 NR Description: P0506E04.17
MDAAGAPLLTLHRKRLSLAERWLIYEDGAGTTQPQPRRPLLSVHRHVGLRASGGKTLAHVFAPSSAAQEAFVVEGSYGRRDCAVRDARGDVMAEVRRKEAVGDDVFRLVVSPRFGAPLAMGLVIVLDEMFGGRSSWSWLHRAC

SEQ ID NO: 24766 - DNA, 677 bp, Zea mays subsp. mays
  misc_feature (1)..(677): Ceres Seq. ID no. 12402947
gaaatttggcagtcgatcggatttgtggctcgcggagctggaccagccgccgcgggttttaaaaggagggaccgcaaccaaccacctcgccatcgacctcctcgatccagacagcaggcagcagccatgtccaaggtcttcaccctcgacgcggtcgccaagcacaactccaaggaggattgctggctcatcatcggcggcaaggtgtatgatgtgacgaagtttttggtagaccacccaggaggtgatgatgttctgttgtcctcaactggcaaggatgcgactgatgatttcgaggatgtcggtcacagcaacactgcccgcgcgatgatggatgagtacttggtgggtgaaatcgacgcgtcgacgatcccttccaggacgaagtatgtccccccgaaacaaccgcactacaaccaggacaagactcccgagtttgtcatcaagatcctccagtttttggttcccctggcaatcctgggcttggctgttgccgttaggatgtacaccaagtcggagtctgcttagctttgttgcccacttgcccttgcccccctcgcgattgtacgagtcgaacttgtcgaataagctagcaagagttttgtgaggttttattacatgtgtaacttgtcacgaaattcatcgaatgttctgagctgctgtgggttctgtggtct

SEQ ID NO: 24767 - protein, 175 aa, Zea mays subsp. mays
  peptide (1)..(175): Ceres Seq. ID no. 12402948
  misc_feature (46)..(120): Pfam Name: Pfam Description:  Cytochrome b5-like Heme/Steroid binding domain
  misc_feature (45)..(175): NCBI GI NO: 14719320 NR Description: cytochrome B5 [Oryza sativa]
  misc_feature (45)..(175): NCBI GI NO: 1345881 NR Description: Cytochrome b5
  misc_feature (44)..(175): NCBI GI NO: 34905998 NR Description: putative cytochrome B5
  misc_feature (44)..(175): NCBI GI NO: 1076621 NR Description: cytochrome b5 - common tobacco
  misc_feature (44)..(175): NCBI GI NO: 1345882 NR Description: CYTOCHROME B5
  misc_feature (43)..(174): NCBI GI NO: 2647949 NR Description: cytochrome b5 [Olea europaea]
  misc_feature (44)..(172): NCBI GI NO: 15225731 NR Description: putative cytochrome b5; protein id: At2g32720.1
  misc_feature (43)..(174): NCBI GI NO: 12229735 NR Description: Cytochrome b5
  misc_feature (44)..(174): NCBI GI NO: 1345925 NR Description: Cytochrome b5, seed isoform
  misc_feature (44)..(174): NCBI GI NO: 1345879 NR Description: Cytochrome b5
EIWQSIGFVARGAGPAAAGFKRRDRNQPPRHRPPRSRQQAAAMSKVFTLDAVAKHNSKEDCWLIIGGKVYDVTKFLVDHPGGDDVLLSSTGKDATDDFEDVGHSNTARAMMDEYLVGEIDASTIPSRTKYVPPKQPHYNQDKTPEFVIKILQFLVPLAILGLAVAVRMYTKSESA

SEQ ID NO: 24768 - protein, 133 aa, Zea mays subsp. mays
  peptide (1)..(133): Ceres Seq. ID no. 12402949
  misc_feature (4)..(78): Pfam Name: Pfam Description:  Cytochrome b5-like Heme/Steroid binding domain
  misc_feature (3)..(133): NCBI GI NO: 14719320 NR Description: cytochrome B5 [Oryza sativa]
  misc_feature (3)..(133): NCBI GI NO: 1345881 NR Description: Cytochrome b5
  misc_feature (2)..(133): NCBI GI NO: 34905998 NR Description: putative cytochrome B5
  misc_feature (2)..(133): NCBI GI NO: 1076621 NR Description: cytochrome b5 - common tobacco
  misc_feature (2)..(133): NCBI GI NO: 1345882 NR Description: CYTOCHROME B5
  misc_feature (1)..(132): NCBI GI NO: 2647949 NR Description: cytochrome b5 [Olea europaea]
  misc_feature (2)..(130): NCBI GI NO: 15225731 NR Description: putative cytochrome b5; protein id: At2g32720.1
  misc_feature (1)..(132): NCBI GI NO: 12229735 NR Description: Cytochrome b5
  misc_feature (2)..(132): NCBI GI NO: 1345925 NR Description: Cytochrome b5, seed isoform
  misc_feature (2)..(132): NCBI GI NO: 1345879 NR Description: Cytochrome b5
MSKVFTLDAVAKHNSKEDCWLIIGGKVYDVTKFLVDHPGGDDVLLSSTGKDATDDFEDVGHSNTARAMMDEYLVGEIDASTIPSRTKYVPPKQPHYNQDKTPEFVIKILQFLVPLAILGLAVAVRMYTKSESA

SEQ ID NO: 24769 - protein, 90 aa, Zea mays subsp. mays
  peptide (1)..(90): Ceres Seq. ID no. 12402950
MSTWWVKSTRRRSLPGRSMSPRNNRTTTRTRLPSLSSRSSSFWFPWQSWAWLLPLGCTPSRSLLSFVAHLPLPPSRLYESNLSNKLARVL

SEQ ID NO: 24770 - DNA, 1690 bp, Zea mays subsp. mays
  misc_feature (1)..(1690): Ceres Seq. ID no. 12365309
aaaaaacctcgcctccccccactccttccctccctccctcgctcacccagtggggcagccaaagccgagccgcaaccgcaaagatcttgcgcggcctcctttccccagctcgtcactgtgccgctcgtgccatccaccctcggttcacccaaccaacaatccatccgccaccacaccccgctgcggcgatgtgcggcggcgccatcctctcgggtttcatcccgccgtccggggtgccggcggcggcagcggcggccaagaagaaacagcagcggcgtgcgacggcggacctgctgtggccggggcccggcaagaagggagcgccccgggaggaggacttcgaggccgacttccgcgagttcgagcgcggcctcggagaggatgacgacgtggacggggccggcgacgaggtccaggagcttcctctgccggagccggcgaggctcgccttcgccgccgcggttggggcgccgcgcactgcagttgacggcgtgatgactccaaaggatggtgaaggagacatgcctactaccgctaccaactcagcagcaaataagcgcaggcggaagaaccagtacaggggaatccggcggcggccctggggcaagtgggcggccgagatcagagaccccagcaagggcgtgcgcgtctggctcggcacatacagcaccgccgaggaggcggccagggcgtacgacgccgaggctcgcaggatacgcgggaagaaagccaaggtcaatttccgggacgaagcggcggcagcagcaggtgctcagaaggcaccagccgcaactactccaactgcttgtggcaacgcagcgaggctaggtcctccacctccaccgccgaagttccgtgctgacgaggttttcgggaacatgaacggtggcactggcagcaacgatctgttcgcgattatgttcgcgttcagtgacagtagtagtaaggtcgttcgtgtggagccaggtgagggcgccgccggtttcctccccgcagatctgttgcccggcagtaagaggtctgcggctaacatgctgctgctctccgaccagagcagcgactcgtatggctcttgtgacttggggtgggagtgggactgggacgatgacaccatgacctcagactacgcctcagtctttgctccagctgctcccagtaacgttgtgccagcatggtacacgcaaggtggaccggtgtcgaagagaacgaggagcagctacggctacggtgcggccatgccgggcggctttgaccctgagacgaactaccagtaccagccgttgccttatgtcgtcgagagcagcccgtcagacggcgcgtcgacggacgacatggactgccttcaaatgatgcgggctggtgatgttccacaggatggggcgagcagtggtggtggtggcggcgacggcggcgatatctggagccttgacgagctgctcatggccgctggcgcttactgagaaaagctatgtgcatcgcattcgcatgtgctagacggctacttgctgtgccgtgaatggagtgtttctcagcttcgttttgcttttaattttttgttatgccaggtctcctgcttgtgcttgtggtgatgatgcaggagagccatggtgggtactatgcttttgctgccagtggaactgtaagacaatgtttatatagtatctatactatgttggtgcgtcgatggttc

SEQ ID NO: 24771 - protein, 485 aa, Zea mays subsp. mays
  peptide (1)..(485): Ceres Seq. ID no. 12365310
  misc_feature (189)..(252): Pfam Name: Pfam Description:  AP2 domain
  misc_feature (63)..(306): NCBI GI NO: 19880313 NR Description: putative EREBP-type transcription factor
  misc_feature (271)..(485): NCBI GI NO: 19880313 NR Description: putative EREBP-type transcription factor
  misc_feature (63)..(362): NCBI GI NO: 33331083 NR Description: ethylene responsive protein [Glycine max]
  misc_feature (63)..(293): NCBI GI NO: 21593779 NR Description: AP2 domain containing protein, putative
  misc_feature (176)..(311): NCBI GI NO: 33146866 NR Description: EREB-like protein
  misc_feature (110)..(139): NCBI GI NO: 33146866 NR Description: EREB-like protein
  misc_feature (63)..(386): NCBI GI NO: 37538128 NR Description: JERF3 [Lycopersicon esculentum]
  misc_feature (63)..(293): NCBI GI NO: 15220971 NR Description: AP2 domain protein RAP2
  misc_feature (63)..(281): NCBI GI NO: 6689918 NR Description: transcription factor EREBP1 [Oryza sativa]
  misc_feature (63)..(255): NCBI GI NO: 6176534 NR Description: EREBP-like protein [Oryza sativa]
KTSPPPTPSLPPSLTQWGSQSRAATAKILRGLLSPARHCAARAIHPRFTQPTIHPPPHPAAAMCGGAILSGFIPPSGVPAAAAAAKKKQQRRATADLLWPGPGKKGAPREEDFEADFREFERGLGEDDDVDGAGDEVQELPLPEPARLAFAAAVGAPRTAVDGVMTPKDGEGDMPTTATNSAANKRRRKNQYRGIRRRPWGKWAAEIRDPSKGVRVWLGTYSTAEEAARAYDAEARRIRGKKAKVNFRDEAAAAAGAQKAPAATTPTACGNAARLGPPPPPPKFRADEVFGNMNGGTGSNDLFAIMFAFSDSSSKVVRVEPGEGAAGFLPADLLPGSKRSAANMLLLSDQSSDSYGSCDLGWEWDWDDDTMTSDYASVFAPAAPSNVVPAWYTQGGPVSKRTRSSYGYGAAMPGGFDPETNYQYQPLPYVVESSPSDGASTDDMDCLQMMRAGDVPQDGASSGGGGGDGGDIWSLDELLMAAGAY

SEQ ID NO: 24772 - protein, 423 aa, Zea mays subsp. mays
  peptide (1)..(423): Ceres Seq. ID no. 12365311
  misc_feature (127)..(190): Pfam Name: Pfam Description:  AP2 domain
  misc_feature (1)..(244): NCBI GI NO: 19880313 NR Description: putative EREBP-type transcription factor
  misc_feature (209)..(423): NCBI GI NO: 19880313 NR Description: putative EREBP-type transcription factor
  misc_feature (1)..(300): NCBI GI NO: 33331083 NR Description: ethylene responsive protein [Glycine max]
  misc_feature (1)..(231): NCBI GI NO: 21593779 NR Description: AP2 domain containing protein, putative
  misc_feature (114)..(249): NCBI GI NO: 33146866 NR Description: EREB-like protein
  misc_feature (48)..(77): NCBI GI NO: 33146866 NR Description: EREB-like protein
  misc_feature (1)..(324): NCBI GI NO: 37538128 NR Description: JERF3 [Lycopersicon esculentum]
  misc_feature (1)..(231): NCBI GI NO: 15220971 NR Description: AP2 domain protein RAP2
  misc_feature (1)..(219): NCBI GI NO: 6689918 NR Description: transcription factor EREBP1 [Oryza sativa]
  misc_feature (1)..(193): NCBI GI NO: 6176534 NR Description: EREBP-like protein [Oryza sativa]
MCGGAILSGFIPPSGVPAAAAAAKKKQQRRATADLLWPGPGKKGAPREEDFEADFREFERGLGEDDDVDGAGDEVQELPLPEPARLAFAAAVGAPRTAVDGVMTPKDGEGDMPTTATNSAANKRRRKNQYRGIRRRPWGKWAAEIRDPSKGVRVWLGTYSTAEEAARAYDAEARRIRGKKAKVNFRDEAAAAAGAQKAPAATTPTACGNAARLGPPPPPPKFRADEVFGNMNGGTGSNDLFAIMFAFSDSSSKVVRVEPGEGAAGFLPADLLPGSKRSAANMLLLSDQSSDSYGSCDLGWEWDWDDDTMTSDYASVFAPAAPSNVVPAWYTQGGPVSKRTRSSYGYGAAMPGGFDPETNYQYQPLPYVVESSPSDGASTDDMDCLQMMRAGDVPQDGASSGGGGGDGGDIWSLDELLMAAGAY

SEQ ID NO: 24773 - protein, 321 aa, Zea mays subsp. mays
  peptide (1)..(321): Ceres Seq. ID no. 12365312
  misc_feature (25)..(88): Pfam Name: Pfam Description:  AP2 domain
  misc_feature (1)..(142): NCBI GI NO: 19880313 NR Description: putative EREBP-type transcription factor
  misc_feature (107)..(321): NCBI GI NO: 19880313 NR Description: putative EREBP-type transcription factor
  misc_feature (1)..(198): NCBI GI NO: 33331083 NR Description: ethylene responsive protein [Glycine max]
  misc_feature (1)..(129): NCBI GI NO: 21593779 NR Description: AP2 domain containing protein, putative
  misc_feature (12)..(147): NCBI GI NO: 33146866 NR Description: EREB-like protein
  misc_feature (1)..(222): NCBI GI NO: 37538128 NR Description: JERF3 [Lycopersicon esculentum]
  misc_feature (1)..(129): NCBI GI NO: 15220971 NR Description: AP2 domain protein RAP2
  misc_feature (1)..(117): NCBI GI NO: 6689918 NR Description: transcription factor EREBP1 [Oryza sativa]
  misc_feature (1)..(91): NCBI GI NO: 6176534 NR Description: EREBP-like protein [Oryza sativa]
  misc_feature (1)..(222): NCBI GI NO: 30961941 NR Description: C-repeat/DRE-binding factor [Nicotiana tabacum]
MTPKDGEGDMPTTATNSAANKRRRKNQYRGIRRRPWGKWAAEIRDPSKGVRVWLGTYSTAEEAARAYDAEARRIRGKKAKVNFRDEAAAAAGAQKAPAATTPTACGNAARLGPPPPPPKFRADEVFGNMNGGTGSNDLFAIMFAFSDSSSKVVRVEPGEGAAGFLPADLLPGSKRSAANMLLLSDQSSDSYGSCDLGWEWDWDDDTMTSDYASVFAPAAPSNVVPAWYTQGGPVSKRTRSSYGYGAAMPGGFDPETNYQYQPLPYVVESSPSDGASTDDMDCLQMMRAGDVPQDGASSGGGGGDGGDIWSLDELLMAAGAY

SEQ ID NO: 24774 - DNA, 1414 bp, Zea mays subsp. mays
  misc_feature (1)..(1414): Ceres Seq. ID no. 13493147
  misc_feature (538)..(538): n is a, c, t, g, unknown, or other
  misc_feature (267)..(267): n is a, c, t, g, unknown, or other
  misc_feature (505)..(505): n is a, c, t, g, unknown, or other
  misc_feature (264)..(264): n is a, c, t, g, unknown, or other
  misc_feature (479)..(479): n is a, c, t, g, unknown, or other
  misc_feature (253)..(253): n is a, c, t, g, unknown, or other
  misc_feature (268)..(268): n is a, c, t, g, unknown, or other
  misc_feature (482)..(482): n is a, c, t, g, unknown, or other
  misc_feature (254)..(254): n is a, c, t, g, unknown, or other
  misc_feature (265)..(265): n is a, c, t, g, unknown, or other
aagccaggcacggaggaggcgcgtgctctgctctgctctgcgtctgctccactccacctcccccccccccccctgcgccactcacgccgctcgttcgcgcagttttggtcttctggccagcagggcagggggggaacccgcgggagcgaggcgcgcgagcgagcgagcggagggaggaggaggatgatgcacaccaagtcggagtcggacgtgacgagcctggcagcgtcgtcgccgccgcggtcgccgaagnngggcgttgcnncnnccggcaccggcggcggcggcgggtactacgtgcagagcccgtcgcgggagtcgcacgacggcggcggcggcggcgggtacaagtcgtcgtcgatgcaggccacgccggtgtacaacaacagccccagcgagtcgccgtcgcacccctcctacggccgccactcccgctcctcctccgtcagccgcttctccggcggcctccgcggggccgncgncggcgggcgcaaggtgctcaacnacaagggctggcccgagtgcagcgtcatcgagnaggaagggccctacgagggcctcggcgccggggacagcggcctctcccgccgctgccagatcgtgctcggcttcctcaccttcgtcctcctcttcaccgtcttctgcctcgtcatctggggcgccgcccgcccgtacgagcccgaggtcgtcgtcaagagcttggtgatggacgacttctacgctggtgaaggcacagaccacagcggcgttccgaccaaattggtcacgacgaactgttcgctgcacgtatcggtgtacaaccctgccacaatgtttgggatccatgtcacctccggccccatccgtctgatctattcagagatctcaatagcagtcggtcaggtccgcaggtactaccagccgaggaagagccaacggacggtgacggcggtgatccacggcgagaaggtgccgctgtacggcgccgggggcggcctgacgctgtccacgagcgcgggcgggggcgcggtgcccctgacgctggacttcgacctcacctcccggggctacgtgatcggcaggctcgtgcgggtgacgcacagggcgcacgtgacgtgccccgtcgtcgtggacgccaggaggaccaagcctgtcaggttctccaagaaggcgtgcgccgtgtacaaggcctgagcttgagagctcgtgaaacctgtgatcgacggagcgttagcgatgcgtgttcttgaaaagatgtagctattgtgttgatggtgaagaacaataagcgcacacgtatggtcttgtcgatatatcgcgctgtaaggcctgttgttcttgtgtgtgtgtgtccctttttcagagcatgatcgtagagacggaagatgacttaccatgacaattttcctatacctttataacttcaatttttttt

SEQ ID NO: 24775 - protein, 390 aa, Zea mays subsp. mays
  peptide (1)..(390): Ceres Seq. ID no. 13493148
  misc_feature (53)..(232): NCBI GI NO: 34898370 NR Description: ESTD24835
  misc_feature (292)..(389): NCBI GI NO: 34898370 NR Description: ESTD24835
  misc_feature (71)..(386): NCBI GI NO: 34904260 NR Description: P0452F10.18
  misc_feature (59)..(388): NCBI GI NO: 5777621 NR Description: CAA30379.1 protein [Oryza sativa]
  misc_feature (63)..(388): NCBI GI NO: 38345517 NR Description: OSJNBa0039K24.20
  misc_feature (63)..(326): NCBI GI NO: 18401556 NR Description: expressed protein [Arabidopsis thaliana]
  misc_feature (98)..(385): NCBI GI NO: 9294056 NR Description: emb|CAB53482
  misc_feature (98)..(385): NCBI GI NO: 9294055 NR Description: gene_id:MOB24.18~unknown protein
  misc_feature (135)..(385): NCBI GI NO: 15230135 NR Description: hypothetical protein [Arabidopsis thaliana]
  misc_feature (98)..(347): NCBI GI NO: 15230135 NR Description: hypothetical protein [Arabidopsis thaliana]
  misc_feature (85)..(85): Xaa is any aa, unknown or other
  misc_feature (88)..(88): Xaa is any aa, unknown or other
  misc_feature (89)..(89): Xaa is any aa, unknown or other
  misc_feature (90)..(90): Xaa is any aa, unknown or other
  misc_feature (160)..(160): Xaa is any aa, unknown or other
  misc_feature (161)..(161): Xaa is any aa, unknown or other
  misc_feature (169)..(169): Xaa is any aa, unknown or other
  misc_feature (180)..(180): Xaa is any aa, unknown or other
KPGTEEARALLCSASAPLHLPPPPLRHSRRSFAQFWSSGQQGRGGTRGSEARERASGGRRRMMHTKSESDVTSLAASSPPRSPKXGVXXXGTGGGGGYYVQSPSRESHDGGGGGGYKSSSMQATPVYNNSPSESPSHPSYGRHSRSSSVSRFSGGLRGAXXGGRKVLNXKGWPECSVIEXEGPYEGLGAGDSGLSRRCQIVLGFLTFVLLFTVFCLVIWGAARPYEPEVVVKSLVMDDFYAGEGTDHSGVPTKLVTTNCSLHVSVYNPATMFGIHVTSGPIRLIYSEISIAVGQVRRYYQPRKSQRTVTAVIHGEKVPLYGAGGGLTLSTSAGGGAVPLTLDFDLTSRGYVIGRLVRVTHRAHVTCPVVVDARRTKPVRFSKKACAVYKA

SEQ ID NO: 24776 - protein, 329 aa, Zea mays subsp. mays
  peptide (1)..(329): Ceres Seq. ID no. 13493149
  misc_feature (1)..(171): NCBI GI NO: 34898370 NR Description: ESTD24835
  misc_feature (231)..(328): NCBI GI NO: 34898370 NR Description: ESTD24835
  misc_feature (10)..(325): NCBI GI NO: 34904260 NR Description: P0452F10.18
  misc_feature (1)..(327): NCBI GI NO: 5777621 NR Description: CAA30379.1 protein [Oryza sativa]
  misc_feature (2)..(327): NCBI GI NO: 38345517 NR Description: OSJNBa0039K24.20
  misc_feature (2)..(265): NCBI GI NO: 18401556 NR Description: expressed protein [Arabidopsis thaliana]
  misc_feature (37)..(324): NCBI GI NO: 9294056 NR Description: emb|CAB53482
  misc_feature (37)..(324): NCBI GI NO: 9294055 NR Description: gene_id:MOB24.18~unknown protein
  misc_feature (74)..(324): NCBI GI NO: 15230135 NR Description: hypothetical protein [Arabidopsis thaliana]
  misc_feature (37)..(286): NCBI GI NO: 15230135 NR Description: hypothetical protein [Arabidopsis thaliana]
  misc_feature (24)..(24): Xaa is any aa, unknown or other
  misc_feature (27)..(27): Xaa is any aa, unknown or other
  misc_feature (28)..(28): Xaa is any aa, unknown or other
  misc_feature (29)..(29): Xaa is any aa, unknown or other
  misc_feature (99)..(99): Xaa is any aa, unknown or other
  misc_feature (100)..(100): Xaa is any aa, unknown or other
  misc_feature (108)..(108): Xaa is any aa, unknown or other
  misc_feature (119)..(119): Xaa is any aa, unknown or other
MMHTKSESDVTSLAASSPPRSPKXGVXXXGTGGGGGYYVQSPSRESHDGGGGGGYKSSSMQATPVYNNSPSESPSHPSYGRHSRSSSVSRFSGGLRGAXXGGRKVLNXKGWPECSVIEXEGPYEGLGAGDSGLSRRCQIVLGFLTFVLLFTVFCLVIWGAARPYEPEVVVKSLVMDDFYAGEGTDHSGVPTKLVTTNCSLHVSVYNPATMFGIHVTSGPIRLIYSEISIAVGQVRRYYQPRKSQRTVTAVIHGEKVPLYGAGGGLTLSTSAGGGAVPLTLDFDLTSRGYVIGRLVRVTHRAHVTCPVVVDARRTKPVRFSKKACAVYKA

SEQ ID NO: 24777 - protein, 328 aa, Zea mays subsp. mays
  peptide (1)..(328): Ceres Seq. ID no. 13493150
  misc_feature (1)..(170): NCBI GI NO: 34898370 NR Description: ESTD24835
  misc_feature (230)..(327): NCBI GI NO: 34898370 NR Description: ESTD24835
  misc_feature (9)..(324): NCBI GI NO: 34904260 NR Description: P0452F10.18
  misc_feature (1)..(326): NCBI GI NO: 5777621 NR Description: CAA30379.1 protein [Oryza sativa]
  misc_feature (1)..(326): NCBI GI NO: 38345517 NR Description: OSJNBa0039K24.20
  misc_feature (1)..(264): NCBI GI NO: 18401556 NR Description: expressed protein [Arabidopsis thaliana]
  misc_feature (36)..(323): NCBI GI NO: 9294056 NR Description: emb|CAB53482
  misc_feature (36)..(323): NCBI GI NO: 9294055 NR Description: gene_id:MOB24.18~unknown protein
  misc_feature (73)..(323): NCBI GI NO: 15230135 NR Description: hypothetical protein [Arabidopsis thaliana]
  misc_feature (36)..(285): NCBI GI NO: 15230135 NR Description: hypothetical protein [Arabidopsis thaliana]
  misc_feature (23)..(23): Xaa is any aa, unknown or other
  misc_feature (26)..(26): Xaa is any aa, unknown or other
  misc_feature (27)..(27): Xaa is any aa, unknown or other
  misc_feature (28)..(28): Xaa is any aa, unknown or other
  misc_feature (98)..(98): Xaa is any aa, unknown or other
  misc_feature (99)..(99): Xaa is any aa, unknown or other
  misc_feature (107)..(107): Xaa is any aa, unknown or other
  misc_feature (118)..(118): Xaa is any aa, unknown or other
MHTKSESDVTSLAASSPPRSPKXGVXXXGTGGGGGYYVQSPSRESHDGGGGGGYKSSSMQATPVYNNSPSESPSHPSYGRHSRSSSVSRFSGGLRGAXXGGRKVLNXKGWPECSVIEXEGPYEGLGAGDSGLSRRCQIVLGFLTFVLLFTVFCLVIWGAARPYEPEVVVKSLVMDDFYAGEGTDHSGVPTKLVTTNCSLHVSVYNPATMFGIHVTSGPIRLIYSEISIAVGQVRRYYQPRKSQRTVTAVIHGEKVPLYGAGGGLTLSTSAGGGAVPLTLDFDLTSRGYVIGRLVRVTHRAHVTCPVVVDARRTKPVRFSKKACAVYKA

SEQ ID NO: 24778 - DNA, 938 bp, Zea mays subsp. mays
  misc_feature (1)..(938): Ceres Seq. ID no. 12366741
attcacgcatcacaagctggaaggcactgtgggcaataatggctctgctcacgctccagcagccagcgatacccttcctcctgctcctcctcctgctccccgccgcgtccgctaggctgcccggtggccggacactggtcttcatcctggctgggcagtccaacatgagcggccgcggcggcgccaccaacggcacctgggacggcatcgtcccgccggagtgcgcgccctcggaccgcatcgtccgtctctcccccgccttcgctgggagcaggcgcgcgagccgctgcacgccggcgtcgacgtgggcaacgttctcggcgtcgggcccggcatgcccttcgcgcacgccgtgctcaccagcgagggcgcagccgcagagccccccgtcgtcgtcgggctcgtgccgtgcgcacagggcggcacgccgatcgccaactggtcccgggggacggagctgtacgagcggatggtgacgcgcgccagggcggccgtggccgagtgcagcggacgcggtcacctggccgccttgctttggtaccagggggaggcggacaccatgaggcgccaggatgctgagctctaccagcggcggatggagactctcgtgcgtgacgttcgctgcgacctcggccggcccgacctcctcgtcatccaggtgggcattgcaactgcgcagtacaatggcaagttcctcggcgtggtgagggaagctcagaaggcagtgaagctcccaaatgtcaagtacgttgatgccatggggctgcccatcgcgagcgaccacacgcatctcaccacggaggctcaagtccagctcggcaacaaactagccgagtcgtatttagaaacgctgtaattttcaaataccggtatgcctaccaaaaacaaggcattcccccacgatttggaaacggacagagcaagcaatatgtacactc

SEQ ID NO: 24779 - protein, 173 aa, Zea mays subsp. mays
  peptide (1)..(173): Ceres Seq. ID no. 12366742
  misc_feature (1)..(173): NCBI GI NO: 30102977 NR Description: hypothetical protein
  misc_feature (1)..(170): NCBI GI NO: 30102980 NR Description: unknown protein
  misc_feature (1)..(170): NCBI GI NO: 21594009 NR Description: unknown [Arabidopsis thaliana]
  misc_feature (1)..(170): NCBI GI NO: 18418402 NR Description: Expressed protein; protein id: At4g34215
  misc_feature (1)..(170): NCBI GI NO: 38347110 NR Description: OSJNBa0009K15.7
  misc_feature (1)..(171): NCBI GI NO: 38345580 NR Description: OSJNBa0027H06.16
  misc_feature (1)..(109): NCBI GI NO: 30693749 NR Description: expressed protein [Arabidopsis thaliana]
  misc_feature (1)..(116): NCBI GI NO: 7488258 NR Description: protein kinase homolog F28A23
  misc_feature (1)..(109): NCBI GI NO: 11357879 NR Description: hypothetical protein F8J2
  misc_feature (1)..(167): NCBI GI NO: 29349588 NR Description: acetyl xylan esterase A
MPFAHAVLTSEGAAAEPPVVVGLVPCAQGGTPIANWSRGTELYERMVTRARAAVAECSGRGHLAALLWYQGEADTMRRQDAELYQRRMETLVRDVRCDLGRPDLLVIQVGIATAQYNGKFLGVVREAQKAVKLPNVKYVDAMGLPIASDHTHLTTEAQVQLGNKLAESYLETL

SEQ ID NO: 24780 - protein, 157 aa, Zea mays subsp. mays
  peptide (1)..(157): Ceres Seq. ID no. 12366743
  misc_feature (27)..(85): NCBI GI NO: 30102977 NR Description: hypothetical protein
  misc_feature (26)..(85): NCBI GI NO: 30102980 NR Description: unknown protein
  misc_feature (33)..(84): NCBI GI NO: 21594009 NR Description: unknown [Arabidopsis thaliana]
  misc_feature (33)..(84): NCBI GI NO: 18418402 NR Description: Expressed protein; protein id: At4g34215
  misc_feature (46)..(86): NCBI GI NO: 38347110 NR Description: OSJNBa0009K15.7
  misc_feature (25)..(84): NCBI GI NO: 30693749 NR Description: expressed protein [Arabidopsis thaliana]
  misc_feature (33)..(84): NCBI GI NO: 7488258 NR Description: protein kinase homolog F28A23
  misc_feature (55)..(84): NCBI GI NO: 11357879 NR Description: hypothetical protein F8J2
SRITSWKALWAIMALLTLQQPAIPFLLLLLLLPAASARLPGGRTLVFILAGQSNMSGRGGATNGTWDGIVPPECAPSDRIVRLSPAFAGSRRASRCTPASTWATFSASGPACPSRTPCSPARAQPQSPPSSSGSCRAHRAARRSPTGPGGRSCTSGW

SEQ ID NO: 24781 - protein, 145 aa, Zea mays subsp. mays
  peptide (1)..(145): Ceres Seq. ID no. 12366744
  misc_feature (15)..(73): NCBI GI NO: 30102977 NR Description: hypothetical protein
  misc_feature (14)..(73): NCBI GI NO: 30102980 NR Description: unknown protein
  misc_feature (21)..(72): NCBI GI NO: 21594009 NR Description: unknown [Arabidopsis thaliana]
  misc_feature (21)..(72): NCBI GI NO: 18418402 NR Description: Expressed protein; protein id: At4g34215
  misc_feature (34)..(74): NCBI GI NO: 38347110 NR Description: OSJNBa0009K15.7
  misc_feature (13)..(72): NCBI GI NO: 30693749 NR Description: expressed protein [Arabidopsis thaliana]
  misc_feature (21)..(72): NCBI GI NO: 7488258 NR Description: protein kinase homolog F28A23
  misc_feature (43)..(72): NCBI GI NO: 11357879 NR Description: hypothetical protein F8J2
MALLTLQQPAIPFLLLLLLLPAASARLPGGRTLVFILAGQSNMSGRGGATNGTWDGIVPPECAPSDRIVRLSPAFAGSRRASRCTPASTWATFSASGPACPSRTPCSPARAQPQSPPSSSGSCRAHRAARRSPTGPGGRSCTSGW

SEQ ID NO: 24782 - DNA, 1174 bp, Zea mays subsp. mays
  misc_feature (1)..(1174): Ceres Seq. ID no. 12365255
atagcaaatccgcgaccccgagcaagaagccaggaaccagctcaaagttattcgtccaagaaccccaccccacccccacaacacatagaaatttcgtcttggagagccaccaatggcttgttccactgcatctttagcggcgatgctgctggcgttcgcgctgatgttccaggcctgcgtcgcggggaggaggaggctcaccgcgctcgtgcaggagccggccatcaccatgaagtaccacaagggcgcgctcctgtcgggccccatcgccgtcaacttcatctggtacggcgacttcacggcgccacagcgggcggtgatcaccgacttcgtctcgtcgctgtccgcggccccgcgggcggcggcgcagtcgcagccggagccgtccgtgtccacgtggttcaagacggcgcgcaagtactacgacacctccaaggcgcgtttcccggcgctgcgcctcggctcccacgccgtcgaccggaactgctccctcggcaggcggctcacggagcgggacctcctcaggctcgccgccaggggggcaccgagccgcgccatcaacctggtgctcacggccgccgacgtggccgtggacgggttctgcgcgtcccgttgcggcacgcacggcgcgtccccgcggtcccgcgccggccggttcgcgtacgtgtgggtgggcaacccggcgtcgcagtgccccggacagtgcgcgtggccgttccaccagcccgtctacggcccgcaggcgccgccgctcacgccccccaacgccgacgtcggggtcgacggcatggtgatctcgctggcgtccatgatcgtcggcaccgtcaccaacccgttcggcaacggggttctaccaggagggctcggccgacgcgccgctcgaggccgccacggcgtgcgccggcgtgtacggcaagggcgcgtaccccggctacgcgggggcgctgctggtggacccggccagcggcgccagcttcaatgccaacggggcccacgggagaaagtacctggtcccggcgctcgtggatccggacacgtcgtcgtgtgccaccttggggtagatttcgcggatcgtaaattagtgtttgcgatgtggcggtggtggtgctgtggagtgtgttccacgcggctaaaagtttgtgctaaagtagtactgaccaggttgcattattcc

SEQ ID NO: 24783 - protein, 358 aa, Zea mays subsp. mays
  peptide (1)..(358): Ceres Seq. ID no. 12365256
  misc_feature (115)..(172): Pfam Name: Pfam Description:  Phosphate-induced protein 1 conserved region
  misc_feature (46)..(172): NCBI GI NO: 13194680 NR Description: phosphate-induced protein 1-like protein
  misc_feature (4)..(313): NCBI GI NO: 23335597 NR Description: hypothetical protein
IANPRPRARSQEPAQSYSSKNPTPPPQHIEISSWRATNGLFHCIFSGDAAGVRADVPGLRRGEEEAHRARAGAGHHHEVPQGRAPVGPHRRQLHLVRRLHGATAGGDHRLRLVAVRGPAGGGAVAAGAVRVHVVQDGAQVLRHLQGAFPGAAPRLPRRRPELLPRQAAHGAGPPQARRQGGTEPRHQPGAHGRRRGRGRVLRVPLRHARRVPAVPRRPVRVRVGGQPGVAVPRTVRVAVPPARLRPAGAAAHAPQRRRRGRRHGDLAGVHDRRHRHQPVRQRGSTRRARPTRRSRPPRRAPACTARARTPATRGRCWWTRPAAPASMPTGPTGESTWSRRSWIRTRRRVPPWGRFRGS

SEQ ID NO: 24784 - protein, 354 aa, Zea mays subsp. mays
  peptide (1)..(354): Ceres Seq. ID no. 12365257
  misc_feature (108)..(250): Pfam Name: Pfam Description:  Phosphate-induced protein 1 conserved region
  misc_feature (22)..(249): NCBI GI NO: 3759184 NR Description: phi-1 [Nicotiana tabacum]
  misc_feature (108)..(250): NCBI GI NO: 13194680 NR Description: phosphate-induced protein 1-like protein
  misc_feature (7)..(249): NCBI GI NO: 21593043 NR Description: putative phi-1-like phosphate-induced protein
  misc_feature (8)..(249): NCBI GI NO: 15236667 NR Description: putative phi-1-like phosphate-induced protein
  misc_feature (13)..(249): NCBI GI NO: 15219504 NR Description: phosphate-induced
  misc_feature (5)..(249): NCBI GI NO: 31074969 NR Description: erg-1 [Solanum tuberosum]
  misc_feature (31)..(249): NCBI GI NO: 15237656 NR Description: phi-1-like protein; protein id: At5g64260
  misc_feature (48)..(253): NCBI GI NO: 15242420 NR Description: putative protein; protein id: At5g09440
  misc_feature (13)..(248): NCBI GI NO: 11762144 NR Description: At1g35140 [Arabidopsis thaliana]
  misc_feature (8)..(208): NCBI GI NO: 37533672 NR Description: putative phosphate-induced protein
MACSTASLAAMLLAFALMFQACVAGRRRLTALVQEPAITMKYHKGALLSGPIAVNFIWYGDFTAPQRAVITDFVSSLSAAPRAAAQSQPEPSVSTWFKTARKYYDTSKARFPALRLGSHAVDRNCSLGRRLTERDLLRLAARGAPSRAINLVLTAADVAVDGFCASRCGTHGASPRSRAGRFAYVWVGNPASQCPGQCAWPFHQPVYGPQAPPLTPPNADVGVDGMVISLASMIVGTVTNPFGNGVLPGGLGRRAARGRHGVRRRVRQGRVPRLRGGAAGGPGQRRQLQCQRGPREKVPGPGARGSGHVVVCHLGVDFADRKLVFAMWRWWCCGVCSTRLKVCAKVVLTRLHYS

SEQ ID NO: 24785 - protein, 344 aa, Zea mays subsp. mays
  peptide (1)..(344): Ceres Seq. ID no. 12365258
  misc_feature (98)..(240): Pfam Name: Pfam Description:  Phosphate-induced protein 1 conserved region
  misc_feature (12)..(239): NCBI GI NO: 3759184 NR Description: phi-1 [Nicotiana tabacum]
  misc_feature (98)..(240): NCBI GI NO: 13194680 NR Description: phosphate-induced protein 1-like protein
  misc_feature (1)..(239): NCBI GI NO: 21593043 NR Description: putative phi-1-like phosphate-induced protein
  misc_feature (1)..(239): NCBI GI NO: 15236667 NR Description: putative phi-1-like phosphate-induced protein
  misc_feature (3)..(239): NCBI GI NO: 15219504 NR Description: phosphate-induced
  misc_feature (1)..(239): NCBI GI NO: 31074969 NR Description: erg-1 [Solanum tuberosum]
  misc_feature (21)..(239): NCBI GI NO: 15237656 NR Description: phi-1-like protein; protein id: At5g64260
  misc_feature (38)..(243): NCBI GI NO: 15242420 NR Description: putative protein; protein id: At5g09440
  misc_feature (3)..(238): NCBI GI NO: 11762144 NR Description: At1g35140 [Arabidopsis thaliana]
  misc_feature (1)..(198): NCBI GI NO: 37533672 NR Description: putative phosphate-induced protein
MLLAFALMFQACVAGRRRLTALVQEPAITMKYHKGALLSGPIAVNFIWYGDFTAPQRAVITDFVSSLSAAPRAAAQSQPEPSVSTWFKTARKYYDTSKARFPALRLGSHAVDRNCSLGRRLTERDLLRLAARGAPSRAINLVLTAADVAVDGFCASRCGTHGASPRSRAGRFAYVWVGNPASQCPGQCAWPFHQPVYGPQAPPLTPPNADVGVDGMVISLASMIVGTVTNPFGNGVLPGGLGRRAARGRHGVRRRVRQGRVPRLRGGAAGGPGQRRQLQCQRGPREKVPGPGARGSGHVVVCHLGVDFADRKLVFAMWRWWCCGVCSTRLKVCAKVVLTRLHYS

SEQ ID NO: 24786 - DNA, 1660 bp, Zea mays subsp. mays
  misc_feature (1)..(1660): Ceres Seq. ID no. 12362157
atcctcgctgctttccaccaccctataccaaaccagccaaagccctcctctcctccccgcctccgcctccgacctcgaacattcttctccaatggcgacggcccccgcatccctctcgctctccgcctctaccctgcccacccggctccgtgccgcagcggtgctggcgggcatgcgctggaggcagccgcagcgcgggcggatggtggtgcgcgccaagatccgggagatcttcatgccggcgctgagctccaccatgacggagggcaagatcgtctcctggtccgctggagagggtgatcgcgtctccaagggtgacgccgtcgtggtcgtcgagtctgacaaggccgacatggacgttgagaccttccacgacggcatcgtggcggcggtcctcgtccaggctggcgagtcggcgccggtgggcgcgcccatcgcgctgctcgcggagtcagaggaggaggtgccgctcgctctcgccaaggctcaggagctctccaacgggcagccgcagcaggtgcctcctgctccgacggaggatgccgcagcgacgccgccccctcctcctgctccggccactgctcccacgccggtggccgtgggtacgaagggcattgccagcccgcacgctaagaagctggctaagcagcacagggtggaccttgccaaggtgactggcaccgggccgtatggtcgaattacgtcggcagatgtcgaggcggctgccggaatccagccgaagtcaaagcccgctgctgctgctgctgcgccaccacctgtggctgcaccttcagtgggtgcggtgcctcagtcggcagttctaccaccggttcctggcgcgactgttgttccattcactaccatgcaggctgcagtgagcaagaacatggtggagagtctggcagtgccaacattccgcgttgggtaccccattattactgataaactcgacgagctgtatgaaaaggttaagccaaagggagtgacaatgacagtgctgctggcgaaggctgcagccatggctcttgcacagcaccctgttgtcaatgctagctgcagggatggaaagagcttcacatacaacagtaacatcaacattgcagtggctgtggcaattgatggtggccttattacacctgtccttcaggatgctgacaagctggatatatatttgctctcgcaaaattggaaggatctagtgaagaaagcacgagcaaaacagctccaaccaaatgagtacagctctgggacttttacactgtccaacctgggtatgtttggtgtagatcggtttgatgcaatccttccacctgaccagggagctattatggctgttggagcctcgaaacctacagttgtggctgataaagatggtttctttagcgtcaagaacaaaatgctggtcaatgtcactgctgatcacaggattgtatatggggctgatttggcagcattcctacaaacttttgcaaaggttattgaggatcctgagagcttaactttgtgagatctcttgaagagttatgatcttatctatatgcccataaatagtctggttgcagttggagttctgttgttgatctccagtttttgtatctttgaacattcggcatgatttatctgatctttttgtactggtttctatctctcattgttgtgg

SEQ ID NO: 24787 - protein, 501 aa, Zea mays subsp. mays
  peptide (1)..(501): Ceres Seq. ID no. 12362158
  misc_feature (277)..(501): Pfam Name: catalytic domain Pfam Description: 2-oxoacid dehydrogenases acyltransferase
  misc_feature (18)..(501): NCBI GI NO: 15230922 NR Description: dihydrolipoamide S-acetyltransferase
  misc_feature (68)..(501): NCBI GI NO: 9279589 NR Description: dihydrolipoamide S-acetyltransferase
  misc_feature (40)..(500): NCBI GI NO: 15218630 NR Description: dihydrolipoamide S-acetyltransferase, putative
  misc_feature (40)..(500): NCBI GI NO: 21536525 NR Description: dihydrolipoamide S-acetyltransferase, putative
  misc_feature (40)..(500): NCBI GI NO: 25286434 NR Description: protein F12K21.24
  misc_feature (131)..(501): NCBI GI NO: 21954074 NR Description: putative dihydrolipoamide S-acetyltransferase
  misc_feature (74)..(501): NCBI GI NO: 16331208 NR Description: dihydrolipoamide acetyltransferase component
  misc_feature (74)..(501): NCBI GI NO: 23123757 NR Description: hypothetical protein [Nostoc punctiforme]
  misc_feature (74)..(501): NCBI GI NO: 17231098 NR Description: dihydrolipoamide S-acetyltransferase
  misc_feature (74)..(501): NCBI GI NO: 22298842 NR Description: dihydrolipoamide S-acetyltransferase
SSLLSTTLYQTSQSPPLLPASASDLEHSSPMATAPASLSLSASTLPTRLRAAAVLAGMRWRQPQRGRMVVRAKIREIFMPALSSTMTEGKIVSWSAGEGDRVSKGDAVVVVESDKADMDVETFHDGIVAAVLVQAGESAPVGAPIALLAESEEEVPLALAKAQELSNGQPQQVPPAPTEDAAATPPPPPAPATAPTPVAVGTKGIASPHAKKLAKQHRVDLAKVTGTGPYGRITSADVEAAAGIQPKSKPAAAAAAPPPVAAPSVGAVPQSAVLPPVPGATVVPFTTMQAAVSKNMVESLAVPTFRVGYPIITDKLDELYEKVKPKGVTMTVLLAKAAAMALAQHPVVNASCRDGKSFTYNSNINIAVAVAIDGGLITPVLQDADKLDIYLLSQNWKDLVKKARAKQLQPNEYSSGTFTLSNLGMFGVDRFDAILPPDQGAIMAVGASKPTVVADKDGFFSVKNKMLVNVTADHRIVYGADLAAFLQTFAKVIEDPESLTL

SEQ ID NO: 24788 - protein, 471 aa, Zea mays subsp. mays
  peptide (1)..(471): Ceres Seq. ID no. 12362159
  misc_feature (247)..(471): Pfam Name: catalytic domain Pfam Description: 2-oxoacid dehydrogenases acyltransferase
  misc_feature (1)..(471): NCBI GI NO: 15230922 NR Description: dihydrolipoamide S-acetyltransferase
  misc_feature (38)..(471): NCBI GI NO: 9279589 NR Description: dihydrolipoamide S-acetyltransferase
  misc_feature (10)..(470): NCBI GI NO: 15218630 NR Description: dihydrolipoamide S-acetyltransferase, putative
  misc_feature (10)..(470): NCBI GI NO: 21536525 NR Description: dihydrolipoamide S-acetyltransferase, putative
  misc_feature (10)..(470): NCBI GI NO: 25286434 NR Description: protein F12K21.24
  misc_feature (101)..(471): NCBI GI NO: 21954074 NR Description: putative dihydrolipoamide S-acetyltransferase
  misc_feature (44)..(471): NCBI GI NO: 16331208 NR Description: dihydrolipoamide acetyltransferase component
  misc_feature (44)..(471): NCBI GI NO: 23123757 NR Description: hypothetical protein [Nostoc punctiforme]
  misc_feature (44)..(471): NCBI GI NO: 17231098 NR Description: dihydrolipoamide S-acetyltransferase
  misc_feature (44)..(471): NCBI GI NO: 22298842 NR Description: dihydrolipoamide S-acetyltransferase
MATAPASLSLSASTLPTRLRAAAVLAGMRWRQPQRGRMVVRAKIREIFMPALSSTMTEGKIVSWSAGEGDRVSKGDAVVVVESDKADMDVETFHDGIVAAVLVQAGESAPVGAPIALLAESEEEVPLALAKAQELSNGQPQQVPPAPTEDAAATPPPPPAPATAPTPVAVGTKGIASPHAKKLAKQHRVDLAKVTGTGPYGRITSADVEAAAGIQPKSKPAAAAAAPPPVAAPSVGAVPQSAVLPPVPGATVVPFTTMQAAVSKNMVESLAVPTFRVGYPIITDKLDELYEKVKPKGVTMTVLLAKAAAMALAQHPVVNASCRDGKSFTYNSNINIAVAVAIDGGLITPVLQDADKLDIYLLSQNWKDLVKKARAKQLQPNEYSSGTFTLSNLGMFGVDRFDAILPPDQGAIMAVGASKPTVVADKDGFFSVKNKMLVNVTADHRIVYGADLAAFLQTFAKVIEDPESLTL

SEQ ID NO: 24789 - protein, 444 aa, Zea mays subsp. mays
  peptide (1)..(444): Ceres Seq. ID no. 12362160
  misc_feature (220)..(444): Pfam Name: catalytic domain Pfam Description: 2-oxoacid dehydrogenases acyltransferase
  misc_feature (1)..(444): NCBI GI NO: 15230922 NR Description: dihydrolipoamide S-acetyltransferase
  misc_feature (11)..(444): NCBI GI NO: 9279589 NR Description: dihydrolipoamide S-acetyltransferase
  misc_feature (1)..(443): NCBI GI NO: 15218630 NR Description: dihydrolipoamide S-acetyltransferase, putative
  misc_feature (1)..(443): NCBI GI NO: 21536525 NR Description: dihydrolipoamide S-acetyltransferase, putative
  misc_feature (1)..(443): NCBI GI NO: 25286434 NR Description: protein F12K21.24
  misc_feature (74)..(444): NCBI GI NO: 21954074 NR Description: putative dihydrolipoamide S-acetyltransferase
  misc_feature (17)..(444): NCBI GI NO: 16331208 NR Description: dihydrolipoamide acetyltransferase component
  misc_feature (17)..(444): NCBI GI NO: 23123757 NR Description: hypothetical protein [Nostoc punctiforme]
  misc_feature (17)..(444): NCBI GI NO: 17231098 NR Description: dihydrolipoamide S-acetyltransferase
  misc_feature (17)..(444): NCBI GI NO: 22298842 NR Description: dihydrolipoamide S-acetyltransferase
MRWRQPQRGRMVVRAKIREIFMPALSSTMTEGKIVSWSAGEGDRVSKGDAVVVVESDKADMDVETFHDGIVAAVLVQAGESAPVGAPIALLAESEEEVPLALAKAQELSNGQPQQVPPAPTEDAAATPPPPPAPATAPTPVAVGTKGIASPHAKKLAKQHRVDLAKVTGTGPYGRITSADVEAAAGIQPKSKPAAAAAAPPPVAAPSVGAVPQSAVLPPVPGATVVPFTTMQAAVSKNMVESLAVPTFRVGYPIITDKLDELYEKVKPKGVTMTVLLAKAAAMALAQHPVVNASCRDGKSFTYNSNINIAVAVAIDGGLITPVLQDADKLDIYLLSQNWKDLVKKARAKQLQPNEYSSGTFTLSNLGMFGVDRFDAILPPDQGAIMAVGASKPTVVADKDGFFSVKNKMLVNVTADHRIVYGADLAAFLQTFAKVIEDPESLTL

SEQ ID NO: 24790 - DNA, 1741 bp, Zea mays subsp. mays
  misc_feature (1)..(1741): Ceres Seq. ID no. 12362368
gcacgagaccattacctagaacatcctaatcgaaaaaccccccgttctgtagctctcctctaatcctgatttttgtatgcgtggtggtcgctcttccgtctctcccagcccagcagccagcagtcgtctccttctctacctccctcgcatatcctgctcctctgtaaccactgtactaaaactagcctgtacctgtactgtgctgacattatatacagccccttctctttgcttcttgctcgtgccaattggcagttgccattgccaatcaccacgtagagctgcattattgcttgcttcgaggccatgggaactgcaagagttcgcttcgtggtccttgttctgatctctacgtttctcagagtcagagaaggcagagccgcgacattcacgttcgtgaaccggtgcacggggacggtgtggccgggcatccagtccaacgccggaagctcgaggctggacacgacgggcttcgtgctgccgccgggcacgtcgcgcgcggtcccggcgccgtcggggtggtccggccgcgtctgggcccgcaccggctgcgggcaggacggcagcggcaaggtggtgtgcgcgacgggcgactgcgggtccgggtccctggagtgcaacgggcagaacgcggcgacgcctgcgacgctggccgagttcacgctggcctccgcgggcggcaacgacttctacgacgtgagcctggtggacggctacaacctgccgatcctggtggagcccgcgggcggcgccgccaccggcgccagtgccacgacgtgcgccgcggccgggtgcacggcggacctcaacgagcggtgccccgcggagctgcgcgccgagggcggcgccgggtgccgcaccgcctgccacgccttcggcaggcccgagtactgctgcagcggcgcctacgccaaccccaacacctgccgccccaccgcctactcgcagctcttcaagtccgcctgccccaactcgtacagctacgcatacgacgaccccaccagcaccttcacctgcgccggcggccgcgactacaccatcaccttctgccccgtcgccaccccaagcgtgaaatcgtcgagtggccctggagcggcaacaacgacggcggcaccgacaggcccgacgccgacgctgccgggggcgacgccgcggtcggcaggcggcggcccggaggggcagggcgtgatgctgggcgacaactcctggctcgccagcctcgccacgggcgacgcgtcgtccgcgccggcgctccgggccttgcccctcgcgccgctcctgctcgtcggcctgctcctgcttgtgctgctatagcaccaccagcgggaaacccaggcaaccgaccgcgtcacgggcgtgtgaggcgaaagcttttgatctcggacagcctaccgaacgcgcgcgctcctgctacgtttgatgaatcatctcctagtcacggtgcaggcctgcagtgcggcggatgattttgacggctagccgaatgcgcgcacccccatccccagtcagcagctgaaggaaaaaaagtttaagtggcctactcatggatgaggtggctgcagcatggactagacacaaatactattagtgctgatggtgtatagtaccgctgccgctttaaagtagtgtacagtgcagtgcagctctgatggcgctgtccctcggcacatgggaggagatgtgcccatgccatgccatctgatctgtgcttgcggatcaatcaaatactacgtacgtgtcc

SEQ ID NO: 24791 - protein, 335 aa, Zea mays subsp. mays
  peptide (1)..(335): Ceres Seq. ID no. 12362369
  misc_feature (32)..(249): Pfam Name: Pfam Description:  Thaumatin family
  misc_feature (1)..(285): NCBI GI NO: 37531036 NR Description: putative thaumatin-like protein
  misc_feature (1)..(315): NCBI GI NO: 21592749 NR Description: putative thaumatin-like protein
  misc_feature (1)..(315): NCBI GI NO: 18420282 NR Description: putative thaumatin-like protein
  misc_feature (26)..(315): NCBI GI NO: 7442168 NR Description: pathogenesis-related protein F20M13
  misc_feature (9)..(319): NCBI GI NO: 37531042 NR Description: putative thaumatin-like protein
  misc_feature (1)..(277): NCBI GI NO: 15233437 NR Description: thaumatin-like protein; protein id: At4g36010
  misc_feature (27)..(306): NCBI GI NO: 25296204 NR Description: hypothetical protein T20H2.19
  misc_feature (27)..(306): NCBI GI NO: 30686652 NR Description: thaumatin family [Arabidopsis thaliana]
  misc_feature (4)..(249): NCBI GI NO: 15233738 NR Description: thaumatin-like protein; protein id: At4g24180.1
  misc_feature (10)..(278): NCBI GI NO: 15222875 NR Description: thaumatin, putative; protein id: At1g75800
MGTARVRFVVLVLISTFLRVREGRAATFTFVNRCTGTVWPGIQSNAGSSRLDTTGFVLPPGTSRAVPAPSGWSGRVWARTGCGQDGSGKVVCATGDCGSGSLECNGQNAATPATLAEFTLASAGGNDFYDVSLVDGYNLPILVEPAGGAATGASATTCAAAGCTADLNERCPAELRAEGGAGCRTACHAFGRPEYCCSGAYANPNTCRPTAYSQLFKSACPNSYSYAYDDPTSTFTCAGGRDYTITFCPVATPSVKSSSGPGAATTTAAPTGPTPTLPGATPRSAGGGPEGQGVMLGDNSWLASLATGDASSAPALRALPLAPLLLVGLLLLVLL

SEQ ID NO: 24792 - DNA, 1191 bp, Zea mays subsp. mays
  misc_feature (1)..(1191): Ceres Seq. ID no. 12352162
aagatataggttggaaccagactctgacaccgactacggagccaatccctcctgctggttcgatccaaaccctaccaaatcgatggccgacggcggcaacggcgggccgggcggcggcaatgcatcggcgccggtgtgcagtttcgtgaggaaaccacccaagaacatccggaagcgccccgccgcgcccgcggggtctgatgacgacgacgacggcggcggcggcgccctagccgccgcgcgctccaagaaggggccaccgtcctcaaccgctggcaagctcgttttctccaccgcaggtgcttcctccgaggcgccgcggttccagtacgaatcgtcccggacgatccagtccacggacacccgcgcaactgccacgctcgagacggagacggagtttgaccgcgacgcgcgctccatccgcgagagacagctcaagcaggccgaggagtccctcaagaagaacccctccgctgttgctgcttccgcctccgcctccaccgctggagaggtgtacaaggggatccacggctacacggactacaaagctgggttccgacgggagcacacggtatctagcgagaaggccggcggttcgcatggtccgctccgggcgtccgcgcacattcgcctctcccagcggtttgactaccagcccgacatctgcaaggactacaaggagacggggtactgtggttacggcgattcctgcaaattcatgcacgaccgaggggattacaaatccgggtggcagctcgagaaggaatatgaggaggctgagaaggcccgcaagcgacgaattgccatgggtggtggtggtgagagtgatgatgaggcagcagatgacgaggatgaggaggaggcgctgccctttgcctgcttcatttgtcgggagccattcgttgatccagtggtcaccaaatgcaagcactacttttgtgaacattgcgctttgaagcaccactcgaagaacaagaagtgctacgtctgcaacaaaccgacgctgggcatcttcaacgctgcacaggagatccgcaagaagatggcacaggacaagaagcagcagcagcaggagtaggagagctcaaaacacaccgttgctaatttagctgtgttgtacaacgatgattggtgcgataactagagtccggtatttttcgctatcagataaaagagaccaagttttgaacg

SEQ ID NO: 24793 - protein, 358 aa, Zea mays subsp. mays
  peptide (1)..(358): Ceres Seq. ID no. 12352163
  misc_feature (293)..(330): Pfam Name: RING finger Pfam Description: Zinc finger, C3HC4 type
  misc_feature (27)..(357): NCBI GI NO: 15240037 NR Description: putative protein; protein id: At5g06420
  misc_feature (42)..(357): NCBI GI NO: 15223384 NR Description: hypothetical protein; protein id: At1g01350.1
  misc_feature (42)..(357): NCBI GI NO: 26451788 NR Description: unknown protein [Arabidopsis thaliana]
  misc_feature (27)..(357): NCBI GI NO: 22531136 NR Description: putative protein [Arabidopsis thaliana]
  misc_feature (42)..(319): NCBI GI NO: 25406720 NR Description: probable zinc finger protein
  misc_feature (39)..(356): NCBI GI NO: 27715515 NR Description: similar to RIKEN cDNA 2810428C21
  misc_feature (39)..(356): NCBI GI NO: 23943840 NR Description: RIKEN cDNA 2810428C21 [Mus musculus]
  misc_feature (82)..(358): NCBI GI NO: 27374394 NR Description: CG4973-PA [Drosophila willistoni]
  misc_feature (66)..(348): NCBI GI NO: 27374308 NR Description: CG4973-PA [Drosophila pseudoobscura]
  misc_feature (39)..(355): NCBI GI NO: 34935361 NR Description: similar to RIKEN cDNA 2310020H19
RYRLEPDSDTDYGANPSCWFDPNPTKSMADGGNGGPGGGNASAPVCSFVRKPPKNIRKRPAAPAGSDDDDDGGGGALAAARSKKGPPSSTAGKLVFSTAGASSEAPRFQYESSRTIQSTDTRATATLETETEFDRDARSIRERQLKQAEESLKKNPSAVAASASASTAGEVYKGIHGYTDYKAGFRREHTVSSEKAGGSHGPLRASAHIRLSQRFDYQPDICKDYKETGYCGYGDSCKFMHDRGDYKSGWQLEKEYEEAEKARKRRIAMGGGGESDDEAADDEDEEEALPFACFICREPFVDPVVTKCKHYFCEHCALKHHSKNKKCYVCNKPTLGIFNAAQEIRKKMAQDKKQQQQE

SEQ ID NO: 24794 - protein, 331 aa, Zea mays subsp. mays
  peptide (1)..(331): Ceres Seq. ID no. 12352164
  misc_feature (266)..(303): Pfam Name: RING finger Pfam Description: Zinc finger, C3HC4 type
  misc_feature (1)..(330): NCBI GI NO: 15240037 NR Description: putative protein; protein id: At5g06420
  misc_feature (15)..(330): NCBI GI NO: 15223384 NR Description: hypothetical protein; protein id: At1g01350.1
  misc_feature (15)..(330): NCBI GI NO: 26451788 NR Description: unknown protein [Arabidopsis thaliana]
  misc_feature (1)..(330): NCBI GI NO: 22531136 NR Description: putative protein [Arabidopsis thaliana]
  misc_feature (15)..(292): NCBI GI NO: 25406720 NR Description: probable zinc finger protein
  misc_feature (12)..(329): NCBI GI NO: 27715515 NR Description: similar to RIKEN cDNA 2810428C21
  misc_feature (12)..(329): NCBI GI NO: 23943840 NR Description: RIKEN cDNA 2810428C21 [Mus musculus]
  misc_feature (55)..(331): NCBI GI NO: 27374394 NR Description: CG4973-PA [Drosophila willistoni]
  misc_feature (39)..(321): NCBI GI NO: 27374308 NR Description: CG4973-PA [Drosophila pseudoobscura]
  misc_feature (12)..(328): NCBI GI NO: 34935361 NR Description: similar to RIKEN cDNA 2310020H19
MADGGNGGPGGGNASAPVCSFVRKPPKNIRKRPAAPAGSDDDDDGGGGALAAARSKKGPPSSTAGKLVFSTAGASSEAPRFQYESSRTIQSTDTRATATLETETEFDRDARSIRERQLKQAEESLKKNPSAVAASASASTAGEVYKGIHGYTDYKAGFRREHTVSSEKAGGSHGPLRASAHIRLSQRFDYQPDICKDYKETGYCGYGDSCKFMHDRGDYKSGWQLEKEYEEAEKARKRRIAMGGGGESDDEAADDEDEEEALPFACFICREPFVDPVVTKCKHYFCEHCALKHHSKNKKCYVCNKPTLGIFNAAQEIRKKMAQDKKQQQQE

SEQ ID NO: 24795 - DNA, 1249 bp, Zea mays subsp. mays
  misc_feature (1)..(1249): Ceres Seq. ID no. 12381193
gcacgagaccattacctagaacatcctaatcgaaaaaaaccccaactccacaatgaggccgtcgctgatgagatccacctcccagctcctccgccgccggagctactcctccgcatccgggcagcccgagcggaaggtggccatcctcggggcggcggggggcatcgggcagccgctgtcgctgctcatgaagctcaacccactggtctcctccctctcgctctacgatatcgctggcaccccaggtgtcgcggccgacgtctcccacatcaactcccccgcactggtgaagggtttcatgggtgatgagcaacttggggaagcgctagagggctcggacgtggtgatcataccggccggcgtcccgaggaagcccggcatgaccagggacgacctattcaatatcaacgctggcatcgttaagaacctcagcaccgccatcgccaagtactgccccaatgcccttgtcaacatgatcagcaaccctgtgaattcaactgtaccaattgctgctgaggttttcaagaaggctgggacatatgatgagaagaagttgtttggcgtgaccacccttgatgttgttcgtgctaagactttctatgctgggaaggctaatttaccagttaccgatgtgaatgtccctgttgttggtggtcatgcgggtatcactatcctgccgttgttctcacaggccacccctgcaaccaacgcattgtccgatgaagacatcaaggctctcaccaagaggacacaggatggtggaactgaagttgtcgaggcaaaggctgggaagggctctgcaaccttgtccatggcgtatgctggtgctgtttttgcagatgcatgcttgaagggtctcaatggagttccggatattgttgagtgctcttttgttcaatcaactgtaacagagcttccattctttgcatctaaggtaaggcttgggaagaatggagttgaggaagtgcttggattaggtgagctgtgcggactttgagaaagaagggttggagaagctcaagagcgagctcaagtcttcgattgagaagggtatcaagtttgcaaatgataactagataaggccattttgcagattatagcaacaattgaaacctttagtagcaattgaaacctttagttgcgggatcttctgatttcattctacccttttctgtccctttttgtgagggagtggaaggtattacaataaaaaacctgatgggcaaagcttacatgagggatttattcc

SEQ ID NO: 24796 - protein, 314 aa, Zea mays subsp. mays
  peptide (1)..(314): Ceres Seq. ID no. 12381194
  misc_feature (172)..(311): Pfam Name: Pfam Description:  lactate/malate dehydrogenase
  misc_feature (1)..(311): NCBI GI NO: 126896 NR Description: MALATE DEHYDROGENASE, MITOCHONDRIAL PRECURSOR
  misc_feature (1)..(311): NCBI GI NO: 24638017 NR Description: Malate dehydrogenase, mitochondrial precursor
  misc_feature (1)..(311): NCBI GI NO: 7798706 NR Description: malate dehydrogenase [Vitis vinifera]
  misc_feature (1)..(311): NCBI GI NO: 5929964 NR Description: malate dehydrogenase [Glycine max]
  misc_feature (2)..(311): NCBI GI NO: 18404382 NR Description: mitochondrial NAD-dependent malate dehydrogenase
  misc_feature (1)..(311): NCBI GI NO: 7431177 NR Description: malate dehydrogenase (EC 1
  misc_feature (2)..(311): NCBI GI NO: 21592905 NR Description: mitochondrial NAD-dependent malate dehydrogenase
  misc_feature (2)..(311): NCBI GI NO: 15232468 NR Description: mitochondrial NAD-dependent malate dehydrogenase
  misc_feature (1)..(311): NCBI GI NO: 21388544 NR Description: putative mitochondrial NAD-dependent malatedehydrogenase
  misc_feature (1)..(314): NCBI GI NO: 15232820 NR Description: chloroplast NAD-dependent malate dehydrogenase
MRPSLMRSTSQLLRRRSYSSASGQPERKVAILGAAGGIGQPLSLLMKLNPLVSSLSLYDIAGTPGVAADVSHINSPALVKGFMGDEQLGEALEGSDVVIIPAGVPRKPGMTRDDLFNINAGIVKNLSTAIAKYCPNALVNMISNPVNSTVPIAAEVFKKAGTYDEKKLFGVTTLDVVRAKTFYAGKANLPVTDVNVPVVGGHAGITILPLFSQATPATNALSDEDIKALTKRTQDGGTEVVEAKAGKGSATLSMAYAGAVFADACLKGLNGVPDIVECSFVQSTVTELPFFASKVRLGKNGVEEVLGLGELCGL

SEQ ID NO: 24797 - protein, 309 aa, Zea mays subsp. mays
  peptide (1)..(309): Ceres Seq. ID no. 12381195
  misc_feature (167)..(306): Pfam Name: Pfam Description:  lactate/malate dehydrogenase
  misc_feature (1)..(306): NCBI GI NO: 126896 NR Description: MALATE DEHYDROGENASE, MITOCHONDRIAL PRECURSOR
  misc_feature (1)..(306): NCBI GI NO: 24638017 NR Description: Malate dehydrogenase, mitochondrial precursor
  misc_feature (1)..(306): NCBI GI NO: 7798706 NR Description: malate dehydrogenase [Vitis vinifera]
  misc_feature (1)..(306): NCBI GI NO: 5929964 NR Description: malate dehydrogenase [Glycine max]
  misc_feature (1)..(306): NCBI GI NO: 18404382 NR Description: mitochondrial NAD-dependent malate dehydrogenase
  misc_feature (1)..(306): NCBI GI NO: 7431177 NR Description: malate dehydrogenase (EC 1
  misc_feature (1)..(306): NCBI GI NO: 21592905 NR Description: mitochondrial NAD-dependent malate dehydrogenase
  misc_feature (1)..(306): NCBI GI NO: 15232468 NR Description: mitochondrial NAD-dependent malate dehydrogenase
  misc_feature (1)..(306): NCBI GI NO: 21388544 NR Description: putative mitochondrial NAD-dependent malatedehydrogenase
  misc_feature (1)..(309): NCBI GI NO: 15232820 NR Description: chloroplast NAD-dependent malate dehydrogenase
MRSTSQLLRRRSYSSASGQPERKVAILGAAGGIGQPLSLLMKLNPLVSSLSLYDIAGTPGVAADVSHINSPALVKGFMGDEQLGEALEGSDVVIIPAGVPRKPGMTRDDLFNINAGIVKNLSTAIAKYCPNALVNMISNPVNSTVPIAAEVFKKAGTYDEKKLFGVTTLDVVRAKTFYAGKANLPVTDVNVPVVGGHAGITILPLFSQATPATNALSDEDIKALTKRTQDGGTEVVEAKAGKGSATLSMAYAGAVFADACLKGLNGVPDIVECSFVQSTVTELPFFASKVRLGKNGVEEVLGLGELCGL

SEQ ID NO: 24798 - protein, 269 aa, Zea mays subsp. mays
  peptide (1)..(269): Ceres Seq. ID no. 12381196
  misc_feature (127)..(266): Pfam Name: Pfam Description:  lactate/malate dehydrogenase
  misc_feature (1)..(266): NCBI GI NO: 126896 NR Description: MALATE DEHYDROGENASE, MITOCHONDRIAL PRECURSOR
  misc_feature (1)..(266): NCBI GI NO: 24638017 NR Description: Malate dehydrogenase, mitochondrial precursor
  misc_feature (1)..(266): NCBI GI NO: 7798706 NR Description: malate dehydrogenase [Vitis vinifera]
  misc_feature (1)..(266): NCBI GI NO: 5929964 NR Description: malate dehydrogenase [Glycine max]
  misc_feature (1)..(266): NCBI GI NO: 18404382 NR Description: mitochondrial NAD-dependent malate dehydrogenase
  misc_feature (1)..(266): NCBI GI NO: 7431177 NR Description: malate dehydrogenase (EC 1
  misc_feature (1)..(266): NCBI GI NO: 21592905 NR Description: mitochondrial NAD-dependent malate dehydrogenase
  misc_feature (1)..(266): NCBI GI NO: 15232468 NR Description: mitochondrial NAD-dependent malate dehydrogenase
  misc_feature (1)..(266): NCBI GI NO: 21388544 NR Description: putative mitochondrial NAD-dependent malatedehydrogenase
  misc_feature (1)..(269): NCBI GI NO: 15232820 NR Description: chloroplast NAD-dependent malate dehydrogenase
MKLNPLVSSLSLYDIAGTPGVAADVSHINSPALVKGFMGDEQLGEALEGSDVVIIPAGVPRKPGMTRDDLFNINAGIVKNLSTAIAKYCPNALVNMISNPVNSTVPIAAEVFKKAGTYDEKKLFGVTTLDVVRAKTFYAGKANLPVTDVNVPVVGGHAGITILPLFSQATPATNALSDEDIKALTKRTQDGGTEVVEAKAGKGSATLSMAYAGAVFADACLKGLNGVPDIVECSFVQSTVTELPFFASKVRLGKNGVEEVLGLGELCGL

SEQ ID NO: 24799 - DNA, 1673 bp, Zea mays subsp. mays
  misc_feature (1)..(1673): Ceres Seq. ID no. 12384182
ctcgacgcctcataggctcatagggttctccaaattctaaatcgttgcaagcgaaaccaccaaaactgtactcacaaccctcgtctgcgctgcgccaccactcccccgtggcggcttgtagttgtagaagttcccggaaccagacaacccctaggcgctgagttttctgatagcggcttcggatatctcgtcgtgggcggccatggcgggcccgtgctgagtgcggggcgggacaggtgaaggtctccgagctcgagatctcgatgcagattcgggagggcccggcgcggcggcaggcgccgtccgccgctggggcgctgcggtcgcccatgtccgccatgatgctcgctatgttcgctactatggcctccttctacgtcgccggtcgattgtggcaggatgctcagaaccgacttcatctcattaaggagctcgacagacgaacaggccaggggcaatcagcaatatctgtggatgataccttgaaggttgttgcatgcaggcagcaagggaagcggttggcatcacttgagatggagctggctgcagcaaagcataaaggttttgttggcaaatatactcctgagacaaatggaactcattctgggaaaaagccactgattgttattggaataatgagtagctttgggaggaaaaactaccgtgatgctgtcaggaaatcatggcttccaacaggttcaatgctgaagaaactagaagaagaaaaaggcattgtagtacgttttgttgttggaagaagtgcaaatcgaggtgatactttcgatagggagattgatgacgaaaataggagcaccaaggatttcttgatattggatgatcatatagaatctgatgaagagcttcctaagaagacaaaaagtttctttgctaatgcagcagaaacattcaatgctgcattttatgctaaggtcaatgatgatatatacataaatgtcgatactttgagtgcaatgctcgaaactcactgggacaggcctcgtgtctatataggttgcatgaaatcgggcgaggttttctctgacttaacccacaagtggtacgaatcagactggtggaaatttggtgatgggaaatcgtactttcgacacgcttctggtgaaatgtttgtcatatccagggccatagctcagttcatttctataaacaagtccgctctccggacatatgcccatgatgatgttagtattggatcgtggatgattggccttgccgtgaatcatgtaaatgaagcaaaactgtgctgttcatcgtggccctcaggtgcgttatgttcagcgctataacgagcaacaatgcttaatgaggaagagttttgcaaacactgtgcctgttggatcgaatcggtattgggaaaattttgttttcttctgccatcttgtgtagtcctttggaggaggcttgtacgagccagttcatactgattactggatcggatatcttgtttttcttttccaaaggaaaggtcttgcatattttctttgcaaggccactacactagaatcatgagttctgacgaaaagccctctgcagattgtatcctgttccgcgtgccatttgtagatgccccaccctttaccattcttttttctgacagacactgccattgttggagtgacagaaatcaatagcaattcgggagattactttgctcc

SEQ ID NO: 24800 - protein, 346 aa, Zea mays subsp. mays
  peptide (1)..(346): Ceres Seq. ID no. 12384183
  misc_feature (132)..(330): Pfam Name: Pfam Description:  Galactosyltransferase
  misc_feature (1)..(346): NCBI GI NO: 40253477 NR Description: putative Avr9 elicitor response protein
  misc_feature (23)..(344): NCBI GI NO: 22553068 NR Description: beta 1,3-glycosyltransferase-like protein I
  misc_feature (6)..(345): NCBI GI NO: 20372915 NR Description: beta 1,3-glycosyltransferase-like protein I
  misc_feature (21)..(346): NCBI GI NO: 18423501 NR Description: Avr9 elicitor response protein-like
  misc_feature (21)..(336): NCBI GI NO: 9759181 NR Description: Avr9 elicitor response protein-like
  misc_feature (7)..(344): NCBI GI NO: 34898462 NR Description: ESTs D47620
  misc_feature (25)..(344): NCBI GI NO: 15236681 NR Description: putative protein; protein id: At4g32120
  misc_feature (8)..(340): NCBI GI NO: 15224704 NR Description: unknown protein; protein id: At2g25300.1
  misc_feature (63)..(344): NCBI GI NO: 26451702 NR Description: unknown protein [Arabidopsis thaliana]
  misc_feature (78)..(338): NCBI GI NO: 15217544 NR Description: elicitor response protein, putative
MQIREGPARRQAPSAAGALRSPMSAMMLAMFATMASFYVAGRLWQDAQNRLHLIKELDRRTGQGQSAISVDDTLKVVACRQQGKRLASLEMELAAAKHKGFVGKYTPETNGTHSGKKPLIVIGIMSSFGRKNYRDAVRKSWLPTGSMLKKLEEEKGIVVRFVVGRSANRGDTFDREIDDENRSTKDFLILDDHIESDEELPKKTKSFFANAAETFNAAFYAKVNDDIYINVDTLSAMLETHWDRPRVYIGCMKSGEVFSDLTHKWYESDWWKFGDGKSYFRHASGEMFVISRAIAQFISINKSALRTYAHDDVSIGSWMIGLAVNHVNEAKLCCSSWPSGALCSAL

SEQ ID NO: 24801 - protein, 324 aa, Zea mays subsp. mays
  peptide (1)..(324): Ceres Seq. ID no. 12384184
  misc_feature (110)..(308): Pfam Name: Pfam Description:  Galactosyltransferase
  misc_feature (1)..(324): NCBI GI NO: 40253477 NR Description: putative Avr9 elicitor response protein
  misc_feature (1)..(322): NCBI GI NO: 22553068 NR Description: beta 1,3-glycosyltransferase-like protein I
  misc_feature (1)..(323): NCBI GI NO: 20372915 NR Description: beta 1,3-glycosyltransferase-like protein I
  misc_feature (1)..(324): NCBI GI NO: 18423501 NR Description: Avr9 elicitor response protein-like
  misc_feature (1)..(314): NCBI GI NO: 9759181 NR Description: Avr9 elicitor response protein-like
  misc_feature (1)..(322): NCBI GI NO: 34898462 NR Description: ESTs D47620
  misc_feature (3)..(322): NCBI GI NO: 15236681 NR Description: putative protein; protein id: At4g32120
  misc_feature (1)..(318): NCBI GI NO: 15224704 NR Description: unknown protein; protein id: At2g25300.1
  misc_feature (41)..(322): NCBI GI NO: 26451702 NR Description: unknown protein [Arabidopsis thaliana]
  misc_feature (56)..(316): NCBI GI NO: 15217544 NR Description: elicitor response protein, putative
MSAMMLAMFATMASFYVAGRLWQDAQNRLHLIKELDRRTGQGQSAISVDDTLKVVACRQQGKRLASLEMELAAAKHKGFVGKYTPETNGTHSGKKPLIVIGIMSSFGRKNYRDAVRKSWLPTGSMLKKLEEEKGIVVRFVVGRSANRGDTFDREIDDENRSTKDFLILDDHIESDEELPKKTKSFFANAAETFNAAFYAKVNDDIYINVDTLSAMLETHWDRPRVYIGCMKSGEVFSDLTHKWYESDWWKFGDGKSYFRHASGEMFVISRAIAQFISINKSALRTYAHDDVSIGSWMIGLAVNHVNEAKLCCSSWPSGALCSAL

SEQ ID NO: 24802 - protein, 321 aa, Zea mays subsp. mays
  peptide (1)..(321): Ceres Seq. ID no. 12384185
  misc_feature (107)..(305): Pfam Name: Pfam Description:  Galactosyltransferase
  misc_feature (1)..(321): NCBI GI NO: 40253477 NR Description: putative Avr9 elicitor response protein
  misc_feature (1)..(319): NCBI GI NO: 22553068 NR Description: beta 1,3-glycosyltransferase-like protein I
  misc_feature (1)..(320): NCBI GI NO: 20372915 NR Description: beta 1,3-glycosyltransferase-like protein I
  misc_feature (1)..(321): NCBI GI NO: 18423501 NR Description: Avr9 elicitor response protein-like
  misc_feature (1)..(311): NCBI GI NO: 9759181 NR Description: Avr9 elicitor response protein-like
  misc_feature (1)..(319): NCBI GI NO: 34898462 NR Description: ESTs D47620
  misc_feature (1)..(319): NCBI GI NO: 15236681 NR Description: putative protein; protein id: At4g32120
  misc_feature (1)..(315): NCBI GI NO: 15224704 NR Description: unknown protein; protein id: At2g25300.1
  misc_feature (38)..(319): NCBI GI NO: 26451702 NR Description: unknown protein [Arabidopsis thaliana]
  misc_feature (53)..(313): NCBI GI NO: 15217544 NR Description: elicitor response protein, putative
MMLAMFATMASFYVAGRLWQDAQNRLHLIKELDRRTGQGQSAISVDDTLKVVACRQQGKRLASLEMELAAAKHKGFVGKYTPETNGTHSGKKPLIVIGIMSSFGRKNYRDAVRKSWLPTGSMLKKLEEEKGIVVRFVVGRSANRGDTFDREIDDENRSTKDFLILDDHIESDEELPKKTKSFFANAAETFNAAFYAKVNDDIYINVDTLSAMLETHWDRPRVYIGCMKSGEVFSDLTHKWYESDWWKFGDGKSYFRHASGEMFVISRAIAQFISINKSALRTYAHDDVSIGSWMIGLAVNHVNEAKLCCSSWPSGALCSAL

SEQ ID NO: 24803 - DNA, 1506 bp, Zea mays subsp. mays
  misc_feature (1)..(1506): Ceres Seq. ID no. 12410412
cccggctcggctcggctcggcacaggatccggccggccttttcactcaactcgcttcagcagctcagcctccaaccaaccgagagaagccagagaaaaggttactccacagaaagcaaaaccctagcccactccggcgcgccaccggccgatggtttcgatgagcaccacgccgaagccgcttgactccgccgtcgtcagcgcagccgttgacggcggggatgagggtggtggtggaggcggtggcgggaagaagcaggcgcacggggcggtgatggcgccgccaccgatggtggtcccggccgcggcgcccgcggccgaggaggaggttcggaaggtcaggaagccgtacaccatcaccaagtcgcgggagagctggacggagccggagcacgacaagttcctcgaggccctgcagctttttgatcgtgattggaagaaaattgaagcatatgttggctcaaagactgttatacagataaggagccatgcacagaagtacttcctgaaggttcagaagaatggtacgggcgagcatctgcccccacccaggccaaaacgaaaggcagctcatccatatccacagaaggcatctaaaaatgctcctgcagtttctcaagctattttatcacaagaacaacctacccagagggagcaaggttctgtcatgcctatggatactgctactgtgagaaacacaaatgcgaatgtggcggtgccttcctgggacaatactcttgctcaacctttcagcgctggtcatgttcaaggtgcagctgcaacaaataactgttcaagtagcatggagagtccatctggtacttggccaacttctgaagcagtcgagcaagaaaatatggttccaccactccgtgccatgccagattttgcccaagtatacaacttcctgggaagcatatttgatccggatacaagtgggcatttgcagatgttaaaagcgatggatccagttgatattgaaacggcactactacttatgaggaatctttccatgaaccttaggagtcccgactttgagcaacatcggaggttgctatcatcatatagctatggtggcgcggaccatgtcaaatctgaagccatggaaaatcttggatctcctcagagtggccatcttccatccctggtaacaagcgaatgagagcacacttccaatttgcggtcggagctttggttgtttacacgggacattcctgtgcgctcccagcaatggagttgtggagacggctggtctgtttatgaatgctagagacgtatcgtggcagtaacatctgtatagcttccaataaatggtctgaccctaggcaagttttgctttttcgcgtacgtgtagatagccagttttgtgtgctcatgcaattttttcctgggtggggcctagatcgtatgtttttttatatacacactattggacgcgtgatgtaaatatgtgcaatctttgtaatgcttgaggtactataattatataatggatatgttatgatcg

SEQ ID NO: 24804 - protein, 336 aa, Zea mays subsp. mays
  peptide (1)..(336): Ceres Seq. ID no. 12410413
  misc_feature (73)..(118): Pfam Name: Pfam Description:  Myb-like DNA-binding domain
  misc_feature (49)..(312): NCBI GI NO: 30696221 NR Description: myb family transcription factor
  misc_feature (49)..(312): NCBI GI NO: 30696225 NR Description: myb family transcription factor
  misc_feature (49)..(302): NCBI GI NO: 8953721 NR Description: contains similarity to MYB-related DNA-bindingprotein~gene_id:F6N7
  misc_feature (43)..(305): NCBI GI NO: 30680926 NR Description: myb family transcription factor
  misc_feature (57)..(306): NCBI GI NO: 15223419 NR Description: myb family transcription factor
  misc_feature (51)..(315): NCBI GI NO: 18414039 NR Description: myb family transcription factor
  misc_feature (57)..(306): NCBI GI NO: 25517982 NR Description: F22L4.6 protein - Arabidopsis thaliana
  misc_feature (56)..(306): NCBI GI NO: 15234118 NR Description: myb family transcription factor
  misc_feature (51)..(315): NCBI GI NO: 14596213 NR Description: putative protein [Arabidopsis thaliana]
  misc_feature (51)..(193): NCBI GI NO: 11357907 NR Description: hypothetical protein F9G14
MVSMSTTPKPLDSAVVSAAVDGGDEGGGGGGGGKKQAHGAVMAPPPMVVPAAAPAAEEEVRKVRKPYTITKSRESWTEPEHDKFLEALQLFDRDWKKIEAYVGSKTVIQIRSHAQKYFLKVQKNGTGEHLPPPRPKRKAAHPYPQKASKNAPAVSQAILSQEQPTQREQGSVMPMDTATVRNTNANVAVPSWDNTLAQPFSAGHVQGAAATNNCSSSMESPSGTWPTSEAVEQENMVPPLRAMPDFAQVYNFLGSIFDPDTSGHLQMLKAMDPVDIETALLLMRNLSMNLRSPDFEQHRRLLSSYSYGGADHVKSEAMENLGSPQSGHLPSLVTSE

SEQ ID NO: 24805 - protein, 333 aa, Zea mays subsp. mays
  peptide (1)..(333): Ceres Seq. ID no. 12410414
  misc_feature (70)..(115): Pfam Name: Pfam Description:  Myb-like DNA-binding domain
  misc_feature (46)..(309): NCBI GI NO: 30696221 NR Description: myb family transcription factor
  misc_feature (46)..(309): NCBI GI NO: 30696225 NR Description: myb family transcription factor
  misc_feature (46)..(299): NCBI GI NO: 8953721 NR Description: contains similarity to MYB-related DNA-bindingprotein~gene_id:F6N7
  misc_feature (40)..(302): NCBI GI NO: 30680926 NR Description: myb family transcription factor
  misc_feature (54)..(303): NCBI GI NO: 15223419 NR Description: myb family transcription factor
  misc_feature (48)..(312): NCBI GI NO: 18414039 NR Description: myb family transcription factor
  misc_feature (54)..(303): NCBI GI NO: 25517982 NR Description: F22L4.6 protein - Arabidopsis thaliana
  misc_feature (53)..(303): NCBI GI NO: 15234118 NR Description: myb family transcription factor
  misc_feature (48)..(312): NCBI GI NO: 14596213 NR Description: putative protein [Arabidopsis thaliana]
  misc_feature (48)..(190): NCBI GI NO: 11357907 NR Description: hypothetical protein F9G14
MSTTPKPLDSAVVSAAVDGGDEGGGGGGGGKKQAHGAVMAPPPMVVPAAAPAAEEEVRKVRKPYTITKSRESWTEPEHDKFLEALQLFDRDWKKIEAYVGSKTVIQIRSHAQKYFLKVQKNGTGEHLPPPRPKRKAAHPYPQKASKNAPAVSQAILSQEQPTQREQGSVMPMDTATVRNTNANVAVPSWDNTLAQPFSAGHVQGAAATNNCSSSMESPSGTWPTSEAVEQENMVPPLRAMPDFAQVYNFLGSIFDPDTSGHLQMLKAMDPVDIETALLLMRNLSMNLRSPDFEQHRRLLSSYSYGGADHVKSEAMENLGSPQSGHLPSLVTSE

SEQ ID NO: 24806 - protein, 295 aa, Zea mays subsp. mays
  peptide (1)..(295): Ceres Seq. ID no. 12410415
  misc_feature (32)..(77): Pfam Name: Pfam Description:  Myb-like DNA-binding domain
  misc_feature (8)..(271): NCBI GI NO: 30696221 NR Description: myb family transcription factor
  misc_feature (8)..(271): NCBI GI NO: 30696225 NR Description: myb family transcription factor
  misc_feature (8)..(261): NCBI GI NO: 8953721 NR Description: contains similarity to MYB-related DNA-bindingprotein~gene_id:F6N7
  misc_feature (2)..(264): NCBI GI NO: 30680926 NR Description: myb family transcription factor
  misc_feature (16)..(265): NCBI GI NO: 15223419 NR Description: myb family transcription factor
  misc_feature (10)..(274): NCBI GI NO: 18414039 NR Description: myb family transcription factor
  misc_feature (16)..(265): NCBI GI NO: 25517982 NR Description: F22L4.6 protein - Arabidopsis thaliana
  misc_feature (15)..(265): NCBI GI NO: 15234118 NR Description: myb family transcription factor
  misc_feature (10)..(274): NCBI GI NO: 14596213 NR Description: putative protein [Arabidopsis thaliana]
  misc_feature (10)..(152): NCBI GI NO: 11357907 NR Description: hypothetical protein F9G14
MAPPPMVVPAAAPAAEEEVRKVRKPYTITKSRESWTEPEHDKFLEALQLFDRDWKKIEAYVGSKTVIQIRSHAQKYFLKVQKNGTGEHLPPPRPKRKAAHPYPQKASKNAPAVSQAILSQEQPTQREQGSVMPMDTATVRNTNANVAVPSWDNTLAQPFSAGHVQGAAATNNCSSSMESPSGTWPTSEAVEQENMVPPLRAMPDFAQVYNFLGSIFDPDTSGHLQMLKAMDPVDIETALLLMRNLSMNLRSPDFEQHRRLLSSYSYGGADHVKSEAMENLGSPQSGHLPSLVTSE

SEQ ID NO: 24807 - DNA, 1505 bp, Zea mays subsp. mays
  misc_feature (1)..(1505): Ceres Seq. ID no. 12347490
gatatcttttttccatatgcttcactggacatctgcttattactcaggatgggtggttagcacatccctagctggtgcaacactaggttcctttaccgggggatctttggcagataaatttgggcggacaagaacattcatcctggatgcagccccactggctgtaggtgcattcttgagcgcaacagctcaagatatccgcaccatgattattggtcggttgcttgctggaattggtattgggatctcatctgcacttgtacccctttacatatctgagatatcaccaactgaaattcgtggaacacttggttctgttaatcaactttttatctgcattggaattcttgcagctttgttagctggattgcctttggcaggaaatcctgcctggtggaggacaatgtttggaattgctgtagttccatccattttgctggctgtaggaatggccttttcgcctgaaagccctcgatggctattccagcaaggaaaggttattcaagcagaatcagctgtaaaaagactatatggaaaagaaatggttaccgaaattatgtatgatctgagagctagtggccaaagttcttctgagaccgaagctggctggttggatcttttcagcaagcgttactggaaagttgtgagtgtgggggcagcactgtttttgttccagcagcttgctggtataaacgctgttgtatattactctacatcggtgttccgtaatgcaggcattacatctgatgttgctgctagtgctcttgttggagcagccaatgtttttggcaccatggttgcatcttctctaatggacaagaaaggaaggaaaagccttctgatgacaagcttttctggaatgggtgcttcaatgctactcctagcattgtccttcacctggaaagctctggcaccttattctggtactcttgctgttgttggcactgttctgtatgtgctgtcttttgctctaggagctggtcctgttcctgccctgcttcttcctgaaatatttgcctccagaataagggccaaggctgttgcattatctctaggcatgcactgggtatccaacttttttattggcctgtacttcttgagtgtcgtcaacaagttcgggatcagcaatgtatatttgggatttgcatcagtgtgcgtccttgcagttctctacatagctgggaatgtggtcgagaccaaggggcgatcacttgaagagattgaacgggaactaagtgtagcagaatgatgtgcttttgctagtcatgctgcggcgccgttttggtgattttgagaatgcaaccaagcacacaaccgagcatccttggacctggagactttctagtttcatgtagcagttaccgatcagattcagaaacaatgaactcgtcgatgtttctggagataagttttcgttttttgttctaaaatttcttgtttctcttgtataggagactttgagatagtttcagctctaaagacgtgaatatggagcagctccgctg

SEQ ID NO: 24808 - protein, 415 aa, Zea mays subsp. mays
  peptide (1)..(415): Ceres Seq. ID no. 12347491
  misc_feature (11)..(411): Pfam Name: and other Pfam Description: Sugar
  misc_feature (11)..(415): NCBI GI NO: 8347248 NR Description: hexose transporter [Zea mays]
  misc_feature (11)..(414): NCBI GI NO: 15625046 NR Description: hexose transporter pGlT [Olea europaea]
  misc_feature (4)..(412): NCBI GI NO: 11278994 NR Description: sugar transporter-like protein
  misc_feature (16)..(414): NCBI GI NO: 8347244 NR Description: hexose transporter [Nicotiana tabacum]
  misc_feature (16)..(412): NCBI GI NO: 18417892 NR Description: sugar transporter-like protein
  misc_feature (16)..(414): NCBI GI NO: 8347250 NR Description: hexose transporter [Arabidopsis thaliana]
  misc_feature (16)..(414): NCBI GI NO: 8347242 NR Description: hexose transporter [Spinacia oleracea]
  misc_feature (16)..(414): NCBI GI NO: 9858106 NR Description: putative glucose translocator
  misc_feature (11)..(414): NCBI GI NO: 2688830 NR Description: putative sugar transporter [Prunus armeniaca]
  misc_feature (16)..(414): NCBI GI NO: 8347246 NR Description: hexose transporter [Solanum tuberosum]
ISFFHMLHWTSAYYSGWVVSTSLAGATLGSFTGGSLADKFGRTRTFILDAAPLAVGAFLSATAQDIRTMIIGRLLAGIGIGISSALVPLYISEISPTEIRGTLGSVNQLFICIGILAALLAGLPLAGNPAWWRTMFGIAVVPSILLAVGMAFSPESPRWLFQQGKVIQAESAVKRLYGKEMVTEIMYDLRASGQSSSETEAGWLDLFSKRYWKVVSVGAALFLFQQLAGINAVVYYSTSVFRNAGITSDVAASALVGAANVFGTMVASSLMDKKGRKSLLMTSFSGMGASMLLLALSFTWKALAPYSGTLAVVGTVLYVLSFALGAGPVPALLLPEIFASRIRAKAVALSLGMHWVSNFFIGLYFLSVVNKFGISNVYLGFASVCVLAVLYIAGNVVETKGRSLEEIERELSVAE

SEQ ID NO: 24809 - protein, 410 aa, Zea mays subsp. mays
  peptide (1)..(410): Ceres Seq. ID no. 12347492
  misc_feature (6)..(406): Pfam Name: and other Pfam Description: Sugar
  misc_feature (6)..(410): NCBI GI NO: 8347248 NR Description: hexose transporter [Zea mays]
  misc_feature (6)..(409): NCBI GI NO: 15625046 NR Description: hexose transporter pGlT [Olea europaea]
  misc_feature (1)..(407): NCBI GI NO: 11278994 NR Description: sugar transporter-like protein
  misc_feature (11)..(409): NCBI GI NO: 8347244 NR Description: hexose transporter [Nicotiana tabacum]
  misc_feature (11)..(407): NCBI GI NO: 18417892 NR Description: sugar transporter-like protein
  misc_feature (11)..(409): NCBI GI NO: 8347250 NR Description: hexose transporter [Arabidopsis thaliana]
  misc_feature (11)..(409): NCBI GI NO: 8347242 NR Description: hexose transporter [Spinacia oleracea]
  misc_feature (11)..(409): NCBI GI NO: 9858106 NR Description: putative glucose translocator
  misc_feature (6)..(409): NCBI GI NO: 2688830 NR Description: putative sugar transporter [Prunus armeniaca]
  misc_feature (11)..(409): NCBI GI NO: 8347246 NR Description: hexose transporter [Solanum tuberosum]
MLHWTSAYYSGWVVSTSLAGATLGSFTGGSLADKFGRTRTFILDAAPLAVGAFLSATAQDIRTMIIGRLLAGIGIGISSALVPLYISEISPTEIRGTLGSVNQLFICIGILAALLAGLPLAGNPAWWRTMFGIAVVPSILLAVGMAFSPESPRWLFQQGKVIQAESAVKRLYGKEMVTEIMYDLRASGQSSSETEAGWLDLFSKRYWKVVSVGAALFLFQQLAGINAVVYYSTSVFRNAGITSDVAASALVGAANVFGTMVASSLMDKKGRKSLLMTSFSGMGASMLLLALSFTWKALAPYSGTLAVVGTVLYVLSFALGAGPVPALLLPEIFASRIRAKAVALSLGMHWVSNFFIGLYFLSVVNKFGISNVYLGFASVCVLAVLYIAGNVVETKGRSLEEIERELSVAE

SEQ ID NO: 24810 - protein, 347 aa, Zea mays subsp. mays
  peptide (1)..(347): Ceres Seq. ID no. 12347493
  misc_feature (1)..(343): Pfam Name: and other Pfam Description: Sugar
  misc_feature (1)..(347): NCBI GI NO: 8347248 NR Description: hexose transporter [Zea mays]
  misc_feature (1)..(346): NCBI GI NO: 15625046 NR Description: hexose transporter pGlT [Olea europaea]
  misc_feature (1)..(344): NCBI GI NO: 11278994 NR Description: sugar transporter-like protein
  misc_feature (1)..(346): NCBI GI NO: 8347244 NR Description: hexose transporter [Nicotiana tabacum]
  misc_feature (1)..(344): NCBI GI NO: 18417892 NR Description: sugar transporter-like protein
  misc_feature (1)..(346): NCBI GI NO: 8347250 NR Description: hexose transporter [Arabidopsis thaliana]
  misc_feature (1)..(346): NCBI GI NO: 8347242 NR Description: hexose transporter [Spinacia oleracea]
  misc_feature (1)..(346): NCBI GI NO: 9858106 NR Description: putative glucose translocator
  misc_feature (1)..(346): NCBI GI NO: 2688830 NR Description: putative sugar transporter [Prunus armeniaca]
  misc_feature (1)..(346): NCBI GI NO: 8347246 NR Description: hexose transporter [Solanum tuberosum]
MIIGRLLAGIGIGISSALVPLYISEISPTEIRGTLGSVNQLFICIGILAALLAGLPLAGNPAWWRTMFGIAVVPSILLAVGMAFSPESPRWLFQQGKVIQAESAVKRLYGKEMVTEIMYDLRASGQSSSETEAGWLDLFSKRYWKVVSVGAALFLFQQLAGINAVVYYSTSVFRNAGITSDVAASALVGAANVFGTMVASSLMDKKGRKSLLMTSFSGMGASMLLLALSFTWKALAPYSGTLAVVGTVLYVLSFALGAGPVPALLLPEIFASRIRAKAVALSLGMHWVSNFFIGLYFLSVVNKFGISNVYLGFASVCVLAVLYIAGNVVETKGRSLEEIERELSVAE

SEQ ID NO: 24811 - DNA, 1775 bp, Zea mays subsp. mays
  misc_feature (1)..(1775): Ceres Seq. ID no. 12410409
aatccctccctccctcatcgcgttttattattcccgtccttcttcattcggcccttcgccgctgctatatttcgcggccgccttgcctcctaataatagccgccgcggcagtggataccgccaccgccatgggagcgctcgaggaggcccacctcgcggccgccgcgtgcgcgtgcgaggaggaggaggaaagcgactacatcggcctcctcgcaggggaagcggcggcgggcgacgccgtggagccggccgtgcgcgccctgctgctggggctcggtgaggacgaccgccgcgagggcctgctccggacgcccaagcgcgtcgccaaggccttccgcgacggcacccgaggctacaggcaaaaagtaaaagacatagtgcaaggtgctctgtttccagaggttggtgtggataaaaggactggatctgctggtggaactggcgggcaagtagttgttcgagacattgaacttttctcctattgtgagtcatgcttgcttccattcagcatacagtgccatgtcgggtatgttccctcaggtggaagagtggttgggttaagcaagctttctagagtatctgatgtctttgccaagagattgcaaaaccctcaaagactagctaatgaaatctgtggtgcactgcatgctagcattcaacctgccggcgtggctgttgctctgcagtgctggcacattcctttaccagaaaacttggaatgcaagactttggaaggttggattagaacttcacattcatctcgctctggagtctttgaaggtgaaagcagcactttctggactgacttcttggctcttgttaagcttaggggcatagacgtggaggctaaggaccatactgtttctattccttggtgccctttaaggtctcatgaggttctactctctaacgggctctgcaagaaaaactcaactaatggcatggtttctgctgttacctcgatgctcttatcactcggagaggaccccctcaggaaagagcttttaggcactcctcagcgttatgtgcagtggctgatgaagttcaaagcatgtaatctactagacgtgaagctgaatggttttacacttagtaatgttagcttatatgagaggctaggtggaggcacaactgatcatggagcaatccgatcggagctgcacttgccattttgtgctcaatgtgaacaccatcttctgcccttctacggagtagttcacattgggtactttgacaatggaagcggagaaggcattgatcggtcgcattttcaggcgttggttcatttctacgggtgcaagcttcaggttcaagaaaggatgacaaggcagatagctgaagcggtttattcggtttcgcaccatggggccatggtcgttgttgaggccaaccacatttgcatgatctcaagggggatagagaaaataaggagcaacacggcaacaattgcagttttgggccagtttttggccgacccttctgccaaggcgtgcttcttacaaaatgttttggattctgttggttctgcggtatgaatcgtatcgcaagcagcaaaggaaaaaaatgtctagttgggagtcactatccagcaattgaaatttttagcaatctacttgtctagcatgattcttctcgggtgcaaatttgtcacctgtgggactgtaccgaggatgtcacaagaaagcaccaaaagggttttggttctctcgtgttgtaccatgtcacttgtaaggcacttcaaataaaaaagaaatagtaatagttacaactgtgcc

SEQ ID NO: 24812 - protein, 510 aa, Zea mays subsp. mays
  peptide (1)..(510): Ceres Seq. ID no. 12410410
  misc_feature (116)..(510): NCBI GI NO: 38346071 NR Description: OSJNBa0084K01.11
  misc_feature (80)..(100): NCBI GI NO: 38346071 NR Description: OSJNBa0084K01.11
  misc_feature (43)..(509): NCBI GI NO: 17979018 NR Description: GTP cyclohydrolase I [Lycopersicon esculentum]
  misc_feature (79)..(502): NCBI GI NO: 15231435 NR Description: GTP cyclohydrolase I; protein id: At3g07270
  misc_feature (79)..(502): NCBI GI NO: 19909132 NR Description: GTP cyclohydrolase I [Arabidopsis thaliana]
  misc_feature (71)..(273): NCBI GI NO: 37521149 NR Description: GTP cyclohydrolase I [Gloeobacter violaceus]
  misc_feature (73)..(274): NCBI GI NO: 1399847 NR Description: GTP cyclohydrolase I [Synechococcus sp. PCC 7942]
  misc_feature (73)..(274): NCBI GI NO: 23831177 NR Description: GTP cyclohydrolase I (GTP-CH-I)
  misc_feature (73)..(274): NCBI GI NO: 22002492 NR Description: Gch1 [Synechococcus sp. PCC 7942]
  misc_feature (79)..(273): NCBI GI NO: 13699226 NR Description: GTP cyclohydrolase I [Physarum polycephalum]
SLPPSSRFIIPVLLHSALRRCYISRPPCLLIIAAAAVDTATAMGALEEAHLAAAACACEEEEESDYIGLLAGEAAAGDAVEPAVRALLLGLGEDDRREGLLRTPKRVAKAFRDGTRGYRQKVKDIVQGALFPEVGVDKRTGSAGGTGGQVVVRDIELFSYCESCLLPFSIQCHVGYVPSGGRVVGLSKLSRVSDVFAKRLQNPQRLANEICGALHASIQPAGVAVALQCWHIPLPENLECKTLEGWIRTSHSSRSGVFEGESSTFWTDFLALVKLRGIDVEAKDHTVSIPWCPLRSHEVLLSNGLCKKNSTNGMVSAVTSMLLSLGEDPLRKELLGTPQRYVQWLMKFKACNLLDVKLNGFTLSNVSLYERLGGGTTDHGAIRSELHLPFCAQCEHHLLPFYGVVHIGYFDNGSGEGIDRSHFQALVHFYGCKLQVQERMTRQIAEAVYSVSHHGAMVVVEANHICMISRGIEKIRSNTATIAVLGQFLADPSAKACFLQNVLDSVGSAV

SEQ ID NO: 24813 - protein, 468 aa, Zea mays subsp. mays
  peptide (1)..(468): Ceres Seq. ID no. 12410411
  misc_feature (74)..(468): NCBI GI NO: 38346071 NR Description: OSJNBa0084K01.11
  misc_feature (38)..(58): NCBI GI NO: 38346071 NR Description: OSJNBa0084K01.11
  misc_feature (1)..(467): NCBI GI NO: 17979018 NR Description: GTP cyclohydrolase I [Lycopersicon esculentum]
  misc_feature (37)..(460): NCBI GI NO: 15231435 NR Description: GTP cyclohydrolase I; protein id: At3g07270
  misc_feature (37)..(460): NCBI GI NO: 19909132 NR Description: GTP cyclohydrolase I [Arabidopsis thaliana]
  misc_feature (29)..(231): NCBI GI NO: 37521149 NR Description: GTP cyclohydrolase I [Gloeobacter violaceus]
  misc_feature (31)..(232): NCBI GI NO: 1399847 NR Description: GTP cyclohydrolase I [Synechococcus sp. PCC 7942]
  misc_feature (31)..(232): NCBI GI NO: 23831177 NR Description: GTP cyclohydrolase I (GTP-CH-I)
  misc_feature (31)..(232): NCBI GI NO: 22002492 NR Description: Gch1 [Synechococcus sp. PCC 7942]
  misc_feature (37)..(231): NCBI GI NO: 13699226 NR Description: GTP cyclohydrolase I [Physarum polycephalum]
MGALEEAHLAAAACACEEEEESDYIGLLAGEAAAGDAVEPAVRALLLGLGEDDRREGLLRTPKRVAKAFRDGTRGYRQKVKDIVQGALFPEVGVDKRTGSAGGTGGQVVVRDIELFSYCESCLLPFSIQCHVGYVPSGGRVVGLSKLSRVSDVFAKRLQNPQRLANEICGALHASIQPAGVAVALQCWHIPLPENLECKTLEGWIRTSHSSRSGVFEGESSTFWTDFLALVKLRGIDVEAKDHTVSIPWCPLRSHEVLLSNGLCKKNSTNGMVSAVTSMLLSLGEDPLRKELLGTPQRYVQWLMKFKACNLLDVKLNGFTLSNVSLYERLGGGTTDHGAIRSELHLPFCAQCEHHLLPFYGVVHIGYFDNGSGEGIDRSHFQALVHFYGCKLQVQERMTRQIAEAVYSVSHHGAMVVVEANHICMISRGIEKIRSNTATIAVLGQFLADPSAKACFLQNVLDSVGSAV

SEQ ID NO: 24814 - DNA, 1255 bp, Zea mays subsp. mays
  misc_feature (1)..(1255): Ceres Seq. ID no. 12358141
gcaaaaatctcctctctcgcttcatttcttttttctttccatcgaattcctcgtcaccaacacgcacgcggcctctgcctccgcgatccgcgtctccatcctgaggctccgaatcgatctcccttcctcaccaaaccggagcacttcggaggccggacccggcgagaagcgaccgaccgcagccagctcacgtctccctcttcatccaccatgctgagggtcgcgggcaggcgcctctcgtccgctctcgcctggcgccccgccgccgccgcctcaggctcccggggccctctcgccggtacactacccggccgcgacgacgacgacacacgcgactgcagggcgcgtttcgccatcgaatctcccttcttcgccgctgccagagggttttctgcagagactcttgctccaagaaaccaggatgtgggcttatccgagctcccagcaactgtggcagctgtgaagaatccaagtggaaaaatcgtgtatgatgagtataaccatgagcgctacccgcctggagaccccagcaagcgtgcatttgcctactttgtgctgagtggtgggaggttcatttacgcatctttgctgcgacttctcgtcttaaaatttgtcctgagcatgtcagcaagtaaggatgttctcgcgcttgcctcacttgaggttgacctctcaagcattgagcctggaaccacggtgacggtgaagtggcgtggcaagccggtcttcataaggcggaggacagaggatgatatcaagttggccaacagtgttgacgtcgcatccctccgccacccagagcaggatgcagagcgtgtcaagaaccccgaatggctggtcgtcattggggtctgcactcacctgggctgcatcccgctccctaatgcaggagactttggtggctggttctgcccgtgccacggctcgcactacgacatttctggtaggatccgcaagggcccggcacccttcaacctggaagtgccgacatacagcttcttggaagagaacaagcttctcatcggctgagattgctgttagtgttgttcgtgtggccctgtcgtttttgtttgatcaacaacttcaccttttctcttgcctgggttagggcatacctttgtgggttgtttctgagtgcagtgttgttgctagcacctgacagtaatgaataacctgctgctacataaaggatactgttaattgttgtcaaatttggttctgtttttttcctgacagcaatgaacaaacttctgct

SEQ ID NO: 24815 - protein, 342 aa, Zea mays subsp. mays
  peptide (1)..(342): Ceres Seq. ID no. 12358142
  misc_feature (242)..(338): Pfam Name: Pfam Description:  Rieske [2Fe-2S] domain
  misc_feature (71)..(342): NCBI GI NO: 1717957 NR Description: Ubiquinol-cytochrome C reductase iron-sulfur subunit
  misc_feature (71)..(342): NCBI GI NO: 38347166 NR Description: OSJNBa0039C07.12
  misc_feature (71)..(342): NCBI GI NO: 1717951 NR Description: Ubiquinol-cytochrome C reductase iron-sulfur subunit 3
  misc_feature (71)..(342): NCBI GI NO: 1717953 NR Description: Ubiquinol-cytochrome C reductase iron-sulfur subunit 5
  misc_feature (71)..(342): NCBI GI NO: 1717950 NR Description: Ubiquinol-cytochrome C reductase iron-sulfur subunit 2
  misc_feature (71)..(342): NCBI GI NO: 1076675 NR Description: ubiquinol-cytochrome-c reductase (EC 1
  misc_feature (71)..(342): NCBI GI NO: 586145 NR Description: Ubiquinol-cytochrome C reductase iron-sulfur subunit
  misc_feature (85)..(342): NCBI GI NO: 1717949 NR Description: Ubiquinol-cytochrome C reductase iron-sulfur subunit 1
  misc_feature (71)..(342): NCBI GI NO: 18417067 NR Description: ubiquinol--cytochrome-c reductase - like protein
  misc_feature (71)..(342): NCBI GI NO: 21553507 NR Description: ubiquinol--cytochrome-c reductase-like protein
AKISSLASFLFSFHRIPRHQHARGLCLRDPRLHPEAPNRSPFLTKPEHFGGRTRREATDRSQLTSPSSSTMLRVAGRRLSSALAWRPAAAASGSRGPLAGTLPGRDDDDTRDCRARFAIESPFFAAARGFSAETLAPRNQDVGLSELPATVAAVKNPSGKIVYDEYNHERYPPGDPSKRAFAYFVLSGGRFIYASLLRLLVLKFVLSMSASKDVLALASLEVDLSSIEPGTTVTVKWRGKPVFIRRRTEDDIKLANSVDVASLRHPEQDAERVKNPEWLVVIGVCTHLGCIPLPNAGDFGGWFCPCHGSHYDISGRIRKGPAPFNLEVPTYSFLEENKLLIG

SEQ ID NO: 24816 - protein, 272 aa, Zea mays subsp. mays
  peptide (1)..(272): Ceres Seq. ID no. 12358143
  misc_feature (172)..(268): Pfam Name: Pfam Description:  Rieske [2Fe-2S] domain
  misc_feature (1)..(272): NCBI GI NO: 1717957 NR Description: Ubiquinol-cytochrome C reductase iron-sulfur subunit
  misc_feature (1)..(272): NCBI GI NO: 38347166 NR Description: OSJNBa0039C07.12
  misc_feature (1)..(272): NCBI GI NO: 1717951 NR Description: Ubiquinol-cytochrome C reductase iron-sulfur subunit 3
  misc_feature (1)..(272): NCBI GI NO: 1717953 NR Description: Ubiquinol-cytochrome C reductase iron-sulfur subunit 5
  misc_feature (1)..(272): NCBI GI NO: 1717950 NR Description: Ubiquinol-cytochrome C reductase iron-sulfur subunit 2
  misc_feature (1)..(272): NCBI GI NO: 1076675 NR Description: ubiquinol-cytochrome-c reductase (EC 1
  misc_feature (1)..(272): NCBI GI NO: 586145 NR Description: Ubiquinol-cytochrome C reductase iron-sulfur subunit
  misc_feature (15)..(272): NCBI GI NO: 1717949 NR Description: Ubiquinol-cytochrome C reductase iron-sulfur subunit 1
  misc_feature (1)..(272): NCBI GI NO: 18417067 NR Description: ubiquinol--cytochrome-c reductase - like protein
  misc_feature (1)..(272): NCBI GI NO: 21553507 NR Description: ubiquinol--cytochrome-c reductase-like protein
MLRVAGRRLSSALAWRPAAAASGSRGPLAGTLPGRDDDDTRDCRARFAIESPFFAAARGFSAETLAPRNQDVGLSELPATVAAVKNPSGKIVYDEYNHERYPPGDPSKRAFAYFVLSGGRFIYASLLRLLVLKFVLSMSASKDVLALASLEVDLSSIEPGTTVTVKWRGKPVFIRRRTEDDIKLANSVDVASLRHPEQDAERVKNPEWLVVIGVCTHLGCIPLPNAGDFGGWFCPCHGSHYDISGRIRKGPAPFNLEVPTYSFLEENKLLIG

SEQ ID NO: 24817 - DNA, 817 bp, Zea mays subsp. mays
  misc_feature (1)..(817): Ceres Seq. ID no. 12342710
atccggcatcccgatcctgtgtgtctctactctgcactcctcgattcgattcccccgacccagcaggcgggaaatggcgaacggtggggccgaggcatcgccgctgcggccccggcggcgcgccggctccagggacccgttcctcatcgtgtgccgcttcttcggcgtcgtcacggccgccgccgcgctgctctgcgtcgccgccaacgtcctctccgcggtctactccttccgcggtggcgctgacatcatcggcggcgtgttccggtgctacgcggtggtgttctccgtcttcgtcgccgttctcgagaccgagtgggcacccgtcatcaggctctggaagatatttgagtacttgccggcaaggggaatgctgcagacctttgttgctatcatgactaaggcgtacccaaatgttgagaggagcgagctgattttgatccaggagatcgctacctacatgcttcttgtgtgtggagctgtctacataatcgcaggtatactatgtcttggtgttttaaaacgttctaggcagcataaagcaacatcacaggagcaagcggccaaggatctggaggagctagagaagaggagagaggagcttgagtctctgttaactgctgagcggtcagagatggcctgatgtcgacctaccatctctcttctggtgtaaataagtgttttttttcattctctgttgaatgttggtagcgtgcatactgctttgccgtgaccattttgtttcagcatgttgtttcagctgggttctagacattcgtgtaatgcactgtttacttatatgatgatctcctgttgt

SEQ ID NO: 24818 - protein, 213 aa, Zea mays subsp. mays
  peptide (1)..(213): Ceres Seq. ID no. 12342711
  misc_feature (20)..(211): NCBI GI NO: 34915380 NR Description: contains ESTsC27019
  misc_feature (31)..(210): NCBI GI NO: 30689751 NR Description: expressed protein [Arabidopsis thaliana]
SGIPILCVSTLHSSIRFPRPSRREMANGGAEASPLRPRRRAGSRDPFLIVCRFFGVVTAAAALLCVAANVLSAVYSFRGGADIIGGVFRCYAVVFSVFVAVLETEWAPVIRLWKIFEYLPARGMLQTFVAIMTKAYPNVERSELILIQEIATYMLLVCGAVYIIAGILCLGVLKRSRQHKATSQEQAAKDLEELEKRREELESLLTAERSEMA

SEQ ID NO: 24819 - protein, 189 aa, Zea mays subsp. mays
  peptide (1)..(189): Ceres Seq. ID no. 12342712
  misc_feature (1)..(187): NCBI GI NO: 34915380 NR Description: contains ESTsC27019
  misc_feature (7)..(186): NCBI GI NO: 30689751 NR Description: expressed protein [Arabidopsis thaliana]
MANGGAEASPLRPRRRAGSRDPFLIVCRFFGVVTAAAALLCVAANVLSAVYSFRGGADIIGGVFRCYAVVFSVFVAVLETEWAPVIRLWKIFEYLPARGMLQTFVAIMTKAYPNVERSELILIQEIATYMLLVCGAVYIIAGILCLGVLKRSRQHKATSQEQAAKDLEELEKRREELESLLTAERSEMA

SEQ ID NO: 24820 - protein, 131 aa, Zea mays subsp. mays
  peptide (1)..(131): Ceres Seq. ID no. 12342713
PASRSCVSLLCTPRFDSPDPAGGKWRTVGPRHRRCGPGGAPAPGTRSSSCAASSASSRPPPRCSASPPTSSPRSTPSAVALTSSAACSGATRWCSPSSSPFSRPSGHPSSGSGRYLSTCRQGECCRPLLLS

SEQ ID NO: 24821 - DNA, 1402 bp, Zea mays subsp. mays
  misc_feature (1)..(1402): Ceres Seq. ID no. 12344673
cttgaccctggcctccacggcgtaggccttgtacccggctaccctccgccgtcgcttcgcctcggggtcgcccgacgaccaccacgagtccacgacggcgcgcgcacctcgctgtcgcccccgtcgtgcgacgccgccggctgggcatcgccccggaactcctcctgaaggcccctcatcacgctcttgcaggctctggacggacgtgggaggccccgcggcgcccgtacgtatatctagcggcgagacggcaagctcccgccccatctccgccgcctccgctccccgtcgtccggctgcgctgttgctgctcatacggatcaagctcggctacacccgtttctgcgagcagatcagaggacgccatcgtcgggtcggtagggatgggacctgttcactccgatcaaaaggcgaagaaattggcgattatttgcgaacaaagagttataattccaaacgggcatggggagaagcttgttggtttattacatcgaacaagttcaaagaatcttgtgatcctttgtcatggattccaagccacaaaggatgacagcatcttggttgaccttgctgatgccatcacaaaggaaggaattagtgcttttcggtttgatttttctggaaatggggaaagtgatggtgaattccagtatggaagctacagaaaagaggcagctgatttgcgctctgtagtattacatttctcagaacagaaatatgacataattgctcttatcgggcatagcaaaggaggaaatgctgttcttctttatgcttccaagtaccatgatgtccctgccattgtgaacatttctggccgctttgcattagagcgaggtatggagggacgccttgggaagaatttcatgaggagaataaacgaagatggatacattgatgtgaagaataaaaaaggggagttgcagtaccgggtgtcgaaagcgagtctggatgaccggctgagcactgataccctattttccagccgtgccataagcaaagactgcagggttctcacgatccacggcgccaaagacgagatcgtcccggcggaggacgcccggcagttcgcggcgaacatccgcaaccacgagctgcgcatcatggcagaggccaaccaccgttacaccgggcacagggaggagctggcctcgctggtgctgggcttcctcagctcccatccctaccagatcacgtcgcgcttgcgtccgagactctagatagagtagagcacacccacttgaccgtttgcgaacaaaaaaaaaatcccctgtaccaatccaagagttgtgggtatggtgatgtgtttatccagaaccagaacacgagcacctgccgtccaaatcagcgtgactctgtctcgctcaagaatttcaaaaaaagtcagtgccaggcatctaac

SEQ ID NO: 24822 - protein, 278 aa, Zea mays subsp. mays
  peptide (1)..(278): Ceres Seq. ID no. 12344674
  misc_feature (1)..(265): NCBI GI NO: 34913064 NR Description: P0013G02.24
  misc_feature (1)..(266): NCBI GI NO: 34913068 NR Description: P0013G02.26
  misc_feature (6)..(265): NCBI GI NO: 15228202 NR Description: putative protein; protein id: At3g47590.1
  misc_feature (18)..(266): NCBI GI NO: 21554728 NR Description: putative esterase [Arabidopsis thaliana]
  misc_feature (6)..(267): NCBI GI NO: 18416707 NR Description: putative esterase - like protein
  misc_feature (6)..(267): NCBI GI NO: 21595418 NR Description: putative esterase-like protein
  misc_feature (18)..(266): NCBI GI NO: 15232826 NR Description: putative protein; protein id: At3g47560
  misc_feature (14)..(267): NCBI GI NO: 11358640 NR Description: probable esterase-like protein - Arabidopsisthaliana
  misc_feature (18)..(266): NCBI GI NO: 22135864 NR Description: putative protein [Arabidopsis thaliana]
  misc_feature (18)..(265): NCBI GI NO: 15220578 NR Description: hypothetical protein; protein id: At1g29840.1
MGPVHSDQKAKKLAIICEQRVIIPNGHGEKLVGLLHRTSSKNLVILCHGFQATKDDSILVDLADAITKEGISAFRFDFSGNGESDGEFQYGSYRKEAADLRSVVLHFSEQKYDIIALIGHSKGGNAVLLYASKYHDVPAIVNISGRFALERGMEGRLGKNFMRRINEDGYIDVKNKKGELQYRVSKASLDDRLSTDTLFSSRAISKDCRVLTIHGAKDEIVPAEDARQFAANIRNHELRIMAEANHRYTGHREELASLVLGFLSSHPYQITSRLRPRL

SEQ ID NO: 24823 - DNA, 1531 bp, Zea mays subsp. mays
  misc_feature (1)..(1531): Ceres Seq. ID no. 12358795
ctagccgcctgcctctcctcctccagagctcgtcgccaccggccaccgccaccctcgatcacgccgtccgtcgaggtaaagttagtctccacgcccctttccctccgccctagtcctccgtagctctccgccgcgtcgtccgtcgaggtaaggtcagcatggtgagggtcagtgtgctcaacgatgcgctcaagtccatgtacaacgctgagaagatcggcaagaggcaggtcatgatcaggccgtcgtccaaggtcatcatcaagttcctgacggtcatgcagcgccacggctacattggagagttcgagtacgttgatgaccaccgatcgggcaagatcgtggtcgaactcaacgggaggctgaacaagtgcggcgtcatcagccctcgctttgatatcggcgtgaaagacattgagggatggactgcaaggctgctcccgtccaggcagttcggatacatcgtcctcacaacttcggcaggcatcatggaccacgaggaggcccgccggaagagcgtaggaggcaaggttctaggtttcttctattgaagaagctgagaatctttgttatggcctgcctgcctgtcttactctctcagactagagtacctgttattttactttaatatgtctctctcagactagagcgccttcttttacttgaatattggtgactgcattggtctttcactttaaaatcggtgactgcattgatcgaaaaaaaaaaaaaaaaaacggcacgagaagcgcttctcgtgccgttttttttttttttttttaccactactactaccatgtttgtgtatataaaaagaatgtgttctttcacgggcccgtgaaatcgtgtgctggggacaacatacatcaagtttcttcctcattacatcactcgccgctagtgtatggacaaggggtcacaatcaccaacgacaagggccgtctctccaaggaggagatcgagaagatggttcaggacgctgagaagtacaagtctgaggatgaggagcacaagaagaaggtggaggccaagaactcgctggagaactactcctacaacatgcgcaacacgatcaaggacgagaagattgcgtccaagctgccggccgatgacaagaagaagatcgaggacgccatcgacgcggccatcagctggctggacgccaaccagctcgccgaggcggacgagttcgaggacaagatgaaggagctggagagcctctgcaaccccatcatcgccaagatgtaccagggcgcgggtgaagacatgggcggcgctggcggcatggacgaggacgcccctgccggcagcggcggccctggccccaagatcgaggaggtggactaagcggtttgttgtcagtcttgagtgtgctgcagttgctggctggcccagttgctgccgagagttatcgtcagttggtgcggtgtgtccgcttaaactttatttgtggttggttggtacttttgtggtggttatttttttggacctcgtgatagtcggtcggttcaatgttatcgcggctactggt

SEQ ID NO: 24824 - protein, 130 aa, Zea mays subsp. mays
  peptide (1)..(130): Ceres Seq. ID no. 12358796
  misc_feature (5)..(130): Pfam Name: Pfam Description:  Ribosomal protein S8
  misc_feature (1)..(130): NCBI GI NO: 15223001 NR Description: ribosomal protein S15; protein id: At1g07770
  misc_feature (1)..(130): NCBI GI NO: 133793 NR Description: 40S RIBOSOMAL PROTEIN S15A (PPCB8)
  misc_feature (1)..(130): NCBI GI NO: 23051991 NR Description: hypothetical protein [Methanosarcina barkeri]
MVRVSVLNDALKSMYNAEKIGKRQVMIRPSSKVIIKFLTVMQRHGYIGEFEYVDDHRSGKIVVELNGRLNKCGVISPRFDIGVKDIEGWTARLLPSRQFGYIVLTTSAGIMDHEEARRKSVGGKVLGFFY

SEQ ID NO: 24825 - protein, 126 aa, Zea mays subsp. mays
  peptide (1)..(126): Ceres Seq. ID no. 12358797
  misc_feature (1)..(95): Pfam Name: Pfam Description:  Hsp70 protein
  misc_feature (1)..(126): NCBI GI NO: 629844 NR Description: dnaK-type molecular chaperone hsp70
  misc_feature (1)..(126): NCBI GI NO: 629843 NR Description: dnaK-type molecular chaperone hsp70
  misc_feature (1)..(126): NCBI GI NO: 34908140 NR Description: putative HSP70
  misc_feature (1)..(126): NCBI GI NO: 3962377 NR Description: heat shock protein 70 [Arabidopsis thaliana]
  misc_feature (1)..(126): NCBI GI NO: 15230534 NR Description: heat shock protein 70; protein id: At3g12580.1
  misc_feature (1)..(126): NCBI GI NO: 2827002 NR Description: HSP70 [Triticum aestivum]
  misc_feature (1)..(126): NCBI GI NO: 29124135 NR Description: heat shock protein cognate 70
  misc_feature (1)..(126): NCBI GI NO: 3986110 NR Description: heat shock protein 70 cognate [Salix gilgiana]
  misc_feature (1)..(126): NCBI GI NO: 1076746 NR Description: dnaK-type molecular chaperone hsp70 - rice
  misc_feature (1)..(126): NCBI GI NO: 21664287 NR Description: heat shock protein 70
MVQDAEKYKSEDEEHKKKVEAKNSLENYSYNMRNTIKDEKIASKLPADDKKKIEDAIDAAISWLDANQLAEADEFEDKMKELESLCNPIIAKMYQGAGEDMGGAGGMDEDAPAGSGGPGPKIEEVD

SEQ ID NO: 24826 - protein, 117 aa, Zea mays subsp. mays
  peptide (1)..(117): Ceres Seq. ID no. 12358798
  misc_feature (1)..(117): Pfam Name: Pfam Description:  Ribosomal protein S8
  misc_feature (1)..(117): NCBI GI NO: 15223001 NR Description: ribosomal protein S15; protein id: At1g07770
  misc_feature (1)..(117): NCBI GI NO: 133793 NR Description: 40S RIBOSOMAL PROTEIN S15A (PPCB8)
  misc_feature (1)..(117): NCBI GI NO: 23051991 NR Description: hypothetical protein [Methanosarcina barkeri]
MYNAEKIGKRQVMIRPSSKVIIKFLTVMQRHGYIGEFEYVDDHRSGKIVVELNGRLNKCGVISPRFDIGVKDIEGWTARLLPSRQFGYIVLTTSAGIMDHEEARRKSVGGKVLGFFY

SEQ ID NO: 24827 - DNA, 1201 bp, Zea mays subsp. mays
  misc_feature (1)..(1201): Ceres Seq. ID no. 12410398
cccggttagctcccgcgggagacgagacagcgcgcgcaaaacaaacctcaaacgccaaacgcaacacccgccagcaggccacctgtgagcagcgatgagctcgtcgacgcccggccgcgatgacgacgcgccggacctcgtctgccagatcgactgcgtccacggcatggtggacgcgctctcctcagtccgctggaagcgccaccaggacgcggtgatggagctgtcggagcacgggatcgttctctccgtagaggagagcgggtgtctccaggccaaggtcttcctcaagcgcgagctgttcgtagagtacgactatgcgggggacgggaggcagcggttcggcctcagcctgggtctcttcgtcgactgcctcaacatcttctcatcgccaggccacgcgtccgccgtcgagatccgttaccctggccccgacatgcagcttctcctcaagtctgtgggctctgccgatgcatgcctgtacgcagaaatcagaaccaggattccagatacagtctcctgggattaccattttgagcatgctgggaatagtccagtcagttttaccgtcaagtccgccgtcctgaaagaaacgatcgacgacctcgaatggccaggttccagcatccagattcgaatgcaaccagatcctccaactgttatactaaaaggcgaaggtcatggcgacttgcagaccgaattcccctactatgcaaacaccgaccttctaatcgtgttccaatgcgagcacgaagtgtcacacaggtacaaatacaagttcctccgagcgaccacctcgaacatccccagcagtgccgtgaaggagaaccgcaggaccaaggtctcgatcgggaggggagggatgctgaaggtccagcacctggtgtcgcttgccaggccaggcatgccgtacttccgtagcattggtggagggaacgagcagacgagccggatcgcgcatatagagttcttcgtgaagcccgaagaagacgataacggtgcctagctagcgttttgtggagtgtgttatcggcatgttgtttgagtagttcatgtgaaactgaagccgggtcttggtttttgaaacggctagtgtcgtctatcatacaggcatcacgcttctaatcatgtggatcctgttactaggcacgcattattttcctaatcaggtgaaacacatgtttgtggccttgtgatttgc

SEQ ID NO: 24828 - protein, 303 aa, Zea mays subsp. mays
  peptide (1)..(303): Ceres Seq. ID no. 12410399
  misc_feature (112)..(264): Pfam Name: Pfam Description:  Repair protein Rad1/Rec1/Rad17
  misc_feature (1)..(298): NCBI GI NO: 11875164 NR Description: hypothetical protein
  misc_feature (2)..(298): NCBI GI NO: 30684177 NR Description: expressed protein [Arabidopsis thaliana]
  misc_feature (53)..(298): NCBI GI NO: 7452416 NR Description: hypothetical protein dl4915w - Arabidopsis thaliana
  misc_feature (1)..(264): NCBI GI NO: 39795628 NR Description: Unknown (protein for MGC:77779) [Danio rerio]
  misc_feature (1)..(264): NCBI GI NO: 29437240 NR Description: Similar to RAD1 homolog (S. pombe) [Danio rerio]
MSSSTPGRDDDAPDLVCQIDCVHGMVDALSSVRWKRHQDAVMELSEHGIVLSVEESGCLQAKVFLKRELFVEYDYAGDGRQRFGLSLGLFVDCLNIFSSPGHASAVEIRYPGPDMQLLLKSVGSADACLYAEIRTRIPDTVSWDYHFEHAGNSPVSFTVKSAVLKETIDDLEWPGSSIQIRMQPDPPTVILKGEGHGDLQTEFPYYANTDLLIVFQCEHEVSHRYKYKFLRATTSNIPSSAVKENRRTKVSIGRGGMLKVQHLVSLARPGMPYFRSIGGGNEQTSRIAHIEFFVKPEEDDNGA

SEQ ID NO: 24829 - protein, 279 aa, Zea mays subsp. mays
  peptide (1)..(279): Ceres Seq. ID no. 12410400
  misc_feature (88)..(240): Pfam Name: Pfam Description:  Repair protein Rad1/Rec1/Rad17
  misc_feature (1)..(274): NCBI GI NO: 11875164 NR Description: hypothetical protein
  misc_feature (1)..(274): NCBI GI NO: 30684177 NR Description: expressed protein [Arabidopsis thaliana]
  misc_feature (29)..(274): NCBI GI NO: 7452416 NR Description: hypothetical protein dl4915w - Arabidopsis thaliana
  misc_feature (1)..(240): NCBI GI NO: 39795628 NR Description: Unknown (protein for MGC:77779) [Danio rerio]
  misc_feature (1)..(240): NCBI GI NO: 29437240 NR Description: Similar to RAD1 homolog (S. pombe) [Danio rerio]
MVDALSSVRWKRHQDAVMELSEHGIVLSVEESGCLQAKVFLKRELFVEYDYAGDGRQRFGLSLGLFVDCLNIFSSPGHASAVEIRYPGPDMQLLLKSVGSADACLYAEIRTRIPDTVSWDYHFEHAGNSPVSFTVKSAVLKETIDDLEWPGSSIQIRMQPDPPTVILKGEGHGDLQTEFPYYANTDLLIVFQCEHEVSHRYKYKFLRATTSNIPSSAVKENRRTKVSIGRGGMLKVQHLVSLARPGMPYFRSIGGGNEQTSRIAHIEFFVKPEEDDNGA

SEQ ID NO: 24830 - protein, 262 aa, Zea mays subsp. mays
  peptide (1)..(262): Ceres Seq. ID no. 12410401
  misc_feature (71)..(223): Pfam Name: Pfam Description:  Repair protein Rad1/Rec1/Rad17
  misc_feature (1)..(257): NCBI GI NO: 11875164 NR Description: hypothetical protein
  misc_feature (1)..(257): NCBI GI NO: 30684177 NR Description: expressed protein [Arabidopsis thaliana]
  misc_feature (12)..(257): NCBI GI NO: 7452416 NR Description: hypothetical protein dl4915w - Arabidopsis thaliana
  misc_feature (1)..(223): NCBI GI NO: 39795628 NR Description: Unknown (protein for MGC:77779) [Danio rerio]
  misc_feature (1)..(223): NCBI GI NO: 29437240 NR Description: Similar to RAD1 homolog (S. pombe) [Danio rerio]
MELSEHGIVLSVEESGCLQAKVFLKRELFVEYDYAGDGRQRFGLSLGLFVDCLNIFSSPGHASAVEIRYPGPDMQLLLKSVGSADACLYAEIRTRIPDTVSWDYHFEHAGNSPVSFTVKSAVLKETIDDLEWPGSSIQIRMQPDPPTVILKGEGHGDLQTEFPYYANTDLLIVFQCEHEVSHRYKYKFLRATTSNIPSSAVKENRRTKVSIGRGGMLKVQHLVSLARPGMPYFRSIGGGNEQTSRIAHIEFFVKPEEDDNGA

SEQ ID NO: 24831 - DNA, 938 bp, Zea mays subsp. mays
  misc_feature (1)..(938): Ceres Seq. ID no. 12410394
agtgtctccactcgcacttccgcgacgcgcaacccaaagcaaacgcaccgggtcgagccaatccaccacccagccatgcctcccaagcgcaagtccccggcgacgattgcccctgcggcggggtccccgaggaagacgcggagcatggctgctgctgctgctgcagggaagcgggcaacggagcctgctccggcgaaggcagtgccggccaagaaggaagacgaggcggcggttgccgagttgaaagggaggaagaggggcaagaaggaagccgaggcggtgacggtggccaccgagccgaaagggaggaatagggacaagaaggaagccgaggcggtgacggtggccaccgagccgaaagggaggaagaggggcaagaaggaagccgaggcggtggcaccagcggcagaggaggaggatggggttgatgtggcggctgtagggaagcgtgtcatcgtcgaggcctgcactcagtgcagacagtttaagatccgagctcagaaggtgaaggaggacctggaaagttatgtttcgggggtgtctgtgataatcaaccctcagaagccacgccgtggttgccttgagatacgtgaagaaggcggtgaagtgttcatatcactgctgaacatgccacgccccttcacaccaatgaagaagctcgacatggacaaggttatcaaggacatcgccaagaagatctcctaaaccatgttggctggctatggctcggcggcaccattttgtgattgaaatattcaatctaagatcgtaatcttcaaagggtacggtgtaccttaggtgtaggttccaatcagtggcgtttcctattgcattggccatgtgcccatgtctcgtactcgtacctatgcttgtcctgcattgctggggcatatcgttttctgttatatgatatatgccctgaaaattccttgacttcc

SEQ ID NO: 24832 - protein, 234 aa, Zea mays subsp. mays
  peptide (1)..(234): Ceres Seq. ID no. 12410395
  misc_feature (57)..(233): NCBI GI NO: 22329049 NR Description: hypothetical protein; protein id: At4g31360
  misc_feature (106)..(233): NCBI GI NO: 18400547 NR Description: expressed protein; protein id: At2g24440
  misc_feature (57)..(188): NCBI GI NO: 7486666 NR Description: hypothetical protein F8F16
SVSTRTSATRNPKQTHRVEPIHHPAMPPKRKSPATIAPAAGSPRKTRSMAAAAAAGKRATEPAPAKAVPAKKEDEAAVAELKGRKRGKKEAEAVTVATEPKGRNRDKKEAEAVTVATEPKGRKRGKKEAEAVAPAAEEEDGVDVAAVGKRVIVEACTQCRQFKIRAQKVKEDLESYVSGVSVIINPQKPRRGCLEIREEGGEVFISLLNMPRPFTPMKKLDMDKVIKDIAKKIS

SEQ ID NO: 24833 - protein, 209 aa, Zea mays subsp. mays
  peptide (1)..(209): Ceres Seq. ID no. 12410396
  misc_feature (32)..(208): NCBI GI NO: 22329049 NR Description: hypothetical protein; protein id: At4g31360
  misc_feature (81)..(208): NCBI GI NO: 18400547 NR Description: expressed protein; protein id: At2g24440
  misc_feature (32)..(163): NCBI GI NO: 7486666 NR Description: hypothetical protein F8F16
MPPKRKSPATIAPAAGSPRKTRSMAAAAAAGKRATEPAPAKAVPAKKEDEAAVAELKGRKRGKKEAEAVTVATEPKGRNRDKKEAEAVTVATEPKGRKRGKKEAEAVAPAAEEEDGVDVAAVGKRVIVEACTQCRQFKIRAQKVKEDLESYVSGVSVIINPQKPRRGCLEIREEGGEVFISLLNMPRPFTPMKKLDMDKVIKDIAKKIS

SEQ ID NO: 24834 - protein, 186 aa, Zea mays subsp. mays
  peptide (1)..(186): Ceres Seq. ID no. 12410397
  misc_feature (9)..(185): NCBI GI NO: 22329049 NR Description: hypothetical protein; protein id: At4g31360
  misc_feature (58)..(185): NCBI GI NO: 18400547 NR Description: expressed protein; protein id: At2g24440
  misc_feature (9)..(140): NCBI GI NO: 7486666 NR Description: hypothetical protein F8F16
MAAAAAAGKRATEPAPAKAVPAKKEDEAAVAELKGRKRGKKEAEAVTVATEPKGRNRDKKEAEAVTVATEPKGRKRGKKEAEAVAPAAEEEDGVDVAAVGKRVIVEACTQCRQFKIRAQKVKEDLESYVSGVSVIINPQKPRRGCLEIREEGGEVFISLLNMPRPFTPMKKLDMDKVIKDIAKKIS

SEQ ID NO: 24835 - DNA, 1370 bp, Zea mays subsp. mays
  misc_feature (1)..(1370): Ceres Seq. ID no. 12356099
tcaagagtcaagatacatcagagtagctcattgcatagtttcagtgtgtaattatatatttgtctcctctagtgcagtactagagtctagtctagctagtttagattgagtctgcttgttcatctagcgcgtgttttggggtaggtagctagctagctagacacgcgcacccggacaaacgcacgcagcagacaccaagcaggaatcatcggcggcaggcggagggatggggctgagggagattgagtcgacattgccgccggggttcaggttctatcccagcgacgaggagctggtatgccattacctctacaggaaggtggccaacgagcgctccgtgcaggggacgctggtggaggtcgacctgcacgcgcgggaaccatgggagcttccagacgcggccaagctgacggcgagcgagtggtacttcttcagcttcagggaccgcaagtacgcgaccgggccgcgcacgaaccgcgccaccaagacgggctactggaaggccaccggcaaggaccgcgaggtgcgcgacccggccgcccgcgccgtcgtcgtcggcatgcggaagacgctcgtcttctaccagggccgtgcccccagcggcgtcaagtcatgctgggtcatgcacgagttccgcctcgactcgccgcgtacgacgacgacgccaccgaaggaggactgggtgctgtgcagggtgttccagaagcggaaagtcgacggcagcgagcaagacaacggcgtctccccctcgccgccggtctttgccggcgcatcgcagtcgcagggggtcgtcctgccgccggaccagccctgcgtggtggacgcgtacgtcgtggtagaccagccgggctcttcttccgtcggactcgcgccgccgcaggagaacctcggtagcggcctggacgcgttgctgacgaacggagcgatgtggcagtacacctcgtcggtcttcggtcacttgttgccgcaggaggcgaccagctccccgccggtgatggacctaggctccaggggaggagaaggaggagactacgggtgcagcttcttctacgacagcagcttcgaggacatggccaacatcgggttccgacaagggtggatgggctgatccaggaccaggaagcacacgtacgtgcgtgcagtcatgcgatatggaatgtgcatttgtgaaggaagtgattgaattaattgattccattagtagtagcaccctctagtgttgtacagtaggtacgtatatagtgtgagattagattattattgggaattgttagagtgcaccggcctctcaaatccaaagaagtaacagcggaaagaaaagctagtagctagagcacacatgtatatatttgcacaaggtagatggtttg

SEQ ID NO: 24836 - protein, 293 aa, Zea mays subsp. mays
  peptide (1)..(293): Ceres Seq. ID no. 12356100
  misc_feature (10)..(139): Pfam Name: NAM Pfam Description: No apical meristem
  misc_feature (1)..(291): NCBI GI NO: 32482946 NR Description: OSJNBb0072M01.11
  misc_feature (2)..(183): NCBI GI NO: 37535380 NR Description: putative NAM (no apical meristem) protein
  misc_feature (1)..(170): NCBI GI NO: 18417214 NR Description: NAM / CUC2 -like protein; protein id: At4g28530
  misc_feature (1)..(170): NCBI GI NO: 21593065 NR Description: NAM / CUC2-like protein [Arabidopsis thaliana]
  misc_feature (1)..(192): NCBI GI NO: 11994506 NR Description: contains similarity to NAM
  misc_feature (1)..(192): NCBI GI NO: 15232511 NR Description: NAM-like protein; protein id: At3g15170
  misc_feature (7)..(160): NCBI GI NO: 15224139 NR Description: NAM
  misc_feature (6)..(252): NCBI GI NO: 38636961 NR Description: putative NAC domain protein NAC1
  misc_feature (6)..(179): NCBI GI NO: 15229637 NR Description: organ separation protein, putative
  misc_feature (6)..(210): NCBI GI NO: 15222818 NR Description: NAC1; protein id: At1g56010
MGLREIESTLPPGFRFYPSDEELVCHYLYRKVANERSVQGTLVEVDLHAREPWELPDAAKLTASEWYFFSFRDRKYATGPRTNRATKTGYWKATGKDREVRDPAARAVVVGMRKTLVFYQGRAPSGVKSCWVMHEFRLDSPRTTTTPPKEDWVLCRVFQKRKVDGSEQDNGVSPSPPVFAGASQSQGVVLPPDQPCVVDAYVVVDQPGSSSVGLAPPQENLGSGLDALLTNGAMWQYTSSVFGHLLPQEATSSPPVMDLGSRGGEGGDYGCSFFYDSSFEDMANIGFRQGWMG

SEQ ID NO: 24837 - protein, 198 aa, Zea mays subsp. mays
  peptide (1)..(198): Ceres Seq. ID no. 12356101
MPLPLQEGGQRALRAGDAGGGRPARAGTMGASRRGQADGERVVLLQLQGPQVRDRAAHEPRHQDGLLEGHRQGPRGARPGRPRRRRRHAEDARLLPGPCPQRRQVMLGHARVPPRLAAYDDDATEGGLGAVQGVPEAESRRQRARQRRLPLAAGLCRRIAVAGGRPAAGPALRGGRVRRGRPAGLFFRRTRAAAGEPR

SEQ ID NO: 24838 - protein, 182 aa, Zea mays subsp. mays
  peptide (1)..(182): Ceres Seq. ID no. 12356102
  misc_feature (1)..(180): NCBI GI NO: 32482946 NR Description: OSJNBb0072M01.11
  misc_feature (1)..(72): NCBI GI NO: 37535380 NR Description: putative NAM (no apical meristem) protein
  misc_feature (1)..(59): NCBI GI NO: 18417214 NR Description: NAM / CUC2 -like protein; protein id: At4g28530
  misc_feature (1)..(59): NCBI GI NO: 21593065 NR Description: NAM / CUC2-like protein [Arabidopsis thaliana]
  misc_feature (1)..(81): NCBI GI NO: 11994506 NR Description: contains similarity to NAM
  misc_feature (1)..(81): NCBI GI NO: 15232511 NR Description: NAM-like protein; protein id: At3g15170
  misc_feature (1)..(49): NCBI GI NO: 15224139 NR Description: NAM
  misc_feature (1)..(141): NCBI GI NO: 38636961 NR Description: putative NAC domain protein NAC1
  misc_feature (1)..(68): NCBI GI NO: 15229637 NR Description: organ separation protein, putative
  misc_feature (1)..(99): NCBI GI NO: 15222818 NR Description: NAC1; protein id: At1g56010
MRKTLVFYQGRAPSGVKSCWVMHEFRLDSPRTTTTPPKEDWVLCRVFQKRKVDGSEQDNGVSPSPPVFAGASQSQGVVLPPDQPCVVDAYVVVDQPGSSSVGLAPPQENLGSGLDALLTNGAMWQYTSSVFGHLLPQEATSSPPVMDLGSRGGEGGDYGCSFFYDSSFEDMANIGFRQGWMG

SEQ ID NO: 24839 - DNA, 1312 bp, Zea mays subsp. mays
  misc_feature (1)..(1312): Ceres Seq. ID no. 12410390
aatcatgctagttgttctcgttcccttgttagttgagctctttcccttcctcgcttggaaccaaatcaaatcggagcggcggagcaatacgatccctcgcctcgcttccattcgaatcatctcgaacggggcactaatcgggaagctaatgtcgcgcaattcgcgagatctgtagcgccactcggcttcaccggcggcgcggcgggcatggaagcgcagaacggctccggcgtaggggcgcccgtggtgctcaacgtgtacgaccttacgcccatgaacaactacctctactggttcggcctcggtattttccactccggaatcgaagtccacggcatggagtacggatatggagcacacgagtttccaacaagtggggtatttgaggtggaaccaaagagctgtcctggtttcacctacagaagatctgtgtggatgggcacaactgacttgtctagaacagagttccgctcgttcattgaaaaccttgcaggaaagtacaatggcaacacataccatttgatttcaaagaactgcaaccattttacagatgatgtctgtaagaacttgaccaggaaatcaatccctgggtgggtcaatcggctagcaagagtgggttcatttttcaactgtcttctaccagaaagcatccaagtttccacagtaagacacgtccctactcatcctgcattttctgatgatgatatggattcggtatcttcatcggttattggagacagtgatctggaagagctggaccaacaccttctgccatcaactgctgacgtccattctatagacgtgccgccaaagctagcgaaagatcttctctgagttattcagcactttgggttttcacatagcaaggataacttggactgctgcagtggatgtccgctgagtgcttctctgggtggcgcagccgcgcaggactccaggaatgtcgaatgctgctaattgtatcgattcttttgccactgaggtccttacatgcacacagagctctcgacagaaatgacacgctttctaatcctttgcctgttacttgtatgttgtgacttcatcctaggtattttgtgttcgagtgatactgtatgcattcagaatgccgtcaatggcgtgtctggttcgaggcatacaaagtagtatcttgtgttcgagtgatactgtaggcactgagaatgccgtcaatggtgtgtgtgtttgaggggtcacaggtaatccatcgagtgtagttaaaccaaacaaatcttaatatcatctgacttcaatccgtgcagcttttcctagtgatatatataatttttgtttt

SEQ ID NO: 24840 - protein, 208 aa, Zea mays subsp. mays
  peptide (1)..(208): Ceres Seq. ID no. 12410391
  misc_feature (12)..(134): Pfam Name: DUF862 Pfam Description: Eukaryotic protein of unknown function
  misc_feature (1)..(198): NCBI GI NO: 38346173 NR Description: OSJNBa0079A21.20
  misc_feature (2)..(208): NCBI GI NO: 15238059 NR Description: putative protein; protein id: At5g47310.1
  misc_feature (2)..(206): NCBI GI NO: 30684058 NR Description: expressed protein [Arabidopsis thaliana]
  misc_feature (5)..(157): NCBI GI NO: 18401869 NR Description: expressed protein; protein id: At1g47740
  misc_feature (5)..(157): NCBI GI NO: 21593644 NR Description: unknown [Arabidopsis thaliana]
  misc_feature (1)..(156): NCBI GI NO: 18420889 NR Description: putative protein; protein id: At5g25170
  misc_feature (1)..(156): NCBI GI NO: 18400749 NR Description: expressed protein; protein id: At2g25190
  misc_feature (5)..(157): NCBI GI NO: 9802596 NR Description: T2E6.19 [Arabidopsis thaliana]
  misc_feature (4)..(156): NCBI GI NO: 15236618 NR Description: putative protein; protein id: At4g31980.1
  misc_feature (4)..(156): NCBI GI NO: 17529024 NR Description: unknown protein [Arabidopsis thaliana]
MEAQNGSGVGAPVVLNVYDLTPMNNYLYWFGLGIFHSGIEVHGMEYGYGAHEFPTSGVFEVEPKSCPGFTYRRSVWMGTTDLSRTEFRSFIENLAGKYNGNTYHLISKNCNHFTDDVCKNLTRKSIPGWVNRLARVGSFFNCLLPESIQVSTVRHVPTHPAFSDDDMDSVSSSVIGDSDLEELDQHLLPSTADVHSIDVPPKLAKDLL

SEQ ID NO: 24841 - protein, 186 aa, Zea mays subsp. mays
  peptide (1)..(186): Ceres Seq. ID no. 12410392
  misc_feature (1)..(112): Pfam Name: DUF862 Pfam Description: Eukaryotic protein of unknown function
  misc_feature (1)..(176): NCBI GI NO: 38346173 NR Description: OSJNBa0079A21.20
  misc_feature (1)..(186): NCBI GI NO: 15238059 NR Description: putative protein; protein id: At5g47310.1
  misc_feature (1)..(184): NCBI GI NO: 30684058 NR Description: expressed protein [Arabidopsis thaliana]
  misc_feature (1)..(135): NCBI GI NO: 18401869 NR Description: expressed protein; protein id: At1g47740
  misc_feature (1)..(135): NCBI GI NO: 21593644 NR Description: unknown [Arabidopsis thaliana]
  misc_feature (1)..(134): NCBI GI NO: 18420889 NR Description: putative protein; protein id: At5g25170
  misc_feature (1)..(134): NCBI GI NO: 18400749 NR Description: expressed protein; protein id: At2g25190
  misc_feature (1)..(135): NCBI GI NO: 9802596 NR Description: T2E6.19 [Arabidopsis thaliana]
  misc_feature (1)..(134): NCBI GI NO: 15236618 NR Description: putative protein; protein id: At4g31980.1
  misc_feature (1)..(134): NCBI GI NO: 17529024 NR Description: unknown protein [Arabidopsis thaliana]
MNNYLYWFGLGIFHSGIEVHGMEYGYGAHEFPTSGVFEVEPKSCPGFTYRRSVWMGTTDLSRTEFRSFIENLAGKYNGNTYHLISKNCNHFTDDVCKNLTRKSIPGWVNRLARVGSFFNCLLPESIQVSTVRHVPTHPAFSDDDMDSVSSSVIGDSDLEELDQHLLPSTADVHSIDVPPKLAKDLL

SEQ ID NO: 24842 - protein, 165 aa, Zea mays subsp. mays
  peptide (1)..(165): Ceres Seq. ID no. 12410393
  misc_feature (1)..(91): Pfam Name: DUF862 Pfam Description: Eukaryotic protein of unknown function
  misc_feature (1)..(155): NCBI GI NO: 38346173 NR Description: OSJNBa0079A21.20
  misc_feature (1)..(165): NCBI GI NO: 15238059 NR Description: putative protein; protein id: At5g47310.1
  misc_feature (1)..(163): NCBI GI NO: 30684058 NR Description: expressed protein [Arabidopsis thaliana]
  misc_feature (1)..(114): NCBI GI NO: 18401869 NR Description: expressed protein; protein id: At1g47740
  misc_feature (1)..(114): NCBI GI NO: 21593644 NR Description: unknown [Arabidopsis thaliana]
  misc_feature (1)..(113): NCBI GI NO: 18420889 NR Description: putative protein; protein id: At5g25170
  misc_feature (1)..(113): NCBI GI NO: 18400749 NR Description: expressed protein; protein id: At2g25190
  misc_feature (1)..(114): NCBI GI NO: 9802596 NR Description: T2E6.19 [Arabidopsis thaliana]
  misc_feature (1)..(113): NCBI GI NO: 15236618 NR Description: putative protein; protein id: At4g31980.1
  misc_feature (1)..(113): NCBI GI NO: 17529024 NR Description: unknown protein [Arabidopsis thaliana]
MEYGYGAHEFPTSGVFEVEPKSCPGFTYRRSVWMGTTDLSRTEFRSFIENLAGKYNGNTYHLISKNCNHFTDDVCKNLTRKSIPGWVNRLARVGSFFNCLLPESIQVSTVRHVPTHPAFSDDDMDSVSSSVIGDSDLEELDQHLLPSTADVHSIDVPPKLAKDLL

SEQ ID NO: 24843 - DNA, 1058 bp, Zea mays subsp. mays
  misc_feature (1)..(1058): Ceres Seq. ID no. 12406184
gctagggttttctcgcaatccagcccctctgtcatggccaagacgaagcaagggaagcgggatgtcgacgcctataccatcaagggcaccaacaaggtggtccgagtgggggactgcgtgctgatgcggccagcggacacggacaacccgccgtacgtggcgcgggtggagcggatggagtcggacgggcgcggcagcgtgagggtgcgggtgcgctggtactaccgccccgaggaggccaagggcggccgacgcccgttccacggtgccaaggagctcttcctctccgaccacttcgacacgcagagcgcccacaccattgagggcaagtgcatcgttcactccttcaagagctacaccaagctcgacaacgttggtccggaggacttctactgccgatttgactacaaggccgccaccggtgcattcacccccgaccgtgtcgccgtatattgcaagtgtgagatgccgtacaacccggatgacctcatggtgcagtgtgaaggatgcaaggactggttccatccgtcttgtatgggaatgaccattgagcaagcaaaaaagatagatcattacatgtgctcggattgtgctaaagaaaatggtgcaaagagaccctcaaattcatactcagtttcaccaaactcagattctaagattgaatcaaagaggcgcaagagataaatgctgcggcagaagcacccctggcaaaggagatgcggtatttatggtgtcagctcctcattactggtgcatatttgagatgttgatgtgtacactgcgagagaagagccaagccaattgtagggcaaaacctatttgacttatcattcttctgtgtattctgcctagacattagtgtgatgagtacgtgagttccccgttgcggcgtgtgcatgatcagctgctggaggcgggatgtcgggaaatgctagaattatgctgactcttgtcgatgtaagtgtatcgtgtgtgtgtgttaacatatgcactggctggaaacgttcccatgtgtgaatggaggatgctgatgatagcttgactgttgtttcatattc

SEQ ID NO: 24844 - protein, 227 aa, Zea mays subsp. mays
  peptide (1)..(227): Ceres Seq. ID no. 12406185
  misc_feature (31)..(147): Pfam Name: Pfam Description:  BAH domain
  misc_feature (12)..(227): NCBI GI NO: 37573088 NR Description: receptor like protein
  misc_feature (12)..(219): NCBI GI NO: 34904940 NR Description: OSJNBa0077M12.13
  misc_feature (12)..(227): NCBI GI NO: 33146914 NR Description: putative ES43 protein
  misc_feature (37)..(220): NCBI GI NO: 11292613 NR Description: receptor like protein - Arabidopsis thaliana
  misc_feature (42)..(220): NCBI GI NO: 15234729 NR Description: receptor like protein
  misc_feature (12)..(227): NCBI GI NO: 34897170 NR Description: putative DNA-binding protein
  misc_feature (12)..(227): NCBI GI NO: 18420377 NR Description: ES43 like protein; protein id: At4g39100
  misc_feature (12)..(227): NCBI GI NO: 21595796 NR Description: ES43 like protein [Arabidopsis thaliana]
  misc_feature (12)..(220): NCBI GI NO: 7484948 NR Description: ES43 protein homolog F19H22
  misc_feature (19)..(227): NCBI GI NO: 629783 NR Description: ES43 protein - barley
ARVFSQSSPSVMAKTKQGKRDVDAYTIKGTNKVVRVGDCVLMRPADTDNPPYVARVERMESDGRGSVRVRVRWYYRPEEAKGGRRPFHGAKELFLSDHFDTQSAHTIEGKCIVHSFKSYTKLDNVGPEDFYCRFDYKAATGAFTPDRVAVYCKCEMPYNPDDLMVQCEGCKDWFHPSCMGMTIEQAKKIDHYMCSDCAKENGAKRPSNSYSVSPNSDSKIESKRRKR

SEQ ID NO: 24845 - protein, 216 aa, Zea mays subsp. mays
  peptide (1)..(216): Ceres Seq. ID no. 12406186
  misc_feature (20)..(136): Pfam Name: Pfam Description:  BAH domain
  misc_feature (1)..(216): NCBI GI NO: 37573088 NR Description: receptor like protein
  misc_feature (1)..(208): NCBI GI NO: 34904940 NR Description: OSJNBa0077M12.13
  misc_feature (1)..(216): NCBI GI NO: 33146914 NR Description: putative ES43 protein
  misc_feature (26)..(209): NCBI GI NO: 11292613 NR Description: receptor like protein - Arabidopsis thaliana
  misc_feature (31)..(209): NCBI GI NO: 15234729 NR Description: receptor like protein
  misc_feature (1)..(216): NCBI GI NO: 34897170 NR Description: putative DNA-binding protein
  misc_feature (1)..(216): NCBI GI NO: 18420377 NR Description: ES43 like protein; protein id: At4g39100
  misc_feature (1)..(216): NCBI GI NO: 21595796 NR Description: ES43 like protein [Arabidopsis thaliana]
  misc_feature (1)..(209): NCBI GI NO: 7484948 NR Description: ES43 protein homolog F19H22
  misc_feature (8)..(216): NCBI GI NO: 629783 NR Description: ES43 protein - barley
MAKTKQGKRDVDAYTIKGTNKVVRVGDCVLMRPADTDNPPYVARVERMESDGRGSVRVRVRWYYRPEEAKGGRRPFHGAKELFLSDHFDTQSAHTIEGKCIVHSFKSYTKLDNVGPEDFYCRFDYKAATGAFTPDRVAVYCKCEMPYNPDDLMVQCEGCKDWFHPSCMGMTIEQAKKIDHYMCSDCAKENGAKRPSNSYSVSPNSDSKIESKRRKR

SEQ ID NO: 24846 - protein, 186 aa, Zea mays subsp. mays
  peptide (1)..(186): Ceres Seq. ID no. 12406187
  misc_feature (1)..(106): Pfam Name: Pfam Description:  BAH domain
  misc_feature (1)..(186): NCBI GI NO: 37573088 NR Description: receptor like protein
  misc_feature (1)..(178): NCBI GI NO: 34904940 NR Description: OSJNBa0077M12.13
  misc_feature (1)..(186): NCBI GI NO: 33146914 NR Description: putative ES43 protein
  misc_feature (1)..(179): NCBI GI NO: 11292613 NR Description: receptor like protein - Arabidopsis thaliana
  misc_feature (1)..(179): NCBI GI NO: 15234729 NR Description: receptor like protein
  misc_feature (1)..(186): NCBI GI NO: 34897170 NR Description: putative DNA-binding protein
  misc_feature (1)..(186): NCBI GI NO: 18420377 NR Description: ES43 like protein; protein id: At4g39100
  misc_feature (1)..(186): NCBI GI NO: 21595796 NR Description: ES43 like protein [Arabidopsis thaliana]
  misc_feature (1)..(179): NCBI GI NO: 7484948 NR Description: ES43 protein homolog F19H22
  misc_feature (1)..(186): NCBI GI NO: 629783 NR Description: ES43 protein - barley
MRPADTDNPPYVARVERMESDGRGSVRVRVRWYYRPEEAKGGRRPFHGAKELFLSDHFDTQSAHTIEGKCIVHSFKSYTKLDNVGPEDFYCRFDYKAATGAFTPDRVAVYCKCEMPYNPDDLMVQCEGCKDWFHPSCMGMTIEQAKKIDHYMCSDCAKENGAKRPSNSYSVSPNSDSKIESKRRKR

SEQ ID NO: 24847 - DNA, 1316 bp, Zea mays subsp. mays
  misc_feature (1)..(1316): Ceres Seq. ID no. 12408232
aattcaaacttcacatagagccgttgctcagcactcgcgacccactaccaatcctccaagcacaacaaccaatctttgcaagccgtccaaagacgccgcagccgccgccgccgacgccatggggaaactcggagccaagtccgactacgagagtctccgcgacgcccgcatctccgagaacatggcccggatggagatgctcggccttctccgctgcgcgggggagctcagcgacatcgcctccgcctccagccaccgcgcggcagggagcgcgacgcctcggaagacccccaggccacgggtgacgagcatgaccccgctccgccgctccggccgcctcctcgccgcgacgccgacccgcccgaccggatccgcgtcgacgcaccgctgttccactcggctgaatggacagggcacaggggttctgagtaagttgacggcggcgggatcggaggatgaggatgatacatgggaagatgataaggaggggaagtgggcggtggcggtggccaaggagagggtacaggcgctgcaggagaggcggtgcgacagcagggggaggggcggcgtgtacgactctgttcttgggatctgctgccatttctgcaggcagaagaaattgtgcggcgaggaggactgcaagcgctgcggggaaggagacctgaagcagccatgcttaggaaagacggagtgctcatcttgccattcttctaatgggatactctgccgtggttgcctgaaagttaggtacggcgaagagatggaagaggtgcggaagaacaagaactggctgtgccctcactgcgttgaggagaagggtatcaagaaattctggatatgcaacagctccttctgcttgaagaagcggaagataccaccgactgggattgccatatataatgcaagggagcaaggatacgagtcagttgcgcaccttctgatggacaggctgaagcgacaagctttctgatgacgactggtgtaatggtgttggcacgttcacttctacagcgacgatgatgacatagagattgtagtggcagtctgttgtctgacgacgtatggttttgcatgtttcacttctgcagtggcttagtgatgatggtagattggtagaggttatagcgagagtccgtttgtctggcagttccgatagtaggcatcttagcctctaggagaaaatgtttctgttgaaatgagttagactttttggcccaagaagaatgtgaagctaactctcggtagtctgatgtttcagagaacaacctcagcggccttctgacttctgagtggcagcatgtctgtttattgtaacc

SEQ ID NO: 24848 - protein, 322 aa, Zea mays subsp. mays
  peptide (1)..(322): Ceres Seq. ID no. 12408233
  misc_feature (40)..(322): NCBI GI NO: 13324785 NR Description: hypothetical protein [Oryza sativa]
  misc_feature (14)..(317): NCBI GI NO: 34855191 NR Description: similar to RIKEN cDNA 2310021G01
  misc_feature (172)..(297): NCBI GI NO: 25407788 NR Description: hypothetical protein AT4g37110
  misc_feature (90)..(320): NCBI GI NO: 15929382 NR Description: Unknown (protein for IMAGE:3829029) [Homo sapiens]
  misc_feature (2)..(320): NCBI GI NO: 26324608 NR Description: unnamed protein product [Mus musculus]
  misc_feature (14)..(320): NCBI GI NO: 21313220 NR Description: RIKEN cDNA 2310021G01 [Mus musculus]
  misc_feature (172)..(320): NCBI GI NO: 20891867 NR Description: hypothetical protein XP_148415 [Mus musculus]
  misc_feature (187)..(320): NCBI GI NO: 11360288 NR Description: hypothetical protein DKFZp762L0311
  misc_feature (9)..(320): NCBI GI NO: 22027514 NR Description: cell division cycle associated protein 7 isoform 2
  misc_feature (9)..(320): NCBI GI NO: 21362008 NR Description: cell division cycle associated protein 7 isoform 1
IQTSHRAVAQHSRPTTNPPSTTTNLCKPSKDAAAAAADAMGKLGAKSDYESLRDARISENMARMEMLGLLRCAGELSDIASASSHRAAGSATPRKTPRPRVTSMTPLRRSGRLLAATPTRPTGSASTHRCSTRLNGQGTGVLSKLTAAGSEDEDDTWEDDKEGKWAVAVAKERVQALQERRCDSRGRGGVYDSVLGICCHFCRQKKLCGEEDCKRCGEGDLKQPCLGKTECSSCHSSNGILCRGCLKVRYGEEMEEVRKNKNWLCPHCVEEKGIKKFWICNSSFCLKKRKIPPTGIAIYNAREQGYESVAHLLMDRLKRQAF

SEQ ID NO: 24849 - protein, 283 aa, Zea mays subsp. mays
  peptide (1)..(283): Ceres Seq. ID no. 12408234
  misc_feature (1)..(283): NCBI GI NO: 13324785 NR Description: hypothetical protein [Oryza sativa]
  misc_feature (1)..(278): NCBI GI NO: 34855191 NR Description: similar to RIKEN cDNA 2310021G01
  misc_feature (133)..(258): NCBI GI NO: 25407788 NR Description: hypothetical protein AT4g37110
  misc_feature (51)..(281): NCBI GI NO: 15929382 NR Description: Unknown (protein for IMAGE:3829029) [Homo sapiens]
  misc_feature (1)..(281): NCBI GI NO: 26324608 NR Description: unnamed protein product [Mus musculus]
  misc_feature (1)..(281): NCBI GI NO: 21313220 NR Description: RIKEN cDNA 2310021G01 [Mus musculus]
  misc_feature (133)..(281): NCBI GI NO: 20891867 NR Description: hypothetical protein XP_148415 [Mus musculus]
  misc_feature (148)..(281): NCBI GI NO: 11360288 NR Description: hypothetical protein DKFZp762L0311
  misc_feature (1)..(281): NCBI GI NO: 22027514 NR Description: cell division cycle associated protein 7 isoform 2
  misc_feature (1)..(281): NCBI GI NO: 21362008 NR Description: cell division cycle associated protein 7 isoform 1
MGKLGAKSDYESLRDARISENMARMEMLGLLRCAGELSDIASASSHRAAGSATPRKTPRPRVTSMTPLRRSGRLLAATPTRPTGSASTHRCSTRLNGQGTGVLSKLTAAGSEDEDDTWEDDKEGKWAVAVAKERVQALQERRCDSRGRGGVYDSVLGICCHFCRQKKLCGEEDCKRCGEGDLKQPCLGKTECSSCHSSNGILCRGCLKVRYGEEMEEVRKNKNWLCPHCVEEKGIKKFWICNSSFCLKKRKIPPTGIAIYNAREQGYESVAHLLMDRLKRQAF

SEQ ID NO: 24850 - protein, 262 aa, Zea mays subsp. mays
  peptide (1)..(262): Ceres Seq. ID no. 12408235
  misc_feature (1)..(262): NCBI GI NO: 13324785 NR Description: hypothetical protein [Oryza sativa]
  misc_feature (1)..(257): NCBI GI NO: 34855191 NR Description: similar to RIKEN cDNA 2310021G01
  misc_feature (112)..(237): NCBI GI NO: 25407788 NR Description: hypothetical protein AT4g37110
  misc_feature (30)..(260): NCBI GI NO: 15929382 NR Description: Unknown (protein for IMAGE:3829029) [Homo sapiens]
  misc_feature (1)..(260): NCBI GI NO: 26324608 NR Description: unnamed protein product [Mus musculus]
  misc_feature (1)..(260): NCBI GI NO: 21313220 NR Description: RIKEN cDNA 2310021G01 [Mus musculus]
  misc_feature (112)..(260): NCBI GI NO: 20891867 NR Description: hypothetical protein XP_148415 [Mus musculus]
  misc_feature (127)..(260): NCBI GI NO: 11360288 NR Description: hypothetical protein DKFZp762L0311
  misc_feature (1)..(260): NCBI GI NO: 22027514 NR Description: cell division cycle associated protein 7 isoform 2
  misc_feature (1)..(260): NCBI GI NO: 21362008 NR Description: cell division cycle associated protein 7 isoform 1
MARMEMLGLLRCAGELSDIASASSHRAAGSATPRKTPRPRVTSMTPLRRSGRLLAATPTRPTGSASTHRCSTRLNGQGTGVLSKLTAAGSEDEDDTWEDDKEGKWAVAVAKERVQALQERRCDSRGRGGVYDSVLGICCHFCRQKKLCGEEDCKRCGEGDLKQPCLGKTECSSCHSSNGILCRGCLKVRYGEEMEEVRKNKNWLCPHCVEEKGIKKFWICNSSFCLKKRKIPPTGIAIYNAREQGYESVAHLLMDRLKRQAF

SEQ ID NO: 24851 - DNA, 1191 bp, Zea mays subsp. mays
  misc_feature (1)..(1191): Ceres Seq. ID no. 12410365
aaaccgcacacggcacctcctctcgtccgttcgccgcctggctcgcaccgctgacagtgcgtcagtccaggtcgatactccctctttccaagatccggtcattctctctcggggtcggctaccgccgccgccgtacgccaggtgccgactgccgagaccttctccgatctgtttgccggcgaagagcgcccgccaaatctgcccctggtttcaaccgattgaaccccgatgtccgacgtcgagaaccctggcgtgggtgggaagccgccgccgtacaaggaccctgacaatgggagtcagcgattcctactcgagttggagttcgtgcagtgcctcgccaaccctacctacatccactatctagcgcagaatagatatttcgaggatgaggcatttatcgggtacctcaagtatctaaaatactggcagcgaccagagtatatcaaatacataatgtatccacactgccttttctttcttgagcttctccaaaatgccaatttccgaaatgcaatggcacatccaacaaacaaggagcttgctcataggcagcaatatttcttctggaaaaactacaggaataacagactgaagcacatcataccgcgccctcctcctgaacctgcaccttcacaggcacctgctacattgcccctacaagcgtccgtgccgacacctgtagctccacctgttcctgcaccaacatcgtctatgccacctgtggtagcaggtggtgcatctgcaatgtctcctatgcagtttgtaggaactccaggcactaatatgccgaagaatgacatgagaaatgctatggacaatagaaaaaggaagatgggctaattgaagttcttgcgcaacttttcaacggacactgccggattcgagcacagttgctgcctcaggagccttattatttccttttgttttagtgctggttatttggccttgtagttgagggttcgtgagtttttagaatggaagcttctgacttagagtgaagttagaacaaatactccatgtcgcatgaacttgcacacgtgactttaggtgtcagcattctcctgaatgatcataccatttaccttaatgtttcagcatattgcttggcagcaggaaatatgtactgttcataaactatacatatgcccgttggccccaatacaaagttgacattttggcaatattctgttc

SEQ ID NO: 24852 - protein, 203 aa, Zea mays subsp. mays
  peptide (1)..(203): Ceres Seq. ID no. 12410366
  misc_feature (15)..(203): NCBI GI NO: 12597881 NR Description: hypothetical protein [Oryza sativa]
  misc_feature (12)..(203): NCBI GI NO: 33146796 NR Description: SOH1-like protein
  misc_feature (12)..(201): NCBI GI NO: 34899976 NR Description: P0039H02.5
  misc_feature (12)..(203): NCBI GI NO: 34899964 NR Description: P0428D12.23
  misc_feature (13)..(203): NCBI GI NO: 22326900 NR Description: SOH1 - like protein; protein id: At5g19910
  misc_feature (20)..(122): NCBI GI NO: 27673870 NR Description: similar to CGI-125 protein
  misc_feature (20)..(122): NCBI GI NO: 13385570 NR Description: RIKEN cDNA 3110004H13 [Mus musculus]
  misc_feature (20)..(122): NCBI GI NO: 7705592 NR Description: CGI-125 protein [Homo sapiens]
  misc_feature (24)..(202): NCBI GI NO: 21355471 NR Description: CG1057-PA [Drosophila melanogaster]
  misc_feature (19)..(120): NCBI GI NO: 39589769 NR Description: Hypothetical protein CBG12403
MSDVENPGVGGKPPPYKDPDNGSQRFLLELEFVQCLANPTYIHYLAQNRYFEDEAFIGYLKYLKYWQRPEYIKYIMYPHCLFFLELLQNANFRNAMAHPTNKELAHRQQYFFWKNYRNNRLKHIIPRPPPEPAPSQAPATLPLQASVPTPVAPPVPAPTSSMPPVVAGGASAMSPMQFVGTPGTNMPKNDMRNAMDNRKRKMG

SEQ ID NO: 24853 - protein, 128 aa, Zea mays subsp. mays
  peptide (1)..(128): Ceres Seq. ID no. 12410367
  misc_feature (1)..(128): NCBI GI NO: 12597881 NR Description: hypothetical protein [Oryza sativa]
  misc_feature (1)..(128): NCBI GI NO: 33146796 NR Description: SOH1-like protein
  misc_feature (1)..(126): NCBI GI NO: 34899976 NR Description: P0039H02.5
  misc_feature (1)..(128): NCBI GI NO: 34899964 NR Description: P0428D12.23
  misc_feature (1)..(128): NCBI GI NO: 22326900 NR Description: SOH1 - like protein; protein id: At5g19910
  misc_feature (1)..(47): NCBI GI NO: 27673870 NR Description: similar to CGI-125 protein
  misc_feature (1)..(47): NCBI GI NO: 13385570 NR Description: RIKEN cDNA 3110004H13 [Mus musculus]
  misc_feature (1)..(47): NCBI GI NO: 7705592 NR Description: CGI-125 protein [Homo sapiens]
  misc_feature (1)..(127): NCBI GI NO: 21355471 NR Description: CG1057-PA [Drosophila melanogaster]
  misc_feature (1)..(45): NCBI GI NO: 39589769 NR Description: Hypothetical protein CBG12403
MYPHCLFFLELLQNANFRNAMAHPTNKELAHRQQYFFWKNYRNNRLKHIIPRPPPEPAPSQAPATLPLQASVPTPVAPPVPAPTSSMPPVVAGGASAMSPMQFVGTPGTNMPKNDMRNAMDNRKRKMG

SEQ ID NO: 24854 - protein, 120 aa, Zea mays subsp. mays
  peptide (1)..(120): Ceres Seq. ID no. 12410368
NRTRHLLSSVRRLARTADSASVQVDTPSFQDPVILSRGRLPPPPYARCRLPRPSPICLPAKSARQICPWFQPIEPRCPTSRTLAWVGSRRRTRTLTMGVSDSYSSWSSCSASPTLPTSTI

SEQ ID NO: 24855 - DNA, 1583 bp, Zea mays subsp. mays
  misc_feature (1)..(1583): Ceres Seq. ID no. 12362521
gcacgagaccattacctagaacatcctaatcgaaaagaccaatcgttcctatgaagatcaccgtgcagtcgtcgaagctggtcacgggcagctccagcggcggtcgtccttcttccgccgatgccgccgaggcggtcccgctcacggtgttcgacaagctccactacgatctgtacgtgcatgccttatacttcttccacccgccagcgccgcccagctccgtcctcgaggccgggctcgccgccgcgctggccgagtacccggagtaggccgggcggctcggcgtggacgcgcgcggcaaccgcgccatcctgctcaacggcgcgggcgcgcggctcgtcgaagccacggccgccgccgccgacgtctgctcgctcgacagcgtcgtgccgccggagccagcgactcccgcgaccatgagcctgcaccccagcgccgaggacgccgtcgacggcgaggtcctgctgctccaggtcacgcggttcgcctgcggctccttcgtcgtgggcacggcggtgcagcatgtcgtcggcgacggcgccgccttccactgcttcgtgagcgcctggggccaggcctcgcgcggcgccgccgtggaccccgcgcccgtgcacgaccgcgtgtccttcttcgtgccccggcacccgcccttggtcgagttcgagcaccgcggcgcggagtacaagcggccgcctcgccctcgcgagggcgaggagaaggccgggggcagcgagtcaggggccaaggccaaggccaacgccgacgtcggcgaaaagcagctggtgacgcgtagggtgaactttagccgagagttcgtcgccgagctcaagacgagggcgtcagcgggggcgcccttgccgcggcggtacagcacgctgcagtgcgtggcggcgcacctgtggcggtgcgtgacgagggcgcggaggctcgacgcgcgcgcccgcaccaccctccgcatcgccgtgaacgggcggtcgcggatgaggaacccgcgggtgcccgaggcgtacgccggcaacgtcgtgctctgggcgcgggcgaccgcggccgcaggcggcctggtacggagcccgctcccggaggccgtgcggctcgtgtccgaggcggtggcggccgtggacgacgcctacttcaggtccgtcatcgacttcgccagctccggggccctggaggaggaaggcctggtgccggcggccgacccgttggagacggtgttcagcccggacgtcgaggtgtacagcctgctgggggcctcgttccaggacttcgacttcggcggtggcccgcccttcttcttcatgccgagctactcgcccgtggagggcgccgtattcgtcgtgtcgtctttctccggcgacggcagtatcgacgcctacgtccctctcttcagccacgcgatggacatcttcgacaaatgctgccactccctgcctgctgcggacgcacgactttaggcgcgttgactttgcttcgtccgagatgatacatttcgtgaaataatcatttgcaaaaaaaagaagtaagatggattcggttatcatgtcaggagatgaatattaaggtagataattaagatatttcct

SEQ ID NO: 24856 - protein, 345 aa, Zea mays subsp. mays
  peptide (1)..(345): Ceres Seq. ID no. 12362522
  misc_feature (1)..(90): Pfam Name: Pfam Description:  Transferase family
  misc_feature (1)..(339): NCBI GI NO: 32488652 NR Description: OSJNBa0087O24.2
  misc_feature (1)..(338): NCBI GI NO: 31712073 NR Description: putative hydroxycinnamoyl transferase
  misc_feature (50)..(337): NCBI GI NO: 32488651 NR Description: OSJNBa0087O24.1
  misc_feature (1)..(338): NCBI GI NO: 32490472 NR Description: putative anthranilate N-benzoyltransferase
  misc_feature (1)..(338): NCBI GI NO: 30025135 NR Description: agmatine coumaroyltransferase [Hordeum vulgare]
  misc_feature (1)..(338): NCBI GI NO: 30025137 NR Description: putative agmatine coumaroyltransferase
  misc_feature (127)..(338): NCBI GI NO: 37533700 NR Description: putative anthranilate N-benzoyltransferase
  misc_feature (1)..(90): NCBI GI NO: 37533700 NR Description: putative anthranilate N-benzoyltransferase
  misc_feature (1)..(90): NCBI GI NO: 30025135 NR Description: agmatine coumaroyltransferase [Hordeum vulgare]
  misc_feature (1)..(192): NCBI GI NO: 32490471 NR Description: putative anthranilate N-benzoyltransferase
MSLHPSAEDAVDGEVLLLQVTRFACGSFVVGTAVQHVVGDGAAFHCFVSAWGQASRGAAVDPAPVHDRVSFFVPRHPPLVEFEHRGAEYKRPPRPREGEEKAGGSESGAKAKANADVGEKQLVTRRVNFSREFVAELKTRASAGAPLPRRYSTLQCVAAHLWRCVTRARRLDARARTTLRIAVNGRSRMRNPRVPEAYAGNVVLWARATAAAGGLVRSPLPEAVRLVSEAVAAVDDAYFRSVIDFASSGALEEEGLVPAADPLETVFSPDVEVYSLLGASFQDFDFGGGPPFFFMPSYSPVEGAVFVVSSFSGDGSIDAYVPLFSHAMDIFDKCCHSLPAADARL

SEQ ID NO: 24857 - DNA, 1743 bp, Zea mays subsp. mays
  misc_feature (1)..(1743): Ceres Seq. ID no. 12348976
acgacgctactcgtcctcatccagtcacgaaaaatcggaatctctgaaaaatcctccgtaccatgaagctccggttgcgatctatgcaggcgcgcggcggctccgccgccgtggagacccaccgcgtggacctgccgcccacggccactctggccgacgtgaagaccctcctcgcgtcgaagctctctgcggcgcaacccgtccccgccgagtccgtccgcctctccctcaaccgtagcgaggagctcgtctcgccggaccctgccgctacgctcccgtccctcggcctcgcgtccggtgatctcgtatttttcaccctatcccccctcacggccctagcgccgccggctcaggccctgccacggaaccctagcccgagctctggcgctgcagcgtcgatcgctgaggctgccgaccgcgggaagggttcgaagcaatctggtactggagatttctcttcctcgtcactggcgcaggctgtggttgtgagccctagctttccggtcgcttccggtacgcgggatgtggtgatggaggaggaggccgtcgatgccacaaagggctggtcgagttttgtgcttagggatctcaagagggagatggacaacgtcggggccgcggagggaaccgccgcaggtcgcctggttgcggccttgcatgcagctctgcttgatgccggttttctcaccgctaaactgacgggctctcacctttcgctgcctcagggctggccgtcaggtgctttgaagccattgaccatcaagtatactataccagagctttcatcaatggtatctgtgactgaggaaggaaaggtggtggtgctgaactactccttgatggccaatttcgtgatggtttatgggtatgttcctggggcacagtctgaggtttgccggttgtgcttggagttgccggggctggagcctctactttatctggatggcgatcagctgaatggagtgcatgagaagggagttcatgatctgtggagagtgctgaaggatgagatttgcctgccactgatgatatcattgtgccaactgaacggtctgccttgccgccttgcttgatggctttgcctgctgatctcaagactaaggtattggggtttttacctggggttgatcttgcaaaggttgagtgcacatgcaaggaaatgatgaatcttgcatcagatgatagtatctggaagaagcttgtatccaagtttgaaaattatggcgagggctctaggctggcaggcaagaatgcaaaggccatatttgtagaagcttggcaggccaataagagacggcagaagaggcccaatccaaccttttggaactatggctggggaaacagtccttatagccgcccacttaggctgccattgattggtggggactcggacagacttccttttattgggaatcatggttctgttgggcgccactttggaaatcaacgaaggaatatctcaccgaactgcattcttgatggtcaccgtcataacttcctttgaagccatgtcaatgagttttacttgtatgttaagagtgttttataaggacttcaatggtgcatatacggttagaccgccttgttcatatcgtcaagtcgcacacttatgcttgtgcacagcactcttatgatcttatcctaatatatccccttagtatcttagatcgtatctttactatctttttttggtaccaaatgtaatccagtgtcctagtaataaagtacccttgttctattctc

SEQ ID NO: 24858 - protein, 336 aa, Zea mays subsp. mays
  peptide (1)..(336): Ceres Seq. ID no. 12348977
  misc_feature (1)..(336): NCBI GI NO: 27311243 NR Description: Hypothetical protein
  misc_feature (1)..(333): NCBI GI NO: 18395296 NR Description: expressed protein; protein id: At1g23780
MKLRLRSMQARGGSAAVETHRVDLPPTATLADVKTLLASKLSAAQPVPAESVRLSLNRSEELVSPDPAATLPSLGLASGDLVFFTLSPLTALAPPAQALPRNPSPSSGAAASIAEAADRGKGSKQSGTGDFSSSSLAQAVVVSPSFPVASGTRDVVMEEEAVDATKGWSSFVLRDLKREMDNVGAAEGTAAGRLVAALHAALLDAGFLTAKLTGSHLSLPQGWPSGALKPLTIKYTIPELSSMVSVTEEGKVVVLNYSLMANFVMVYGYVPGAQSEVCRLCLELPGLEPLLYLDGDQLNGVHEKGVHDLWRVLKDEICLPLMISLCQLNGLPCRLA

SEQ ID NO: 24859 - protein, 329 aa, Zea mays subsp. mays
  peptide (1)..(329): Ceres Seq. ID no. 12348978
  misc_feature (1)..(329): NCBI GI NO: 27311243 NR Description: Hypothetical protein
  misc_feature (1)..(326): NCBI GI NO: 18395296 NR Description: expressed protein; protein id: At1g23780
MQARGGSAAVETHRVDLPPTATLADVKTLLASKLSAAQPVPAESVRLSLNRSEELVSPDPAATLPSLGLASGDLVFFTLSPLTALAPPAQALPRNPSPSSGAAASIAEAADRGKGSKQSGTGDFSSSSLAQAVVVSPSFPVASGTRDVVMEEEAVDATKGWSSFVLRDLKREMDNVGAAEGTAAGRLVAALHAALLDAGFLTAKLTGSHLSLPQGWPSGALKPLTIKYTIPELSSMVSVTEEGKVVVLNYSLMANFVMVYGYVPGAQSEVCRLCLELPGLEPLLYLDGDQLNGVHEKGVHDLWRVLKDEICLPLMISLCQLNGLPCRLA

SEQ ID NO: 24860 - protein, 180 aa, Zea mays subsp. mays
  peptide (1)..(180): Ceres Seq. ID no. 12348979
  misc_feature (1)..(180): NCBI GI NO: 27311243 NR Description: Hypothetical protein
  misc_feature (1)..(177): NCBI GI NO: 18395296 NR Description: expressed protein; protein id: At1g23780
MEEEAVDATKGWSSFVLRDLKREMDNVGAAEGTAAGRLVAALHAALLDAGFLTAKLTGSHLSLPQGWPSGALKPLTIKYTIPELSSMVSVTEEGKVVVLNYSLMANFVMVYGYVPGAQSEVCRLCLELPGLEPLLYLDGDQLNGVHEKGVHDLWRVLKDEICLPLMISLCQLNGLPCRLA

SEQ ID NO: 24861 - DNA, 1993 bp, Zea mays subsp. mays
  misc_feature (1)..(1993): Ceres Seq. ID no. 12352173
attagaatagccaggggcctcgctcctctccaccacgtactccactccatccatccatcatcgtctatccatgaagagcttgcaggaggagagggcggcgttggtgccgtcgccgtggccccagcaacagagaaaggacggcggcgagcatgatccggagcagctgatggatgaggatgacggtgacgatgaggaggatctgcaggatgagcagcacacaagaacaattaggacgtcgaccaagacggcggaagcatcgtcatcagcggagcggcgggtgccggcgtggtggaggcggcggcgggcgcagaagctggtgcccaccagaggtgttggcctggtcatcgccggtctcctcgtgctggtcttgctcgtcgtcgtcggcggcggcggcaacaccagtcgtcgtcgctggatccacctcgactatgcatcgtcgtttctgctaggcagcggcggcggcggcggcttgaagcagcatcaatggcctcctcaccacgtcccttcacccgcagcggacctcgtgcccatacccttcagctgcggcggcaacggctcggcatgtccccgtcgtcaaaccgcaacatcacccccctctccgtcgccgtcatcgtcatcgccaccagcagccaccaagtcatcatcgtccaagaataaacaaccccctcctcagtgcccggattacttccgcttcatccactccgacctgtcgccgtggcgcgagacggggatcacgcgcgaggcggtggagcgggggcgccaccgggcggcgttccggctggtggtcgtggacggccgcgcgtacgtggagacgtaccaccgcgtgttccagacgcgtgacaccttcacgcagtggggcatcgcgcagctgctggcgcgctaccccggacgcgtcccggacctggacctcatgttcaactgcgaggacatgcccgaggtcaaggtcaagccgtcggaggagtcgtccgcgccgccgctgttccgctactgcaaggacgactccacggtggacatcgtgttcccggactggtccttctggggctggcccgaggtcaacatccgtccctgggcgccgctgctggaggagatggccgccgagatgggtcgcctgccgtgggcggaccgggagccgtacgcgtactggaagggcaaccccaccgtgtccgccgagcgcgccgacctccgccgctgcaacgactcctcgtcgtccggcggcacgcgcgtgttctggcaggactggggcgccgccatccgggacggcttccgggactccaacctggccaagcagtgccgctaccgctacaagatctacgtgcgtggccggtcctggtcggtcagcctcaagtacatcctcgcctgcgactcgccggtgctgctcatcgccacgcccttcaaggacttcttctcccggggcctcgtcgccggcaggcactactggcccatcgaccccggagcccgcaagtgcgccgacatcaacttcgccgtccacgactggggcaacgcgcacccggagcaggcgcgccggatggcggaggaaggcagcggcttcgcgcgccaccagctcagcatggactacgtctacgactacatgctgcacctgctcacccagtacgccggcctgctccgctacaagcccaccgtgccggagaacgccgtagagctgtgcgccgagaccgtcgcctgccccgctgcgcaccacagcaacaggagggagttcgacttcatgatgcagtccagggagaggtacatcgccgactaccagccctgcacgctgccgccgccctttaccgaccgtcacatcagggagatgacgcgaagagaccaggaggtgcgcgccaacgtgcacaagatgatgaccaccgtcactccatgacgtcaccaattaagggattctcttgttctctatctatctatctatcttgaatatccacttcgttatactacgtcctggtctctgtctctataatattaaaatatcagttttaatggtctt

SEQ ID NO: 24862 - protein, 600 aa, Zea mays subsp. mays
  peptide (1)..(600): Ceres Seq. ID no. 12352174
  misc_feature (198)..(593): Pfam Name: DUF821 Pfam Description: Arabidopsis thaliana protein of unknown function
  misc_feature (25)..(597): NCBI GI NO: 38637028 NR Description: unknown protein
  misc_feature (161)..(593): NCBI GI NO: 15229061 NR Description: putative protein; protein id: At3g48980.1
  misc_feature (170)..(591): NCBI GI NO: 15237842 NR Description: putative protein; protein id: At5g23850.1
  misc_feature (160)..(586): NCBI GI NO: 38346998 NR Description: OSJNBb0039L24.21
  misc_feature (167)..(591): NCBI GI NO: 7486461 NR Description: hypothetical protein At2g45830
  misc_feature (141)..(593): NCBI GI NO: 15222413 NR Description: hypothetical protein; protein id: At1g63420.1
  misc_feature (161)..(591): NCBI GI NO: 15233070 NR Description: putative protein; protein id: At3g61270.1
  misc_feature (228)..(588): NCBI GI NO: 21742339 NR Description: OSJNBb0020O11.18
  misc_feature (141)..(388): NCBI GI NO: 25404907 NR Description: protein F2K11.20 [imported] - Arabidopsis thaliana
  misc_feature (393)..(593): NCBI GI NO: 25404907 NR Description: protein F2K11.20 [imported] - Arabidopsis thaliana
MKSLQEERAALVPSPWPQQQRKDGGEHDPEQLMDEDDGDDEEDLQDEQHTRTIRTSTKTAEASSSAERRVPAWWRRRRAQKLVPTRGVGLVIAGLLVLVLLVVVGGGGNTSRRRWIHLDYASSFLLGSGGGGGLKQHQWPPHHVPSPAADLVPIPFSCGGNGSACPRRQTATSPPSPSPSSSSPPAATKSSSSKNKQPPPQCPDYFRFIHSDLSPWRETGITREAVERGRHRAAFRLVVVDGRAYVETYHRVFQTRDTFTQWGIAQLLARYPGRVPDLDLMFNCEDMPEVKVKPSEESSAPPLFRYCKDDSTVDIVFPDWSFWGWPEVNIRPWAPLLEEMAAEMGRLPWADREPYAYWKGNPTVSAERADLRRCNDSSSSGGTRVFWQDWGAAIRDGFRDSNLAKQCRYRYKIYVRGRSWSVSLKYILACDSPVLLIATPFKDFFSRGLVAGRHYWPIDPGARKCADINFAVHDWGNAHPEQARRMAEEGSGFARHQLSMDYVYDYMLHLLTQYAGLLRYKPTVPENAVELCAETVACPAAHHSNRREFDFMMQSRERYIADYQPCTLPPPFTDRHIREMTRRDQEVRANVHKMMTTVTP

SEQ ID NO: 24863 - protein, 568 aa, Zea mays subsp. mays
  peptide (1)..(568): Ceres Seq. ID no. 12352175
  misc_feature (166)..(561): Pfam Name: DUF821 Pfam Description: Arabidopsis thaliana protein of unknown function
  misc_feature (1)..(565): NCBI GI NO: 38637028 NR Description: unknown protein
  misc_feature (129)..(561): NCBI GI NO: 15229061 NR Description: putative protein; protein id: At3g48980.1
  misc_feature (138)..(559): NCBI GI NO: 15237842 NR Description: putative protein; protein id: At5g23850.1
  misc_feature (128)..(554): NCBI GI NO: 38346998 NR Description: OSJNBb0039L24.21
  misc_feature (135)..(559): NCBI GI NO: 7486461 NR Description: hypothetical protein At2g45830
  misc_feature (109)..(561): NCBI GI NO: 15222413 NR Description: hypothetical protein; protein id: At1g63420.1
  misc_feature (129)..(559): NCBI GI NO: 15233070 NR Description: putative protein; protein id: At3g61270.1
  misc_feature (196)..(556): NCBI GI NO: 21742339 NR Description: OSJNBb0020O11.18
  misc_feature (109)..(356): NCBI GI NO: 25404907 NR Description: protein F2K11.20 [imported] - Arabidopsis thaliana
  misc_feature (361)..(561): NCBI GI NO: 25404907 NR Description: protein F2K11.20 [imported] - Arabidopsis thaliana
MDEDDGDDEEDLQDEQHTRTIRTSTKTAEASSSAERRVPAWWRRRRAQKLVPTRGVGLVIAGLLVLVLLVVVGGGGNTSRRRWIHLDYASSFLLGSGGGGGLKQHQWPPHHVPSPAADLVPIPFSCGGNGSACPRRQTATSPPSPSPSSSSPPAATKSSSSKNKQPPPQCPDYFRFIHSDLSPWRETGITREAVERGRHRAAFRLVVVDGRAYVETYHRVFQTRDTFTQWGIAQLLARYPGRVPDLDLMFNCEDMPEVKVKPSEESSAPPLFRYCKDDSTVDIVFPDWSFWGWPEVNIRPWAPLLEEMAAEMGRLPWADREPYAYWKGNPTVSAERADLRRCNDSSSSGGTRVFWQDWGAAIRDGFRDSNLAKQCRYRYKIYVRGRSWSVSLKYILACDSPVLLIATPFKDFFSRGLVAGRHYWPIDPGARKCADINFAVHDWGNAHPEQARRMAEEGSGFARHQLSMDYVYDYMLHLLTQYAGLLRYKPTVPENAVELCAETVACPAAHHSNRREFDFMMQSRERYIADYQPCTLPPPFTDRHIREMTRRDQEVRANVHKMMTTVTP

SEQ ID NO: 24864 - protein, 320 aa, Zea mays subsp. mays
  peptide (1)..(320): Ceres Seq. ID no. 12352176
  misc_feature (1)..(313): Pfam Name: DUF821 Pfam Description: Arabidopsis thaliana protein of unknown function
  misc_feature (1)..(317): NCBI GI NO: 38637028 NR Description: unknown protein
  misc_feature (1)..(313): NCBI GI NO: 15229061 NR Description: putative protein; protein id: At3g48980.1
  misc_feature (1)..(311): NCBI GI NO: 15237842 NR Description: putative protein; protein id: At5g23850.1
  misc_feature (1)..(306): NCBI GI NO: 38346998 NR Description: OSJNBb0039L24.21
  misc_feature (1)..(311): NCBI GI NO: 7486461 NR Description: hypothetical protein At2g45830
  misc_feature (1)..(313): NCBI GI NO: 15222413 NR Description: hypothetical protein; protein id: At1g63420.1
  misc_feature (1)..(311): NCBI GI NO: 15233070 NR Description: putative protein; protein id: At3g61270.1
  misc_feature (1)..(308): NCBI GI NO: 21742339 NR Description: OSJNBb0020O11.18
  misc_feature (1)..(108): NCBI GI NO: 25404907 NR Description: protein F2K11.20 [imported] - Arabidopsis thaliana
  misc_feature (113)..(313): NCBI GI NO: 25404907 NR Description: protein F2K11.20 [imported] - Arabidopsis thaliana
MFNCEDMPEVKVKPSEESSAPPLFRYCKDDSTVDIVFPDWSFWGWPEVNIRPWAPLLEEMAAEMGRLPWADREPYAYWKGNPTVSAERADLRRCNDSSSSGGTRVFWQDWGAAIRDGFRDSNLAKQCRYRYKIYVRGRSWSVSLKYILACDSPVLLIATPFKDFFSRGLVAGRHYWPIDPGARKCADINFAVHDWGNAHPEQARRMAEEGSGFARHQLSMDYVYDYMLHLLTQYAGLLRYKPTVPENAVELCAETVACPAAHHSNRREFDFMMQSRERYIADYQPCTLPPPFTDRHIREMTRRDQEVRANVHKMMTTVTP

SEQ ID NO: 24865 - DNA, 1676 bp, Zea mays subsp. mays
  misc_feature (1)..(1676): Ceres Seq. ID no. 12357283
cagatcttatcccttccagttccaggcagcatccccagcctgacgaaggaattgaggacgctcgagctcgagctacgtcaggatccaacaccaccatggttacgggaacaagaggacgttcgtgctctacccgtcgctgggcgtgggccacctgatcccgatggtggagctggccaagcacctcttgcgccacggccacggcgcgctcatcgccgtggtcaacccgcccgacaccgacgccgtgtcggccgccgcggtggagcgcctcgcggcggccaacccggccatcgcgttccgcctcctgccggtcccggccagcccggacgccggcgcggactgggtgaagcgcgacctggacacgctccggctcgccaaccccgtgctccgggacttcctgctccggtcccagcccgcagccgacgccgacgcgctcatcctcgacatgttctgcgtcgacgcgctcgacgtcgcggcggagctcggcgtcccggcctacttcttcttcgcctccgcggcgggggacctcgccatgttcctcaacctgccgtacctctaccccaccctgccgtcgttcagggacatgggcgaggcgccggtgcgctgccccggcatgccgccggtccgggcgatggacatgccgctgacggtgcaggacagggacagcgaccggaccaaggtccggatgtaccagttccgccgcatcccggaggggaggggcgtgctggtcaacagcttcgcctggctggagcccagggcactgagagcgctcggcgacggcgtctgcgtgcccggccgcccgacgccgagggtcttctgcgtcgggccactggtcaacgacggcagcagcacggcggggggcggggggaggcacgagtgcctggcgtggctggacgcgcagcctaagcggagcgtcgtgttcctctgcttcggcagcaagggctccttccccgccgcgcagttacaggagatcgcccacgggctggagagctccggccaccggttcctgtgggccgtgaggagcccgccggaagaaccggacacggacctggggaagctgcttcccgaagggttcctggacaggaacagagacagaggcatggtggtgaaggactgggtgccacaggcagaggtggtgcggcacgaggcggtccgcgcgttcgtcacgcactgcggctggaactccacgctcgaggccatcatgtctggcctgcccatgatatgctggccgctgtacgcggagcaggggctcaacaaggtgttcatggtggaggagtggaggatcggggtggagctgcgcgggtacgaaaagttcgtcaaggcggaggagctggaagcgaaggtcagactggtgatggaggctgaggaagggaggatcctccgggagaggctcgcggtggcgagggagaaggcgttgggggctactaaggaaggcgggtcttctgaagtggcattcgcggagttctttggagatttggacaagagcagctctccgtcggtaaacggagaatgcgattgaattgatcactggtgtgctggtgtggcagatggactgcgaacgtatatatactttaggattcaatatcacttagtattttgacagtacgagactaaaatattgcatctgtggtatgggaataaaattggattcaagcagagcgccacttgcgttgcgtgct

SEQ ID NO: 24866 - protein, 451 aa, Zea mays subsp. mays
  peptide (1)..(451): Ceres Seq. ID no. 12357284
  misc_feature (1)..(438): Pfam Name: Pfam Description:  UDP-glucoronosyl and UDP-glucosyl transferase
  misc_feature (1)..(445): NCBI GI NO: 34910222 NR Description: putative flavonol glucosyltransferase
  misc_feature (1)..(438): NCBI GI NO: 34910228 NR Description: putative flavonol glucosyltransferase
  misc_feature (1)..(438): NCBI GI NO: 34910204 NR Description: putative flavonol glucosyltransferase
  misc_feature (1)..(438): NCBI GI NO: 34910218 NR Description: putative flavonol glucosyltransferase
  misc_feature (1)..(439): NCBI GI NO: 34910206 NR Description: putative flavonol glucosyltransferase
  misc_feature (1)..(438): NCBI GI NO: 34908644 NR Description: putative flavonol 3-O-glucosyltransferase
  misc_feature (1)..(432): NCBI GI NO: 22535568 NR Description: putative glucosyltransferase
  misc_feature (1)..(430): NCBI GI NO: 21593785 NR Description: putative glucosyltransferase
  misc_feature (1)..(443): NCBI GI NO: 34394683 NR Description: putative flavonol 3-O-glucosyltransferase
  misc_feature (1)..(430): NCBI GI NO: 18401158 NR Description: putative glucosyltransferase
MVELAKHLLRHGHGALIAVVNPPDTDAVSAAAVERLAAANPAIAFRLLPVPASPDAGADWVKRDLDTLRLANPVLRDFLLRSQPAADADALILDMFCVDALDVAAELGVPAYFFFASAAGDLAMFLNLPYLYPTLPSFRDMGEAPVRCPGMPPVRAMDMPLTVQDRDSDRTKVRMYQFRRIPEGRGVLVNSFAWLEPRALRALGDGVCVPGRPTPRVFCVGPLVNDGSSTAGGGGRHECLAWLDAQPKRSVVFLCFGSKGSFPAAQLQEIAHGLESSGHRFLWAVRSPPEEPDTDLGKLLPEGFLDRNRDRGMVVKDWVPQAEVVRHEAVRAFVTHCGWNSTLEAIMSGLPMICWPLYAEQGLNKVFMVEEWRIGVELRGYEKFVKAEELEAKVRLVMEAEEGRILRERLAVAREKALGATKEGGSSEVAFAEFFGDLDKSSSPSVNGECD

SEQ ID NO: 24867 - protein, 357 aa, Zea mays subsp. mays
  peptide (1)..(357): Ceres Seq. ID no. 12357285
  misc_feature (1)..(344): Pfam Name: Pfam Description:  UDP-glucoronosyl and UDP-glucosyl transferase
  misc_feature (1)..(351): NCBI GI NO: 34910222 NR Description: putative flavonol glucosyltransferase
  misc_feature (1)..(344): NCBI GI NO: 34910228 NR Description: putative flavonol glucosyltransferase
  misc_feature (1)..(344): NCBI GI NO: 34910204 NR Description: putative flavonol glucosyltransferase
  misc_feature (1)..(344): NCBI GI NO: 34910218 NR Description: putative flavonol glucosyltransferase
  misc_feature (1)..(345): NCBI GI NO: 34910206 NR Description: putative flavonol glucosyltransferase
  misc_feature (1)..(344): NCBI GI NO: 34908644 NR Description: putative flavonol 3-O-glucosyltransferase
  misc_feature (1)..(338): NCBI GI NO: 22535568 NR Description: putative glucosyltransferase
  misc_feature (1)..(336): NCBI GI NO: 21593785 NR Description: putative glucosyltransferase
  misc_feature (1)..(349): NCBI GI NO: 34394683 NR Description: putative flavonol 3-O-glucosyltransferase
  misc_feature (1)..(336): NCBI GI NO: 18401158 NR Description: putative glucosyltransferase
MFCVDALDVAAELGVPAYFFFASAAGDLAMFLNLPYLYPTLPSFRDMGEAPVRCPGMPPVRAMDMPLTVQDRDSDRTKVRMYQFRRIPEGRGVLVNSFAWLEPRALRALGDGVCVPGRPTPRVFCVGPLVNDGSSTAGGGGRHECLAWLDAQPKRSVVFLCFGSKGSFPAAQLQEIAHGLESSGHRFLWAVRSPPEEPDTDLGKLLPEGFLDRNRDRGMVVKDWVPQAEVVRHEAVRAFVTHCGWNSTLEAIMSGLPMICWPLYAEQGLNKVFMVEEWRIGVELRGYEKFVKAEELEAKVRLVMEAEEGRILRERLAVAREKALGATKEGGSSEVAFAEFFGDLDKSSSPSVNGECD

SEQ ID NO: 24868 - protein, 328 aa, Zea mays subsp. mays
  peptide (1)..(328): Ceres Seq. ID no. 12357286
  misc_feature (1)..(315): Pfam Name: Pfam Description:  UDP-glucoronosyl and UDP-glucosyl transferase
  misc_feature (1)..(322): NCBI GI NO: 34910222 NR Description: putative flavonol glucosyltransferase
  misc_feature (1)..(315): NCBI GI NO: 34910228 NR Description: putative flavonol glucosyltransferase
  misc_feature (1)..(315): NCBI GI NO: 34910204 NR Description: putative flavonol glucosyltransferase
  misc_feature (1)..(315): NCBI GI NO: 34910218 NR Description: putative flavonol glucosyltransferase
  misc_feature (1)..(316): NCBI GI NO: 34910206 NR Description: putative flavonol glucosyltransferase
  misc_feature (1)..(315): NCBI GI NO: 34908644 NR Description: putative flavonol 3-O-glucosyltransferase
  misc_feature (1)..(309): NCBI GI NO: 22535568 NR Description: putative glucosyltransferase
  misc_feature (1)..(307): NCBI GI NO: 21593785 NR Description: putative glucosyltransferase
  misc_feature (1)..(320): NCBI GI NO: 34394683 NR Description: putative flavonol 3-O-glucosyltransferase
  misc_feature (1)..(307): NCBI GI NO: 18401158 NR Description: putative glucosyltransferase
MFLNLPYLYPTLPSFRDMGEAPVRCPGMPPVRAMDMPLTVQDRDSDRTKVRMYQFRRIPEGRGVLVNSFAWLEPRALRALGDGVCVPGRPTPRVFCVGPLVNDGSSTAGGGGRHECLAWLDAQPKRSVVFLCFGSKGSFPAAQLQEIAHGLESSGHRFLWAVRSPPEEPDTDLGKLLPEGFLDRNRDRGMVVKDWVPQAEVVRHEAVRAFVTHCGWNSTLEAIMSGLPMICWPLYAEQGLNKVFMVEEWRIGVELRGYEKFVKAEELEAKVRLVMEAEEGRILRERLAVAREKALGATKEGGSSEVAFAEFFGDLDKSSSPSVNGECD

SEQ ID NO: 24869 - DNA, 914 bp, Zea mays subsp. mays
  misc_feature (1)..(914): Ceres Seq. ID no. 12352193
atcccggggcacgaaaccctaactgaacccatggcgctctccgccgctcgccggctctccaccaccgcgtcctcctcctccgtcgccgaagcgccgccaaagctctcttcgctgttccagaacccgaagcctcgaccgctgcctgtccgcggcgtcgaggagccgcggcggggggccaggcccaggccgaggcagccctgggaggaggaggcgggggcgctgctgctgcggctccacaaggggaggtacctcccgggccccgacctctcgtcggcgccgcacgctgtctcacccgacgccgtcaagaccgccgccgagtggttcgggcatgaccaccagcccgtcgccaaatggctgtcagggagtgatttgaagaagcttgccttgtttgggtgtcccactgttgagcgaagaacggtttttgcatcaaaaagattaagagccttcttcaacatccaggaagacaaaatatgcggttcctgtaaactgagaagttcgtgcaagtttgtgaaccaggaagtggccaggcataatagagtgattctatcagatacgatgagaattatctccttgtttgtactggacgcttgcccacaagagctcgagattaccgctgagttaaaagccagtgtctgcaagctgctaaaggacgccataaatctcagcagttaactgctgagcattacggagcagaagtttgctagttttcttgtccttgtagttctaatagcgtgctgtcagcatttatctggacttatggaggaaattgccgaggcccatgtttgacgttgcgctcgcaatcgctccctgtgaaggttggagtggtgaaccccagcgacttccttctgatccgtgttttcttttgtgcaactaatatgaagatgaagtacagagtatgtaaaaacttaagatgc

SEQ ID NO: 24870 - protein, 223 aa, Zea mays subsp. mays
  peptide (1)..(223): Ceres Seq. ID no. 12352194
  misc_feature (11)..(202): NCBI GI NO: 34903722 NR Description: P0489A05.27
  misc_feature (78)..(222): NCBI GI NO: 18404478 NR Description: expressed protein; protein id: At1g53460
  misc_feature (78)..(222): NCBI GI NO: 21536664 NR Description: unknown [Arabidopsis thaliana]
  misc_feature (12)..(220): NCBI GI NO: 13324787 NR Description: hypothetical protein [Oryza sativa]
  misc_feature (48)..(219): NCBI GI NO: 21593408 NR Description: unknown [Arabidopsis thaliana]
  misc_feature (50)..(219): NCBI GI NO: 25372841 NR Description: hypothetical protein F5A18.17
  misc_feature (50)..(219): NCBI GI NO: 18409643 NR Description: expressed protein; protein id: At1g70650
  misc_feature (101)..(196): NCBI GI NO: 15221905 NR Description: hypothetical protein; protein id: At1g48570
  misc_feature (100)..(223): NCBI GI NO: 15293147 NR Description: unknown protein [Arabidopsis thaliana]
  misc_feature (100)..(223): NCBI GI NO: 18405190 NR Description: expressed protein; protein id: At1g55040
IPGHETLTEPMALSAARRLSTTASSSSVAEAPPKLSSLFQNPKPRPLPVRGVEEPRRGARPRPRQPWEEEAGALLLRLHKGRYLPGPDLSSAPHAVSPDAVKTAAEWFGHDHQPVAKWLSGSDLKKLALFGCPTVERRTVFASKRLRAFFNIQEDKICGSCKLRSSCKFVNQEVARHNRVILSDTMRIISLFVLDACPQELEITAELKASVCKLLKDAINLSS

SEQ ID NO: 24871 - protein, 213 aa, Zea mays subsp. mays
  peptide (1)..(213): Ceres Seq. ID no. 12352195
  misc_feature (1)..(192): NCBI GI NO: 34903722 NR Description: P0489A05.27
  misc_feature (68)..(212): NCBI GI NO: 18404478 NR Description: expressed protein; protein id: At1g53460
  misc_feature (68)..(212): NCBI GI NO: 21536664 NR Description: unknown [Arabidopsis thaliana]
  misc_feature (2)..(210): NCBI GI NO: 13324787 NR Description: hypothetical protein [Oryza sativa]
  misc_feature (38)..(209): NCBI GI NO: 21593408 NR Description: unknown [Arabidopsis thaliana]
  misc_feature (40)..(209): NCBI GI NO: 25372841 NR Description: hypothetical protein F5A18.17
  misc_feature (40)..(209): NCBI GI NO: 18409643 NR Description: expressed protein; protein id: At1g70650
  misc_feature (91)..(186): NCBI GI NO: 15221905 NR Description: hypothetical protein; protein id: At1g48570
  misc_feature (90)..(213): NCBI GI NO: 15293147 NR Description: unknown protein [Arabidopsis thaliana]
  misc_feature (90)..(213): NCBI GI NO: 18405190 NR Description: expressed protein; protein id: At1g55040
MALSAARRLSTTASSSSVAEAPPKLSSLFQNPKPRPLPVRGVEEPRRGARPRPRQPWEEEAGALLLRLHKGRYLPGPDLSSAPHAVSPDAVKTAAEWFGHDHQPVAKWLSGSDLKKLALFGCPTVERRTVFASKRLRAFFNIQEDKICGSCKLRSSCKFVNQEVARHNRVILSDTMRIISLFVLDACPQELEITAELKASVCKLLKDAINLSS

SEQ ID NO: 24872 - DNA, 1474 bp, Zea mays subsp. mays
  misc_feature (1)..(1474): Ceres Seq. ID no. 12410376
agtcgaacacagagtcacttcgccacgaacaaaagcgcatcgatctcgctgtcgtcactcctcgtcacccagccacgaacagaggcaccacccagcatggccctgcaggcggcgctcctcccatccaccctctcatccgtccccaagaagtgcagcatcgccgtcgcggcgaaggacacggcattccttagcgtatcccagaagaaggtgcaggcggcgtcgctgtcggtgagaacgcgggtggcgacgacggcgcctgtggccacgccggggtccagcacggcggccaaggatgggaagaagaccgtgcggcagggcgtggtggtgatcacgggcgcgtcgtcggggttgggcctggcggcggccaaggcgctggcggagaccggcaagtggcacgtggtgatggcctgccgcgacttcctcaaggcggccaaggcggccaagggcgccggcatggcggacggcagctacaccatcatgcacctggacctggcctccctcgacagcgtgcggcagttcgtggacagcttccggcgcgccggcatgccgctcgactcgctcgtctgcaacgccgccatctaccggcccacggcaaggacgccgacgttcacggcggacggatacgagatgagcgtcggcgtcaaccacctgggccacttcctcctggcgcgcctgctcctggacgacatgcagaagtccgactacccgtcccgccgcctcatcatcctcggctccatcaccggcaacaccaacacgctggccgggaacatcccgcccaaggccgggctgggcgacctccgcggcctcgcggcggggctgcgcggccagaacggctctgccatgatcgacggctccgagagcttcgacggcgccaaggcgtacaaggacagcaagatctgcaacatgctcaccatgcaggagctgcaccggcggtaccacgaggagacgggcatcacgttcgcgtcgctctacccggggtgcatcgccaccacgggggctgttccgcgagcacatcccgctgttccgcctgctcttcccgcctttccagaagttcgtcaccaagggcttcgtgtcggaggcggagtccggcaagaggctggcgcatgtggtcagcgaccccagcctcaccaagtcgggggtgtactggagctggaacaaggactcggcgtcgttcgagaaccagctgtcgcaggaggccagcgatccggagaaggccaagaagctctgggagatcagcgagaagctcgtggggcttgcctgagctcgccggcacggcgacggcgacatgatgactctgtcgagcagaggagctttcgcttcgttgtattatgtgtaccattagcatccattttgtttgtttctagaagttggtaatgaccgtcggagaagagcctgtaattgttcgatcatgtattattgcttacaaaatttttttcaaaaaccgatgaaataaaacaacaggcttaacatctct

SEQ ID NO: 24873 - protein, 457 aa, Zea mays subsp. mays
  peptide (1)..(457): Ceres Seq. ID no. 12410377
  misc_feature (33)..(355): NCBI GI NO: 129708 NR Description: Protochlorophyllide reductase A
  misc_feature (33)..(355): NCBI GI NO: 10720235 NR Description: Protochlorophyllide reductase A
  misc_feature (107)..(355): NCBI GI NO: 129707 NR Description: Protochlorophyllide reductase
  misc_feature (33)..(355): NCBI GI NO: 10720233 NR Description: Protochlorophyllide reductase
  misc_feature (33)..(355): NCBI GI NO: 266742 NR Description: Protochlorophyllide reductase
  misc_feature (33)..(355): NCBI GI NO: 81946 NR Description: protochlorophyllide reductase (EC 1
  misc_feature (33)..(355): NCBI GI NO: 9587209 NR Description: NADPH-protochlorophyllide oxidoreductase
  misc_feature (33)..(355): NCBI GI NO: 21068893 NR Description: NADPH:protochlorophyllide oxidoreductase
  misc_feature (33)..(355): NCBI GI NO: 10720220 NR Description: Protochlorophyllide reductase
  misc_feature (33)..(355): NCBI GI NO: 10720236 NR Description: Protochlorophyllide reductase B
SRTQSHFATNKSASISLSSLLVTQPRTEAPPSMALQAALLPSTLSSVPKKCSIAVAAKDTAFLSVSQKKVQAASLSVRTRVATTAPVATPGSSTAAKDGKKTVRQGVVVITGASSGLGLAAAKALAETGKWHVVMACRDFLKAAKAAKGAGMADGSYTIMHLDLASLDSVRQFVDSFRRAGMPLDSLVCNAAIYRPTARTPTFTADGYEMSVGVNHLGHFLLARLLLDDMQKSDYPSRRLIILGSITGNTNTLAGNIPPKAGLGDLRGLAAGLRGQNGSAMIDGSESFDGAKAYKDSKICNMLTMQELHRRYHEETGITFASLYPGCIATTGAVPRAHPAVPPALPAFPEVRHQGLRVGGGVRQEAGACGQRPQPHQVGGVLELEQGLGVVREPAVAGGQRSGEGQEALGDQREARGACLSSPARRRRHDDSVEQRSFRFVVLCVPLASILFVSRSW

SEQ ID NO: 24874 - protein, 425 aa, Zea mays subsp. mays
  peptide (1)..(425): Ceres Seq. ID no. 12410378
  misc_feature (1)..(323): NCBI GI NO: 129708 NR Description: Protochlorophyllide reductase A
  misc_feature (1)..(323): NCBI GI NO: 10720235 NR Description: Protochlorophyllide reductase A
  misc_feature (75)..(323): NCBI GI NO: 129707 NR Description: Protochlorophyllide reductase
  misc_feature (1)..(323): NCBI GI NO: 10720233 NR Description: Protochlorophyllide reductase
  misc_feature (1)..(323): NCBI GI NO: 266742 NR Description: Protochlorophyllide reductase
  misc_feature (1)..(323): NCBI GI NO: 81946 NR Description: protochlorophyllide reductase (EC 1
  misc_feature (1)..(323): NCBI GI NO: 9587209 NR Description: NADPH-protochlorophyllide oxidoreductase
  misc_feature (1)..(323): NCBI GI NO: 21068893 NR Description: NADPH:protochlorophyllide oxidoreductase
  misc_feature (1)..(323): NCBI GI NO: 10720220 NR Description: Protochlorophyllide reductase
  misc_feature (1)..(323): NCBI GI NO: 10720236 NR Description: Protochlorophyllide reductase B
MALQAALLPSTLSSVPKKCSIAVAAKDTAFLSVSQKKVQAASLSVRTRVATTAPVATPGSSTAAKDGKKTVRQGVVVITGASSGLGLAAAKALAETGKWHVVMACRDFLKAAKAAKGAGMADGSYTIMHLDLASLDSVRQFVDSFRRAGMPLDSLVCNAAIYRPTARTPTFTADGYEMSVGVNHLGHFLLARLLLDDMQKSDYPSRRLIILGSITGNTNTLAGNIPPKAGLGDLRGLAAGLRGQNGSAMIDGSESFDGAKAYKDSKICNMLTMQELHRRYHEETGITFASLYPGCIATTGAVPRAHPAVPPALPAFPEVRHQGLRVGGGVRQEAGACGQRPQPHQVGGVLELEQGLGVVREPAVAGGQRSGEGQEALGDQREARGACLSSPARRRRHDDSVEQRSFRFVVLCVPLASILFVSRSW

SEQ ID NO: 24875 - protein, 323 aa, Zea mays subsp. mays
  peptide (1)..(323): Ceres Seq. ID no. 12410379
  misc_feature (1)..(221): NCBI GI NO: 129708 NR Description: Protochlorophyllide reductase A
  misc_feature (1)..(221): NCBI GI NO: 10720235 NR Description: Protochlorophyllide reductase A
  misc_feature (1)..(221): NCBI GI NO: 129707 NR Description: Protochlorophyllide reductase
  misc_feature (1)..(221): NCBI GI NO: 10720233 NR Description: Protochlorophyllide reductase
  misc_feature (1)..(221): NCBI GI NO: 266742 NR Description: Protochlorophyllide reductase
  misc_feature (1)..(221): NCBI GI NO: 81946 NR Description: protochlorophyllide reductase (EC 1
  misc_feature (1)..(221): NCBI GI NO: 9587209 NR Description: NADPH-protochlorophyllide oxidoreductase
  misc_feature (1)..(221): NCBI GI NO: 21068893 NR Description: NADPH:protochlorophyllide oxidoreductase
  misc_feature (1)..(221): NCBI GI NO: 10720220 NR Description: Protochlorophyllide reductase
  misc_feature (1)..(221): NCBI GI NO: 10720236 NR Description: Protochlorophyllide reductase B
MACRDFLKAAKAAKGAGMADGSYTIMHLDLASLDSVRQFVDSFRRAGMPLDSLVCNAAIYRPTARTPTFTADGYEMSVGVNHLGHFLLARLLLDDMQKSDYPSRRLIILGSITGNTNTLAGNIPPKAGLGDLRGLAAGLRGQNGSAMIDGSESFDGAKAYKDSKICNMLTMQELHRRYHEETGITFASLYPGCIATTGAVPRAHPAVPPALPAFPEVRHQGLRVGGGVRQEAGACGQRPQPHQVGGVLELEQGLGVVREPAVAGGQRSGEGQEALGDQREARGACLSSPARRRRHDDSVEQRSFRFVVLCVPLASILFVSRSW

SEQ ID NO: 24876 - DNA, 669 bp, Zea mays subsp. mays
  misc_feature (1)..(669): Ceres Seq. ID no. 12367126
agtacttactcactctccccccacccgcgccaggccagacagactaactgagcacccgctgcaaggagtccgcgcccatggcgagcaccaacatggcgtcggccacctcgcggttcatgctggccgcgggcgtgcccaccggcagcagcggcggccgcgtcaacttcgcctcggcgcccaaccggcttggcaggaggctcgtggcccgggccgacaacgaggccgccgcagctgaggcggcggaaggggagggtgccgtggccaccaagcccaaggccgagaagccgccgccgatcgggcccaataggggcgccaaggtgaagatccttaggagggagtcctactggtacaacgggatcggcaacgtcgtcaccgtcgatcaggatcccaacacccgctacccggtggttgtgcggttcaacaaggtgaactacgccggcgtgtccaccaacaactacgccttggacgaggtcttagaggtgaaatgagtggggccggccggctcaagggctccgcgctagctaccgtgtgattgatttgtagtagttgtgaaatgaggctgtgaagctgcatgctgtgctggctagcgtcacaacatcgatcctatgtgtaatagcataatccacataatcatatcatgtaattgcttgctttattcaccgtgtactc

SEQ ID NO: 24877 - protein, 136 aa, Zea mays subsp. mays
  peptide (1)..(136): Ceres Seq. ID no. 12367127
  misc_feature (75)..(135): Pfam Name: Pfam Description:  Photosystem I reaction centre subunit IV / PsaE
  misc_feature (1)..(135): NCBI GI NO: 131176 NR Description: Photosystem I reaction center subunit IV
  misc_feature (1)..(136): NCBI GI NO: 34394725 NR Description: putative Photosystem I reaction center subunit IV
  misc_feature (1)..(136): NCBI GI NO: 2499967 NR Description: Photosystem I reaction center subunit IV B
  misc_feature (1)..(136): NCBI GI NO: 26986114 NR Description: putative photosystem I reaction centre subunit IV
  misc_feature (1)..(136): NCBI GI NO: 2499966 NR Description: Photosystem I reaction center subunit IV A
  misc_feature (1)..(136): NCBI GI NO: 7443145 NR Description: photosystem I chain IV - wood tobacco
  misc_feature (6)..(135): NCBI GI NO: 24030202 NR Description: putative photosystem I subunit PSI-E protein
  misc_feature (6)..(135): NCBI GI NO: 30688100 NR Description: photosystem I subunit PSI-E - like protein
  misc_feature (29)..(135): NCBI GI NO: 131178 NR Description: Photosystem I reaction center subunit IV
  misc_feature (6)..(136): NCBI GI NO: 15225331 NR Description: putative photosystem I reaction center subunit IV
MASTNMASATSRFMLAAGVPTGSSGGRVNFASAPNRLGRRLVARADNEAAAAEAAEGEGAVATKPKAEKPPPIGPNRGAKVKILRRESYWYNGIGNVVTVDQDPNTRYPVVVRFNKVNYAGVSTNNYALDEVLEVK

SEQ ID NO: 24878 - protein, 131 aa, Zea mays subsp. mays
  peptide (1)..(131): Ceres Seq. ID no. 12367128
  misc_feature (70)..(130): Pfam Name: Pfam Description:  Photosystem I reaction centre subunit IV / PsaE
  misc_feature (1)..(130): NCBI GI NO: 131176 NR Description: Photosystem I reaction center subunit IV
  misc_feature (1)..(131): NCBI GI NO: 34394725 NR Description: putative Photosystem I reaction center subunit IV
  misc_feature (1)..(131): NCBI GI NO: 2499967 NR Description: Photosystem I reaction center subunit IV B
  misc_feature (1)..(131): NCBI GI NO: 26986114 NR Description: putative photosystem I reaction centre subunit IV
  misc_feature (1)..(131): NCBI GI NO: 2499966 NR Description: Photosystem I reaction center subunit IV A
  misc_feature (1)..(131): NCBI GI NO: 7443145 NR Description: photosystem I chain IV - wood tobacco
  misc_feature (1)..(130): NCBI GI NO: 24030202 NR Description: putative photosystem I subunit PSI-E protein
  misc_feature (1)..(130): NCBI GI NO: 30688100 NR Description: photosystem I subunit PSI-E - like protein
  misc_feature (24)..(130): NCBI GI NO: 131178 NR Description: Photosystem I reaction center subunit IV
  misc_feature (1)..(131): NCBI GI NO: 15225331 NR Description: putative photosystem I reaction center subunit IV
MASATSRFMLAAGVPTGSSGGRVNFASAPNRLGRRLVARADNEAAAAEAAEGEGAVATKPKAEKPPPIGPNRGAKVKILRRESYWYNGIGNVVTVDQDPNTRYPVVVRFNKVNYAGVSTNNYALDEVLEVK

SEQ ID NO: 24879 - protein, 123 aa, Zea mays subsp. mays
  peptide (1)..(123): Ceres Seq. ID no. 12367129
  misc_feature (62)..(122): Pfam Name: Pfam Description:  Photosystem I reaction centre subunit IV / PsaE
  misc_feature (1)..(122): NCBI GI NO: 131176 NR Description: Photosystem I reaction center subunit IV
  misc_feature (1)..(123): NCBI GI NO: 34394725 NR Description: putative Photosystem I reaction center subunit IV
  misc_feature (1)..(123): NCBI GI NO: 2499967 NR Description: Photosystem I reaction center subunit IV B
  misc_feature (1)..(123): NCBI GI NO: 26986114 NR Description: putative photosystem I reaction centre subunit IV
  misc_feature (1)..(123): NCBI GI NO: 2499966 NR Description: Photosystem I reaction center subunit IV A
  misc_feature (1)..(123): NCBI GI NO: 7443145 NR Description: photosystem I chain IV - wood tobacco
  misc_feature (1)..(122): NCBI GI NO: 24030202 NR Description: putative photosystem I subunit PSI-E protein
  misc_feature (1)..(122): NCBI GI NO: 30688100 NR Description: photosystem I subunit PSI-E - like protein
  misc_feature (16)..(122): NCBI GI NO: 131178 NR Description: Photosystem I reaction center subunit IV
  misc_feature (1)..(123): NCBI GI NO: 15225331 NR Description: putative photosystem I reaction center subunit IV
MLAAGVPTGSSGGRVNFASAPNRLGRRLVARADNEAAAAEAAEGEGAVATKPKAEKPPPIGPNRGAKVKILRRESYWYNGIGNVVTVDQDPNTRYPVVVRFNKVNYAGVSTNNYALDEVLEVK

SEQ ID NO: 24880 - DNA, 1377 bp, Zea mays subsp. mays
  misc_feature (1)..(1377): Ceres Seq. ID no. 12345470
aaaacaaagcttttgttgtctctcacctactattcttcttgcctcctccctccaccagcatccctgagtctgccatgggcaactgctggggaaccaagattagctctgacaccgccgcctccccttccacatcaccgttccctcgcagcgagggtgagattctccggtgtgccaatgtcaggagcttcaccttgacggagctgatgacctccacccggaacttccggcccgacagcgtcctcggcgagggaggcttcggctccgtcttcaaggggtggatcgacgagaccaccttcgccccggccaggcccggcacagggatggtcatcgctgtcaagaagctcaaccagcagggattgcaggggcacagggagtggctggctgaagtcaactacctgggccagttgtctcaccccagtctcgtaaggctcgtagggtactgcctccaagacgagcagcgccttctcgtctacgagttcatgccgcgaggaagcttggagaaccatcttttcaggacctcacgtttccagccgctctcctggaacctacgaatcaaagtttgccctgggagcagccaagggccttgcgttcttgcacagcgacaaggccagagttatctaccgagatttcaagacatccaacgtgctcctggattcgacttttgtgtgtgttttcagaactacaacgccaagctgtctgacttcggtttggcaaaggacgggccaaccggcgaccagagccacgtgtccaccagagtcatgggcacctacggatatgctgctccggaatatctcgcaacaggtcatctcacgccgaagagcgacgtctacagcttcggcgtcgtgctgctggagatgctgtcgggccgccgcgccatggacaagaaccgcccggccaccgagcacaacctcgtcgactgggcgcgcccctacctcagcagcaagcgccgcgtctcccgcatcctggacgaccgcctggccggccactacccgctgccggccgtccaaagggcggcagcgctggcgctgcagtgcctctccgaggactccaggaagaggccaaccatggaccaggtcgtcgcgtcgctgcagcaactcacagccgcccaggaccacgacgatgcccaccggtcgtcgcgcaggtacccaaaagatcaccgtcaggctgcggcgctcaacaaccggaatctgaacgctcatcgccgcctgtccgccttgcctctacccgagtgaactaccatattcatattcgatcatcttttgtatcttcacaaaagtagtatgtaaatccgtggtgaagacctgggtaattagtgataaaacacaacttgattgttgattagatgtaaatggtggcttcaacttaaccggtttatgg

SEQ ID NO: 24881 - protein, 409 aa, Zea mays subsp. mays
  peptide (1)..(409): Ceres Seq. ID no. 12345471
  misc_feature (30)..(408): NCBI GI NO: 34906046 NR Description: putative serine/threonine-specific protein kinase
  misc_feature (17)..(392): NCBI GI NO: 14719339 NR Description: putative protein kinase [Oryza sativa]
  misc_feature (17)..(365): NCBI GI NO: 166809 NR Description: protein kinase
  misc_feature (17)..(365): NCBI GI NO: 15241749 NR Description: serine/threonine-specific protein kinase NAK
  misc_feature (14)..(380): NCBI GI NO: 34897424 NR Description: putative protein kinase
  misc_feature (14)..(365): NCBI GI NO: 15227001 NR Description: putative protein kinase; protein id: At2g28930.1
  misc_feature (38)..(380): NCBI GI NO: 15222437 NR Description: protein kinase APK1A; protein id: At1g07570.1
  misc_feature (38)..(267): NCBI GI NO: 8778537 NR Description: F22G5.5 [Arabidopsis thaliana]
  misc_feature (267)..(380): NCBI GI NO: 8778537 NR Description: F22G5.5 [Arabidopsis thaliana]
  misc_feature (29)..(406): NCBI GI NO: 15225520 NR Description: putative protein kinase; protein id: At2g39660
NKAFVVSHLLFFLPPPSTSIPESAMGNCWGTKISSDTAASPSTSPFPRSEGEILRCANVRSFTLTELMTSTRNFRPDSVLGEGGFGSVFKGWIDETTFAPARPGTGMVIAVKKLNQQGLQGHREWLAEVNYLGQLSHPSLVRLVGYCLQDEQRLLVYEFMPRGSLENHLFRTSRFQPLSWNLRIKVCPGSSQGPCVLAQRQGQSYLPRFQDIQRAPGFDFCVCFQNYNAKLSDFGLAKDGPTGDQSHVSTRVMGTYGYAAPEYLATGHLTPKSDVYSFGVVLLEMLSGRRAMDKNRPATEHNLVDWARPYLSSKRRVSRILDDRLAGHYPLPAVQRAAALALQCLSEDSRKRPTMDQVVASLQQLTAAQDHDDAHRSSRRYPKDHRQAAALNNRNLNAHRRLSALPLPE

SEQ ID NO: 24882 - protein, 385 aa, Zea mays subsp. mays
  peptide (1)..(385): Ceres Seq. ID no. 12345472
  misc_feature (6)..(384): NCBI GI NO: 34906046 NR Description: putative serine/threonine-specific protein kinase
  misc_feature (1)..(368): NCBI GI NO: 14719339 NR Description: putative protein kinase [Oryza sativa]
  misc_feature (1)..(341): NCBI GI NO: 166809 NR Description: protein kinase
  misc_feature (1)..(341): NCBI GI NO: 15241749 NR Description: serine/threonine-specific protein kinase NAK
  misc_feature (1)..(356): NCBI GI NO: 34897424 NR Description: putative protein kinase
  misc_feature (1)..(341): NCBI GI NO: 15227001 NR Description: putative protein kinase; protein id: At2g28930.1
  misc_feature (14)..(356): NCBI GI NO: 15222437 NR Description: protein kinase APK1A; protein id: At1g07570.1
  misc_feature (14)..(243): NCBI GI NO: 8778537 NR Description: F22G5.5 [Arabidopsis thaliana]
  misc_feature (243)..(356): NCBI GI NO: 8778537 NR Description: F22G5.5 [Arabidopsis thaliana]
  misc_feature (5)..(382): NCBI GI NO: 15225520 NR Description: putative protein kinase; protein id: At2g39660
MGNCWGTKISSDTAASPSTSPFPRSEGEILRCANVRSFTLTELMTSTRNFRPDSVLGEGGFGSVFKGWIDETTFAPARPGTGMVIAVKKLNQQGLQGHREWLAEVNYLGQLSHPSLVRLVGYCLQDEQRLLVYEFMPRGSLENHLFRTSRFQPLSWNLRIKVCPGSSQGPCVLAQRQGQSYLPRFQDIQRAPGFDFCVCFQNYNAKLSDFGLAKDGPTGDQSHVSTRVMGTYGYAAPEYLATGHLTPKSDVYSFGVVLLEMLSGRRAMDKNRPATEHNLVDWARPYLSSKRRVSRILDDRLAGHYPLPAVQRAAALALQCLSEDSRKRPTMDQVVASLQQLTAAQDHDDAHRSSRRYPKDHRQAAALNNRNLNAHRRLSALPLPE

SEQ ID NO: 24883 - protein, 342 aa, Zea mays subsp. mays
  peptide (1)..(342): Ceres Seq. ID no. 12345473
  misc_feature (1)..(341): NCBI GI NO: 34906046 NR Description: putative serine/threonine-specific protein kinase
  misc_feature (1)..(325): NCBI GI NO: 14719339 NR Description: putative protein kinase [Oryza sativa]
  misc_feature (1)..(298): NCBI GI NO: 166809 NR Description: protein kinase
  misc_feature (1)..(298): NCBI GI NO: 15241749 NR Description: serine/threonine-specific protein kinase NAK
  misc_feature (1)..(313): NCBI GI NO: 34897424 NR Description: putative protein kinase
  misc_feature (1)..(298): NCBI GI NO: 15227001 NR Description: putative protein kinase; protein id: At2g28930.1
  misc_feature (1)..(313): NCBI GI NO: 15222437 NR Description: protein kinase APK1A; protein id: At1g07570.1
  misc_feature (1)..(200): NCBI GI NO: 8778537 NR Description: F22G5.5 [Arabidopsis thaliana]
  misc_feature (200)..(313): NCBI GI NO: 8778537 NR Description: F22G5.5 [Arabidopsis thaliana]
  misc_feature (1)..(339): NCBI GI NO: 15225520 NR Description: putative protein kinase; protein id: At2g39660
MTSTRNFRPDSVLGEGGFGSVFKGWIDETTFAPARPGTGMVIAVKKLNQQGLQGHREWLAEVNYLGQLSHPSLVRLVGYCLQDEQRLLVYEFMPRGSLENHLFRTSRFQPLSWNLRIKVCPGSSQGPCVLAQRQGQSYLPRFQDIQRAPGFDFCVCFQNYNAKLSDFGLAKDGPTGDQSHVSTRVMGTYGYAAPEYLATGHLTPKSDVYSFGVVLLEMLSGRRAMDKNRPATEHNLVDWARPYLSSKRRVSRILDDRLAGHYPLPAVQRAAALALQCLSEDSRKRPTMDQVVASLQQLTAAQDHDDAHRSSRRYPKDHRQAAALNNRNLNAHRRLSALPLPE

SEQ ID NO: 24884 - DNA, 1221 bp, Zea mays subsp. mays
  misc_feature (1)..(1221): Ceres Seq. ID no. 12367375
cgcctgggccggctgcatctttctcctcccaccatcacctcctcctctttatccatctgccagggcgcacgaggagaacggcggcgtctgagatcgcgaggccgaggcttgtcccgtcctcgctcggctccgctcctctcacccacggtttctggaggacaattctttgctatctagccttcctcaaaagtaaaaagggtaaatgggatcagaaggaccttcagttgtgactgtccatgttactggatttaagaagttccatggggttgctgagaacccaactgagaaaattgtgaccaatcttaaatctttcttggaaaagcgagggttgccaaaaaatcttgtcctcggaagctgcacagttctcgaaacagcaggggaaggggcacttgccacattatataaggttttagagtctgctgttgcagacagaggaactgggtcctcggcacagggacaagtaatttggatccactttggggtcaacagtggcgcaataaggtttgcccttgagaaccaagctgttaatgaggctaccttccggtgtccagatgagctaggatggaaaccacagagggtccctattgtgccctctgatggaagcatctcacggacgagagagactaccctgccagtcaatgaattaaccaagtcactccggaagataggctacgacgtggtgccctccggcgacgccggtcggtttgtatgcaactacgtgtactaccactctcttcggttcgcggagcaacacggcatcaaatccctgttcgtgcatgttcccctcttcttgacgatcgacgaggaggtccagatgcacttcgtcgcttccctccttgaagtcatcgctttctcctccaactaggaacagcagttggaagatcagcgtctgaattcctatctcaaggatggatgtaaagctggaatgctgcatgtaggctgaataaggtggtgtggtcattggcgatagatgttaatcttgctccagagggtgtgtttgggaatcgggagagaaaaaaagagaggtcattggcgatagatgttgatcttgctccagagggtgtgtttgggaattgggagggggaaaaaagaggaaattgctgcatagagtcagacggtgtatcagcttgtacgccatcaatcaagtgctgtaaacatgcctgggaaataattggggacctggatttgaataagatttgagttgttgggggcggacgcgct

SEQ ID NO: 24885 - protein, 220 aa, Zea mays subsp. mays
  peptide (1)..(220): Ceres Seq. ID no. 12367376
  misc_feature (11)..(213): Pfam Name: Pfam Description:  Pyroglutamyl peptidase
  misc_feature (1)..(216): NCBI GI NO: 38175741 NR Description: pyrrolidone carboxyl peptidase-like protein
  misc_feature (1)..(220): NCBI GI NO: 12039349 NR Description: putative pyrrolidone carboxyl peptidase
  misc_feature (1)..(216): NCBI GI NO: 18405940 NR Description: expressed protein; protein id: At1g56700
  misc_feature (1)..(216): NCBI GI NO: 13430708 NR Description: unknown protein [Arabidopsis thaliana]
  misc_feature (90)..(216): NCBI GI NO: 8778575 NR Description: F28C11.8 [Arabidopsis thaliana]
  misc_feature (1)..(89): NCBI GI NO: 8778575 NR Description: F28C11.8 [Arabidopsis thaliana]
  misc_feature (72)..(216): NCBI GI NO: 15220753 NR Description: hypothetical protein; protein id: At1g23440.1
  misc_feature (1)..(89): NCBI GI NO: 9295697 NR Description: F26F24.31 [Arabidopsis thaliana]
  misc_feature (1)..(89): NCBI GI NO: 15220751 NR Description: hypothetical protein; protein id: At1g23430.1
  misc_feature (88)..(194): NCBI GI NO: 18977671 NR Description: pyroglutamyl-peptidase i
MGSEGPSVVTVHVTGFKKFHGVAENPTEKIVTNLKSFLEKRGLPKNLVLGSCTVLETAGEGALATLYKVLESAVADRGTGSSAQGQVIWIHFGVNSGAIRFALENQAVNEATFRCPDELGWKPQRVPIVPSDGSISRTRETTLPVNELTKSLRKIGYDVVPSGDAGRFVCNYVYYHSLRFAEQHGIKSLFVHVPLFLTIDEEVQMHFVASLLEVIAFSSN

SEQ ID NO: 24886 - DNA, 1711 bp, Zea mays subsp. mays
  misc_feature (1)..(1711): Ceres Seq. ID no. 12342793
agaaacgtactgactgtccaccactccgctaaccaaagtccaaagccaacgcaagcaatccttcggacttcggtgggggaaatggaggccgccgcagccgccgagacggggctcgcccagaaaccggttgtgctgtacccttcgccggggatgggccacctggtctccatgatcgagcttggcaagatcctcggcgcgcggggactgtccgtaataattgtcgtcgtcgagcctcccttcaacacgggcgctacggcgcctttcctcgccggcgtctccgcggccaacccgtccatctccttccaccgcctgcccaaagtcgagcgcctcccgcccgtcaagacgaagcaccaggaggcgctcaccttcgaggtcacccgcgtctccaatccgcacctccgcgagttcctggccgccgcgtccccagccgtgctcgtcgtcgacttcttctgcagcatcgccctggacgtggcggaggagctccgcgtgcccgcctacttcttcttcacctcgggcgccgaggtcctggccttcttcctgcacctcccggcgatccacgagcggaccgccgcgagcttccaggacatggggaaggagctcgtgcacgtgccgggcatcccgtcattcccggcgacgcactccatcctgcccaccatggagcgcgacgacgtggcctacgacggcttcctaaagggctgcaccgacctctgccgctcccagggcatcatggtcaacacgttccgctcgctggagcagcgcgccgtcgagaccgtggccgcgggccactgcacgccccccggcctcccgaccccgcccatctactgcatcgggccgctcatcaagtccgaggaggtgctgggcaagggcggcgaggagtgcctggcgtggctggacgcgcagcccagggccagcgtggtgttcctctgcttcggcagcatcggccggttcagcgtggagcagatcagggaggtggcggccggcctggaagccagcgggcagcggttcttgtgggtggtccgagccccgcccagcgacgacccggccaagaagttcgagaggccgccggagccggacctggatgcgctcctcccggaggggttcctagcccggaccaaggataggggtctcgtggtcaggtcgtgggcgccgcagcgggacgtgctggcgcacgcgtccgtgggcggcttcgtgacgcactgcggctggaactcggtcctggaggcggtgatggcgggcgtgccgatggtggcgtggccgctctacgcggagcagcggctcaaccgggtgtttctggagaaggagatgcagctggccgtggccgtggaagggtacgacagcgacgagggcctcgtggcggccgaggaggttgctgccaaggtgcgatggctcatggagtccgatggcgggaggatgctccggaagcgcacgctggcggccatgcggcaggccaaggacgcgctgcgtgagggcggtgagtcggaggccacactgaccggattggtggacgagtggaaacgcatttgacgcggtatgtggggattgggaacgtgtgacgttacgcgacggatgaagtgccggtcatcatttttttaaataaaatatatattagtaatatattcatgtatttttcaataaaagatacaatttattgcattatactcgtgcgtgcggcgtgccaacaataataagatatctactctttattagattg

SEQ ID NO: 24887 - protein, 507 aa, Zea mays subsp. mays
  peptide (1)..(507): Ceres Seq. ID no. 12342794
  misc_feature (42)..(484): Pfam Name: Pfam Description:  UDP-glucoronosyl and UDP-glucosyl transferase
  misc_feature (28)..(505): NCBI GI NO: 22535568 NR Description: putative glucosyltransferase
  misc_feature (40)..(505): NCBI GI NO: 34910208 NR Description: putative flavonol glucosyltransferase
  misc_feature (43)..(502): NCBI GI NO: 34910228 NR Description: putative flavonol glucosyltransferase
  misc_feature (40)..(507): NCBI GI NO: 34910204 NR Description: putative flavonol glucosyltransferase
  misc_feature (38)..(504): NCBI GI NO: 18401158 NR Description: putative glucosyltransferase
  misc_feature (38)..(504): NCBI GI NO: 21593785 NR Description: putative glucosyltransferase
  misc_feature (40)..(503): NCBI GI NO: 34910206 NR Description: putative flavonol glucosyltransferase
  misc_feature (38)..(489): NCBI GI NO: 18401155 NR Description: putative glucosyltransferase; protein id:At3g16520
  misc_feature (38)..(489): NCBI GI NO: 30684106 NR Description: glycosyltransferase family [Arabidopsis thaliana]
  misc_feature (38)..(494): NCBI GI NO: 34910222 NR Description: putative flavonol glucosyltransferase
RNVLTVHHSANQSPKPTQAILRTSVGEMEAAAAAETGLAQKPVVLYPSPGMGHLVSMIELGKILGARGLSVIIVVVEPPFNTGATAPFLAGVSAANPSISFHRLPKVERLPPVKTKHQEALTFEVTRVSNPHLREFLAAASPAVLVVDFFCSIALDVAEELRVPAYFFFTSGAEVLAFFLHLPAIHERTAASFQDMGKELVHVPGIPSFPATHSILPTMERDDVAYDGFLKGCTDLCRSQGIMVNTFRSLEQRAVETVAAGHCTPPGLPTPPIYCIGPLIKSEEVLGKGGEECLAWLDAQPRASVVFLCFGSIGRFSVEQIREVAAGLEASGQRFLWVVRAPPSDDPAKKFERPPEPDLDALLPEGFLARTKDRGLVVRSWAPQRDVLAHASVGGFVTHCGWNSVLEAVMAGVPMVAWPLYAEQRLNRVFLEKEMQLAVAVEGYDSDEGLVAAEEVAAKVRWLMESDGGRMLRKRTLAAMRQAKDALREGGESEATLTGLVDEWKRI

SEQ ID NO: 24888 - protein, 480 aa, Zea mays subsp. mays
  peptide (1)..(480): Ceres Seq. ID no. 12342795
  misc_feature (15)..(457): Pfam Name: Pfam Description:  UDP-glucoronosyl and UDP-glucosyl transferase
  misc_feature (1)..(478): NCBI GI NO: 22535568 NR Description: putative glucosyltransferase
  misc_feature (13)..(478): NCBI GI NO: 34910208 NR Description: putative flavonol glucosyltransferase
  misc_feature (16)..(475): NCBI GI NO: 34910228 NR Description: putative flavonol glucosyltransferase
  misc_feature (13)..(480): NCBI GI NO: 34910204 NR Description: putative flavonol glucosyltransferase
  misc_feature (11)..(477): NCBI GI NO: 18401158 NR Description: putative glucosyltransferase
  misc_feature (11)..(477): NCBI GI NO: 21593785 NR Description: putative glucosyltransferase
  misc_feature (13)..(476): NCBI GI NO: 34910206 NR Description: putative flavonol glucosyltransferase
  misc_feature (11)..(462): NCBI GI NO: 18401155 NR Description: putative glucosyltransferase; protein id:At3g16520
  misc_feature (11)..(462): NCBI GI NO: 30684106 NR Description: glycosyltransferase family [Arabidopsis thaliana]
  misc_feature (11)..(467): NCBI GI NO: 34910222 NR Description: putative flavonol glucosyltransferase
MEAAAAAETGLAQKPVVLYPSPGMGHLVSMIELGKILGARGLSVIIVVVEPPFNTGATAPFLAGVSAANPSISFHRLPKVERLPPVKTKHQEALTFEVTRVSNPHLREFLAAASPAVLVVDFFCSIALDVAEELRVPAYFFFTSGAEVLAFFLHLPAIHERTAASFQDMGKELVHVPGIPSFPATHSILPTMERDDVAYDGFLKGCTDLCRSQGIMVNTFRSLEQRAVETVAAGHCTPPGLPTPPIYCIGPLIKSEEVLGKGGEECLAWLDAQPRASVVFLCFGSIGRFSVEQIREVAAGLEASGQRFLWVVRAPPSDDPAKKFERPPEPDLDALLPEGFLARTKDRGLVVRSWAPQRDVLAHASVGGFVTHCGWNSVLEAVMAGVPMVAWPLYAEQRLNRVFLEKEMQLAVAVEGYDSDEGLVAAEEVAAKVRWLMESDGGRMLRKRTLAAMRQAKDALREGGESEATLTGLVDEWKRI

SEQ ID NO: 24889 - protein, 457 aa, Zea mays subsp. mays
  peptide (1)..(457): Ceres Seq. ID no. 12342796
  misc_feature (1)..(434): Pfam Name: Pfam Description:  UDP-glucoronosyl and UDP-glucosyl transferase
  misc_feature (1)..(455): NCBI GI NO: 22535568 NR Description: putative glucosyltransferase
  misc_feature (1)..(455): NCBI GI NO: 34910208 NR Description: putative flavonol glucosyltransferase
  misc_feature (1)..(452): NCBI GI NO: 34910228 NR Description: putative flavonol glucosyltransferase
  misc_feature (1)..(457): NCBI GI NO: 34910204 NR Description: putative flavonol glucosyltransferase
  misc_feature (1)..(454): NCBI GI NO: 18401158 NR Description: putative glucosyltransferase
  misc_feature (1)..(454): NCBI GI NO: 21593785 NR Description: putative glucosyltransferase
  misc_feature (1)..(453): NCBI GI NO: 34910206 NR Description: putative flavonol glucosyltransferase
  misc_feature (1)..(439): NCBI GI NO: 18401155 NR Description: putative glucosyltransferase; protein id:At3g16520
  misc_feature (1)..(439): NCBI GI NO: 30684106 NR Description: glycosyltransferase family [Arabidopsis thaliana]
  misc_feature (1)..(444): NCBI GI NO: 34910222 NR Description: putative flavonol glucosyltransferase
MGHLVSMIELGKILGARGLSVIIVVVEPPFNTGATAPFLAGVSAANPSISFHRLPKVERLPPVKTKHQEALTFEVTRVSNPHLREFLAAASPAVLVVDFFCSIALDVAEELRVPAYFFFTSGAEVLAFFLHLPAIHERTAASFQDMGKELVHVPGIPSFPATHSILPTMERDDVAYDGFLKGCTDLCRSQGIMVNTFRSLEQRAVETVAAGHCTPPGLPTPPIYCIGPLIKSEEVLGKGGEECLAWLDAQPRASVVFLCFGSIGRFSVEQIREVAAGLEASGQRFLWVVRAPPSDDPAKKFERPPEPDLDALLPEGFLARTKDRGLVVRSWAPQRDVLAHASVGGFVTHCGWNSVLEAVMAGVPMVAWPLYAEQRLNRVFLEKEMQLAVAVEGYDSDEGLVAAEEVAAKVRWLMESDGGRMLRKRTLAAMRQAKDALREGGESEATLTGLVDEWKRI

SEQ ID NO: 24890 - DNA, 2047 bp, Zea mays subsp. mays
  misc_feature (1)..(2047): Ceres Seq. ID no. 12356085
acaaacttccctgaattcctgttcgctaccttcgcttccgctccaaaaaccaaataaaaaacgcacctttccttcccttctcctccccttcgctttcccccgtcctcccttccctcgatcccctcgccggaaaagatcccattccatccacctccacgtcccggcgcaatcagagtttccggcggcaaagcaggaaggcggaagcgaaaggaatgttgcacctttaagtagcgcggcgacctggtgtttcttcctggccggcgatgggctgcttcccgtgcttcgactccccggcagatgagcagcttaaccccaaattcggtggcgccggtgggtacggcggcacgtcctctgccgtcgcggcgtacggaaacggcacaggcgccggcgtcagcatcggccggcacggggacagggggtacccggacctgcagcaggcgcccatggcggctccgcgcgtcgagaagctctcagcagcggctgagaaagcaagagtaaagagcaatgggctcaccaaagaggctttggtgccaaaggatgccaatggcaatgccatctcagcgcaaactttcaccttccgtgagcttgctaccgccaccaggaacttcaggcccgagtgcttcctgggagagggaggttttggacgtgtttacaagggccgccttgagagcacaggccaggttgttgctataaagcagcttaacagggatgggcttcaaggaaacagagaatttctagtagaagttctcatgctcagcttactacatcatcaaaacctggttaatttgattggttattgtgctgatggagaccagagacttcttgtttatgaatatatgccttctggatcacttgaagatcatttgcacgatctacctcttgataaagaggccttggactggaacaccaggatgaaaattgcagcaggtgctgccaaaggactggagtaccttcatgacaaagctaatccaccagttatttatagggatttcaagtcatcgaacattctgttggatgaaagtttccacccgaagctgtctgattttggacttgctaagttgggtccagttggcgacaaatcacatgtctcaacacgtgtaatgggtacatatggttattgtgcaccagaatatgctatgacagggcagctgacagtgaagtctgacgtgtatagttttggggttgtcttgctagagttgattactggccgtagggctattgacagcaccagaccacatggagaacaaaatcttgtctcatgggcacgtcctctgtttaacgacagaagaaagctccctaagatggctgacccgaggctggaagggcgataccccatgcgtgggctttaccaagcccttgcagtggcttcgatgtgcattcagtcggaggctgcttcacgcccactgattgcagatgtcgtgactgctctgtcctacttggcatcccagccatatgatcccaacgcagctcttgcttcaaggaagccaggcggcgatcagcgaagcaagcctggcgagaacggcagggcagtttccaggaatgatgaaactggaagctccggccacaaaacacctgccaaggaccgagaggactcacctagggacctcccagcgatcctgaacaaggaccttgaccgggagcgcatggtggccgaggcgaagatgtggggcgaccgggagcgcatggtggccgaggctaagatgtggggcgaccgagagcgcatggtggctgaggcgaagatgtggggtgaaaattggcgtgacaagcggcgtgcagagattgggcaggggagcctggattcggttactgggaacagctagggggcaattaagcgaacagaaacgtgacatccacccatgcatttcgtttgtttatttccaggtccattttcgttctggcggcggtcggcaggccccagggttgtacatttctaggtcagggaagagtgggaaagcggcagcgttgtactggacagtgaatgcatgtggttgtacatgtaaattctcagaaaagttttgtgagaatgaaaggacatatttgagttccg

SEQ ID NO: 24891 - protein, 518 aa, Zea mays subsp. mays
  peptide (1)..(518): Ceres Seq. ID no. 12356086
  misc_feature (57)..(473): NCBI GI NO: 15240038 NR Description: protein kinase-like; protein id: At5g13160
  misc_feature (483)..(513): NCBI GI NO: 15240038 NR Description: protein kinase-like; protein id: At5g13160
  misc_feature (1)..(17): NCBI GI NO: 15240038 NR Description: protein kinase-like; protein id: At5g13160
  misc_feature (35)..(333): NCBI GI NO: 21740745 NR Description: OSJNBa0072K14.10
  misc_feature (334)..(517): NCBI GI NO: 21740745 NR Description: OSJNBa0072K14.10
  misc_feature (85)..(482): NCBI GI NO: 15238886 NR Description: protein kinase -like protein; protein id:At5g18610
  misc_feature (483)..(513): NCBI GI NO: 15238886 NR Description: protein kinase -like protein; protein id:At5g18610
  misc_feature (73)..(513): NCBI GI NO: 34907210 NR Description: putative serine/threonine kinase PBS1 protein
  misc_feature (85)..(401): NCBI GI NO: 34394036 NR Description: putative protein serine/threonine kinase BNK1
  misc_feature (46)..(404): NCBI GI NO: 34395193 NR Description: putative protein serine/threonine kinase
MGCFPCFDSPADEQLNPKFGGAGGYGGTSSAVAAYGNGTGAGVSIGRHGDRGYPDLQQAPMAAPRVEKLSAAAEKARVKSNGLTKEALVPKDANGNAISAQTFTFRELATATRNFRPECFLGEGGFGRVYKGRLESTGQVVAIKQLNRDGLQGNREFLVEVLMLSLLHHQNLVNLIGYCADGDQRLLVYEYMPSGSLEDHLHDLPLDKEALDWNTRMKIAAGAAKGLEYLHDKANPPVIYRDFKSSNILLDESFHPKLSDFGLAKLGPVGDKSHVSTRVMGTYGYCAPEYAMTGQLTVKSDVYSFGVVLLELITGRRAIDSTRPHGEQNLVSWARPLFNDRRKLPKMADPRLEGRYPMRGLYQALAVASMCIQSEAASRPLIADVVTALSYLASQPYDPNAALASRKPGGDQRSKPGENGRAVSRNDETGSSGHKTPAKDREDSPRDLPAILNKDLDRERMVAEAKMWGDRERMVAEAKMWGDRERMVAEAKMWGENWRDKRRAEIGQGSLDSVTGNS

SEQ ID NO: 24892 - protein, 458 aa, Zea mays subsp. mays
  peptide (1)..(458): Ceres Seq. ID no. 12356087
  misc_feature (1)..(413): NCBI GI NO: 15240038 NR Description: protein kinase-like; protein id: At5g13160
  misc_feature (423)..(453): NCBI GI NO: 15240038 NR Description: protein kinase-like; protein id: At5g13160
  misc_feature (1)..(273): NCBI GI NO: 21740745 NR Description: OSJNBa0072K14.10
  misc_feature (274)..(457): NCBI GI NO: 21740745 NR Description: OSJNBa0072K14.10
  misc_feature (25)..(422): NCBI GI NO: 15238886 NR Description: protein kinase -like protein; protein id:At5g18610
  misc_feature (423)..(453): NCBI GI NO: 15238886 NR Description: protein kinase -like protein; protein id:At5g18610
  misc_feature (13)..(453): NCBI GI NO: 34907210 NR Description: putative serine/threonine kinase PBS1 protein
  misc_feature (25)..(341): NCBI GI NO: 34394036 NR Description: putative protein serine/threonine kinase BNK1
  misc_feature (1)..(344): NCBI GI NO: 34395193 NR Description: putative protein serine/threonine kinase
  misc_feature (11)..(355): NCBI GI NO: 11259782 NR Description: protein kinase-like - Arabidopsis thaliana
MAAPRVEKLSAAAEKARVKSNGLTKEALVPKDANGNAISAQTFTFRELATATRNFRPECFLGEGGFGRVYKGRLESTGQVVAIKQLNRDGLQGNREFLVEVLMLSLLHHQNLVNLIGYCADGDQRLLVYEYMPSGSLEDHLHDLPLDKEALDWNTRMKIAAGAAKGLEYLHDKANPPVIYRDFKSSNILLDESFHPKLSDFGLAKLGPVGDKSHVSTRVMGTYGYCAPEYAMTGQLTVKSDVYSFGVVLLELITGRRAIDSTRPHGEQNLVSWARPLFNDRRKLPKMADPRLEGRYPMRGLYQALAVASMCIQSEAASRPLIADVVTALSYLASQPYDPNAALASRKPGGDQRSKPGENGRAVSRNDETGSSGHKTPAKDREDSPRDLPAILNKDLDRERMVAEAKMWGDRERMVAEAKMWGDRERMVAEAKMWGENWRDKRRAEIGQGSLDSVTGNS

SEQ ID NO: 24893 - protein, 356 aa, Zea mays subsp. mays
  peptide (1)..(356): Ceres Seq. ID no. 12356088
  misc_feature (1)..(311): NCBI GI NO: 15240038 NR Description: protein kinase-like; protein id: At5g13160
  misc_feature (321)..(351): NCBI GI NO: 15240038 NR Description: protein kinase-like; protein id: At5g13160
  misc_feature (1)..(171): NCBI GI NO: 21740745 NR Description: OSJNBa0072K14.10
  misc_feature (172)..(355): NCBI GI NO: 21740745 NR Description: OSJNBa0072K14.10
  misc_feature (1)..(320): NCBI GI NO: 15238886 NR Description: protein kinase -like protein; protein id:At5g18610
  misc_feature (321)..(351): NCBI GI NO: 15238886 NR Description: protein kinase -like protein; protein id:At5g18610
  misc_feature (1)..(351): NCBI GI NO: 34907210 NR Description: putative serine/threonine kinase PBS1 protein
  misc_feature (1)..(239): NCBI GI NO: 34394036 NR Description: putative protein serine/threonine kinase BNK1
  misc_feature (1)..(242): NCBI GI NO: 34395193 NR Description: putative protein serine/threonine kinase
  misc_feature (1)..(253): NCBI GI NO: 11259782 NR Description: protein kinase-like - Arabidopsis thaliana
MLSLLHHQNLVNLIGYCADGDQRLLVYEYMPSGSLEDHLHDLPLDKEALDWNTRMKIAAGAAKGLEYLHDKANPPVIYRDFKSSNILLDESFHPKLSDFGLAKLGPVGDKSHVSTRVMGTYGYCAPEYAMTGQLTVKSDVYSFGVVLLELITGRRAIDSTRPHGEQNLVSWARPLFNDRRKLPKMADPRLEGRYPMRGLYQALAVASMCIQSEAASRPLIADVVTALSYLASQPYDPNAALASRKPGGDQRSKPGENGRAVSRNDETGSSGHKTPAKDREDSPRDLPAILNKDLDRERMVAEAKMWGDRERMVAEAKMWGDRERMVAEAKMWGENWRDKRRAEIGQGSLDSVTGNS

SEQ ID NO: 24894 - DNA, 1313 bp, Zea mays subsp. mays
  misc_feature (1)..(1313): Ceres Seq. ID no. 13564341
atcgcccgctgctcctctatccctttactgctgctgctactaccttaagctatcactatcatggccttgatgctgctagcgcgcaacctgcgctcccgccgccgcccaccgctcgccgccgccgcggcgttctcgtcggccgcggcggaggcggagagggcgatacgggacgggccgcggaacgactggagccggcccgagatccaggccgtctacgactcaccgctcctcgacctcctctttcacggggctcaggtccacagaaatgtccataaattcagagaagtgcagcaatgcacacttctttcaatcaagactggtggatgcagtgaagattgttcttactgtcctcagtcatcaagatacaacactggattgaaggcccaaaaattgatgaacaaagatgctgtcttggaagcagcaaaaaaggcaaaagagtctgggagcacccgtttttgcatgggagctgcatggagagaaaccattggcaggaaatcaaacttcaaccagattcttgaatatgtcaaggaaataaggggtatggacatggaggtctgttgcacactaggcatgatagagaaacaacaagctgaagaactcaagaaggctggacttacagcatataatcataacctagatacatcaagagagtattatcccaacattattaccacaagatcatatgatgatagactgcagactcttgagcatgtccgtgaagctggaataagcatctgctcaggtggaatcattggtcttggtgaagcagaggaggaccgggtagggttgttgcataccctagctaccttgcctacacacccagagagcgttcctattaatgcattggttgctgtaaaaggcacacctcttgaggaccagaagcctgtagagatctgggaaatgatccgcatgatcgccactgctcggatcacgatgccaaaggcaatggtgaggctttcagcaggccgagtacggttctcgatgccagaacaagcgctgtgcttcctcgctggggccaactccatctttgccggcgagaaacttctcacaaccgcaaacaacgactttgatgcggaccaggcgatgttcaagatccttggcctgatccccaaggctccaagctttggcgaggaagaggcgtctgcggcggctcccacagaatccgagaggtctgagcaagctgcttcgatgtagaatatatacatatcattaccgattatccgtatcacggttggggcgaaactagaactaccgttgtagctagagcattggattgtagaaaccacaacatttcattattttgtaattgcttg

SEQ ID NO: 24895 - protein, 377 aa, Zea mays subsp. mays
  peptide (1)..(377): Ceres Seq. ID no. 13564342
  misc_feature (83)..(247): Pfam Name: Pfam Description:  Radical SAM superfamily
  misc_feature (3)..(377): NCBI GI NO: 38175566 NR Description: putative biotin synthase
  misc_feature (4)..(376): NCBI GI NO: 15224273 NR Description: biotin synthase (BioB) (BIO2)
  misc_feature (4)..(376): NCBI GI NO: 28392925 NR Description: putative biotin synthase (Bio B)
  misc_feature (40)..(360): NCBI GI NO: 23135112 NR Description: hypothetical protein [Cytophaga hutchinsonii]
  misc_feature (17)..(367): NCBI GI NO: 40738982 NR Description: hypothetical protein AN6643.2
  misc_feature (40)..(348): NCBI GI NO: 19075228 NR Description: biotin synthase (EC 2.8.1.6)
  misc_feature (40)..(348): NCBI GI NO: 2961328 NR Description: Biotin synthase [Schizosaccharomyces pombe]
  misc_feature (38)..(364): NCBI GI NO: 23127772 NR Description: hypothetical protein [Nostoc punctiforme]
  misc_feature (40)..(354): NCBI GI NO: 17229413 NR Description: biotin synthase [Nostoc sp. PCC 7120]
  misc_feature (39)..(350): NCBI GI NO: 11596107 NR Description: biotin synthase long form [Pichia jadinii]
MALMLLARNLRSRRRPPLAAAAAFSSAAAEAERAIRDGPRNDWSRPEIQAVYDSPLLDLLFHGAQVHRNVHKFREVQQCTLLSIKTGGCSEDCSYCPQSSRYNTGLKAQKLMNKDAVLEAAKKAKESGSTRFCMGAAWRETIGRKSNFNQILEYVKEIRGMDMEVCCTLGMIEKQQAEELKKAGLTAYNHNLDTSREYYPNIITTRSYDDRLQTLEHVREAGISICSGGIIGLGEAEEDRVGLLHTLATLPTHPESVPINALVAVKGTPLEDQKPVEIWEMIRMIATARITMPKAMVRLSAGRVRFSMPEQALCFLAGANSIFAGEKLLTTANNDFDADQAMFKILGLIPKAPSFGEEEASAAAPTESERSEQAASM

SEQ ID NO: 24896 - protein, 374 aa, Zea mays subsp. mays
  peptide (1)..(374): Ceres Seq. ID no. 13564343
  misc_feature (80)..(244): Pfam Name: Pfam Description:  Radical SAM superfamily
  misc_feature (1)..(374): NCBI GI NO: 38175566 NR Description: putative biotin synthase
  misc_feature (1)..(373): NCBI GI NO: 15224273 NR Description: biotin synthase (BioB) (BIO2)
  misc_feature (1)..(373): NCBI GI NO: 28392925 NR Description: putative biotin synthase (Bio B)
  misc_feature (37)..(357): NCBI GI NO: 23135112 NR Description: hypothetical protein [Cytophaga hutchinsonii]
  misc_feature (14)..(364): NCBI GI NO: 40738982 NR Description: hypothetical protein AN6643.2
  misc_feature (37)..(345): NCBI GI NO: 19075228 NR Description: biotin synthase (EC 2.8.1.6)
  misc_feature (37)..(345): NCBI GI NO: 2961328 NR Description: Biotin synthase [Schizosaccharomyces pombe]
  misc_feature (35)..(361): NCBI GI NO: 23127772 NR Description: hypothetical protein [Nostoc punctiforme]
  misc_feature (37)..(351): NCBI GI NO: 17229413 NR Description: biotin synthase [Nostoc sp. PCC 7120]
  misc_feature (36)..(347): NCBI GI NO: 11596107 NR Description: biotin synthase long form [Pichia jadinii]
MLLARNLRSRRRPPLAAAAAFSSAAAEAERAIRDGPRNDWSRPEIQAVYDSPLLDLLFHGAQVHRNVHKFREVQQCTLLSIKTGGCSEDCSYCPQSSRYNTGLKAQKLMNKDAVLEAAKKAKESGSTRFCMGAAWRETIGRKSNFNQILEYVKEIRGMDMEVCCTLGMIEKQQAEELKKAGLTAYNHNLDTSREYYPNIITTRSYDDRLQTLEHVREAGISICSGGIIGLGEAEEDRVGLLHTLATLPTHPESVPINALVAVKGTPLEDQKPVEIWEMIRMIATARITMPKAMVRLSAGRVRFSMPEQALCFLAGANSIFAGEKLLTTANNDFDADQAMFKILGLIPKAPSFGEEEASAAAPTESERSEQAASM

SEQ ID NO: 24897 - protein, 266 aa, Zea mays subsp. mays
  peptide (1)..(266): Ceres Seq. ID no. 13564344
  misc_feature (1)..(136): Pfam Name: Pfam Description:  Radical SAM superfamily
  misc_feature (1)..(266): NCBI GI NO: 38175566 NR Description: putative biotin synthase
  misc_feature (1)..(265): NCBI GI NO: 15224273 NR Description: biotin synthase (BioB) (BIO2)
  misc_feature (1)..(265): NCBI GI NO: 28392925 NR Description: putative biotin synthase (Bio B)
  misc_feature (1)..(249): NCBI GI NO: 23135112 NR Description: hypothetical protein [Cytophaga hutchinsonii]
  misc_feature (1)..(256): NCBI GI NO: 40738982 NR Description: hypothetical protein AN6643.2
  misc_feature (1)..(237): NCBI GI NO: 19075228 NR Description: biotin synthase (EC 2.8.1.6)
  misc_feature (1)..(237): NCBI GI NO: 2961328 NR Description: Biotin synthase [Schizosaccharomyces pombe]
  misc_feature (1)..(253): NCBI GI NO: 23127772 NR Description: hypothetical protein [Nostoc punctiforme]
  misc_feature (1)..(243): NCBI GI NO: 17229413 NR Description: biotin synthase [Nostoc sp. PCC 7120]
  misc_feature (1)..(239): NCBI GI NO: 11596107 NR Description: biotin synthase long form [Pichia jadinii]
MNKDAVLEAAKKAKESGSTRFCMGAAWRETIGRKSNFNQILEYVKEIRGMDMEVCCTLGMIEKQQAEELKKAGLTAYNHNLDTSREYYPNIITTRSYDDRLQTLEHVREAGISICSGGIIGLGEAEEDRVGLLHTLATLPTHPESVPINALVAVKGTPLEDQKPVEIWEMIRMIATARITMPKAMVRLSAGRVRFSMPEQALCFLAGANSIFAGEKLLTTANNDFDADQAMFKILGLIPKAPSFGEEEASAAAPTESERSEQAASM

SEQ ID NO: 24898 - DNA, 1382 bp, Zea mays subsp. mays
  misc_feature (1)..(1382): Ceres Seq. ID no. 12356032
atcccaccccgaagggcgtcgccgagctagccattgccgcctcccggctcgcgactcgcgagtcacaggcgcagccgagcgttccttggggacgaggctacatcgcgatgtggtggagggcggtgaggcgccggtgggtcgcgacggcgcggcccgcgtcctccgcggcggcgggggcggagaagagctgccgcgccgtggtggtgccgcgtttcggtgggccggaggtgctcgaggtcaggcagggcatgcctgtgcccgatctgaagccgcaggaggtgctcgtgcgcgcacgcgctgtctctatcaaccccctggaccttcgaatgcgatgtggctatgggcgctccatattcgaaccactcctacctctgatcattggtcgggacattagcggtgaagttgcggccaccggaactttggcatcgtctttttctattggccaagaagtgtttggttcgttgcatccaactgctctcagagggacatatgctgattatgctatcctgtcactggacgagcttactctcaaaccatctacactcagtcatgtggaggctagtgcaatcccgtttgctgctttgactgcatggcgcgctttacatggtacggctcgtatttctgaaggacaaagagttcttgtgattggtggaggaggagcggttggattagctgctgttcaacttgcggtggctgctgggtgtgtggtttctgctacctgtggaacacaaagtattgagcgagttatgggagttggtgctgaacaagctattgactacactgctgaggatactgaagcagcaattaaaggaaagtttgatgctgttttagacaccataggagtacctgagacagaaagaattggcatcaatgttcttaggagaggtggacactatatgacccttcagggagaagcagctgccctagcagataggtatggattggctgtagggcttcctgctgctactgctgttttactaaagaaacagatgcagtatcgttattctcatggaatagagtattggtggacatacatgagagctgacgccgaaggccttcacgagatccaaaggctatctggagctgggaaactacagatacctgtggagaagacctttcccatcagccatgtaagagaagctcatgcggccaaggagaaaaagttggctcctggcaaggtggttctggaattcgattaatgttattaagattttgtccattgggacctgaagggctgtgcgtttgcaaatcatgatagttttttttgtaaaaaaataaatctgaatctctctgccgacttcaggttccattttatcgttccgtttcagtagaaatacggtaaataatcatatcagctatggcctatgggcacgattttcctg

SEQ ID NO: 24899 - protein, 398 aa, Zea mays subsp. mays
  peptide (1)..(398): Ceres Seq. ID no. 12356033
  misc_feature (36)..(398): NCBI GI NO: 30351052 NR Description: oxidoreductase [Setaria italica]
  misc_feature (36)..(375): NCBI GI NO: 34909604 NR Description: putative oxidoreductase-like protein
  misc_feature (50)..(397): NCBI GI NO: 15232485 NR Description: zinc-binding dehydrogenase, putative
  misc_feature (63)..(397): NCBI GI NO: 21592930 NR Description: zinc-binding dehydrogenase, putative
  misc_feature (64)..(296): NCBI GI NO: 21219303 NR Description: putative zinc-binding oxidoreductase
  misc_feature (347)..(398): NCBI GI NO: 21219303 NR Description: putative zinc-binding oxidoreductase
  misc_feature (65)..(395): NCBI GI NO: 14249346 NR Description: reticulon 4 interacting protein 1
  misc_feature (64)..(301): NCBI GI NO: 13472500 NR Description: probable oxidoreductase [Mesorhizobium loti]
  misc_feature (348)..(395): NCBI GI NO: 13472500 NR Description: probable oxidoreductase [Mesorhizobium loti]
  misc_feature (65)..(395): NCBI GI NO: 17887352 NR Description: NOGO-interacting mitochondrial protein
PTPKGVAELAIAASRLATRESQAQPSVPWGRGYIAMWWRAVRRRWVATARPASSAAAGAEKSCRAVVVPRFGGPEVLEVRQGMPVPDLKPQEVLVRARAVSINPLDLRMRCGYGRSIFEPLLPLIIGRDISGEVAATGTLASSFSIGQEVFGSLHPTALRGTYADYAILSLDELTLKPSTLSHVEASAIPFAALTAWRALHGTARISEGQRVLVIGGGGAVGLAAVQLAVAAGCVVSATCGTQSIERVMGVGAEQAIDYTAEDTEAAIKGKFDAVLDTIGVPETERIGINVLRRGGHYMTLQGEAAALADRYGLAVGLPAATAVLLKKQMQYRYSHGIEYWWTYMRADAEGLHEIQRLSGAGKLQIPVEKTFPISHVREAHAAKEKKLAPGKVVLEFD

SEQ ID NO: 24900 - protein, 363 aa, Zea mays subsp. mays
  peptide (1)..(363): Ceres Seq. ID no. 12356034
  misc_feature (1)..(363): NCBI GI NO: 30351052 NR Description: oxidoreductase [Setaria italica]
  misc_feature (1)..(340): NCBI GI NO: 34909604 NR Description: putative oxidoreductase-like protein
  misc_feature (15)..(362): NCBI GI NO: 15232485 NR Description: zinc-binding dehydrogenase, putative
  misc_feature (28)..(362): NCBI GI NO: 21592930 NR Description: zinc-binding dehydrogenase, putative
  misc_feature (29)..(261): NCBI GI NO: 21219303 NR Description: putative zinc-binding oxidoreductase
  misc_feature (312)..(363): NCBI GI NO: 21219303 NR Description: putative zinc-binding oxidoreductase
  misc_feature (30)..(360): NCBI GI NO: 14249346 NR Description: reticulon 4 interacting protein 1
  misc_feature (29)..(266): NCBI GI NO: 13472500 NR Description: probable oxidoreductase [Mesorhizobium loti]
  misc_feature (313)..(360): NCBI GI NO: 13472500 NR Description: probable oxidoreductase [Mesorhizobium loti]
  misc_feature (30)..(360): NCBI GI NO: 17887352 NR Description: NOGO-interacting mitochondrial protein
MWWRAVRRRWVATARPASSAAAGAEKSCRAVVVPRFGGPEVLEVRQGMPVPDLKPQEVLVRARAVSINPLDLRMRCGYGRSIFEPLLPLIIGRDISGEVAATGTLASSFSIGQEVFGSLHPTALRGTYADYAILSLDELTLKPSTLSHVEASAIPFAALTAWRALHGTARISEGQRVLVIGGGGAVGLAAVQLAVAAGCVVSATCGTQSIERVMGVGAEQAIDYTAEDTEAAIKGKFDAVLDTIGVPETERIGINVLRRGGHYMTLQGEAAALADRYGLAVGLPAATAVLLKKQMQYRYSHGIEYWWTYMRADAEGLHEIQRLSGAGKLQIPVEKTFPISHVREAHAAKEKKLAPGKVVLEFD

SEQ ID NO: 24901 - protein, 316 aa, Zea mays subsp. mays
  peptide (1)..(316): Ceres Seq. ID no. 12356035
  misc_feature (1)..(316): NCBI GI NO: 30351052 NR Description: oxidoreductase [Setaria italica]
  misc_feature (1)..(293): NCBI GI NO: 34909604 NR Description: putative oxidoreductase-like protein
  misc_feature (1)..(315): NCBI GI NO: 15232485 NR Description: zinc-binding dehydrogenase, putative
  misc_feature (1)..(315): NCBI GI NO: 21592930 NR Description: zinc-binding dehydrogenase, putative
  misc_feature (1)..(214): NCBI GI NO: 21219303 NR Description: putative zinc-binding oxidoreductase
  misc_feature (265)..(316): NCBI GI NO: 21219303 NR Description: putative zinc-binding oxidoreductase
  misc_feature (1)..(313): NCBI GI NO: 14249346 NR Description: reticulon 4 interacting protein 1
  misc_feature (1)..(219): NCBI GI NO: 13472500 NR Description: probable oxidoreductase [Mesorhizobium loti]
  misc_feature (266)..(313): NCBI GI NO: 13472500 NR Description: probable oxidoreductase [Mesorhizobium loti]
  misc_feature (1)..(313): NCBI GI NO: 17887352 NR Description: NOGO-interacting mitochondrial protein
MPVPDLKPQEVLVRARAVSINPLDLRMRCGYGRSIFEPLLPLIIGRDISGEVAATGTLASSFSIGQEVFGSLHPTALRGTYADYAILSLDELTLKPSTLSHVEASAIPFAALTAWRALHGTARISEGQRVLVIGGGGAVGLAAVQLAVAAGCVVSATCGTQSIERVMGVGAEQAIDYTAEDTEAAIKGKFDAVLDTIGVPETERIGINVLRRGGHYMTLQGEAAALADRYGLAVGLPAATAVLLKKQMQYRYSHGIEYWWTYMRADAEGLHEIQRLSGAGKLQIPVEKTFPISHVREAHAAKEKKLAPGKVVLEFD

SEQ ID NO: 24902 - DNA, 1779 bp, Zea mays subsp. mays
  misc_feature (1)..(1779): Ceres Seq. ID no. 12387104
agacgcgcgccaggcaagcaacaatggccaagcttctcaagccttggtacgcggccttcgtgaacagattcctcgccgtggtcgcggtggcatctatcgtagccgccgcgctccggcgggcgtggccagcattcagcatggacgatgtcgtcggcagccttggcgccgcgcggccggtccacgtgctcatggcggtcatcctggctgccggcgtggcgaagctgaggcgcctgcgccggccgcgggacgtgtacctggtggagtacggctgcttccgaccgcggccgtgcttccgggcgccgttcgccacgtgcctggagcacgtgcacctcctgccgtacctggtggacgacgagagcgtcagcttcgccatccgcctgctcgagcgctcggggctcggcgacgagacgtgcctgccctactcctaccactacatgcctccggaccgcagcctcgaggcggcccgggaggaggccgagctggtcatcttctccgcagtggacgaggtgttcgccagggcgagcgtgaggcccgaggagatcgacgtgctcatcgtcaactgcagcatcttcacgcccacgccggtcttcgccgacatggtcgtcaacaggtacgggctccgcgccgacgtgcagtgcctgaacctgtccgggatgggctgcggcgcggggctcgtctccatcggcctggccaagaacctcctccaggtggcgccgccaggcacgcgcgtcctgacggtgtccacggagatcctctcgtcgcagtactacgtcgggagcgagcgcgcgatgctgctgcccaactgcctcttccgcatgggggccgccgccacgatcctctccaacagccccgagcgcgcgcggttccggctcggccgcctcgtccgcaccatgaccgccgcgcgggacgccgactaccgctgcatattccaggaggaagacggcgagggcatcctgggcgttcgcctctccaaggacctcaccacaacggccggccatgcgctcaagcggaacatcgcggcgttcggccccctcgtgctgccggtctcggagcagctcctggtggcgatgtcgctgctcaagcgcaagttcatgagcggccggcgcgccagggtgaggctgtaccgcccggacttccgcaaggcgtttgagcacttctgcatccacgccggcggccgcgcggtgatcgacgaggtgcagcgcgggctcggcctgtccgacgaggacgtggaggcgtcgcggatgacgctgcaccggttcgggaacacgtccagcagcctggtgctgtacgagctggcctacatcgaggccaaggcccggatgagggcgggcgatcgggtgtggatgatctccttcggcgccggattcgagtgcagctgtgtggcattggagtgcgtcaagccgccggccgacgccggcgggccctgggccgactgcatcgaccgctacccggtgcagctccccgaagtcgccaaggacaacatctgatcaaccccttcttctggatctggggcatgctgcatcatgctggacatgaacatgcccaaggcttccgtcgtcgtcgatgtcgtcgtccttagtgccgggctgtcggccaccgcccaacatgtcgtgctctgtctatgatcgatctcttggaaataatgtagccctacccctacggtgtccaaaacgcaagtatggcgcgtttgtgtttgttaccactgcacttgtttaccacgctgcactgcgtttgtgtttgttaccactgcacaaagttaattaagcgccagttacgatc

SEQ ID NO: 24903 - protein, 494 aa, Zea mays subsp. mays
  peptide (1)..(494): Ceres Seq. ID no. 12387105
  misc_feature (319)..(466): Pfam Name: Pfam Description:  Chalcone and stilbene synthases
  misc_feature (11)..(490): NCBI GI NO: 34913436 NR Description: putative fatty acid condensing enzyme CUT1
  misc_feature (10)..(491): NCBI GI NO: 17979464 NR Description: At1g68530/T26J14_10 [Arabidopsis thaliana]
  misc_feature (10)..(491): NCBI GI NO: 15221431 NR Description: very-long-chain fatty acid condensing enzyme
  misc_feature (10)..(491): NCBI GI NO: 21593111 NR Description: very-long-chain fatty acid condensing enzyme CUT1
  misc_feature (10)..(491): NCBI GI NO: 21618184 NR Description: fatty acid condensing enzyme CUT1, putative
  misc_feature (10)..(491): NCBI GI NO: 15222592 NR Description: fatty acid condensing enzyme CUT1, putative
  misc_feature (10)..(491): NCBI GI NO: 28393607 NR Description: putative fatty acid condensing enzyme CUT1
  misc_feature (8)..(439): NCBI GI NO: 38344109 NR Description: OSJNBb0050O03.6
  misc_feature (61)..(486): NCBI GI NO: 15223556 NR Description: very-long-chain fatty acid condensing enzyme CUT1
  misc_feature (77)..(486): NCBI GI NO: 15226724 NR Description: putative beta-ketoacyl-CoA synthase
TRARQATMAKLLKPWYAAFVNRFLAVVAVASIVAAALRRAWPAFSMDDVVGSLGAARPVHVLMAVILAAGVAKLRRLRRPRDVYLVEYGCFRPRPCFRAPFATCLEHVHLLPYLVDDESVSFAIRLLERSGLGDETCLPYSYHYMPPDRSLEAAREEAELVIFSAVDEVFARASVRPEEIDVLIVNCSIFTPTPVFADMVVNRYGLRADVQCLNLSGMGCGAGLVSIGLAKNLLQVAPPGTRVLTVSTEILSSQYYVGSERAMLLPNCLFRMGAAATILSNSPERARFRLGRLVRTMTAARDADYRCIFQEEDGEGILGVRLSKDLTTTAGHALKRNIAAFGPLVLPVSEQLLVAMSLLKRKFMSGRRARVRLYRPDFRKAFEHFCIHAGGRAVIDEVQRGLGLSDEDVEASRMTLHRFGNTSSSLVLYELAYIEAKARMRAGDRVWMISFGAGFECSCVALECVKPPADAGGPWADCIDRYPVQLPEVAKDNI

SEQ ID NO: 24904 - protein, 487 aa, Zea mays subsp. mays
  peptide (1)..(487): Ceres Seq. ID no. 12387106
  misc_feature (312)..(459): Pfam Name: Pfam Description:  Chalcone and stilbene synthases
  misc_feature (4)..(483): NCBI GI NO: 34913436 NR Description: putative fatty acid condensing enzyme CUT1
  misc_feature (3)..(484): NCBI GI NO: 17979464 NR Description: At1g68530/T26J14_10 [Arabidopsis thaliana]
  misc_feature (3)..(484): NCBI GI NO: 15221431 NR Description: very-long-chain fatty acid condensing enzyme
  misc_feature (3)..(484): NCBI GI NO: 21593111 NR Description: very-long-chain fatty acid condensing enzyme CUT1
  misc_feature (3)..(484): NCBI GI NO: 21618184 NR Description: fatty acid condensing enzyme CUT1, putative
  misc_feature (3)..(484): NCBI GI NO: 15222592 NR Description: fatty acid condensing enzyme CUT1, putative
  misc_feature (3)..(484): NCBI GI NO: 28393607 NR Description: putative fatty acid condensing enzyme CUT1
  misc_feature (1)..(432): NCBI GI NO: 38344109 NR Description: OSJNBb0050O03.6
  misc_feature (54)..(479): NCBI GI NO: 15223556 NR Description: very-long-chain fatty acid condensing enzyme CUT1
  misc_feature (70)..(479): NCBI GI NO: 15226724 NR Description: putative beta-ketoacyl-CoA synthase
MAKLLKPWYAAFVNRFLAVVAVASIVAAALRRAWPAFSMDDVVGSLGAARPVHVLMAVILAAGVAKLRRLRRPRDVYLVEYGCFRPRPCFRAPFATCLEHVHLLPYLVDDESVSFAIRLLERSGLGDETCLPYSYHYMPPDRSLEAAREEAELVIFSAVDEVFARASVRPEEIDVLIVNCSIFTPTPVFADMVVNRYGLRADVQCLNLSGMGCGAGLVSIGLAKNLLQVAPPGTRVLTVSTEILSSQYYVGSERAMLLPNCLFRMGAAATILSNSPERARFRLGRLVRTMTAARDADYRCIFQEEDGEGILGVRLSKDLTTTAGHALKRNIAAFGPLVLPVSEQLLVAMSLLKRKFMSGRRARVRLYRPDFRKAFEHFCIHAGGRAVIDEVQRGLGLSDEDVEASRMTLHRFGNTSSSLVLYELAYIEAKARMRAGDRVWMISFGAGFECSCVALECVKPPADAGGPWADCIDRYPVQLPEVAKDNI

SEQ ID NO: 24905 - protein, 449 aa, Zea mays subsp. mays
  peptide (1)..(449): Ceres Seq. ID no. 12387107
  misc_feature (274)..(421): Pfam Name: Pfam Description:  Chalcone and stilbene synthases
  misc_feature (1)..(445): NCBI GI NO: 34913436 NR Description: putative fatty acid condensing enzyme CUT1
  misc_feature (1)..(446): NCBI GI NO: 17979464 NR Description: At1g68530/T26J14_10 [Arabidopsis thaliana]
  misc_feature (1)..(446): NCBI GI NO: 15221431 NR Description: very-long-chain fatty acid condensing enzyme
  misc_feature (1)..(446): NCBI GI NO: 21593111 NR Description: very-long-chain fatty acid condensing enzyme CUT1
  misc_feature (1)..(446): NCBI GI NO: 21618184 NR Description: fatty acid condensing enzyme CUT1, putative
  misc_feature (1)..(446): NCBI GI NO: 15222592 NR Description: fatty acid condensing enzyme CUT1, putative
  misc_feature (1)..(446): NCBI GI NO: 28393607 NR Description: putative fatty acid condensing enzyme CUT1
  misc_feature (1)..(394): NCBI GI NO: 38344109 NR Description: OSJNBb0050O03.6
  misc_feature (16)..(441): NCBI GI NO: 15223556 NR Description: very-long-chain fatty acid condensing enzyme CUT1
  misc_feature (32)..(441): NCBI GI NO: 15226724 NR Description: putative beta-ketoacyl-CoA synthase
MDDVVGSLGAARPVHVLMAVILAAGVAKLRRLRRPRDVYLVEYGCFRPRPCFRAPFATCLEHVHLLPYLVDDESVSFAIRLLERSGLGDETCLPYSYHYMPPDRSLEAAREEAELVIFSAVDEVFARASVRPEEIDVLIVNCSIFTPTPVFADMVVNRYGLRADVQCLNLSGMGCGAGLVSIGLAKNLLQVAPPGTRVLTVSTEILSSQYYVGSERAMLLPNCLFRMGAAATILSNSPERARFRLGRLVRTMTAARDADYRCIFQEEDGEGILGVRLSKDLTTTAGHALKRNIAAFGPLVLPVSEQLLVAMSLLKRKFMSGRRARVRLYRPDFRKAFEHFCIHAGGRAVIDEVQRGLGLSDEDVEASRMTLHRFGNTSSSLVLYELAYIEAKARMRAGDRVWMISFGAGFECSCVALECVKPPADAGGPWADCIDRYPVQLPEVAKDNI

SEQ ID NO: 24906 - DNA, 1170 bp, Zea mays subsp. mays
  misc_feature (1)..(1170): Ceres Seq. ID no. 12356036
gttccctctttcctctcctctttccccatccgtccaatcaaccgggctgctctgctgcctctccggcgccattgacgagcaagagagtgctccgacacctggtccgtcgcgtgccgtgcccacccgctaaggccagggcgccccgactcgagctcaccgcgtcgaactcgaaccgctgctgttcctcggcagggggcagggtcgtcgaggatgccggagcactcagagaacgcggcggcggacctgatgggcaacatcatggagaccatcgcggagaacctcccgaggcagaagtccgtgcggttcgacgacggcgacggctcctccatctccgagcaggccaagaagctgttcagcggcggcgagagcaggaagaagtcggtccaccacgtgctgggcggcggcaaatccgccgacgtgctgctgtggcggaacaagaagatctcgtccagcgtgctgggcgtggcgacgctggtgtgggtgttcttcgagtggctggactaccacttcctcaccatcctctgcttcgtgctcgcgctcggcatggccgtccagttcgcctggtccatcttctcgtccagcgtgcctcgcgtgcagctgccggaggagctgttcgcgagcgccggcgcggccgccggcgcccaggtgaacagggcgctgggcttcctccaggacgtggcctgcggacgcgacctcaagcggctggtcatcgtgatcgccgggttcttcgctgcggcggtcgtcggcagcttctgcaacctcctgacggtcatctacatcgggttcgtgtgcgcgcacaccctgccggtgctgtacgagaggtaccaggaccaggtggacgagttcctgtacaacatgctagggctggtgcagagccagtacagcaagctggacagcaagggcatcctcaaggggggcgtcaagttcaggaagagcgactagctgatttcctcccatctacgactacgatttgattcatcctgggaatcttgatcgatcgacacttgttctgttctgtacagcgagtaacaaccgctgctgctagctacattctttactgtactgtacttgtgtgatgacatcatatcttcgcgtcgcgtgtactgaagaaactacacattgcactaaggttgctttcgtacgtgtacgtgctcatctttcttccttggt

SEQ ID NO: 24907 - protein, 323 aa, Zea mays subsp. mays
  peptide (1)..(323): Ceres Seq. ID no. 12356037
  misc_feature (4)..(317): NCBI GI NO: 11362193 NR Description: hypothetical protein
SLFPLLFPHPSNQPGCSAASPAPLTSKRVLRHLVRRVPCPPAKARAPRLELTASNSNRCCSSAGGRVVEDAGALRERGGGPDGQHHGDHRGEPPEAEVRAVRRRRRLLHLRAGQEAVQRRREQEEVGPPRAGRRQIRRRAAVAEQEDLVQRAGRGDAGVGVLRVAGLPLPHHPLLRARARHGRPVRLVHLLVQRASRAAAGGAVRERRRGRRRPGEQGAGLPPGRGLRTRPQAAGHRDRRVLRCGGRRQLLQPPDGHLHRVRVRAHPAGAVREVPGPGGRVPVQHARAGAEPVQQAGQQGHPQGGRQVQEERLADFLPSTTTI

SEQ ID NO: 24908 - protein, 243 aa, Zea mays subsp. mays
  peptide (1)..(243): Ceres Seq. ID no. 12356038
  misc_feature (1)..(243): NCBI GI NO: 34899590 NR Description: hypothetical protein~similar to Oryza sativachromosome3
  misc_feature (1)..(243): NCBI GI NO: 34897094 NR Description: unknown protein
  misc_feature (1)..(233): NCBI GI NO: 18398810 NR Description: expressed protein; protein id: At3g10260
  misc_feature (1)..(233): NCBI GI NO: 30681227 NR Description: expressed protein [Arabidopsis thaliana]
  misc_feature (32)..(241): NCBI GI NO: 34904202 NR Description: P0492F05.25
  misc_feature (1)..(212): NCBI GI NO: 34909318 NR Description: OSJNBb0021A09.5
  misc_feature (15)..(234): NCBI GI NO: 15222616 NR Description: hypothetical protein; protein id: At1g64090
  misc_feature (15)..(234): NCBI GI NO: 18406991 NR Description: expressed protein; protein id: At2g46170
  misc_feature (27)..(243): NCBI GI NO: 15236556 NR Description: putative protein; protein id: At4g23630
  misc_feature (15)..(243): NCBI GI NO: 15237093 NR Description: putative protein; protein id: At4g11220
MPEHSENAAADLMGNIMETIAENLPRQKSVRFDDGDGSSISEQAKKLFSGGESRKKSVHHVLGGGKSADVLLWRNKKISSSVLGVATLVWVFFEWLDYHFLTILCFVLALGMAVQFAWSIFSSSVPRVQLPEELFASAGAAAGAQVNRALGFLQDVACGRDLKRLVIVIAGFFAAAVVGSFCNLLTVIYIGFVCAHTLPVLYERYQDQVDEFLYNMLGLVQSQYSKLDSKGILKGGVKFRKSD

SEQ ID NO: 24909 - protein, 231 aa, Zea mays subsp. mays
  peptide (1)..(231): Ceres Seq. ID no. 12356039
  misc_feature (1)..(231): NCBI GI NO: 34899590 NR Description: hypothetical protein~similar to Oryza sativachromosome3
  misc_feature (1)..(231): NCBI GI NO: 34897094 NR Description: unknown protein
  misc_feature (1)..(221): NCBI GI NO: 18398810 NR Description: expressed protein; protein id: At3g10260
  misc_feature (1)..(221): NCBI GI NO: 30681227 NR Description: expressed protein [Arabidopsis thaliana]
  misc_feature (20)..(229): NCBI GI NO: 34904202 NR Description: P0492F05.25
  misc_feature (1)..(200): NCBI GI NO: 34909318 NR Description: OSJNBb0021A09.5
  misc_feature (3)..(222): NCBI GI NO: 15222616 NR Description: hypothetical protein; protein id: At1g64090
  misc_feature (3)..(222): NCBI GI NO: 18406991 NR Description: expressed protein; protein id: At2g46170
  misc_feature (15)..(231): NCBI GI NO: 15236556 NR Description: putative protein; protein id: At4g23630
  misc_feature (3)..(231): NCBI GI NO: 15237093 NR Description: putative protein; protein id: At4g11220
MGNIMETIAENLPRQKSVRFDDGDGSSISEQAKKLFSGGESRKKSVHHVLGGGKSADVLLWRNKKISSSVLGVATLVWVFFEWLDYHFLTILCFVLALGMAVQFAWSIFSSSVPRVQLPEELFASAGAAAGAQVNRALGFLQDVACGRDLKRLVIVIAGFFAAAVVGSFCNLLTVIYIGFVCAHTLPVLYERYQDQVDEFLYNMLGLVQSQYSKLDSKGILKGGVKFRKSD

SEQ ID NO: 24910 - DNA, 1127 bp, Zea mays subsp. mays
  misc_feature (1)..(1127): Ceres Seq. ID no. 12410358
aaatcacctcacacaacaagctgcaccgcagcaacgaacacgaaccttggcagaacgaagctgaagtagttcgctgtgaacccagtatggcaaacgcgccgaggatcctggccctcggcctgctagcgctcctgtgcgctgccgccggcccggccgccgcgcagaactgcggctgccagccaaacttctgctgcagcaagttcggctactgcggcacgaccgacgcctactgcggcgacgggtgccagtcgggcccgtgccgctcggacggcggcggcggcggcggcggcggcggaggcggcggaggcagtggcggtgcgaacgtggctaatgtggtcaccgacgcgttcttcaacggcatcaagaaccaggccgggagcgggtgcgagggcaagaacttctacacccggagcgcgttcctgagcgccgtcaacaagtacccgggcttcgcccatggcgggacggaggtggagggcaagcgcgagatcgccgccttcttcgcgcacgtcacgcacgagaccggacatttctgctacatcagcgagatcaacaagagcaacgcctactgcgacgcgagcaacaggcagtggccgtgcgcggcggggcagaagtactacgggcgcggcccgctgcagatctcgtggaactacaactacgggcccgccgggagggacatcggcttcaacgggctcgccgaccccaacagggtggcgcaggacgccgtgatcgcgttcaagacggcgctctggttctggatgaacaacgtgcaccgtgtgatgccgcagggcttcggcgccaccatcagggccatcaacggcgccctcgagtgcaacgggaacaaccccgcccagatgaacgcgcgcgtcggctactacaagcagtactgccagcagctccgcgtcgacccagggcccaacctcacttgctaggccagcagctcctgctagctcgtccacaataaatgttcggcgtcgcaccctcgcgaaaccaagagtttactgactagtacgagctagctagcatgcagtaataataatcatcgtaataataataataaaacgacggggctgagccactttgttcgacctgtatgaataatgaaacaactgtatgttccctcggtacgc

SEQ ID NO: 24911 - protein, 308 aa, Zea mays subsp. mays
  peptide (1)..(308): Ceres Seq. ID no. 12410359
  misc_feature (111)..(308): Pfam Name: Pfam Description:  Chitinase class I
  misc_feature (29)..(308): NCBI GI NO: 283037 NR Description: chitinase (EC 3.2.1.14) A - maize
  misc_feature (29)..(308): NCBI GI NO: 116329 NR Description: ENDOCHITINASE A PRECURSOR (SEED CHITINASE A)
  misc_feature (35)..(308): NCBI GI NO: 15213848 NR Description: chitinase-B [Saccharum officinarum]
  misc_feature (33)..(308): NCBI GI NO: 116333 NR Description: ENDOCHITINASE B PRECURSOR (SEED CHITINASE B)
  misc_feature (34)..(308): NCBI GI NO: 482985 NR Description: chitinase (EC 3
  misc_feature (35)..(308): NCBI GI NO: 15213852 NR Description: chitinase-B [Sorghum halepense]
  misc_feature (29)..(308): NCBI GI NO: 15529119 NR Description: chitinase-B1 [Sorghum bicolor]
  misc_feature (35)..(308): NCBI GI NO: 15529117 NR Description: chitinase-B [Sorghum bicolor]
  misc_feature (35)..(308): NCBI GI NO: 15529121 NR Description: chitinase-B [Sorghum bicolor]
  misc_feature (35)..(308): NCBI GI NO: 15213850 NR Description: chitinase-B [Sorghum arundinaceum]
ITSHNKLHRSNEHEPWQNEAEVVRCEPSMANAPRILALGLLALLCAAAGPAAAQNCGCQPNFCCSKFGYCGTTDAYCGDGCQSGPCRSDGGGGGGGGGGGGGSGGANVANVVTDAFFNGIKNQAGSGCEGKNFYTRSAFLSAVNKYPGFAHGGTEVEGKREIAAFFAHVTHETGHFCYISEINKSNAYCDASNRQWPCAAGQKYYGRGPLQISWNYNYGPAGRDIGFNGLADPNRVAQDAVIAFKTALWFWMNNVHRVMPQGFGATIRAINGALECNGNNPAQMNARVGYYKQYCQQLRVDPGPNLTC

SEQ ID NO: 24912 - protein, 280 aa, Zea mays subsp. mays
  peptide (1)..(280): Ceres Seq. ID no. 12410360
  misc_feature (83)..(280): Pfam Name: Pfam Description:  Chitinase class I
  misc_feature (1)..(280): NCBI GI NO: 283037 NR Description: chitinase (EC 3.2.1.14) A - maize
  misc_feature (1)..(280): NCBI GI NO: 116329 NR Description: ENDOCHITINASE A PRECURSOR (SEED CHITINASE A)
  misc_feature (7)..(280): NCBI GI NO: 15213848 NR Description: chitinase-B [Saccharum officinarum]
  misc_feature (5)..(280): NCBI GI NO: 116333 NR Description: ENDOCHITINASE B PRECURSOR (SEED CHITINASE B)
  misc_feature (6)..(280): NCBI GI NO: 482985 NR Description: chitinase (EC 3
  misc_feature (7)..(280): NCBI GI NO: 15213852 NR Description: chitinase-B [Sorghum halepense]
  misc_feature (1)..(280): NCBI GI NO: 15529119 NR Description: chitinase-B1 [Sorghum bicolor]
  misc_feature (7)..(280): NCBI GI NO: 15529117 NR Description: chitinase-B [Sorghum bicolor]
  misc_feature (7)..(280): NCBI GI NO: 15529121 NR Description: chitinase-B [Sorghum bicolor]
  misc_feature (7)..(280): NCBI GI NO: 15213850 NR Description: chitinase-B [Sorghum arundinaceum]
MANAPRILALGLLALLCAAAGPAAAQNCGCQPNFCCSKFGYCGTTDAYCGDGCQSGPCRSDGGGGGGGGGGGGGSGGANVANVVTDAFFNGIKNQAGSGCEGKNFYTRSAFLSAVNKYPGFAHGGTEVEGKREIAAFFAHVTHETGHFCYISEINKSNAYCDASNRQWPCAAGQKYYGRGPLQISWNYNYGPAGRDIGFNGLADPNRVAQDAVIAFKTALWFWMNNVHRVMPQGFGATIRAINGALECNGNNPAQMNARVGYYKQYCQQLRVDPGPNLTC

SEQ ID NO: 24913 - DNA, 1103 bp, Zea mays subsp. mays
  misc_feature (1)..(1103): Ceres Seq. ID no. 12349943
aaagccctcctctcctctcccctctccctcgcggcctcgccttatccccttcgtcactcacctcgaccaccgccatggccatggccttggcctccgcgaccgccgccgcactcttccgctccgccctgtccgcgccacacggcgccggcgcgcgcgtccggccgcagcgccggcagccgttcttggctccgctccacgcggcgaagggccccggctcggcgccggtggtgctggagggcaaggccaagggaaagaagaagaaggggcccagctccgggaaccttcccgcagccctcgacgtcgagatcagggaggcgcaggagtacctcgacagcgaccagcaggaacctgttccagaaaactttccatttgaattaatcgacgaagagggtatgagcgtggttattttgagaagggactacaaggacgagaaggtcgaggttactgtcagcatgcctaatttagaaggaggccccgagtttggtgatgaggatggcgagggcgatggtgagagcgctgccaaggacgacggagaagcagaagaagatgacgagagtgccggggagagcagcatctctcttaaggtggtagtttccaaagactctggcccagagctcgagttcacatgcacagccttccgcgaggagatcaccatcgatgatatgctgatagtggagaaaacagacgacgacgacggagaagagaagttcccctacgagggccccgagttcaccgagctccctgtgaatgttcagaaaggcctgttcaagtacctggagcaaagaggggtaacgctgtcggctaccaactatatgcacgattacatggtgactaagcaggctcaggagtacatccggtggatgactaagctgaaggatttcgtggcgcagtgaggaacagcgtcgtgattcggcagcattgtttggttagcctagccttagcatgtgttacagccttacaggaacactacgactacaccgaattggccacactccccaaaaaacaaaaaagggggagcattgtatctgcttcaatgtatctgtatcagctggcaaaacagtagcaagtagatttccagtaatgtttagtggtgggcattaggt

SEQ ID NO: 24914 - protein, 296 aa, Zea mays subsp. mays
  peptide (1)..(296): Ceres Seq. ID no. 12349944
  misc_feature (98)..(294): Pfam Name: Pfam Description:  Mitochondrial glycoprotein
  misc_feature (24)..(296): NCBI GI NO: 34895742 NR Description: P0019D06.29
  misc_feature (24)..(294): NCBI GI NO: 34895730 NR Description: P0019D06.23
  misc_feature (90)..(296): NCBI GI NO: 11357566 NR Description: hypothetical protein F1I16
  misc_feature (90)..(296): NCBI GI NO: 18410318 NR Description: Expressed protein; protein id: At3g55605
  misc_feature (85)..(294): NCBI GI NO: 15239320 NR Description: putative protein; protein id: At5g05990
  misc_feature (48)..(295): NCBI GI NO: 34895740 NR Description: P0019D06.28
  misc_feature (30)..(294): NCBI GI NO: 15241669 NR Description: putative protein; protein id: At5g02050
  misc_feature (30)..(294): NCBI GI NO: 21592321 NR Description: unknown [Arabidopsis thaliana]
  misc_feature (171)..(296): NCBI GI NO: 7487698 NR Description: hypothetical protein At2g39790
  misc_feature (90)..(170): NCBI GI NO: 7487698 NR Description: hypothetical protein At2g39790
SPPLLSPLPRGLALSPSSLTSTTAMAMALASATAAALFRSALSAPHGAGARVRPQRRQPFLAPLHAAKGPGSAPVVLEGKAKGKKKKGPSSGNLPAALDVEIREAQEYLDSDQQEPVPENFPFELIDEEGMSVVILRRDYKDEKVEVTVSMPNLEGGPEFGDEDGEGDGESAAKDDGEAEEDDESAGESSISLKVVVSKDSGPELEFTCTAFREEITIDDMLIVEKTDDDDGEEKFPYEGPEFTELPVNVQKGLFKYLEQRGVTLSATNYMHDYMVTKQAQEYIRWMTKLKDFVAQ

SEQ ID NO: 24915 - protein, 272 aa, Zea mays subsp. mays
  peptide (1)..(272): Ceres Seq. ID no. 12349945
  misc_feature (74)..(270): Pfam Name: Pfam Description:  Mitochondrial glycoprotein
  misc_feature (1)..(272): NCBI GI NO: 34895742 NR Description: P0019D06.29
  misc_feature (1)..(270): NCBI GI NO: 34895730 NR Description: P0019D06.23
  misc_feature (66)..(272): NCBI GI NO: 11357566 NR Description: hypothetical protein F1I16
  misc_feature (66)..(272): NCBI GI NO: 18410318 NR Description: Expressed protein; protein id: At3g55605
  misc_feature (61)..(270): NCBI GI NO: 15239320 NR Description: putative protein; protein id: At5g05990
  misc_feature (24)..(271): NCBI GI NO: 34895740 NR Description: P0019D06.28
  misc_feature (6)..(270): NCBI GI NO: 15241669 NR Description: putative protein; protein id: At5g02050
  misc_feature (6)..(270): NCBI GI NO: 21592321 NR Description: unknown [Arabidopsis thaliana]
  misc_feature (147)..(272): NCBI GI NO: 7487698 NR Description: hypothetical protein At2g39790
  misc_feature (66)..(146): NCBI GI NO: 7487698 NR Description: hypothetical protein At2g39790
MAMALASATAAALFRSALSAPHGAGARVRPQRRQPFLAPLHAAKGPGSAPVVLEGKAKGKKKKGPSSGNLPAALDVEIREAQEYLDSDQQEPVPENFPFELIDEEGMSVVILRRDYKDEKVEVTVSMPNLEGGPEFGDEDGEGDGESAAKDDGEAEEDDESAGESSISLKVVVSKDSGPELEFTCTAFREEITIDDMLIVEKTDDDDGEEKFPYEGPEFTELPVNVQKGLFKYLEQRGVTLSATNYMHDYMVTKQAQEYIRWMTKLKDFVAQ

SEQ ID NO: 24916 - protein, 270 aa, Zea mays subsp. mays
  peptide (1)..(270): Ceres Seq. ID no. 12349946
  misc_feature (72)..(268): Pfam Name: Pfam Description:  Mitochondrial glycoprotein
  misc_feature (1)..(270): NCBI GI NO: 34895742 NR Description: P0019D06.29
  misc_feature (1)..(268): NCBI GI NO: 34895730 NR Description: P0019D06.23
  misc_feature (64)..(270): NCBI GI NO: 11357566 NR Description: hypothetical protein F1I16
  misc_feature (64)..(270): NCBI GI NO: 18410318 NR Description: Expressed protein; protein id: At3g55605
  misc_feature (59)..(268): NCBI GI NO: 15239320 NR Description: putative protein; protein id: At5g05990
  misc_feature (22)..(269): NCBI GI NO: 34895740 NR Description: P0019D06.28
  misc_feature (4)..(268): NCBI GI NO: 15241669 NR Description: putative protein; protein id: At5g02050
  misc_feature (4)..(268): NCBI GI NO: 21592321 NR Description: unknown [Arabidopsis thaliana]
  misc_feature (145)..(270): NCBI GI NO: 7487698 NR Description: hypothetical protein At2g39790
  misc_feature (64)..(144): NCBI GI NO: 7487698 NR Description: hypothetical protein At2g39790
MALASATAAALFRSALSAPHGAGARVRPQRRQPFLAPLHAAKGPGSAPVVLEGKAKGKKKKGPSSGNLPAALDVEIREAQEYLDSDQQEPVPENFPFELIDEEGMSVVILRRDYKDEKVEVTVSMPNLEGGPEFGDEDGEGDGESAAKDDGEAEEDDESAGESSISLKVVVSKDSGPELEFTCTAFREEITIDDMLIVEKTDDDDGEEKFPYEGPEFTELPVNVQKGLFKYLEQRGVTLSATNYMHDYMVTKQAQEYIRWMTKLKDFVAQ

SEQ ID NO: 24917 - DNA, 1055 bp, Zea mays subsp. mays
  misc_feature (1)..(1055): Ceres Seq. ID no. 12356111
gctctgctttgctcccgttcccatgctgatttttttaggcggctgctggcctgcctgtctccactggaagctccggattacgtagaaaaggggcgggcggcatgaggatccagtgcgacgcgtgcgaggccgcggcggccgcggtggtgtgctgcgccgacgaggcggcgctgtgcgcgcgctgcgacgtggagatccacgccgccaacaagctcgccagcaagcaccagcggctcccgctcggcgacgccgcggcgctccccgccagcctcccgcgctgcgacgtgtgccaggagaggccggccttcatcttctgcgtcgaggacagggcgctcctctgccgccgactgcgacgagcccatccacgtccccggcacgctctccggcaaccaccagcgctacctcgccaccggcatccgcgtcggcttcagctccgtctgcggcgccagcgccgagggcctcccgccggcgccgcccaagggcagctccaagcccgcggccgtcgtcagcgcgccagctgccgggacgaccaccaaaacaaggacggtcaaggacgcgctgccgcaggaggtgccgtcctcgccgttcctgccaccgtccggttgggccgtcgaggacctcctcgagctgtcggactacgaatccagcgacaagaaagactcgtctcttgggctcaaggagctggagtggttcgaggacatcgacctgttccacgcccattcgccagctaaaactgccatggcggagttcttcgcctcgccgcagccagtgagtaacgccgggttctacaaggcgaacggggcgcgcctgttcaagaagtcacggatggaagtgcctgacgacgacgacgaggactacttcatcgttcctgatcttggctgagatgagagatctctgcatgattctccagtcatgtgatgtgtgtatgtatgcaaaatatgtatgtatgccatcatggggtgcactgacgcttacgttggacatatgtaattatccagtcatgtgatgtgtatgtacgcaaaatatgtatgtatgccatcatgggatgcactggc

SEQ ID NO: 24918 - protein, 209 aa, Zea mays subsp. mays
  peptide (1)..(209): Ceres Seq. ID no. 12356112
  misc_feature (1)..(47): Pfam Name: Pfam Description:  B-box zinc finger
  misc_feature (1)..(81): NCBI GI NO: 3618310 NR Description: zinc finger protein
  misc_feature (4)..(44): NCBI GI NO: 3618310 NR Description: zinc finger protein
  misc_feature (1)..(81): NCBI GI NO: 3618314 NR Description: zinc finger protein
  misc_feature (1)..(81): NCBI GI NO: 15221367 NR Description: salt-tolerance protein; protein id: At1g06040
  misc_feature (1)..(81): NCBI GI NO: 30679541 NR Description: salt-tolerance protein [Arabidopsis thaliana]
  misc_feature (1)..(96): NCBI GI NO: 18402646 NR Description: salt tolerance-like protein; protein id:At2g31380
  misc_feature (1)..(96): NCBI GI NO: 25408150 NR Description: hypothetical protein At2g31380
  misc_feature (1)..(82): NCBI GI NO: 17433085 NR Description: Zinc finger protein constans-like 7
  misc_feature (1)..(82): NCBI GI NO: 18412037 NR Description: CONSTANS B-box zinc finger family protein
  misc_feature (1)..(81): NCBI GI NO: 7489603 NR Description: zinc-finger protein R2931 [imported] - rice
MRIQCDACEAAAAAVVCCADEAALCARCDVEIHAANKLASKHQRLPLGDAAALPASLPRCDVCQERPAFIFCVEDRALLCRRLRRAHPRPRHALRQPPALPRHRHPRRLQLRLRRQRRGPPAGAAQGQLQARGRRQRASCRDDHQNKDGQGRAAAGGAVLAVPATVRLGRRGPPRAVGLRIQRQERLVSWAQGAGVVRGHRPVPRPFAS

SEQ ID NO: 24919 - DNA, 1250 bp, Zea mays subsp. mays
  misc_feature (1)..(1250): Ceres Seq. ID no. 12402650
gtccttgtgcgttccttgtagccatctccgactccgcgcctccgctgcctcccgaaagcattgccagttcctccgcacaacatgacgcgcatccaccgcctccgccccctcttcctcttcgttctcttggcgtcgctgcaatgcggtgcggcgacggcggcggctggatacggaggtggcgccgaggggttctgctcggcggagccgtccagcaagtgctccggggatcagccgctctactggaaggtcacccatcccaccctcgcgcccgcgcacctccaagatttacctggcttcacacgtagtgttttcaaaagggatcatgctttaataacaccagagagtcatgtattcagtcctttgcctgattggatcaatacagtaggagcatatttgatcagtccagctattggtgcacacttcattatgtatctagcaaacatgcaagatggttcaaaatcagccctaccaccgaaagatgttgaaaggtggattcttatggatatcttcctgcaaacacaaagcattctatgatctcagatgaaccaaccactcttgtaatatttgagaggaggtacaatgccattgaggattcccatcctgatctaattgtgggttcaacagataagcaaccccttctcgaaaccccgggagaggtatttcaactaaggaagctgctaccgacttctctgtcctatgactttaatatccatataatggactttcaaccaggcgaatatctcaatgtaaaggaggttcattataatcaacatggacttcttcttttagaggggcaagcaatataccgactgggagagagttggtatcccgtgcaagctggggataccatttggatggcaccgtttgttcctcagtggtatgctgcccttggtaagaccaggacgagatacttgctgtacaaagatgtcaataggaatccattgatatgatcaagaaaccagaacaaggagggaataaatcaaatgtcgagctgtgccaggtataaagaatttcaatgggagatgatcacaggaatgagaaaaggagatcttattgtatgctgaaaaatcttgaaaccaaaaataacgtgggaagttgaatgtgtacttgtgatgtccataactgtcaatctttggtgactagtgcgactggaattgtgatgtaacgtattctggacagcagatgccaagttggatatgctgtgacatttgtgaatggctaatcccatgaatttaggtgatgtttggttt

SEQ ID NO: 24920 - protein, 150 aa, Zea mays subsp. mays
  peptide (1)..(150): Ceres Seq. ID no. 12402651
  misc_feature (73)..(140): Pfam Name: DUF923 Pfam Description: Protein of unknown function
  misc_feature (9)..(140): NCBI GI NO: 34393580 NR Description: putative glyoxylate induced protein
  misc_feature (35)..(140): NCBI GI NO: 22328740 NR Description: hypothetical protein; protein id: At4g17050.1
  misc_feature (9)..(125): NCBI GI NO: 34901774 NR Description: OJ1058_B11.16
  misc_feature (71)..(127): NCBI GI NO: 15806172 NR Description: conserved hypothetical protein
  misc_feature (58)..(130): NCBI GI NO: 27375364 NR Description: blr0253 [Bradyrhizobium japonicum]
MTRIHRLRPLFLFVLLASLQCGAATAAAGYGGGAEGFCSAEPSSKCSGDQPLYWKVTHPTLAPAHLQDLPGFTRSVFKRDHALITPESHVFSPLPDWINTVGAYLISPAIGAHFIMYLANMQDGSKSALPPKDVERWILMDIFLQTQSIL

SEQ ID NO: 24921 - protein, 139 aa, Zea mays subsp. mays
  peptide (1)..(139): Ceres Seq. ID no. 12402652
  misc_feature (1)..(138): Pfam Name: DUF923 Pfam Description: Protein of unknown function
  misc_feature (1)..(139): NCBI GI NO: 34393580 NR Description: putative glyoxylate induced protein
  misc_feature (1)..(138): NCBI GI NO: 22328740 NR Description: hypothetical protein; protein id: At4g17050.1
  misc_feature (1)..(74): NCBI GI NO: 34901774 NR Description: OJ1058_B11.16
  misc_feature (6)..(132): NCBI GI NO: 7485211 NR Description: hypothetical protein - Arabidopsis thaliana
  misc_feature (1)..(138): NCBI GI NO: 15806172 NR Description: conserved hypothetical protein
  misc_feature (1)..(139): NCBI GI NO: 27375364 NR Description: blr0253 [Bradyrhizobium japonicum]
  misc_feature (1)..(136): NCBI GI NO: 23113628 NR Description: hypothetical protein
  misc_feature (1)..(139): NCBI GI NO: 22962544 NR Description: hypothetical protein [Rhodopseudomonas palustris]
  misc_feature (1)..(139): NCBI GI NO: 39933630 NR Description: conserved hypothetical protein
  misc_feature (1)..(136): NCBI GI NO: 16265139 NR Description: conserved hypothetical protein
MISDEPTTLVIFERRYNAIEDSHPDLIVGSTDKQPLLETPGEVFQLRKLLPTSLSYDFNIHIMDFQPGEYLNVKEVHYNQHGLLLLEGQAIYRLGESWYPVQAGDTIWMAPFVPQWYAALGKTRTRYLLYKDVNRNPLI

SEQ ID NO: 24922 - protein, 100 aa, Zea mays subsp. mays
  peptide (1)..(100): Ceres Seq. ID no. 12402653
PCAFLVAISDSAPPLPPESIASSSAQHDAHPPPPPPLPLRSLGVAAMRCGDGGGWIRRWRRGVLLGGAVQQVLRGSAALLEGHPSHPRARAPPRFTWLHT

SEQ ID NO: 24923 - DNA, 686 bp, Zea mays subsp. mays
  misc_feature (1)..(686): Ceres Seq. ID no. 12345930
tttttttttccccacctactacttcctctgctcgcggctcgccttcgtcggatcggatccacagcaagcagcaacagcctgcagccggcagtcctcgcctccgcctcctccaccctgaccgtcaacagaggaagacgaggatgtcgggatccaaggtgtacaccctcgaggaggtggctaagcacaacaccaaggacgactgctggctcgtcatcggcggcaaggtgtacaatgtgaccaagtttctggaggatcaccctggaggcgatgatgttctgctgtcttccactgccaaggatgctaccgatgatttcgaagatgtggggcacagcagcactgcccgtgcaatgatggacgagtacttagtgggtgagattgatgcagccacgatacccaccaaggtgaagtacacgccccccaagcagccgcactacaaccaggacaagacccaggagttcgtcatcaagatcctccagtttttggtccccctcgcaatactgggtctgggccgtcgctgtaaggatgtacaccaagtcggaatctgcctagtctcttgtcatcaacgcttcaaacatcattcacaaactgaataagttagtgttgaaatgctgcaaagatcattaattctgaaacttgagtctttgctgtcgtgtgagacgtacgtctattagtataaaatcacttct

SEQ ID NO: 24924 - protein, 196 aa, Zea mays subsp. mays
  peptide (1)..(196): Ceres Seq. ID no. 12345931
  misc_feature (52)..(126): Pfam Name: Pfam Description:  Cytochrome b5-like Heme/Steroid binding domain
  misc_feature (47)..(168): NCBI GI NO: 34905998 NR Description: putative cytochrome B5
  misc_feature (51)..(168): NCBI GI NO: 14719320 NR Description: cytochrome B5 [Oryza sativa]
  misc_feature (51)..(168): NCBI GI NO: 1345881 NR Description: Cytochrome b5
  misc_feature (47)..(168): NCBI GI NO: 1345925 NR Description: Cytochrome b5, seed isoform
  misc_feature (50)..(168): NCBI GI NO: 15225731 NR Description: putative cytochrome b5; protein id: At2g32720.1
  misc_feature (47)..(168): NCBI GI NO: 1076621 NR Description: cytochrome b5 - common tobacco
  misc_feature (47)..(168): NCBI GI NO: 1345882 NR Description: CYTOCHROME B5
  misc_feature (47)..(168): NCBI GI NO: 1345879 NR Description: Cytochrome b5
  misc_feature (50)..(168): NCBI GI NO: 2647949 NR Description: cytochrome b5 [Olea europaea]
  misc_feature (51)..(166): NCBI GI NO: 12229735 NR Description: Cytochrome b5
FFSPPTTSSARGSPSSDRIHSKQQQPAAGSPRLRLLHPDRQQRKTRMSGSKVYTLEEVAKHNTKDDCWLVIGGKVYNVTKFLEDHPGGDDVLLSSTAKDATDDFEDVGHSSTARAMMDEYLVGEIDAATIPTKVKYTPPKQPHYNQDKTQEFVIKILQFLVPLAILGLGRRCKDVHQVGICLVSCHQRFKHHSQTE

SEQ ID NO: 24925 - protein, 150 aa, Zea mays subsp. mays
  peptide (1)..(150): Ceres Seq. ID no. 12345932
  misc_feature (6)..(80): Pfam Name: Pfam Description:  Cytochrome b5-like Heme/Steroid binding domain
  misc_feature (1)..(122): NCBI GI NO: 34905998 NR Description: putative cytochrome B5
  misc_feature (5)..(122): NCBI GI NO: 14719320 NR Description: cytochrome B5 [Oryza sativa]
  misc_feature (5)..(122): NCBI GI NO: 1345881 NR Description: Cytochrome b5
  misc_feature (1)..(122): NCBI GI NO: 1345925 NR Description: Cytochrome b5, seed isoform
  misc_feature (4)..(122): NCBI GI NO: 15225731 NR Description: putative cytochrome b5; protein id: At2g32720.1
  misc_feature (1)..(122): NCBI GI NO: 1076621 NR Description: cytochrome b5 - common tobacco
  misc_feature (1)..(122): NCBI GI NO: 1345882 NR Description: CYTOCHROME B5
  misc_feature (1)..(122): NCBI GI NO: 1345879 NR Description: Cytochrome b5
  misc_feature (4)..(122): NCBI GI NO: 2647949 NR Description: cytochrome b5 [Olea europaea]
  misc_feature (5)..(120): NCBI GI NO: 12229735 NR Description: Cytochrome b5
MSGSKVYTLEEVAKHNTKDDCWLVIGGKVYNVTKFLEDHPGGDDVLLSSTAKDATDDFEDVGHSSTARAMMDEYLVGEIDAATIPTKVKYTPPKQPHYNQDKTQEFVIKILQFLVPLAILGLGRRCKDVHQVGICLVSCHQRFKHHSQTE

SEQ ID NO: 24926 - DNA, 932 bp, Zea mays subsp. mays
  misc_feature (1)..(932): Ceres Seq. ID no. 12400274
gccgccgtagctggtagctaagctacgtgaagaagatggttgggctcctccgtccactctccgccgccgccaccttactcctcgcccccgccacgccactcactggttcctcagtctccgctagttccgtcggcggcaggcggtggagaagcgtgagggcggacgccggcgggggctggctatccgggctgctgggcggcaagggcggcggcgcgtccacggcgatgatggtgacgccgggaaccgtgaaggccggcgaccccgtcctgcacgagcccgcgcaggaggtggcgccgggggacgtgctgtccgagaaggtgcagggcgtcatcgaccggatggtcgacgtcatgcgcagggccccaggcgtcggcctcgccgcccccgcagatcggcgtcccgctcaggattattgttctcgaggatacgcaggagtacatcagctatgcacccaagaaggacatcgaagcacaagaccgccgcccctttgatcttctcgtcggtcattatcaatccaaagattaagagcacgagtaaaagaaccgcgctgttctttgagggatgtctcagtgttgatggatacagggcggtcgtggagcggcatctggacgttgaagtttcaggtctggaccggaatgggagcaccatgaaggtacgggcttcaggatggcaagcgcgcatcctccagcatgaatgtgatcatcttgaaggcacgctgtatgttgacaagatggtagcaaggacattcagggtcgtcgagaacttggatttgccccttcccactggatgccctcaactaggtgcaagataatggggatagctttccatttttcctcgtcgaatagatgtgattctctctctctttttgaaaattacaacgtctcatgtacagtattgcattttgcttcccgtctaattgctgtgtttgttct

SEQ ID NO: 24927 - protein, 151 aa, Zea mays subsp. mays
  peptide (1)..(151): Ceres Seq. ID no. 12400275
  misc_feature (5)..(117): NCBI GI NO: 34913982 NR Description: peptide deformylase-like protein
  misc_feature (26)..(117): NCBI GI NO: 17433049 NR Description: Peptide deformylase, mitochondrial precursor
  misc_feature (47)..(117): NCBI GI NO: 17433051 NR Description: Peptide deformylase, mitochondrial precursor
  misc_feature (47)..(117): NCBI GI NO: 18394237 NR Description: expressed protein; protein id: At1g15390
  misc_feature (71)..(117): NCBI GI NO: 37521298 NR Description: polypeptide deformylase [Gloeobacter violaceus]
  misc_feature (71)..(117): NCBI GI NO: 39930960 NR Description: Peptide deformylase 1
  misc_feature (74)..(117): NCBI GI NO: 24645728 NR Description: CG31373-PA [Drosophila melanogaster]
  misc_feature (72)..(124): NCBI GI NO: 11641243 NR Description: peptide deformylase-like protein [Homo sapiens]
  misc_feature (72)..(124): NCBI GI NO: 18043802 NR Description: peptide deformylase-like protein [Homo sapiens]
  misc_feature (72)..(124): NCBI GI NO: 34851655 NR Description: similar to peptide deformylase-like protein
MVGLLRPLSAAATLLLAPATPLTGSSVSASSVGGRRWRSVRADAGGGWLSGLLGGKGGGASTAMMVTPGTVKAGDPVLHEPAQEVAPGDVLSEKVQGVIDRMVDVMRRAPGVGLAAPADRRPAQDYCSRGYAGVHQLCTQEGHRSTRPPPL

SEQ ID NO: 24928 - protein, 121 aa, Zea mays subsp. mays
  peptide (1)..(121): Ceres Seq. ID no. 12400276
  misc_feature (20)..(102): NCBI GI NO: 34913982 NR Description: peptide deformylase-like protein
  misc_feature (20)..(119): NCBI GI NO: 17433049 NR Description: Peptide deformylase, mitochondrial precursor
  misc_feature (20)..(119): NCBI GI NO: 17433051 NR Description: Peptide deformylase, mitochondrial precursor
  misc_feature (20)..(119): NCBI GI NO: 18394237 NR Description: expressed protein; protein id: At1g15390
  misc_feature (8)..(108): NCBI GI NO: 37521298 NR Description: polypeptide deformylase [Gloeobacter violaceus]
  misc_feature (8)..(108): NCBI GI NO: 39930960 NR Description: Peptide deformylase 1
  misc_feature (19)..(104): NCBI GI NO: 24645728 NR Description: CG31373-PA [Drosophila melanogaster]
  misc_feature (20)..(101): NCBI GI NO: 11641243 NR Description: peptide deformylase-like protein [Homo sapiens]
  misc_feature (20)..(101): NCBI GI NO: 18043802 NR Description: peptide deformylase-like protein [Homo sapiens]
  misc_feature (1)..(101): NCBI GI NO: 34851655 NR Description: similar to peptide deformylase-like protein
MHPRRTSKHKTAAPLIFSSVIINPKIKSTSKRTALFFEGCLSVDGYRAVVERHLDVEVSGLDRNGSTMKVRASGWQARILQHECDHLEGTLYVDKMVARTFRVVENLDLPLPTGCPQLGAR

SEQ ID NO: 24929 - protein, 88 aa, Zea mays subsp. mays
  peptide (1)..(88): Ceres Seq. ID no. 12400277
  misc_feature (1)..(54): NCBI GI NO: 34913982 NR Description: peptide deformylase-like protein
  misc_feature (1)..(54): NCBI GI NO: 17433049 NR Description: Peptide deformylase, mitochondrial precursor
  misc_feature (1)..(54): NCBI GI NO: 17433051 NR Description: Peptide deformylase, mitochondrial precursor
  misc_feature (1)..(54): NCBI GI NO: 18394237 NR Description: expressed protein; protein id: At1g15390
  misc_feature (8)..(54): NCBI GI NO: 37521298 NR Description: polypeptide deformylase [Gloeobacter violaceus]
  misc_feature (8)..(54): NCBI GI NO: 39930960 NR Description: Peptide deformylase 1
  misc_feature (11)..(54): NCBI GI NO: 24645728 NR Description: CG31373-PA [Drosophila melanogaster]
  misc_feature (9)..(61): NCBI GI NO: 11641243 NR Description: peptide deformylase-like protein [Homo sapiens]
  misc_feature (9)..(61): NCBI GI NO: 18043802 NR Description: peptide deformylase-like protein [Homo sapiens]
  misc_feature (9)..(61): NCBI GI NO: 34851655 NR Description: similar to peptide deformylase-like protein
MMVTPGTVKAGDPVLHEPAQEVAPGDVLSEKVQGVIDRMVDVMRRAPGVGLAAPADRRPAQDYCSRGYAGVHQLCTQEGHRSTRPPPL

SEQ ID NO: 24930 - DNA, 921 bp, Zea mays subsp. mays
  misc_feature (1)..(921): Ceres Seq. ID no. 12588519
atcagaaccgatccttacagagagacacacccagcgcgcgagatatctacatcgatcatcatcaccagcgagcgagccggccgagcagcaccgatggcggcgtacatgcgcgtgacgcaccgcgacgaggaaggcaagaaggtgacggagaagatgccggtcccggagacgcggcgcccggacacggccaagcacttcgagcgcaagctggaggagcagggcctccaccgcttcgagcggcacccggcgaacgcgccccggggcgtgggcatcggcgccccgccgcccaagtccgggcgcggcggcaagtacacctgggagggccccggcagcgtcgtcgaggaccagctcgacccggcgcccgcccgccatcgaccccaacgaccccaactacgaggagggaggggcggcggacgaggacgacgaggcggccagtgagatcgccggattcgtggtgggtgccctgctgctcggcgccaccatcgctgcccccaaggtcgacggcttcatcgcctcctcccagagaaggtcactagggatgtgtaagaggtgcggtgaccttcggattgtagcatgctcgcagtgcaagggaacaggatcagctcggagcggagggatgctcagtttgggcgtgctggatgacctctacgagtctcttggagccgaagccaagactgagaatctggttccctgcacaaagtgcaggtcgagaggccgtctcatgtgtccagaatgctccaaggtcgcatgaccctggcctggagccgtgtactcggtcagaacacatgtacggctctgacaaacacaaatcactgctgtcactgtttgtgtttgaacattattatgtgcatggaattcctgacccgactactggtggttagggatggtccactgtctcaatgcagttgttttcagtgcttt

SEQ ID NO: 24931 - protein, 177 aa, Zea mays subsp. mays
  peptide (1)..(177): Ceres Seq. ID no. 12588520
QNRSLQRDTPSARDIYIDHHHQRASRPSSTDGGVHARDAPRRGRQEGDGEDAGPGDAAPGHGQALRAQAGGAGPPPLRAAPGERAPGRGHRRPAAQVRARRQVHLGGPRQRRRGPARPGARPPSTPTTPTTRREGRRTRTTRRPVRSPDSWWVPCCSAPPSLPPRSTASSPPPREGH

SEQ ID NO: 24932 - protein, 145 aa, Zea mays subsp. mays
  peptide (1)..(145): Ceres Seq. ID no. 12588521
  misc_feature (36)..(121): NCBI GI NO: 18398726 NR Description: expressed protein; protein id: At3g10020
IRTDPYRETHPAREISTSIIITSERAGRAAPMAAYMRVTHRDEEGKKVTEKMPVPETRRPDTAKHFERKLEEQGLHRFERHPANAPRGVGIGAPPPKSGRGGKYTWEGPGSVVEDQLDPAPARHRPQRPQLRGGRGGGRGRRGGQ

SEQ ID NO: 24933 - protein, 114 aa, Zea mays subsp. mays
  peptide (1)..(114): Ceres Seq. ID no. 12588522
  misc_feature (5)..(90): NCBI GI NO: 18398726 NR Description: expressed protein; protein id: At3g10020
MAAYMRVTHRDEEGKKVTEKMPVPETRRPDTAKHFERKLEEQGLHRFERHPANAPRGVGIGAPPPKSGRGGKYTWEGPGSVVEDQLDPAPARHRPQRPQLRGGRGGGRGRRGGQ

SEQ ID NO: 24934 - DNA, 1510 bp, Zea mays subsp. mays
  misc_feature (1)..(1510): Ceres Seq. ID no. 12364196
gcacgagaccattacctagaacatcctaatcgaaaacctgctgcagtgtgcaggactgcagggcaggccctgccgtctgccgcaaaagagagcactaggaaaagaagtgttgcggcgttgcgtggtgggggacgaggccagagcgccccaaaaccaaaaaccccagaaccccgacctagggttacgccatcgccatgggatctgttgcctccgccgctgtgccaccacctcctcctcaatcagcgctgcctcaggcgggcgcgccgccctacgggcccgggctcgccgggatcctcccgcagatgtcgaagggggaggagaagaaggatgagaaggtggactacctcaacctcccctgccccgtgcccttcgaggagatccagcgcgaggctctcatgtctttgaagcctgaactttttgaaggattgagatttgacttcacaaaaggattgaatcagaagttttctcttagccacagcatttttatgggctccttagaagttccagcccaggcatctgaaactattaaagttccaactgcacattatgaatttggcgccaattttttagatccaaagttaatgctcattggaagggtgatgacagatggaaggcttaatgctcgtgtgaaatgtgatttgacagacaatctgacgttgaaagtaaatgcacagcttacccaagaggcacattactcacaagggatgtttaacttcgactacaagggaagtgactatcgagcacaattccaaattgggaacaatgcattctatggtgcaaattatattcagagtgttactccgaacctatcaatgggaactgaaatgttctggcttggtcaccaaaggaagtctggaattggttttgcctctcgctacaacacagacaaaatggtgggcactctacaggtcgcaagcactggaatagttgccttaagttatgtccagaagatttccgagaaggtttcccttgcgtctgacttcatgtataaccatatgtcaagagatgtaactgccagctttggttatgattacttgcttaggcagtgccgcctaagaggcaaaatagactcgaatggtgttgttgccgcatacttggaagagaggttgaacatgggtgtcaacttccttctatctgctgagattgaccattgtaagaagaactacaagtttggttttggaatgaccgtaggagagtaattctgccaaaacaattgctgtgagcgcacatgagatacttatgcagtcggcttcgcgcgtatgttgacttgttaaagatatttcaggtctcagttttgactgatcaggttttgccattgcgccgtggaaaaacacaggccgttgctgctttacagggttttgtgttttttcagctacttgagcatgggggccatgattctttgttcatcttggatgtaactagctgattggtgttccaacaatgttgtattggcggaacaatttttacctttttaaatcactaccaatccacctcactaggccttttctgc

SEQ ID NO: 24935 - protein, 334 aa, Zea mays subsp. mays
  peptide (1)..(334): Ceres Seq. ID no. 12364197
  misc_feature (56)..(327): Pfam Name: Pfam Description:  Eukaryotic porin
  misc_feature (30)..(333): NCBI GI NO: 15231008 NR Description: membrane import protein, putative
  misc_feature (43)..(330): NCBI GI NO: 15222963 NR Description: hypothetical protein; protein id: At1g50400.1
  misc_feature (160)..(333): NCBI GI NO: 11994775 NR Description: membrane import protein-like
  misc_feature (30)..(129): NCBI GI NO: 11994775 NR Description: membrane import protein-like
  misc_feature (157)..(330): NCBI GI NO: 13162531 NR Description: Hypothetical protein [Arabidopsis thaliana]
  misc_feature (43)..(129): NCBI GI NO: 13162531 NR Description: Hypothetical protein [Arabidopsis thaliana]
  misc_feature (157)..(330): NCBI GI NO: 25405370 NR Description: hypothetical protein F14I3.2
  misc_feature (98)..(129): NCBI GI NO: 25405370 NR Description: hypothetical protein F14I3.2
  misc_feature (242)..(334): NCBI GI NO: 2982293 NR Description: ISP42-like protein [Picea mariana]
  misc_feature (1)..(277): NCBI GI NO: 34903264 NR Description: unnamed protein product
MGSVASAAVPPPPPQSALPQAGAPPYGPGLAGILPQMSKGEEKKDEKVDYLNLPCPVPFEEIQREALMSLKPELFEGLRFDFTKGLNQKFSLSHSIFMGSLEVPAQASETIKVPTAHYEFGANFLDPKLMLIGRVMTDGRLNARVKCDLTDNLTLKVNAQLTQEAHYSQGMFNFDYKGSDYRAQFQIGNNAFYGANYIQSVTPNLSMGTEMFWLGHQRKSGIGFASRYNTDKMVGTLQVASTGIVALSYVQKISEKVSLASDFMYNHMSRDVTASFGYDYLLRQCRLRGKIDSNGVVAAYLEERLNMGVNFLLSAEIDHCKKNYKFGFGMTVGE

SEQ ID NO: 24936 - protein, 298 aa, Zea mays subsp. mays
  peptide (1)..(298): Ceres Seq. ID no. 12364198
  misc_feature (20)..(291): Pfam Name: Pfam Description:  Eukaryotic porin
  misc_feature (1)..(297): NCBI GI NO: 15231008 NR Description: membrane import protein, putative
  misc_feature (7)..(294): NCBI GI NO: 15222963 NR Description: hypothetical protein; protein id: At1g50400.1
  misc_feature (124)..(297): NCBI GI NO: 11994775 NR Description: membrane import protein-like
  misc_feature (1)..(93): NCBI GI NO: 11994775 NR Description: membrane import protein-like
  misc_feature (121)..(294): NCBI GI NO: 13162531 NR Description: Hypothetical protein [Arabidopsis thaliana]
  misc_feature (7)..(93): NCBI GI NO: 13162531 NR Description: Hypothetical protein [Arabidopsis thaliana]
  misc_feature (121)..(294): NCBI GI NO: 25405370 NR Description: hypothetical protein F14I3.2
  misc_feature (62)..(93): NCBI GI NO: 25405370 NR Description: hypothetical protein F14I3.2
  misc_feature (206)..(298): NCBI GI NO: 2982293 NR Description: ISP42-like protein [Picea mariana]
  misc_feature (1)..(241): NCBI GI NO: 34903264 NR Description: unnamed protein product
MSKGEEKKDEKVDYLNLPCPVPFEEIQREALMSLKPELFEGLRFDFTKGLNQKFSLSHSIFMGSLEVPAQASETIKVPTAHYEFGANFLDPKLMLIGRVMTDGRLNARVKCDLTDNLTLKVNAQLTQEAHYSQGMFNFDYKGSDYRAQFQIGNNAFYGANYIQSVTPNLSMGTEMFWLGHQRKSGIGFASRYNTDKMVGTLQVASTGIVALSYVQKISEKVSLASDFMYNHMSRDVTASFGYDYLLRQCRLRGKIDSNGVVAAYLEERLNMGVNFLLSAEIDHCKKNYKFGFGMTVGE

SEQ ID NO: 24937 - protein, 267 aa, Zea mays subsp. mays
  peptide (1)..(267): Ceres Seq. ID no. 12364199
  misc_feature (1)..(260): Pfam Name: Pfam Description:  Eukaryotic porin
  misc_feature (1)..(266): NCBI GI NO: 15231008 NR Description: membrane import protein, putative
  misc_feature (1)..(263): NCBI GI NO: 15222963 NR Description: hypothetical protein; protein id: At1g50400.1
  misc_feature (93)..(266): NCBI GI NO: 11994775 NR Description: membrane import protein-like
  misc_feature (1)..(62): NCBI GI NO: 11994775 NR Description: membrane import protein-like
  misc_feature (90)..(263): NCBI GI NO: 13162531 NR Description: Hypothetical protein [Arabidopsis thaliana]
  misc_feature (1)..(62): NCBI GI NO: 13162531 NR Description: Hypothetical protein [Arabidopsis thaliana]
  misc_feature (90)..(263): NCBI GI NO: 25405370 NR Description: hypothetical protein F14I3.2
  misc_feature (31)..(62): NCBI GI NO: 25405370 NR Description: hypothetical protein F14I3.2
  misc_feature (175)..(267): NCBI GI NO: 2982293 NR Description: ISP42-like protein [Picea mariana]
  misc_feature (1)..(210): NCBI GI NO: 34903264 NR Description: unnamed protein product
MSLKPELFEGLRFDFTKGLNQKFSLSHSIFMGSLEVPAQASETIKVPTAHYEFGANFLDPKLMLIGRVMTDGRLNARVKCDLTDNLTLKVNAQLTQEAHYSQGMFNFDYKGSDYRAQFQIGNNAFYGANYIQSVTPNLSMGTEMFWLGHQRKSGIGFASRYNTDKMVGTLQVASTGIVALSYVQKISEKVSLASDFMYNHMSRDVTASFGYDYLLRQCRLRGKIDSNGVVAAYLEERLNMGVNFLLSAEIDHCKKNYKFGFGMTVGE

SEQ ID NO: 24938 - DNA, 1559 bp, Zea mays subsp. mays
  misc_feature (1)..(1559): Ceres Seq. ID no. 12367597
cctaatcgaaaactggtctgaaagccctcactccaaatctcgcgcactgtcagctgacgccaccgcctgcgccagccctcgccaagccggtgaaaacctcgtgccctccgccgcctccgcccgcctcttccagagtaccgcggtctcatctcctcccgggacgggcatgcagagcgcggctgccatcggtctcgttcggccatgcgccgcgcggccgctccccacctaccctagcccacggcgcggcgccggcgcgtgcagcggcgccgcccagccgatcctcgcgccccgcggcctctgcctctccgcccgcgccagcctactgccggcctcgccgctggaggaggagtaccggagatgcagggccggccggcacgtgccggcgcgggaaggtggccgcggctgatggggccgtagaggaagcggggggagggctcgtcaagacgctgcagctggggtcgctcttcgggctctggtacctcttcaacatctacttcaacatctacaacaagcaggttctgaaggttctgccataccctataaacatcaccacagtgcagtttgccgttggaagtgccattgctttgtttatgtggatcaccggtatccttaaaaggccaaagatttctggtgcccagctttttgctatccttcctctagctatcgttcataccatgggcaatcttttcacaaacatgagccttggaaaggttgcggtgtcatttacacatactatcaaggccatggaacctttcttctcagttctcctttcagcaattttccttggtgagttgcctacgccttgggttgtgttgtctcttcttccgatcgttggtggtgtggcattggcatcccttactgaggcctcctttaactgggctggattttggagtgcaatggcttcaaatgtaaccttccagtcaaggaatgtgctaagcaagaaacttatggtgaagaaagaggaatctctcgacaacattaatctattttcgataattacagtcatgtcattcttcctgttggccccagtaaccttacttacagaaggtgttaaagttagtccagcagttttgcagtctgctggtttgaacttgaaacagatatacacaaggtcattgattgctgcatgctgcttccatgcataccaacaggtgtcatacatgatcctcgccagggtatccccagtcacacattcagtgggcaattgcgtcaagcgtgtggtggtcattgtgacctctgttctgttcttcaggacccctgtttctcccatcaactcactcggtaccgggatcgctcttgctggagttttcctatactcgcaattgaagaggcttaagcccaagcccaaggctgcttgatcatagacctttgcaggtccatccaatagaacttttgaagttatgctatgccattggaatgattagtgagtgccgtagttagaatgatgtttaaagaagagctaccacttcagcagataatttgtgacttgcttgcattttttggacggatttgttcgtgtattaataattttgcagtgacgatacttctgttgtgctgtt

SEQ ID NO: 24939 - protein, 255 aa, Zea mays subsp. mays
  peptide (1)..(255): Ceres Seq. ID no. 12367598
  misc_feature (1)..(89): Pfam Name: Pfam Description:  Integral membrane protein DUF6
  misc_feature (1)..(255): NCBI GI NO: 7489742 NR Description: glucose-6-phosphate/ phosphate-translocatorprecursor homolog
  misc_feature (1)..(255): NCBI GI NO: 7489743 NR Description: glucose-6-phosphate/ phosphate-translocatorprecursor homolog
  misc_feature (1)..(255): NCBI GI NO: 13991929 NR Description: phosphoenolpyruvate/phosphate translocator
  misc_feature (1)..(255): NCBI GI NO: 29647427 NR Description: putative phosphoenolpyruvate/phosphate translocator
  misc_feature (1)..(255): NCBI GI NO: 1706110 NR Description: Triose phosphate/phosphate translocator
  misc_feature (1)..(253): NCBI GI NO: 7489171 NR Description: phosphate/ phosphoenolpyruvate translocator TABPPT10precursor
  misc_feature (1)..(255): NCBI GI NO: 7489170 NR Description: phosphate/ phosphoenolpyruvate translocatorprecursor
  misc_feature (1)..(255): NCBI GI NO: 15242801 NR Description: phosphate/ phosphoenolpyruvate translocatorprecursor
  misc_feature (1)..(255): NCBI GI NO: 1778141 NR Description: phosphate/ phosphoenolpyruvate translocatorprecursor
  misc_feature (1)..(255): NCBI GI NO: 7546829 NR Description: phosphate/phosphoenolpyruvate translocator
MWITGILKRPKISGAQLFAILPLAIVHTMGNLFTNMSLGKVAVSFTHTIKAMEPFFSVLLSAIFLGELPTPWVVLSLLPIVGGVALASLTEASFNWAGFWSAMASNVTFQSRNVLSKKLMVKKEESLDNINLFSIITVMSFFLLAPVTLLTEGVKVSPAVLQSAGLNLKQIYTRSLIAACCFHAYQQVSYMILARVSPVTHSVGNCVKRVVVIVTSVLFFRTPVSPINSLGTGIALAGVFLYSQLKRLKPKPKAA

SEQ ID NO: 24940 - protein, 227 aa, Zea mays subsp. mays
  peptide (1)..(227): Ceres Seq. ID no. 12367599
  misc_feature (1)..(61): Pfam Name: Pfam Description:  Integral membrane protein DUF6
  misc_feature (1)..(227): NCBI GI NO: 7489742 NR Description: glucose-6-phosphate/ phosphate-translocatorprecursor homolog
  misc_feature (1)..(227): NCBI GI NO: 7489743 NR Description: glucose-6-phosphate/ phosphate-translocatorprecursor homolog
  misc_feature (1)..(227): NCBI GI NO: 13991929 NR Description: phosphoenolpyruvate/phosphate translocator
  misc_feature (1)..(227): NCBI GI NO: 29647427 NR Description: putative phosphoenolpyruvate/phosphate translocator
  misc_feature (1)..(227): NCBI GI NO: 1706110 NR Description: Triose phosphate/phosphate translocator
  misc_feature (1)..(225): NCBI GI NO: 7489171 NR Description: phosphate/ phosphoenolpyruvate translocator TABPPT10precursor
  misc_feature (1)..(227): NCBI GI NO: 7489170 NR Description: phosphate/ phosphoenolpyruvate translocatorprecursor
  misc_feature (1)..(227): NCBI GI NO: 15242801 NR Description: phosphate/ phosphoenolpyruvate translocatorprecursor
  misc_feature (1)..(227): NCBI GI NO: 1778141 NR Description: phosphate/ phosphoenolpyruvate translocatorprecursor
  misc_feature (1)..(227): NCBI GI NO: 7546829 NR Description: phosphate/phosphoenolpyruvate translocator
MGNLFTNMSLGKVAVSFTHTIKAMEPFFSVLLSAIFLGELPTPWVVLSLLPIVGGVALASLTEASFNWAGFWSAMASNVTFQSRNVLSKKLMVKKEESLDNINLFSIITVMSFFLLAPVTLLTEGVKVSPAVLQSAGLNLKQIYTRSLIAACCFHAYQQVSYMILARVSPVTHSVGNCVKRVVVIVTSVLFFRTPVSPINSLGTGIALAGVFLYSQLKRLKPKPKAA

SEQ ID NO: 24941 - protein, 220 aa, Zea mays subsp. mays
  peptide (1)..(220): Ceres Seq. ID no. 12367600
  misc_feature (1)..(54): Pfam Name: Pfam Description:  Integral membrane protein DUF6
  misc_feature (1)..(220): NCBI GI NO: 7489742 NR Description: glucose-6-phosphate/ phosphate-translocatorprecursor homolog
  misc_feature (1)..(220): NCBI GI NO: 7489743 NR Description: glucose-6-phosphate/ phosphate-translocatorprecursor homolog
  misc_feature (1)..(220): NCBI GI NO: 13991929 NR Description: phosphoenolpyruvate/phosphate translocator
  misc_feature (1)..(220): NCBI GI NO: 29647427 NR Description: putative phosphoenolpyruvate/phosphate translocator
  misc_feature (1)..(220): NCBI GI NO: 1706110 NR Description: Triose phosphate/phosphate translocator
  misc_feature (1)..(218): NCBI GI NO: 7489171 NR Description: phosphate/ phosphoenolpyruvate translocator TABPPT10precursor
  misc_feature (1)..(220): NCBI GI NO: 7489170 NR Description: phosphate/ phosphoenolpyruvate translocatorprecursor
  misc_feature (1)..(220): NCBI GI NO: 15242801 NR Description: phosphate/ phosphoenolpyruvate translocatorprecursor
  misc_feature (1)..(220): NCBI GI NO: 1778141 NR Description: phosphate/ phosphoenolpyruvate translocatorprecursor
  misc_feature (1)..(220): NCBI GI NO: 7546829 NR Description: phosphate/phosphoenolpyruvate translocator
MSLGKVAVSFTHTIKAMEPFFSVLLSAIFLGELPTPWVVLSLLPIVGGVALASLTEASFNWAGFWSAMASNVTFQSRNVLSKKLMVKKEESLDNINLFSIITVMSFFLLAPVTLLTEGVKVSPAVLQSAGLNLKQIYTRSLIAACCFHAYQQVSYMILARVSPVTHSVGNCVKRVVVIVTSVLFFRTPVSPINSLGTGIALAGVFLYSQLKRLKPKPKAA

SEQ ID NO: 24942 - DNA, 1225 bp, Zea mays subsp. mays
  misc_feature (1)..(1225): Ceres Seq. ID no. 13499081
  misc_feature (379)..(379): n is a, c, t, g, unknown, or other
  misc_feature (278)..(278): n is a, c, t, g, unknown, or other
aattttatgaccgtcgaaaaccaaaatttagataggccacccaaatccaggtgcaaatcccaacctccctccctcccaggccccctccccacctccacctccaggcaccactggtcccacctcctcacctgcgaggatgctgctcgtgagtcaggcagcgaacggctccctctccgcgcggcgctgccgtcgaagccgccggggccgtccaccaccaacccctacccgctcttcgccaaccctcgcctcctgcgccgccgcctggcgctctccggcgntggcgccgaccaagccccgcgccgcgccgcgccgaccccagccgccgcgggcgagggcccctccgcctcctccaccgaggacccggtccttgtccgcgtcnccgacgacggcgtgccgctcgagggcgtcatccagattgagaagcccggggatgcggccgccgagtccaagctcgtctcctacgcgaagctgggtcttctggccggcggggacgtgttctgccttctgctgttctctgcgattggaaggttcagccatggcctgcccgtcctcgacgccgagacgttcaagacggccgaccccttcattgctgagtggctgctgagcgcctaccttcttggcggatttggcgatgatgccaaagggcgcaatggcgtcggaagcgcggttatcaccgcagctaaatcatgggctgttgggataccgttgggacttgctatccgagcagtgacgtctggtcatcttccaccaactccttttatcttggtaaccatgggaagtacaggggtcttgttaactgcatggcgtgctttggtatcacaactgttttccaaccagcaaaagcagcaggatgatgtctaccggcgtggaagtccttttgagctttttgagctactcacatcgctggtgcggaggtggtgacatctgaaggctgaagcctatagaaggtaagaagggcattgttccgctctggtatccgcaatcatcaggttcagccatctgtgtctattgtgtaagtacaattttgaaggtgaagaagagcaggctaaaacctagtttggagcatttgccgaacccaaaaaaaatgtttggcaataacacgcccgcgatgttggtttagtatattatattatattcataagatgtactcatattcctgatcttccacttgtaaaattgtatccagcttaacaaatcctaatcgataagaccgttgcctcttgtt

SEQ ID NO: 24943 - protein, 306 aa, Zea mays subsp. mays
  peptide (1)..(306): Ceres Seq. ID no. 13499082
  misc_feature (41)..(306): NCBI GI NO: 28273393 NR Description: unknown protein
  misc_feature (58)..(306): NCBI GI NO: 18401414 NR Description: expressed protein [Arabidopsis thaliana]
  misc_feature (58)..(304): NCBI GI NO: 25405875 NR Description: protein F27F5.3 [imported] - Arabidopsis thaliana
  misc_feature (152)..(269): NCBI GI NO: 22970530 NR Description: hypothetical protein [Chloroflexus aurantiacus]
  misc_feature (93)..(93): Xaa is any aa, unknown or other
  misc_feature (127)..(127): Xaa is any aa, unknown or other
NFMTVENQNLDRPPKSRCKSQPPSLPGPLPTSTSRHHWSHLLTCEDAARESGSERLPLRAALPSKPPGPSTTNPYPLFANPRLLRRRLALSGXGADQAPRRAAPTPAAAGEGPSASSTEDPVLVRVXDDGVPLEGVIQIEKPGDAAAESKLVSYAKLGLLAGGDVFCLLLFSAIGRFSHGLPVLDAETFKTADPFIAEWLLSAYLLGGFGDDAKGRNGVGSAVITAAKSWAVGIPLGLAIRAVTSGHLPPTPFILVTMGSTGVLLTAWRALVSQLFSNQQKQQDDVYRRGSPFELFELLTSLVRRW

SEQ ID NO: 24944 - protein, 304 aa, Zea mays subsp. mays
  peptide (1)..(304): Ceres Seq. ID no. 13499083
  misc_feature (39)..(304): NCBI GI NO: 28273393 NR Description: unknown protein
  misc_feature (56)..(304): NCBI GI NO: 18401414 NR Description: expressed protein [Arabidopsis thaliana]
  misc_feature (56)..(302): NCBI GI NO: 25405875 NR Description: protein F27F5.3 [imported] - Arabidopsis thaliana
  misc_feature (150)..(267): NCBI GI NO: 22970530 NR Description: hypothetical protein [Chloroflexus aurantiacus]
  misc_feature (91)..(91): Xaa is any aa, unknown or other
  misc_feature (125)..(125): Xaa is any aa, unknown or other
MTVENQNLDRPPKSRCKSQPPSLPGPLPTSTSRHHWSHLLTCEDAARESGSERLPLRAALPSKPPGPSTTNPYPLFANPRLLRRRLALSGXGADQAPRRAAPTPAAAGEGPSASSTEDPVLVRVXDDGVPLEGVIQIEKPGDAAAESKLVSYAKLGLLAGGDVFCLLLFSAIGRFSHGLPVLDAETFKTADPFIAEWLLSAYLLGGFGDDAKGRNGVGSAVITAAKSWAVGIPLGLAIRAVTSGHLPPTPFILVTMGSTGVLLTAWRALVSQLFSNQQKQQDDVYRRGSPFELFELLTSLVRRW

SEQ ID NO: 24945 - protein, 155 aa, Zea mays subsp. mays
  peptide (1)..(155): Ceres Seq. ID no. 13499084
  misc_feature (1)..(108): Pfam Name: Pfam Description:  Formin Homology 2 Domain
  misc_feature (1)..(108): NCBI GI NO: 2429362 NR Description: proline rich protein [Santalum album]
  misc_feature (1)..(155): NCBI GI NO: 23017082 NR Description: hypothetical protein [Thermobifida fusca]
  misc_feature (1)..(155): NCBI GI NO: 40787890 NR Description: UL36 very large tegument protein
  misc_feature (1)..(109): NCBI GI NO: 15419013 NR Description: subtilisin-like protein [Toxoplasma gondii]
  misc_feature (1)..(147): NCBI GI NO: 25143299 NR Description: pre-mRNA splicing SR protein related RSR-1 (68
  misc_feature (1)..(108): NCBI GI NO: 6523547 NR Description: hydroxyproline-rich glycoprotein DZ-HRGP
  misc_feature (1)..(147): NCBI GI NO: 25143299 NR Description: pre-mRNA splicing SR protein related RSR-1 (68
  misc_feature (1)..(108): NCBI GI NO: 30387315 NR Description: unknown [Choristoneura fumiferana MNPV]
  misc_feature (1)..(110): NCBI GI NO: 6523547 NR Description: hydroxyproline-rich glycoprotein DZ-HRGP
  misc_feature (1)..(109): NCBI GI NO: 1076205 NR Description: hypothetical protein WP6 - Chlamydomonas eugametos
  misc_feature (48)..(48): Xaa is any aa, unknown or other
  misc_feature (81)..(81): Xaa is any aa, unknown or other
MLLVSQAANGSLSARRCRRSRRGRPPPTPTRSSPTLASCAAAWRSPAXAPTKPRAAPRRPQPPRARAPPPPPPRTRSLSAXPTTACRSRASSRLRSPGMRPPSPSSSPTRSWVFWPAGTCSAFCCSLRLEGSAMACPSSTPRRSRRPTPSLLSGC

SEQ ID NO: 24946 - DNA, 925 bp, Zea mays subsp. mays
  misc_feature (1)..(925): Ceres Seq. ID no. 12351451
gccagttcacctccgcctccgctcctcccctccccctcccgtcctgccatggccaccgcagcacgcgccctcgtcgccgcacgcccggcacggccgctgctgccgtctcggcgcctcccgtcctcctcttccatccgtcccgcgcggcaacgtgctggcgtcgggtgcgtccgctgcatggctcggcggccggattccacctattccccgctgcgttcgggccagggcggtgaccgtgcaccgactgaaatggcgcctctgttccctggctgcgactacgagcactggctcatcgtcatggacaagcccgggggcgagggcgccaccaagcagcaaatgatagattgttacatccagacccttgcccaggtggtagggagtgaagaggaggcgaagaagaggatatataatgtgtcctgcgagcgctattttggattcggatgcgaaattgacgaggagacctcccaacaaactcgaaggccttccaggggttctttttgtgcttcctgactcttacgttgatgctgagaacaaggattatggtgctgagttatttgtgaacggtgaaatcgttcagcgatctccagaaaggcagagaagggtggagccagtgcctcagagagctcaggatcgaccacggtacagtgaccggacccgctatgtgaagcggagggagaaccaatcttaccagagatgatgtttccgtctctgaagatgtaaaatgtcacggtttccacaagtgtccaaatgcggtactgaagatgcagcagcaactccccactactcatatgagaatggcatccgttctgtttgccgcgcattttaagctgtatatgcttattatgcatttgggcttgtacctcagtcgatatgaacgatgtatcctttgaactaacgcattataatttttgaaaccgttttagcc

SEQ ID NO: 24947 - protein, 169 aa, Zea mays subsp. mays
  peptide (1)..(169): Ceres Seq. ID no. 12351452
  misc_feature (18)..(157): NCBI GI NO: 38344141 NR Description: OSJNBa0041A02.8
  misc_feature (16)..(157): NCBI GI NO: 34897972 NR Description: putative plastid protein
  misc_feature (57)..(157): NCBI GI NO: 15223247 NR Description: plastid protein, putative; protein id: At1g32580
  misc_feature (57)..(157): NCBI GI NO: 15226934 NR Description: unknown protein; protein id: At2g35240
  misc_feature (33)..(155): NCBI GI NO: 15226108 NR Description: plastid protein; protein id: At2g33430
  misc_feature (33)..(155): NCBI GI NO: 21617909 NR Description: plastid protein [Arabidopsis thaliana]
  misc_feature (38)..(155): NCBI GI NO: 25370552 NR Description: DAG protein homolog
  misc_feature (33)..(155): NCBI GI NO: 2440029 NR Description: DAL1 protein [Arabidopsis thaliana]
  misc_feature (13)..(157): NCBI GI NO: 38636775 NR Description: putative DAG protein
  misc_feature (8)..(157): NCBI GI NO: 6014904 NR Description: DAG PROTEIN, CHLOROPLAST PRECURSOR
ASSPPPPLLPSPSRPAMATAARALVAARPARPLLPSRRLPSSSSIRPARQRAGVGCVRCMARRPDSTYSPLRSGQGGDRAPTEMAPLFPGCDYEHWLIVMDKPGGEGATKQQMIDCYIQTLAQVVGSEEEAKKRIYNVSCERYFGFGCEIDEETSQQTRRPSRGSFCAS

SEQ ID NO: 24948 - protein, 153 aa, Zea mays subsp. mays
  peptide (1)..(153): Ceres Seq. ID no. 12351453
  misc_feature (2)..(141): NCBI GI NO: 38344141 NR Description: OSJNBa0041A02.8
  misc_feature (1)..(141): NCBI GI NO: 34897972 NR Description: putative plastid protein
  misc_feature (41)..(141): NCBI GI NO: 15223247 NR Description: plastid protein, putative; protein id: At1g32580
  misc_feature (41)..(141): NCBI GI NO: 15226934 NR Description: unknown protein; protein id: At2g35240
  misc_feature (17)..(139): NCBI GI NO: 15226108 NR Description: plastid protein; protein id: At2g33430
  misc_feature (17)..(139): NCBI GI NO: 21617909 NR Description: plastid protein [Arabidopsis thaliana]
  misc_feature (22)..(139): NCBI GI NO: 25370552 NR Description: DAG protein homolog
  misc_feature (17)..(139): NCBI GI NO: 2440029 NR Description: DAL1 protein [Arabidopsis thaliana]
  misc_feature (1)..(141): NCBI GI NO: 38636775 NR Description: putative DAG protein
  misc_feature (1)..(141): NCBI GI NO: 6014904 NR Description: DAG PROTEIN, CHLOROPLAST PRECURSOR
MATAARALVAARPARPLLPSRRLPSSSSIRPARQRAGVGCVRCMARRPDSTYSPLRSGQGGDRAPTEMAPLFPGCDYEHWLIVMDKPGGEGATKQQMIDCYIQTLAQVVGSEEEAKKRIYNVSCERYFGFGCEIDEETSQQTRRPSRGSFCAS

SEQ ID NO: 24949 - protein, 112 aa, Zea mays subsp. mays
  peptide (1)..(112): Ceres Seq. ID no. 12351454
PVHLRLRSSPPPPVLPWPPQHAPSSPHARHGRCCRLGASRPPLPSVPRGNVLASGASAAWLGGRIPPIPRCVRARAVTVHRLKWRLCSLAATTSTGSSSWTSPGARAPPSSK

SEQ ID NO: 24950 - DNA, 748 bp, Zea mays subsp. mays
  misc_feature (1)..(748): Ceres Seq. ID no. 12405725
aacttaaccactactccgcatctactgacgccgccgccgccgccgccgcgctctctccgtcggactagtcagagcatccgtcatggcgaagaaccccaaggtgttcttcgacatcctcatcggcaagtccaaggccgggcgggtcgtgatggagctcttcgccgacaaggtgcccaagacggccgagaacttccgctgcctgtgcacgggcgagaagggcctgggctccgcggggaagccgctgcactacaagggctcggccttccaccgcgtcatcccgggcttcatgtgccagggcggcgacttcacccggggcaacggcacgggcggcgagtccatctacggcgccaggttcgccgacgagaacttcaagctgcgccacacgggacccggcgtgctctccatggccaacgcggggcccgacaccaacggctcccagttcttcatctgcaccgcgcagacgccctggcttgacggcaagcacgtcgtcttcggcaaggtcgtcgatggctacgccgtcgtggacaagatggaggctgtcggttctcagtcaggtgccacggccgagagcgtacgcatcgaggactgcggccagcttgccgacgactgagggcctcgctgtgtccgattgtaaccaaatgaatgatcaataaatttctttctttcattcttttgtttctgtggagatggataccggcctgtagttaattaaccaatataaactatggatggatggggcggtgatttg

SEQ ID NO: 24951 - protein, 175 aa, Zea mays subsp. mays
  peptide (1)..(175): Ceres Seq. ID no. 12405726
  misc_feature (2)..(175): NCBI GI NO: 1084454 NR Description: peptidylprolyl isomerase (EC 5.2.1.8) Cyp1 - rice
  misc_feature (4)..(172): NCBI GI NO: 1305457 NR Description: cytosolic cyclophilin [Arabidopsis thaliana]
  misc_feature (4)..(172): NCBI GI NO: 15228814 NR Description: peptidylprolyl isomerase; protein id: At3g56070
  misc_feature (4)..(172): NCBI GI NO: 11270314 NR Description: peptidylprolyl isomerase (EC 5.2.1.8) ATCYP4
  misc_feature (1)..(173): NCBI GI NO: 18076088 NR Description: cyclophilin [Ricinus communis]
  misc_feature (5)..(172): NCBI GI NO: 1480465 NR Description: cyclophilin Ovcyp-2
  misc_feature (4)..(172): NCBI GI NO: 11270316 NR Description: peptidylprolyl isomerase (EC 5.2.1.8)
  misc_feature (4)..(173): NCBI GI NO: 3334157 NR Description: Peptidyl-prolyl cis-trans isomerase
  misc_feature (4)..(173): NCBI GI NO: 18376589 NR Description: putative cyclosporin A-binding protein
  misc_feature (4)..(172): NCBI GI NO: 118103 NR Description: Peptidyl-prolyl cis-trans isomerase
MAKNPKVFFDILIGKSKAGRVVMELFADKVPKTAENFRCLCTGEKGLGSAGKPLHYKGSAFHRVIPGFMCQGGDFTRGNGTGGESIYGARFADENFKLRHTGPGVLSMANAGPDTNGSQFFICTAQTPWLDGKHVVFGKVVDGYAVVDKMEAVGSQSGATAESVRIEDCGQLADD

SEQ ID NO: 24952 - protein, 157 aa, Zea mays subsp. mays
  peptide (1)..(157): Ceres Seq. ID no. 12405727
NLTTTPHLLTPPPPPPRSLRRTSQSIRHGEEPQGVLRHPHRQVQGRAGRDGALRRQGAQDGRELPLPVHGREGPGLRGEAAALQGLGLPPRHPGLHVPGRRLHPGQRHGRRVHLRRQVRRRELQAAPHGTRRALHGQRGARHQRLPVLHLHRADALA

SEQ ID NO: 24953 - protein, 153 aa, Zea mays subsp. mays
  peptide (1)..(153): Ceres Seq. ID no. 12405728
  misc_feature (1)..(153): NCBI GI NO: 1084454 NR Description: peptidylprolyl isomerase (EC 5.2.1.8) Cyp1 - rice
  misc_feature (1)..(150): NCBI GI NO: 1305457 NR Description: cytosolic cyclophilin [Arabidopsis thaliana]
  misc_feature (1)..(150): NCBI GI NO: 15228814 NR Description: peptidylprolyl isomerase; protein id: At3g56070
  misc_feature (1)..(150): NCBI GI NO: 11270314 NR Description: peptidylprolyl isomerase (EC 5.2.1.8) ATCYP4
  misc_feature (1)..(151): NCBI GI NO: 18076088 NR Description: cyclophilin [Ricinus communis]
  misc_feature (1)..(150): NCBI GI NO: 1480465 NR Description: cyclophilin Ovcyp-2
  misc_feature (1)..(150): NCBI GI NO: 11270316 NR Description: peptidylprolyl isomerase (EC 5.2.1.8)
  misc_feature (1)..(151): NCBI GI NO: 3334157 NR Description: Peptidyl-prolyl cis-trans isomerase
  misc_feature (1)..(151): NCBI GI NO: 18376589 NR Description: putative cyclosporin A-binding protein
  misc_feature (1)..(150): NCBI GI NO: 118103 NR Description: Peptidyl-prolyl cis-trans isomerase
MELFADKVPKTAENFRCLCTGEKGLGSAGKPLHYKGSAFHRVIPGFMCQGGDFTRGNGTGGESIYGARFADENFKLRHTGPGVLSMANAGPDTNGSQFFICTAQTPWLDGKHVVFGKVVDGYAVVDKMEAVGSQSGATAESVRIEDCGQLADD

SEQ ID NO: 24954 - DNA, 1712 bp, Zea mays subsp. mays
  misc_feature (1)..(1712): Ceres Seq. ID no. 12346894
acaaatcgggtttgccgtgcggcacttgcgtttcgggtcgggtacggacccgcaaaaagagctccgtcagttcctctacctcctctgtaggagcacacttgtttcggaaaggaacgcagattcacgccacgccgccgcctcaattatatggcgccggcgttctcggcacaggtccccgcgctccgacgggcagcactgcgcgtgcggtgggtcacggctgcgctgttctcatcggggattctcgccggcaacaagccgattctggtgcgtgacttcgtgaggtcagcgttgtacgaccccaaccatggctacttctccaagcgggcggggccggtgggcgttcttgacgccagcatccgcttcaaccagctcgaggggaggagtgcatatatacagcaccttgataagctgtataagaagcatgatatcgcttggtttactcccgtggagctctttaagccatggtatgcctacgcaatagcagcatcgattctgcgtacagcaaatctttcagtcccattgaagatatacgagattggtggtggctctggaacatgcgcaaagtgcatacttgattacatgatgctgaatgcgccaccaaaagtctacaatgatatgaaatacatctcagtagagattagctcctctcttgctgagaagcaattggaaactgttggtgaagtgcaaagccatttgtcaaagttcacggtggagcaccgggatgcaattaacagacctggatggggccgcacggatcctcacccatgttgggtgcttatgcttgaggtacttgacaatctaccacatgaccttgtctattcaccagatcaggtctctccatggatggaagtgtggattgaaaaagtaaaaggcagtttacaagcctccgaagtctataagccattacaagacccattgatttctcgctgtgttgatattattggcatgaatgaagacaaagcttctgtcagtgaaaaactagcatttgctgcaaaaggagttctatcaaaagtattcccaaagcctcgtagagcttggttgcccaccggctgcttgaaactaatggatactctacatcaagctttaccgagcatgtcccttattgcttcagacttcagctatcttccagacgttagcatacctggtgacagggctccattggtttcatcaaagaacgatggaaagacatcagatcatcgcaactactttgatgctcagggtgacgcggacatcttcttcccaaccgatttccggctcctggagcagatcgaccataactgcgctggcttctcaaaggagcagaagaatcccggcgcattcaaacccgtgaagaagaggagaacgatcatacttgatactgcagccttcatggaggagtttggcatgccgctgaagacgaggaccaaagacgggtataatccgcttctcgacgatttcaagaacacaaagttctatctcagcgtccctacacacaacgttcctacccatagcaggaggaactagtcttctttccttttgctgatgcgtcacgagtcaggaaaagacgtctgccaggctagaatcggtctgtcattttgagcagtctgaatttgcaagttttcttaccttaaggtgttgaaaattttatagtttctcttttttgtagaacaaagtttttattatcatttttgacattgatgcatgggtaataaaaggtggaagaagactgactg

SEQ ID NO: 24955 - protein, 451 aa, Zea mays subsp. mays
  peptide (1)..(451): Ceres Seq. ID no. 12346895
  misc_feature (35)..(89): Pfam Name: Pfam Description:  Uncharacterized ACR, COG1565
  misc_feature (1)..(443): NCBI GI NO: 34906872 NR Description: P0470A12.14
  misc_feature (1)..(443): NCBI GI NO: 18390452 NR Description: expressed protein; protein id: At1g04900
  misc_feature (203)..(443): NCBI GI NO: 25406821 NR Description: protein F13M7.11 [imported] - Arabidopsis thaliana
  misc_feature (1)..(201): NCBI GI NO: 25406821 NR Description: protein F13M7.11 [imported] - Arabidopsis thaliana
  misc_feature (38)..(374): NCBI GI NO: 40744669 NR Description: hypothetical protein AN1512.2
  misc_feature (1)..(89): NCBI GI NO: 34906872 NR Description: P0470A12.14
  misc_feature (18)..(260): NCBI GI NO: 32422641 NR Description: hypothetical protein [Neurospora crassa]
  misc_feature (20)..(374): NCBI GI NO: 26401557 NR Description: Hypothetical protein C25A8.03c in chromosome I
  misc_feature (50)..(374): NCBI GI NO: 19114528 NR Description: hypothetical protein [Schizosaccharomyces pombe]
MAPAFSAQVPALRRAALRVRWVTAALFSSGILAGNKPILVRDFVRSALYDPNHGYFSKRAGPVGVLDASIRFNQLEGRSAYIQHLDKLYKKHDIAWFTPVELFKPWYAYAIAASILRTANLSVPLKIYEIGGGSGTCAKCILDYMMLNAPPKVYNDMKYISVEISSSLAEKQLETVGEVQSHLSKFTVEHRDAINRPGWGRTDPHPCWVLMLEVLDNLPHDLVYSPDQVSPWMEVWIEKVKGSLQASEVYKPLQDPLISRCVDIIGMNEDKASVSEKLAFAAKGVLSKVFPKPRRAWLPTGCLKLMDTLHQALPSMSLIASDFSYLPDVSIPGDRAPLVSSKNDGKTSDHRNYFDAQGDADIFFPTDFRLLEQIDHNCAGFSKEQKNPGAFKPVKKRRTIILDTAAFMEEFGMPLKTRTKDGYNPLLDDFKNTKFYLSVPTHNVPTHSRRN

SEQ ID NO: 24956 - protein, 307 aa, Zea mays subsp. mays
  peptide (1)..(307): Ceres Seq. ID no. 12346896
  misc_feature (1)..(231): Pfam Name: Pfam Description:  Uncharacterized ACR, COG1565
  misc_feature (1)..(299): NCBI GI NO: 34906872 NR Description: P0470A12.14
  misc_feature (1)..(299): NCBI GI NO: 18390452 NR Description: expressed protein; protein id: At1g04900
  misc_feature (59)..(299): NCBI GI NO: 25406821 NR Description: protein F13M7.11 [imported] - Arabidopsis thaliana
  misc_feature (1)..(57): NCBI GI NO: 25406821 NR Description: protein F13M7.11 [imported] - Arabidopsis thaliana
  misc_feature (1)..(230): NCBI GI NO: 40744669 NR Description: hypothetical protein AN1512.2
  misc_feature (1)..(116): NCBI GI NO: 32422641 NR Description: hypothetical protein [Neurospora crassa]
  misc_feature (1)..(230): NCBI GI NO: 26401557 NR Description: Hypothetical protein C25A8.03c in chromosome I
  misc_feature (1)..(230): NCBI GI NO: 19114528 NR Description: hypothetical protein [Schizosaccharomyces pombe]
MMLNAPPKVYNDMKYISVEISSSLAEKQLETVGEVQSHLSKFTVEHRDAINRPGWGRTDPHPCWVLMLEVLDNLPHDLVYSPDQVSPWMEVWIEKVKGSLQASEVYKPLQDPLISRCVDIIGMNEDKASVSEKLAFAAKGVLSKVFPKPRRAWLPTGCLKLMDTLHQALPSMSLIASDFSYLPDVSIPGDRAPLVSSKNDGKTSDHRNYFDAQGDADIFFPTDFRLLEQIDHNCAGFSKEQKNPGAFKPVKKRRTIILDTAAFMEEFGMPLKTRTKDGYNPLLDDFKNTKFYLSVPTHNVPTHSRRN

SEQ ID NO: 24957 - protein, 306 aa, Zea mays subsp. mays
  peptide (1)..(306): Ceres Seq. ID no. 12346897
  misc_feature (1)..(230): Pfam Name: Pfam Description:  Uncharacterized ACR, COG1565
  misc_feature (1)..(298): NCBI GI NO: 34906872 NR Description: P0470A12.14
  misc_feature (1)..(298): NCBI GI NO: 18390452 NR Description: expressed protein; protein id: At1g04900
  misc_feature (58)..(298): NCBI GI NO: 25406821 NR Description: protein F13M7.11 [imported] - Arabidopsis thaliana
  misc_feature (1)..(56): NCBI GI NO: 25406821 NR Description: protein F13M7.11 [imported] - Arabidopsis thaliana
  misc_feature (1)..(229): NCBI GI NO: 40744669 NR Description: hypothetical protein AN1512.2
  misc_feature (1)..(115): NCBI GI NO: 32422641 NR Description: hypothetical protein [Neurospora crassa]
  misc_feature (1)..(229): NCBI GI NO: 26401557 NR Description: Hypothetical protein C25A8.03c in chromosome I
  misc_feature (1)..(229): NCBI GI NO: 19114528 NR Description: hypothetical protein [Schizosaccharomyces pombe]
MLNAPPKVYNDMKYISVEISSSLAEKQLETVGEVQSHLSKFTVEHRDAINRPGWGRTDPHPCWVLMLEVLDNLPHDLVYSPDQVSPWMEVWIEKVKGSLQASEVYKPLQDPLISRCVDIIGMNEDKASVSEKLAFAAKGVLSKVFPKPRRAWLPTGCLKLMDTLHQALPSMSLIASDFSYLPDVSIPGDRAPLVSSKNDGKTSDHRNYFDAQGDADIFFPTDFRLLEQIDHNCAGFSKEQKNPGAFKPVKKRRTIILDTAAFMEEFGMPLKTRTKDGYNPLLDDFKNTKFYLSVPTHNVPTHSRRN

SEQ ID NO: 24958 - DNA, 1318 bp, Zea mays subsp. mays
  misc_feature (1)..(1318): Ceres Seq. ID no. 12356113
atccaatcgaagctctggaacctcctccactcccagcttccgccgacgctcgcttcagctgctgctttccttcccatccttcaacaggtgcaatttgcatttcccatggagctcactgattaataacgtcccttgggttcatctatgccggtaaagagggcgcatttgaagccacatgccgcagacatcaagaggaacccccatgtacatgagctttacaaattggtttaccgacttccggagaaccttagctggctgttggcaccaccagaaattcctaaaagacctgcctcaaagaagaaaaaacaaaaagacgaaatagtggccggtaacagctttggtgtgatcttggagtgggagggagttgttgtggatgatgatgatccagacttggagccccgggtttggtatgttctatcactagaagaggggaagtctttccctccagatgcattgctgaagaaaatcgagggaatgagaactgaccaggctattgcagaagtcttatgttggtcagaagattcagcagaaatccaaaggttggcaacacacaaggaggttatatatcaaaaactccaaggcggatactaccagctgcgaccacatgtgcttgatttcttgaacacccttgtgggttttgacattccaatagcaattgcagctcctcgctcaaggaagagccttgaagaagggatcaaaactgttggtctgcaaggctacttcgatgctataattgcattggatgacttctgcctagggaaacctgatggtgagatgtttgaagtcgcagcggagcaacttggtctggagccagatgtctgtgttgtgtttggtaactcaaacttgacgacggaatctgcacataacgctgggatgaggtgtgtggcagttgcaggccgacaccctgcctatgagctccaatcagcaaaccatgttgtgagatggcttgaccagctctctattgttgacttgcagaggcttgctaatggtgaagttattggtcgcaggggtagagaatctgacatggatatggaaattgtgattgaggaatgatgatgtttctgcaaaaatgacgcactaatatattgttgtgcttataatctgatacacctaagtaatgcgttacattttctaaacaggccaagcagtgcaagttccggactaaggatactctggagtttgcattaccttcctggtttgcttgtgatgaattggaattcgcctaaaactcttttagtcattagagttggaagtgaagacaactcccacccgtaacttgtgtatgtacagtatatatatgtattacctattcttcccc

SEQ ID NO: 24959 - protein, 302 aa, Zea mays subsp. mays
  peptide (1)..(302): Ceres Seq. ID no. 12356114
  misc_feature (150)..(252): Pfam Name: Pfam Description:  haloacid dehalogenase-like hydrolase
  misc_feature (1)..(302): NCBI GI NO: 18542168 NR Description: putative genetic modifier [Zea mays]
  misc_feature (1)..(302): NCBI GI NO: 10444400 NR Description: genetic modifier [Zea mays]
  misc_feature (1)..(302): NCBI GI NO: 38345597 NR Description: OSJNBb0012E24.15
  misc_feature (39)..(297): NCBI GI NO: 15234236 NR Description: putative protein; protein id: At4g11570
  misc_feature (64)..(281): NCBI GI NO: 18399067 NR Description: expressed protein; protein id: At3g10970
  misc_feature (64)..(281): NCBI GI NO: 21592870 NR Description: unknown [Arabidopsis thaliana]
  misc_feature (64)..(281): NCBI GI NO: 14532506 NR Description: AT3g10970/F9F8_21 [Arabidopsis thaliana]
  misc_feature (114)..(281): NCBI GI NO: 6016697 NR Description: unknown protein [Arabidopsis thaliana]
  misc_feature (105)..(279): NCBI GI NO: 22297853 NR Description: ORF_ID:tlr0310~hypothetical protein
  misc_feature (110)..(266): NCBI GI NO: 21219634 NR Description: putative hydrolase [Streptomyces coelicolor A3(2)]
MPVKRAHLKPHAADIKRNPHVHELYKLVYRLPENLSWLLAPPEIPKRPASKKKKQKDEIVAGNSFGVILEWEGVVVDDDDPDLEPRVWYVLSLEEGKSFPPDALLKKIEGMRTDQAIAEVLCWSEDSAEIQRLATHKEVIYQKLQGGYYQLRPHVLDFLNTLVGFDIPIAIAAPRSRKSLEEGIKTVGLQGYFDAIIALDDFCLGKPDGEMFEVAAEQLGLEPDVCVVFGNSNLTTESAHNAGMRCVAVAGRHPAYELQSANHVVRWLDQLSIVDLQRLANGEVIGRRGRESDMDMEIVIEE

SEQ ID NO: 24960 - protein, 192 aa, Zea mays subsp. mays
  peptide (1)..(192): Ceres Seq. ID no. 12356115
  misc_feature (40)..(142): Pfam Name: Pfam Description:  haloacid dehalogenase-like hydrolase
  misc_feature (1)..(192): NCBI GI NO: 18542168 NR Description: putative genetic modifier [Zea mays]
  misc_feature (1)..(192): NCBI GI NO: 10444400 NR Description: genetic modifier [Zea mays]
  misc_feature (1)..(192): NCBI GI NO: 38345597 NR Description: OSJNBb0012E24.15
  misc_feature (1)..(187): NCBI GI NO: 15234236 NR Description: putative protein; protein id: At4g11570
  misc_feature (1)..(171): NCBI GI NO: 18399067 NR Description: expressed protein; protein id: At3g10970
  misc_feature (1)..(171): NCBI GI NO: 21592870 NR Description: unknown [Arabidopsis thaliana]
  misc_feature (1)..(171): NCBI GI NO: 14532506 NR Description: AT3g10970/F9F8_21 [Arabidopsis thaliana]
  misc_feature (4)..(171): NCBI GI NO: 6016697 NR Description: unknown protein [Arabidopsis thaliana]
  misc_feature (1)..(169): NCBI GI NO: 22297853 NR Description: ORF_ID:tlr0310~hypothetical protein
  misc_feature (1)..(156): NCBI GI NO: 21219634 NR Description: putative hydrolase [Streptomyces coelicolor A3(2)]
MRTDQAIAEVLCWSEDSAEIQRLATHKEVIYQKLQGGYYQLRPHVLDFLNTLVGFDIPIAIAAPRSRKSLEEGIKTVGLQGYFDAIIALDDFCLGKPDGEMFEVAAEQLGLEPDVCVVFGNSNLTTESAHNAGMRCVAVAGRHPAYELQSANHVVRWLDQLSIVDLQRLANGEVIGRRGRESDMDMEIVIEE

SEQ ID NO: 24961 - DNA, 1338 bp, Zea mays subsp. mays
  misc_feature (1)..(1338): Ceres Seq. ID no. 12410332
aagcccattcgcgtcccgtcccgtcccgtcaaacaagcactcaaacctccctcccaagccctcttttttccctcgccgcggcgcaggcagagcagaggcagcagcatgccgccgttcgccgcccgcctggccgcaccggtcgccttggccgcgctgctgctcgccctcctgctcgcggcgccggcctcggccgccaacttcacctgcgccacggtgggcaaaacgtgccagtcggcgatcgggtacgcggtgcccaacggcgaccacgtacggggagctggtggcgcggttcaacgccaccacgacgctggcggagctgctgggcgccaacggcctccccgccacgacgccggcctcgacgccgctggcggccaaggccacggtgcgcgtgccgttccggtgccggtgcgggagcaacggcgtggggcagtcggacgggggacccttctacgtggtgtacccgctggacgggctggaccacatcgcgcgggaggtgttcggcgccttcgtcacctaccaggagatcgccaccgccaacaacatcaccaacgtcaacctcatcgtcgtcgggcagaagctcaggatcccgctgccctgcacctgcgaccaggtggacggcgccgacgtcatgcacttcgcctacagcgtcgccaagggggacgacccgcccggcatcgccgccaggttcggggtcaccgagaccacgctgctgagtgtgaataagatcaccgaccccaagaccagcctgcagcaggggcagatcctggatgtccccctccctgtgtgcaagtcatcggtcggcaacgcctcggctgactacaacctgctcgtcccgaacggcacctacgtgctcaccgccgacgactgcatccagtgcagctgcagcgcgagcaactacgagcaactgcactccggtgaaaggcggaaggtgcccggcggtgccgccgtgcagtggaggcctgacgctcgggcaggtcaacggcaccggttgcgcgtccaggatgtgcgcttacagcggttataccaacaccacgtccctcaccatacataccagccttgtgcctgcaaatgagactgcgtgccagaagggaggagctgcgagagcggagtttgccgggtccgtgttgaggacgtctctcatcgccttcatcatgtcgctgatcctcatctgcttgctatagacgttagagcagtagatggtgtattatatgccactgtcagatactcagattgctgttgtggtctattcattggcgattggtctagctgtttgaataaagcaaacattaaagtttgcatctgtgagtgaatacgtatttattagaattgggatgatcc

SEQ ID NO: 24962 - protein, 356 aa, Zea mays subsp. mays
  peptide (1)..(356): Ceres Seq. ID no. 12410333
  misc_feature (150)..(196): Pfam Name: Pfam Description:  LysM domain
  misc_feature (85)..(300): NCBI GI NO: 22758281 NR Description: Unknown protein
  misc_feature (85)..(299): NCBI GI NO: 28207683 NR Description: Erwinia induced protein 1 [Solanum tuberosum]
  misc_feature (81)..(296): NCBI GI NO: 18398317 NR Description: expressed protein; protein id: At2g17120
  misc_feature (81)..(296): NCBI GI NO: 21593990 NR Description: unknown [Arabidopsis thaliana]
  misc_feature (106)..(295): NCBI GI NO: 30687570 NR Description: expressed protein [Arabidopsis thaliana]
  misc_feature (106)..(295): NCBI GI NO: 18395044 NR Description: expressed protein; protein id: At1g21880
  misc_feature (122)..(294): NCBI GI NO: 25406518 NR Description: unknown protein T5M16.22
  misc_feature (122)..(294): NCBI GI NO: 30699276 NR Description: expressed protein [Arabidopsis thaliana]
SPFASRPVPSNKHSNLPPKPSFFPRRGAGRAEAAACRRSPPAWPHRSPWPRCCSPSCSRRRPRPPTSPAPRWAKRASRRSGTRCPTATTYGELVARFNATTTLAELLGANGLPATTPASTPLAAKATVRVPFRCRCGSNGVGQSDGGPFYVVYPLDGLDHIAREVFGAFVTYQEIATANNITNVNLIVVGQKLRIPLPCTCDQVDGADVMHFAYSVAKGDDPPGIAARFGVTETTLLSVNKITDPKTSLQQGQILDVPLPVCKSSVGNASADYNLLVPNGTYVLTADDCIQCSCSASNYEQLHSGERRKVPGGAAVQWRPDARAGQRHRLRVQDVRLQRLYQHHVPHHTYQPCACK

SEQ ID NO: 24963 - protein, 240 aa, Zea mays subsp. mays
  peptide (1)..(240): Ceres Seq. ID no. 12410334
  misc_feature (101)..(225): Pfam Name: Pfam Description:  Amidohydrolase family
  misc_feature (36)..(86): NCBI GI NO: 22758281 NR Description: Unknown protein
KPIRVPSRPVKQALKPPSQALFFPSPRRRQSRGSSMPPFAARLAAPVALAALLLALLLAAPASAANFTCATVGKTCQSAIGYAVPNGDHVRGAGGAVQRHHDAGGAAGRQRPPRHDAGLDAAGGQGHGARAVPVPVREQRRGAVGRGTLLRGVPAGRAGPHRAGGVRRLRHLPGDRHRQQHHQRQPHRRRAEAQDPAALHLRPGGRRRRHALRLQRRQGGRPARHRRQVRGHRDHAAECE

SEQ ID NO: 24964 - protein, 236 aa, Zea mays subsp. mays
  peptide (1)..(236): Ceres Seq. ID no. 12410335
  misc_feature (128)..(236): Pfam Name: Pfam Description:  Equine herpesvirus glycoprotein gp2
  misc_feature (97)..(236): NCBI GI NO: 28574039 NR Description: Salivary gland secretion 1 CG3047-PA
  misc_feature (40)..(236): NCBI GI NO: 25989119 NR Description: unknown [Streptomyces aureofaciens]
  misc_feature (97)..(236): NCBI GI NO: 28574039 NR Description: Salivary gland secretion 1 CG3047-PA
  misc_feature (97)..(236): NCBI GI NO: 28574039 NR Description: Salivary gland secretion 1 CG3047-PA
  misc_feature (97)..(236): NCBI GI NO: 23017082 NR Description: hypothetical protein [Thermobifida fusca]
  misc_feature (139)..(236): NCBI GI NO: 6322611 NR Description: Delayed Anaerobic Gene; Dan4p
  misc_feature (88)..(236): NCBI GI NO: 28574039 NR Description: Salivary gland secretion 1 CG3047-PA
  misc_feature (5)..(236): NCBI GI NO: 11360494 NR Description: antifreeze glycopeptide AFGP polyprotein precursor
  misc_feature (109)..(236): NCBI GI NO: 28574039 NR Description: Salivary gland secretion 1 CG3047-PA
  misc_feature (128)..(236): NCBI GI NO: 17221110 NR Description: glycoprotein gp2 [Equine herpesvirus 1]
AHSRPVPSRQTSTQTSLPSPLFSLAAAQAEQRQQHAAVRRPPGRTGRLGRAAARPPARGAGLGRQLHLRHGGQNVPVGDRVRGAQRRPRTGSWWRGSTPPRRWRSCWAPTASPPRRRPRRRWRPRPRCACRSGAGAGATAWGSRTGDPSTWCTRWTGWTTSRGRCSAPSSPTRRSPPPTTSPTSTSSSSGRSSGSRCPAPATRWTAPTSCTSPTASPRGTTRPASPPGSGSPRPRC

SEQ ID NO: 24965 - DNA, 1719 bp, Zea mays subsp. mays
  misc_feature (1)..(1719): Ceres Seq. ID no. 12348980
cccggcccgcgcctcgctctctcttgtctcgcccgctagctcccatcccagcctcccaccgcgcccgcctgccccaacatcccccctccccgctccgctccacgcacggctccagatctgctacggcggcggccggtggacgccgcgccgcgcgtgccggaggcggtgacgtgagcggcggatcctgcccggccgtgccatcctggcgacgatgacagcgtaagcgggcggcggacgaccgcgtccccccggcccctactcccgaggtcattggcgtgtgctccttggcagaaaatggcgatgatggtggatccccccaatggcatggcaagtcaaggaaagcattactatactatgtggcagacactgtttgagatcgacaccaagtacgtgccgatcaagcccatcggaagaggagcttacggaatcgtttgctcatctgttaaccgcgagaccaatgaaaaagtcgcgataaaaaagataaacaacgtctttgacaaccgtgtggatgcgctaaggacgctgagagagctgaaactccttcggcacctgaggcacgagaatgttattgctctcaaggacataatgatgcctgcgcatagaaggagcttcaaggacgtttacttggtttatgagctcatggacactgatctgcatcaaataattaagtcatctcaaccactatccaatgaccactgccagtatttcctttttcagctgctccgaggcctgaagtacctccattcagccgggatactccacagagacctaaagccagggaacctcctggtcaacgcaaactgtgacctgaagatatgcgacttcgggctcgcccgcacgaacaacaccaagggccagttcatgacggagtacgtggtgacccgctggtacagggcacccgagctgctgctctgctgcgacaactacggcacgtccattgacgtctggtctgtggggtgcatattcgcggagctgcttggccgcaagccgatcttcccaggaaccgagtgcctgaaccagctcaagctcatcgtcaacgtcctcggcaccatgggcgaggccgacctcgcgttcatcgacaacccgaaggcccgcaagtacatcaagtcccttccgtacgccccgggcgcccccttcaccggcatgtaccctcaggcgcaccctctcgccatcgacctgctgcagaagatgctcgtgttcgacccgtccaagaggatcagcgtcaccgaggcgctggagcacccgtacatgtctccgctctatgacccgagcgcgaaccctcccgcgcaggtgccgatcgacctcgacatcgacgagaacctcggcgtcgacatgatcagggagatgatgtggcaggagatgatccactaccaccccgaggtcctcacgagaatcagcatgtgagtatgtgatgtgaccagacaggcagcaatgaaacatgtggacagaggtctgctgcgccaggatcatcacatgttcgcccttcttacgagcttaactgcgattacggcaccgagtcgaggtatcactacatgtatcggaaccgtcaggcggtctcttgtgtaaatatgcgctgaataagatgtgtggcaatctcttgttttttggttgtacatggacctcgctgttgtacgagtctgtgaagtggaaccctggtactaagacctgtaatttcagaccctaatctgttgtatggaaatctgaaggccttgactcccg

SEQ ID NO: 24966 - protein, 369 aa, Zea mays subsp. mays
  peptide (1)..(369): Ceres Seq. ID no. 12348981
  misc_feature (32)..(319): Pfam Name: Pfam Description:  Protein kinase domain
  misc_feature (1)..(369): NCBI GI NO: 11869994 NR Description: MAP kinase 2 [Oryza sativa]
  misc_feature (1)..(369): NCBI GI NO: 24412848 NR Description: putative mitogen-activated protein kinase, msrmk3
  misc_feature (1)..(369): NCBI GI NO: 6491800 NR Description: MAPK4 protein [Oryza sativa]
  misc_feature (1)..(368): NCBI GI NO: 7341300 NR Description: MAP kinase MAPK2 [Oryza sativa]
  misc_feature (1)..(365): NCBI GI NO: 2499614 NR Description: MITOGEN-ACTIVATED PROTEIN KINASE HOMOLOG NTF3
  misc_feature (1)..(365): NCBI GI NO: 18406388 NR Description: expressed protein; protein id: At1g59580
  misc_feature (1)..(365): NCBI GI NO: 533281 NR Description: ATMPK2 [Arabidopsis thaliana]
  misc_feature (1)..(362): NCBI GI NO: 2499612 NR Description: MITOGEN-ACTIVATED PROTEIN KINASE HOMOLOG 1 (PMEK1)
  misc_feature (1)..(365): NCBI GI NO: 15218451 NR Description: putative mitogen-activated protein kinase
  misc_feature (1)..(362): NCBI GI NO: 4887127 NR Description: putative mitogen-activated protein kinase MAPK
MAMMVDPPNGMASQGKHYYTMWQTLFEIDTKYVPIKPIGRGAYGIVCSSVNRETNEKVAIKKINNVFDNRVDALRTLRELKLLRHLRHENVIALKDIMMPAHRRSFKDVYLVYELMDTDLHQIIKSSQPLSNDHCQYFLFQLLRGLKYLHSAGILHRDLKPGNLLVNANCDLKICDFGLARTNNTKGQFMTEYVVTRWYRAPELLLCCDNYGTSIDVWSVGCIFAELLGRKPIFPGTECLNQLKLIVNVLGTMGEADLAFIDNPKARKYIKSLPYAPGAPFTGMYPQAHPLAIDLLQKMLVFDPSKRISVTEALEHPYMSPLYDPSANPPAQVPIDLDIDENLGVDMIREMMWQEMIHYHPEVLTRISM

SEQ ID NO: 24967 - protein, 367 aa, Zea mays subsp. mays
  peptide (1)..(367): Ceres Seq. ID no. 12348982
  misc_feature (30)..(317): Pfam Name: Pfam Description:  Protein kinase domain
  misc_feature (1)..(367): NCBI GI NO: 11869994 NR Description: MAP kinase 2 [Oryza sativa]
  misc_feature (1)..(367): NCBI GI NO: 24412848 NR Description: putative mitogen-activated protein kinase, msrmk3
  misc_feature (1)..(367): NCBI GI NO: 6491800 NR Description: MAPK4 protein [Oryza sativa]
  misc_feature (1)..(366): NCBI GI NO: 7341300 NR Description: MAP kinase MAPK2 [Oryza sativa]
  misc_feature (1)..(363): NCBI GI NO: 2499614 NR Description: MITOGEN-ACTIVATED PROTEIN KINASE HOMOLOG NTF3
  misc_feature (1)..(363): NCBI GI NO: 18406388 NR Description: expressed protein; protein id: At1g59580
  misc_feature (1)..(363): NCBI GI NO: 533281 NR Description: ATMPK2 [Arabidopsis thaliana]
  misc_feature (1)..(360): NCBI GI NO: 2499612 NR Description: MITOGEN-ACTIVATED PROTEIN KINASE HOMOLOG 1 (PMEK1)
  misc_feature (1)..(363): NCBI GI NO: 15218451 NR Description: putative mitogen-activated protein kinase
  misc_feature (1)..(360): NCBI GI NO: 4887127 NR Description: putative mitogen-activated protein kinase MAPK
MMVDPPNGMASQGKHYYTMWQTLFEIDTKYVPIKPIGRGAYGIVCSSVNRETNEKVAIKKINNVFDNRVDALRTLRELKLLRHLRHENVIALKDIMMPAHRRSFKDVYLVYELMDTDLHQIIKSSQPLSNDHCQYFLFQLLRGLKYLHSAGILHRDLKPGNLLVNANCDLKICDFGLARTNNTKGQFMTEYVVTRWYRAPELLLCCDNYGTSIDVWSVGCIFAELLGRKPIFPGTECLNQLKLIVNVLGTMGEADLAFIDNPKARKYIKSLPYAPGAPFTGMYPQAHPLAIDLLQKMLVFDPSKRISVTEALEHPYMSPLYDPSANPPAQVPIDLDIDENLGVDMIREMMWQEMIHYHPEVLTRISM

SEQ ID NO: 24968 - protein, 366 aa, Zea mays subsp. mays
  peptide (1)..(366): Ceres Seq. ID no. 12348983
  misc_feature (29)..(316): Pfam Name: Pfam Description:  Protein kinase domain
  misc_feature (1)..(366): NCBI GI NO: 11869994 NR Description: MAP kinase 2 [Oryza sativa]
  misc_feature (1)..(366): NCBI GI NO: 24412848 NR Description: putative mitogen-activated protein kinase, msrmk3
  misc_feature (1)..(366): NCBI GI NO: 6491800 NR Description: MAPK4 protein [Oryza sativa]
  misc_feature (1)..(365): NCBI GI NO: 7341300 NR Description: MAP kinase MAPK2 [Oryza sativa]
  misc_feature (1)..(362): NCBI GI NO: 2499614 NR Description: MITOGEN-ACTIVATED PROTEIN KINASE HOMOLOG NTF3
  misc_feature (1)..(362): NCBI GI NO: 18406388 NR Description: expressed protein; protein id: At1g59580
  misc_feature (1)..(362): NCBI GI NO: 533281 NR Description: ATMPK2 [Arabidopsis thaliana]
  misc_feature (1)..(359): NCBI GI NO: 2499612 NR Description: MITOGEN-ACTIVATED PROTEIN KINASE HOMOLOG 1 (PMEK1)
  misc_feature (1)..(362): NCBI GI NO: 15218451 NR Description: putative mitogen-activated protein kinase
  misc_feature (1)..(359): NCBI GI NO: 4887127 NR Description: putative mitogen-activated protein kinase MAPK
MVDPPNGMASQGKHYYTMWQTLFEIDTKYVPIKPIGRGAYGIVCSSVNRETNEKVAIKKINNVFDNRVDALRTLRELKLLRHLRHENVIALKDIMMPAHRRSFKDVYLVYELMDTDLHQIIKSSQPLSNDHCQYFLFQLLRGLKYLHSAGILHRDLKPGNLLVNANCDLKICDFGLARTNNTKGQFMTEYVVTRWYRAPELLLCCDNYGTSIDVWSVGCIFAELLGRKPIFPGTECLNQLKLIVNVLGTMGEADLAFIDNPKARKYIKSLPYAPGAPFTGMYPQAHPLAIDLLQKMLVFDPSKRISVTEALEHPYMSPLYDPSANPPAQVPIDLDIDENLGVDMIREMMWQEMIHYHPEVLTRISM

SEQ ID NO: 24969 - DNA, 1291 bp, Zea mays subsp. mays
  misc_feature (1)..(1291): Ceres Seq. ID no. 12406180
  misc_feature (61)..(61): n is a, c, t, g, unknown, or other
atataaataaagtactcaagcaatcctcgagcctcaggcccaagcaaagcatccagcggancacaccacaccacccttggtccggcactagcactagctatccagtggagacgaagatggcgacggcgcggtggctgcaggttgccgccatggcggtggcgctgctggcggagtgggcgacggcggcggcgcctcggaagcccgtggacgtgccgttccagaagaactacgtgccgacgtgggcgcaggaccacatccactacatcgacggcgggcgggaggtgcagctgtacctggacaagtccaccggcacgggcttccagacgcggggctcctacctcttcggccacttcagcatgcacatgaagctcgtcggcggcgactccgcgggcaccgtcacggccttctacctgtcgtcgcagaactcgggagcacgacgagatcgacttcgagttcctgggcaaccggacggggcagccctacatcctgcagaccaacgtgttcaccggcggcaagggcgaccgcgagcagcggatctacctctggttcgaccccaccaaggagtaccactcctactccgtcctctggaacctctacatgatcgcgttcttcgtggacgacgtgccgatccgggtgttcaagaacacgagcgccgacctgggcgtgcggtacccgttcagccagccgatgaagctctactccagcctgtggaacgccgacgactgggcgacccgcggcgggcgcgagaagacggactggtccaacgcgcccttcgtcgcctcctaccgcggcttccacgtcgacggctgcgaggcctccgcggaggcgcgcttctgcgccacccagggcgcgcgctggtgggaccagccggagttcagggacctcgacgccgcgcagtaccgccgcctggccgaggtcaggcgccgctacaccatctacaactactgcaccgatcgcgaccgctacggcgccgccgtgccgcccgagtgcgcccgcgaccgcgacgtctgatgatgatgcgttgggccggcaagctgcttgatcgagagcagcctgtaatgtatgtatggtatggtattgttgtgtgtcaggttcgtcgtcgtgggtctgcagagacagagagagtccgatccggcgcgtacgtgtgcccgcgtgggcacatgcatacgtacatgcttgtgttgtactgtacgctcgtatctcctcacaccgaaatgaattgcgattaagtatcgaaatttcggcagcttatccatcatgtaatgagttcctctgcagtacttaaaactct

SEQ ID NO: 24970 - protein, 408 aa, Zea mays subsp. mays
  peptide (1)..(408): Ceres Seq. ID no. 12406181
  misc_feature (72)..(142): Pfam Name: Pfam Description:  Glycosyl hydrolases family 16
  misc_feature (40)..(142): NCBI GI NO: 38605539 NR Description: Probable xyloglucan endotransglucosylase/hydrolaseprecursor
  misc_feature (40)..(142): NCBI GI NO: 1885310 NR Description: Endoxyloglucan transferase (EXT)
  misc_feature (39)..(142): NCBI GI NO: 950299 NR Description: xyloglucan endotransglycosylase precursor
  misc_feature (39)..(142): NCBI GI NO: 27228078 NR Description: xyloglucan endotransglycosylase precursor
  misc_feature (52)..(142): NCBI GI NO: 541939 NR Description: xyloglucan endo-1,4-beta-D-glucanase (EC 3
  misc_feature (52)..(142): NCBI GI NO: 38605538 NR Description: Probable xyloglucan endotransglucosylase/hydrolaseprecursor
  misc_feature (39)..(142): NCBI GI NO: 38605156 NR Description: Xyloglucan endotransglucosylase/hydrolase protein Aprecursor
  misc_feature (39)..(142): NCBI GI NO: 7447416 NR Description: xyloglucan endo-1,4-beta-D-glucanase (EC 3
  misc_feature (50)..(142): NCBI GI NO: 3043422 NR Description: endoxyloglucan transferase [Cicer arietinum]
  misc_feature (39)..(142): NCBI GI NO: 22947847 NR Description: xyloglucan endotransglycosylase
  misc_feature (20)..(20): Xaa is any aa, unknown or other
INKVLKQSSSLRPKQSIQRXTPHHPWSGTSTSYPVETKMATARWLQVAAMAVALLAEWATAAAPRKPVDVPFQKNYVPTWAQDHIHYIDGGREVQLYLDKSTGTGFQTRGSYLFGHFSMHMKLVGGDSAGTVTAFYLSSQNSGARRDRLRVPGQPDGAALHPADQRVHRRQGRPRAADLPLVRPHQGVPLLLRPLEPLHDRVLRGRRADPGVQEHERRPGRAVPVQPADEALLQPVERRRLGDPRRAREDGLVQRALRRLLPRLPRRRLRGLRGGALLRHPGRALVGPAGVQGPRRRAVPPPGRGQAPLHHLQLLHRSRPLRRRRAARVRPRPRRLMMMRWAGKLLDREQPVMYVWYGIVVCQVRRRGSAETERVRSGAYVCPRGHMHTYMLVLYCTLVSPHTEMNCD

SEQ ID NO: 24971 - protein, 370 aa, Zea mays subsp. mays
  peptide (1)..(370): Ceres Seq. ID no. 12406182
  misc_feature (34)..(104): Pfam Name: Pfam Description:  Glycosyl hydrolases family 16
  misc_feature (2)..(104): NCBI GI NO: 38605539 NR Description: Probable xyloglucan endotransglucosylase/hydrolaseprecursor
  misc_feature (2)..(104): NCBI GI NO: 1885310 NR Description: Endoxyloglucan transferase (EXT)
  misc_feature (1)..(104): NCBI GI NO: 950299 NR Description: xyloglucan endotransglycosylase precursor
  misc_feature (1)..(104): NCBI GI NO: 27228078 NR Description: xyloglucan endotransglycosylase precursor
  misc_feature (14)..(104): NCBI GI NO: 541939 NR Description: xyloglucan endo-1,4-beta-D-glucanase (EC 3
  misc_feature (14)..(104): NCBI GI NO: 38605538 NR Description: Probable xyloglucan endotransglucosylase/hydrolaseprecursor
  misc_feature (1)..(104): NCBI GI NO: 38605156 NR Description: Xyloglucan endotransglucosylase/hydrolase protein Aprecursor
  misc_feature (1)..(104): NCBI GI NO: 7447416 NR Description: xyloglucan endo-1,4-beta-D-glucanase (EC 3
  misc_feature (12)..(104): NCBI GI NO: 3043422 NR Description: endoxyloglucan transferase [Cicer arietinum]
  misc_feature (1)..(104): NCBI GI NO: 22947847 NR Description: xyloglucan endotransglycosylase
MATARWLQVAAMAVALLAEWATAAAPRKPVDVPFQKNYVPTWAQDHIHYIDGGREVQLYLDKSTGTGFQTRGSYLFGHFSMHMKLVGGDSAGTVTAFYLSSQNSGARRDRLRVPGQPDGAALHPADQRVHRRQGRPRAADLPLVRPHQGVPLLLRPLEPLHDRVLRGRRADPGVQEHERRPGRAVPVQPADEALLQPVERRRLGDPRRAREDGLVQRALRRLLPRLPRRRLRGLRGGALLRHPGRALVGPAGVQGPRRRAVPPPGRGQAPLHHLQLLHRSRPLRRRRAARVRPRPRRLMMMRWAGKLLDREQPVMYVWYGIVVCQVRRRGSAETERVRSGAYVCPRGHMHTYMLVLYCTLVSPHTEMNCD

SEQ ID NO: 24972 - protein, 359 aa, Zea mays subsp. mays
  peptide (1)..(359): Ceres Seq. ID no. 12406183
  misc_feature (23)..(93): Pfam Name: Pfam Description:  Glycosyl hydrolases family 16
  misc_feature (1)..(93): NCBI GI NO: 38605539 NR Description: Probable xyloglucan endotransglucosylase/hydrolaseprecursor
  misc_feature (1)..(93): NCBI GI NO: 1885310 NR Description: Endoxyloglucan transferase (EXT)
  misc_feature (1)..(93): NCBI GI NO: 950299 NR Description: xyloglucan endotransglycosylase precursor
  misc_feature (1)..(93): NCBI GI NO: 27228078 NR Description: xyloglucan endotransglycosylase precursor
  misc_feature (3)..(93): NCBI GI NO: 541939 NR Description: xyloglucan endo-1,4-beta-D-glucanase (EC 3
  misc_feature (3)..(93): NCBI GI NO: 38605538 NR Description: Probable xyloglucan endotransglucosylase/hydrolaseprecursor
  misc_feature (1)..(93): NCBI GI NO: 38605156 NR Description: Xyloglucan endotransglucosylase/hydrolase protein Aprecursor
  misc_feature (1)..(93): NCBI GI NO: 7447416 NR Description: xyloglucan endo-1,4-beta-D-glucanase (EC 3
  misc_feature (1)..(93): NCBI GI NO: 3043422 NR Description: endoxyloglucan transferase [Cicer arietinum]
  misc_feature (1)..(93): NCBI GI NO: 22947847 NR Description: xyloglucan endotransglycosylase
MAVALLAEWATAAAPRKPVDVPFQKNYVPTWAQDHIHYIDGGREVQLYLDKSTGTGFQTRGSYLFGHFSMHMKLVGGDSAGTVTAFYLSSQNSGARRDRLRVPGQPDGAALHPADQRVHRRQGRPRAADLPLVRPHQGVPLLLRPLEPLHDRVLRGRRADPGVQEHERRPGRAVPVQPADEALLQPVERRRLGDPRRAREDGLVQRALRRLLPRLPRRRLRGLRGGALLRHPGRALVGPAGVQGPRRRAVPPPGRGQAPLHHLQLLHRSRPLRRRRAARVRPRPRRLMMMRWAGKLLDREQPVMYVWYGIVVCQVRRRGSAETERVRSGAYVCPRGHMHTYMLVLYCTLVSPHTEMNCD

SEQ ID NO: 24973 - DNA, 1481 bp, Zea mays subsp. mays
  misc_feature (1)..(1481): Ceres Seq. ID no. 12410320
gccaaccgatcctcctcctcctcgctcgacgagtcgtctgtgagaacaatggcaactgccgcgggtggagccaccgccggctcgcgccgtcgggcgctgctcctgatcgcgaactacgccgcgctgctggtggggtccgtctcgtcgagcctgctgtccaggttctacttcgcgcgaggcgggcggaaccggtgggtggtgacgctggtgcagtcggcgggcttcccactgctggtcgtcgccgtcctcgtcgccggccgccccgccgccgcgccgcgccccttcacgtggttctcgaggcggttcctcacggtgtgcctcgtcatcggcgcgctcatgggcgccaacaacctgctcttctcgtacagcacgtcgttcctgcccgtgtccacgtcgtcgctgctgctgtcgacgcagttggcgttcacgctcgtgctggccgccgtcatcgtccgccacccgctcaccttcgtcaacctcaatgccgtcgtgctcctgaccgtcagctccgtgctcctggcgctccgctcgggggactccggcgagaacccggacgggggcggcgcggccgcggcgcactacttcgccgggtacgtggtcacgctgggcgcggcggggctgttcgccgcgtacctgcccgtcatggagctcctgtaccgccaggccgtgtccggcgggttcgtcctggccgtggaggtgcaggcggtgatgcaggccatggcctcgctggtggcggcgatcgggctggcggccaagggaggcctgggcggcgacgtggcgcgctggaagggctcggcggcgctctactgggtcgtggtgtccaccctggtcctgacttggcaggcgtgcttcatgggcacggcgggggtgatctacctcacgtcgtcgctacacagcggcgtgtgcatgaccgccgtgctgacggcgaacgtgctgggcggcgtgttggtgttcggcgacccattcggcgccgagaagggcatcgcgaccgcgctctgcgcctggggcctcgcctcctacctctacggcgagtacaccaagaaaaagaaagaagaagaggatgaggccgtcgccgacgcgtccgcttccgacgccgacagcgtccggaagagccttacaggcggcgccggagacgagctagaagacgtctgaaaacaaactaaaggccacaggggaatgaaccgtgtgatcagggacgaagcaagaatggaaactgaaaagggtgtagctgcagttgttgagtcatgttagatcgatggattataggcaaagttacaagcaaccaaacttgtaactgatggccagctcttctggctgctagctagtagctattaatctagtcatgaggtttcactagcggtttaagtgatcagggtttagtactttagtgtagtgtggggtgggtggaatacaacatgtaaaccagctgttcctcctccttactcactgtcgtcatcaatattcaatagccgccgttgttg

SEQ ID NO: 24974 - protein, 383 aa, Zea mays subsp. mays
  peptide (1)..(383): Ceres Seq. ID no. 12410321
  misc_feature (179)..(358): Pfam Name: Pfam Description:  Domain of unknown function, DUF250
  misc_feature (18)..(383): NCBI GI NO: 34911172 NR Description: putative purine permease
  misc_feature (29)..(367): NCBI GI NO: 18397682 NR Description: expressed protein; protein id: At1g30840
  misc_feature (34)..(350): NCBI GI NO: 15217873 NR Description: purine permease; protein id: At1g28230
  misc_feature (34)..(350): NCBI GI NO: 7620007 NR Description: purine permease [Arabidopsis thaliana]
  misc_feature (34)..(363): NCBI GI NO: 15217872 NR Description: purine permease, putative; protein id: At1g28220.1
  misc_feature (33)..(360): NCBI GI NO: 15219436 NR Description: hypothetical protein; protein id: At1g44750
  misc_feature (18)..(367): NCBI GI NO: 34902418 NR Description: Hypothetical protein
  misc_feature (94)..(364): NCBI GI NO: 25350217 NR Description: hypothetical protein At2g33750
  misc_feature (94)..(364): NCBI GI NO: 30685825 NR Description: purine permease family [Arabidopsis thaliana]
  misc_feature (10)..(365): NCBI GI NO: 38344291 NR Description: OSJNBa0013K16.23
ANRSSSSSLDESSVRTMATAAGGATAGSRRRALLLIANYAALLVGSVSSSLLSRFYFARGGRNRWVVTLVQSAGFPLLVVAVLVAGRPAAAPRPFTWFSRRFLTVCLVIGALMGANNLLFSYSTSFLPVSTSSLLLSTQLAFTLVLAAVIVRHPLTFVNLNAVVLLTVSSVLLALRSGDSGENPDGGGAAAAHYFAGYVVTLGAAGLFAAYLPVMELLYRQAVSGGFVLAVEVQAVMQAMASLVAAIGLAAKGGLGGDVARWKGSAALYWVVVSTLVLTWQACFMGTAGVIYLTSSLHSGVCMTAVLTANVLGGVLVFGDPFGAEKGIATALCAWGLASYLYGEYTKKKKEEEDEAVADASASDADSVRKSLTGGAGDELEDV

SEQ ID NO: 24975 - protein, 367 aa, Zea mays subsp. mays
  peptide (1)..(367): Ceres Seq. ID no. 12410322
  misc_feature (163)..(342): Pfam Name: Pfam Description:  Domain of unknown function, DUF250
  misc_feature (2)..(367): NCBI GI NO: 34911172 NR Description: putative purine permease
  misc_feature (13)..(351): NCBI GI NO: 18397682 NR Description: expressed protein; protein id: At1g30840
  misc_feature (18)..(334): NCBI GI NO: 15217873 NR Description: purine permease; protein id: At1g28230
  misc_feature (18)..(334): NCBI GI NO: 7620007 NR Description: purine permease [Arabidopsis thaliana]
  misc_feature (18)..(347): NCBI GI NO: 15217872 NR Description: purine permease, putative; protein id: At1g28220.1
  misc_feature (17)..(344): NCBI GI NO: 15219436 NR Description: hypothetical protein; protein id: At1g44750
  misc_feature (2)..(351): NCBI GI NO: 34902418 NR Description: Hypothetical protein
  misc_feature (78)..(348): NCBI GI NO: 25350217 NR Description: hypothetical protein At2g33750
  misc_feature (78)..(348): NCBI GI NO: 30685825 NR Description: purine permease family [Arabidopsis thaliana]
  misc_feature (1)..(349): NCBI GI NO: 38344291 NR Description: OSJNBa0013K16.23
MATAAGGATAGSRRRALLLIANYAALLVGSVSSSLLSRFYFARGGRNRWVVTLVQSAGFPLLVVAVLVAGRPAAAPRPFTWFSRRFLTVCLVIGALMGANNLLFSYSTSFLPVSTSSLLLSTQLAFTLVLAAVIVRHPLTFVNLNAVVLLTVSSVLLALRSGDSGENPDGGGAAAAHYFAGYVVTLGAAGLFAAYLPVMELLYRQAVSGGFVLAVEVQAVMQAMASLVAAIGLAAKGGLGGDVARWKGSAALYWVVVSTLVLTWQACFMGTAGVIYLTSSLHSGVCMTAVLTANVLGGVLVFGDPFGAEKGIATALCAWGLASYLYGEYTKKKKEEEDEAVADASASDADSVRKSLTGGAGDELEDV

SEQ ID NO: 24976 - protein, 353 aa, Zea mays subsp. mays
  peptide (1)..(353): Ceres Seq. ID no. 12410323
  misc_feature (132)..(353): Pfam Name: Pfam Description:  DivIVA protein
  misc_feature (29)..(258): NCBI GI NO: 23018055 NR Description: hypothetical protein [Thermobifida fusca]
QPILLLLARRVVCENNGNCRGWSHRRLAPSGAAPDRELRRAAGGVRLVEPAVQVLLRARRAEPVGGDAGAVGGLPTAGRRRPRRRPPRRRAAPLHVVLEAVPHGVPRHRRAHGRQQPALLVQHVVPARVHVVAAAVDAVGVHARAGRRHRPPPAHLRQPQCRRAPDRQLRAPGAPLGGLRREPGRGRRGRGALLRRVRGHAGRGGAVRRVPARHGAPVPPGRVRRVRPGRGGAGGDAGHGLAGGGDRAGGQGRPGRRRGALEGLGGALLGRGVHPGPDLAGVLHGHGGGDLPHVVATQRRVHDRRADGERAGRRVGVRRPIRRREGHRDRALRLGPRLLPLRRVHQEKERRRG

SEQ ID NO: 24977 - DNA, 1900 bp, Zea mays subsp. mays
  misc_feature (1)..(1900): Ceres Seq. ID no. 13493214
aacttcacataacggctgtgtcctgttcctgtagctgctctcttttatggttgatggttacgacctgaacagatcgatcgtccttcctgtcgtttcgttttctcgccggcagggcactgggtacgccgccgccgcctcaacgccaccacgctgccgccgcgccagttcgtcaccgcgagacacaagacacgtgcctcgcttccctcgggccggttggccgtggccggccgtcgctgttctgttcctatttcttggcaactccgcccgtttcacctccggaggaccgacagcgacggcgccagtagatagatgcactactgacgccactggccacctcgagttcgagtgccaagggacgccacgagaccaaccgtgaggacaggacaacggtcgcctttgcccgcggatccgcggatttcgtcttcttgggtgccatggatccagtcgccggcacggcggagcatcggggcccgttggaagtgcgcgcccgcgcgcccggcaagatcatcctcgcgggcgagcacgccgtcgtccacggctccgccgccgtcgccgctgccatcgatctctacaccaactcctccctcctcctccgccccgcaggcccaggagatggtggcggcgctggctccggcgcggtggagctggacctcagggactcgggcctcaccttctcgtggccgtgctcgcgcctccgcggggcgctgggggaggagatcagcgccaaccccggggctccggcgccgtgctcccctgaccagctggccgccattgccaggctcttgcaggaccaggagatccctgaggccaagatctggctctccgccggcctctccgccttccttttcctctacgcctccattttgggatgcaggcctggcaaggcagtggtgtcctcggacctgcccatgggcgcagggctcggctcatcagcggcattttgtgtctccatgtcgggggcgctattgactgctgctggtgcagtaagtgttggagcatgcatgggtgctgagggttgggaggtgttggagaagggtgctcttgagctggtcaaccaatgggcgttccaaggggaaaagattattcatggcaagccttctggcattgacaattccgtcagcacttttgggaaaatgatcaaattcaagaagggggaactgacaaaccttgagtcctggaacccagtcaaaatgcttattactgatacaagagttggtaggaacacaaaggcattggttgctggtgtgtctgaaagggcgtctaggcatccagatgctatggcttctgtcttccatgcagtgaactctattagtgaagagctttcaagcattgtcgagttagcagccgaggatgagatagccatcacctctaaggaggataagctagcggagcttatggagatgaaccaaggtttgcttcagtgtatgggagtcagccattcttctatagaaactgtgttgcggaccactctgaaatatagcttggtctcaaagctaactggagctggtggtggaggctgtgtgttgactctaatacccgacgttatcggccaatactgttctggagaaagtcaccacagatctcgaatctcacggttatcgctgcttcaaagttgaggttggtgggcgaggtctccaagtattccgtgtataacactcatcctatttcaaggagatgttgtaccaaacttagatggcttacctgcactgaagctgtttagattctcttcttgagttattccaagatcatgataggatattcttctcctaagcctagcggctagcaggttctgtatccagtacttgagttgctccaggattaggacattcttatgctatccctagcgatcttgtatcaaataagctcatagatgcatgatcattgctggtgtgattgttgt

SEQ ID NO: 24978 - protein, 393 aa, Zea mays subsp. mays
  peptide (1)..(393): Ceres Seq. ID no. 13493215
  misc_feature (14)..(368): NCBI GI NO: 37532842 NR Description: putative mevalonate kinase
  misc_feature (14)..(371): NCBI GI NO: 16417946 NR Description: mevalonate kinase [Hevea brasiliensis]
  misc_feature (14)..(368): NCBI GI NO: 15240936 NR Description: mevalonate kinase [Arabidopsis thaliana]
  misc_feature (14)..(368): NCBI GI NO: 5578718 NR Description: mevalonate kinase [Arabidopsis thaliana]
  misc_feature (20)..(367): NCBI GI NO: 13592007 NR Description: mevalonate kinase [Rattus norvegicus]
  misc_feature (20)..(367): NCBI GI NO: 450346 NR Description: ORF for viral-cellular fusion transcript
  misc_feature (20)..(367): NCBI GI NO: 4557769 NR Description: mevalonate kinase [Homo sapiens]
  misc_feature (20)..(367): NCBI GI NO: 33303805 NR Description: mevalonate kinase [synthetic construct]
  misc_feature (20)..(367): NCBI GI NO: 12963731 NR Description: mevalonate kinase [Mus musculus]
  misc_feature (132)..(367): NCBI GI NO: 28828936 NR Description: similar to Rattus norvegicus (Rat)
MDPVAGTAEHRGPLEVRARAPGKIILAGEHAVVHGSAAVAAAIDLYTNSSLLLRPAGPGDGGGAGSGAVELDLRDSGLTFSWPCSRLRGALGEEISANPGAPAPCSPDQLAAIARLLQDQEIPEAKIWLSAGLSAFLFLYASILGCRPGKAVVSSDLPMGAGLGSSAAFCVSMSGALLTAAGAVSVGACMGAEGWEVLEKGALELVNQWAFQGEKIIHGKPSGIDNSVSTFGKMIKFKKGELTNLESWNPVKMLITDTRVGRNTKALVAGVSERASRHPDAMASVFHAVNSISEELSSIVELAAEDEIAITSKEDKLAELMEMNQGLLQCMGVSHSSIETVLRTTLKYSLVSKLTGAGGGGCVLTLIPDVIGQYCSGESHHRSRISRLSLLQS

SEQ ID NO: 24979 - protein, 235 aa, Zea mays subsp. mays
  peptide (1)..(235): Ceres Seq. ID no. 13493216
  misc_feature (1)..(210): NCBI GI NO: 37532842 NR Description: putative mevalonate kinase
  misc_feature (1)..(213): NCBI GI NO: 16417946 NR Description: mevalonate kinase [Hevea brasiliensis]
  misc_feature (1)..(210): NCBI GI NO: 15240936 NR Description: mevalonate kinase [Arabidopsis thaliana]
  misc_feature (1)..(210): NCBI GI NO: 5578718 NR Description: mevalonate kinase [Arabidopsis thaliana]
  misc_feature (1)..(209): NCBI GI NO: 13592007 NR Description: mevalonate kinase [Rattus norvegicus]
  misc_feature (1)..(209): NCBI GI NO: 450346 NR Description: ORF for viral-cellular fusion transcript
  misc_feature (1)..(209): NCBI GI NO: 4557769 NR Description: mevalonate kinase [Homo sapiens]
  misc_feature (1)..(209): NCBI GI NO: 33303805 NR Description: mevalonate kinase [synthetic construct]
  misc_feature (1)..(209): NCBI GI NO: 12963731 NR Description: mevalonate kinase [Mus musculus]
  misc_feature (1)..(209): NCBI GI NO: 28828936 NR Description: similar to Rattus norvegicus (Rat)
MGAGLGSSAAFCVSMSGALLTAAGAVSVGACMGAEGWEVLEKGALELVNQWAFQGEKIIHGKPSGIDNSVSTFGKMIKFKKGELTNLESWNPVKMLITDTRVGRNTKALVAGVSERASRHPDAMASVFHAVNSISEELSSIVELAAEDEIAITSKEDKLAELMEMNQGLLQCMGVSHSSIETVLRTTLKYSLVSKLTGAGGGGCVLTLIPDVIGQYCSGESHHRSRISRLSLLQS

SEQ ID NO: 24980 - protein, 221 aa, Zea mays subsp. mays
  peptide (1)..(221): Ceres Seq. ID no. 13493217
  misc_feature (1)..(196): NCBI GI NO: 37532842 NR Description: putative mevalonate kinase
  misc_feature (1)..(199): NCBI GI NO: 16417946 NR Description: mevalonate kinase [Hevea brasiliensis]
  misc_feature (1)..(196): NCBI GI NO: 15240936 NR Description: mevalonate kinase [Arabidopsis thaliana]
  misc_feature (1)..(196): NCBI GI NO: 5578718 NR Description: mevalonate kinase [Arabidopsis thaliana]
  misc_feature (1)..(195): NCBI GI NO: 13592007 NR Description: mevalonate kinase [Rattus norvegicus]
  misc_feature (1)..(195): NCBI GI NO: 450346 NR Description: ORF for viral-cellular fusion transcript
  misc_feature (1)..(195): NCBI GI NO: 4557769 NR Description: mevalonate kinase [Homo sapiens]
  misc_feature (1)..(195): NCBI GI NO: 33303805 NR Description: mevalonate kinase [synthetic construct]
  misc_feature (1)..(195): NCBI GI NO: 12963731 NR Description: mevalonate kinase [Mus musculus]
  misc_feature (1)..(195): NCBI GI NO: 28828936 NR Description: similar to Rattus norvegicus (Rat)
MSGALLTAAGAVSVGACMGAEGWEVLEKGALELVNQWAFQGEKIIHGKPSGIDNSVSTFGKMIKFKKGELTNLESWNPVKMLITDTRVGRNTKALVAGVSERASRHPDAMASVFHAVNSISEELSSIVELAAEDEIAITSKEDKLAELMEMNQGLLQCMGVSHSSIETVLRTTLKYSLVSKLTGAGGGGCVLTLIPDVIGQYCSGESHHRSRISRLSLLQS

SEQ ID NO: 24981 - DNA, 1565 bp, Zea mays subsp. mays
  misc_feature (1)..(1565): Ceres Seq. ID no. 12356044
gccgcaacgaattcccagtctccagccaaccaccgcagacaagatcctctcttccgcgtccccaaaccctcgagttcgcacgggctccggccagattcgcgcagtctaagcttcgaatcggcgcatggaggcggcagcagtagccgcggcgctcaggtcgcctaccgccaccaccgccgccgccgccgctggccccacgtggcggcccgctgccccgggcgccgcctcgctcgcctttgaccggagacgcagcttcgccttcggctccgtcaagggtctcgggcggcagcagcagctcacctctaggtctactaggaggcgaagcagtgtggtcagggcatcctggtccccctcggagtctctgccaccgtcctcgccgatcgcgcctctcaggatggaatcgccggcggggcagctactctcgcaaatcctgcacacgcacccgcacttgctgtctgccgctgccgagcagcagctcgagcagctccagactgaccgcgaggccgacaaggagaaggataaggagagcgatgctggcgacaagctggctccgacaggtggcaacctcgtgctgtacaggcggattgctgaagtaaaagagaaggaacggagaaggactttggaggagatactctatgctctggttgttcagaagttcgttgaagctggtgtctctctggttccagcactctcacgctccaccgatccttctggaagagttgatcagtgggcagaaactgtggaagaaaatcttcaacgtctgcactcgcacgaggcctatgaaatgatcgagaatcacctcaccctcattctggggcagcgtcaaggtgacgccactatcgcagccataagtaagctccgtgttggccaggtctatgctgcatctgtgatgtacggttatttcctgaagagagttgaccagaggttccagctcgagaagacaatgaagggcctcccttggggatcagaagaggaagacagcgctttgaatcaagttatgatgaccgacttgatgccttcagctcagacttctagctctcatccagagatgggctcgtggaccgcgcctgccttcagcacaggagggcccagccaatctatcaagccttgccgccttaggtcgtatgtcatgtcgtttgattccgatacgctccagaggtatgcgacagtcaggtcaaaggaggccttcggcatcattgagaagcacacggaagcgctatttgggaagccagagattgtgatcacacctgaaggcacccttgattcttccaaggatgagcatattaggataagctttgctgggctgagaaggctgatcctggaggctgttaccttcggatcgttcctctgggacgttgagagctttgtggattcccggtaccatttcgtgaccagctaagatggtcatcctaagtgaagaacgattcatggtttacggatcttgtctcacaatgtctatgggcttcggaaaggctgttgtacaatgatgttagactgttaccactccccttaggccatgtttttcaccgttaatatatgtgaattggatggtattgagttgattt

SEQ ID NO: 24982 - protein, 424 aa, Zea mays subsp. mays
  peptide (1)..(424): Ceres Seq. ID no. 12356045
  misc_feature (21)..(422): Pfam Name: DUF760 Pfam Description: Protein of unknown function
  misc_feature (1)..(424): NCBI GI NO: 28301943 NR Description: unknown protein
  misc_feature (21)..(422): NCBI GI NO: 18401645 NR Description: expressed protein; protein id: At3g17800
  misc_feature (21)..(422): NCBI GI NO: 17064820 NR Description: Unknown protein [Arabidopsis thaliana]
  misc_feature (5)..(422): NCBI GI NO: 15221185 NR Description: unknown protein; protein id: At1g48450
  misc_feature (165)..(422): NCBI GI NO: 13561930 NR Description: unknown [Brassica napus]
  misc_feature (30)..(422): NCBI GI NO: 18398302 NR Description: expressed protein; protein id: At1g32160
  misc_feature (134)..(424): NCBI GI NO: 32489097 NR Description: OSJNBa0093F12.3
  misc_feature (1)..(299): NCBI GI NO: 32489097 NR Description: OSJNBa0093F12.3
  misc_feature (61)..(277): NCBI GI NO: 18397912 NR Description: expressed protein; protein id: At3g07310
  misc_feature (316)..(419): NCBI GI NO: 18397912 NR Description: expressed protein; protein id: At3g07310
MEAAAVAAALRSPTATTAAAAAGPTWRPAAPGAASLAFDRRRSFAFGSVKGLGRQQQLTSRSTRRRSSVVRASWSPSESLPPSSPIAPLRMESPAGQLLSQILHTHPHLLSAAAEQQLEQLQTDREADKEKDKESDAGDKLAPTGGNLVLYRRIAEVKEKERRRTLEEILYALVVQKFVEAGVSLVPALSRSTDPSGRVDQWAETVEENLQRLHSHEAYEMIENHLTLILGQRQGDATIAAISKLRVGQVYAASVMYGYFLKRVDQRFQLEKTMKGLPWGSEEEDSALNQVMMTDLMPSAQTSSSHPEMGSWTAPAFSTGGPSQSIKPCRLRSYVMSFDSDTLQRYATVRSKEAFGIIEKHTEALFGKPEIVITPEGTLDSSKDEHIRISFAGLRRLILEAVTFGSFLWDVESFVDSRYHFVTS

SEQ ID NO: 24983 - protein, 334 aa, Zea mays subsp. mays
  peptide (1)..(334): Ceres Seq. ID no. 12356046
  misc_feature (1)..(332): Pfam Name: DUF760 Pfam Description: Protein of unknown function
  misc_feature (1)..(334): NCBI GI NO: 28301943 NR Description: unknown protein
  misc_feature (1)..(332): NCBI GI NO: 18401645 NR Description: expressed protein; protein id: At3g17800
  misc_feature (1)..(332): NCBI GI NO: 17064820 NR Description: Unknown protein [Arabidopsis thaliana]
  misc_feature (1)..(332): NCBI GI NO: 15221185 NR Description: unknown protein; protein id: At1g48450
  misc_feature (75)..(332): NCBI GI NO: 13561930 NR Description: unknown [Brassica napus]
  misc_feature (1)..(332): NCBI GI NO: 18398302 NR Description: expressed protein; protein id: At1g32160
  misc_feature (44)..(334): NCBI GI NO: 32489097 NR Description: OSJNBa0093F12.3
  misc_feature (1)..(209): NCBI GI NO: 32489097 NR Description: OSJNBa0093F12.3
  misc_feature (1)..(187): NCBI GI NO: 18397912 NR Description: expressed protein; protein id: At3g07310
  misc_feature (226)..(329): NCBI GI NO: 18397912 NR Description: expressed protein; protein id: At3g07310
MESPAGQLLSQILHTHPHLLSAAAEQQLEQLQTDREADKEKDKESDAGDKLAPTGGNLVLYRRIAEVKEKERRRTLEEILYALVVQKFVEAGVSLVPALSRSTDPSGRVDQWAETVEENLQRLHSHEAYEMIENHLTLILGQRQGDATIAAISKLRVGQVYAASVMYGYFLKRVDQRFQLEKTMKGLPWGSEEEDSALNQVMMTDLMPSAQTSSSHPEMGSWTAPAFSTGGPSQSIKPCRLRSYVMSFDSDTLQRYATVRSKEAFGIIEKHTEALFGKPEIVITPEGTLDSSKDEHIRISFAGLRRLILEAVTFGSFLWDVESFVDSRYHFVTS

SEQ ID NO: 24984 - DNA, 1446 bp, Zea mays subsp. mays
  misc_feature (1)..(1446): Ceres Seq. ID no. 12407308
ctttattttgcgaggagggggcacaacatctcagacctccagtcttcgagtcctcgttgtgcctctcttgatctcctcgcgtccatggctcctgtgcgaggtgccaagaagaggaagcggccggagaagcccgccccggcgcctactccagggttgccgctgccgccgctgccggacggtagcgattggtggggcgtcttctaccgaagggttgcaggacattccccttttccaagagaacaccagaacatggagtctgtcctgaagatgtcaagaagaaccttcgactacatctgctcacttgttaagaaggacctgacaacaaagacatacggtttcagaaacttcaggtttggtgacaagaaagtccttggggtggaggatcaggtggcggtggctctgatgaggctgactactggtgagtcgctgcagaacataggaatgtggtttggcatgaaccactctgccatctcgaacatcacatggcggttcatcgagtccgtggaggagcgtgccatctgccacctgaaatggccgagccctgaggagatggcgaccatcaagacaaggtttgacaaggtttacgggctccctaactgctgcggcgccattgacaccacacacatcctcatgtgttcctcggctcagcccaacagcaaggtctggctggacaatgagaacaaaaacagcatggtgctgcaggccgttgtggatgcagacttgcggttcagagacgtcgtcagtggctggcctgggagcatggacgacacgtgcatccttcgcacttcaggcctgtacaggttgtgtgagaagggcctcaggcttggggggcagatggagcttcccggaggttccgcggttagggagtacctagtcggagatgcaagctacccgctacttccctggctcatgaccccgtaccgggaacatggcctccaggcggccaaggtggaattcaacaagcggcacacggccgcggcggcggtggtgcagaccgcattggcgacgctcaaagggaggtggcgtgtcattcagggagagctgtggaggcctgacaaacaccggctgccacggatcatctttgtctgctgcttgataaccaacatcatcatcgacatggaagggactccaagcagagacgaactggtttcaggcaaccatgaccttggctacaagcagcagttcagtgacgccgcagatgacaatgcaatcaagcagagagacgacctgtctcgacatgtcgacaatgcaatcaagcggagagacgatctgtctcaccatgtcaccgccggcgagtaaacactcaccgtcaccctttgctttttgcacccattaatataaaaaacagggatacaaaattgtaaggtgaatttttagcagattccaataatgttttggtttcagggagacattaccatcttaaacaaagtgtagccctaatttgcc

SEQ ID NO: 24985 - protein, 432 aa, Zea mays subsp. mays
  peptide (1)..(432): Ceres Seq. ID no. 12407309
  misc_feature (29)..(414): NCBI GI NO: 34908114 NR Description: P0031D11.14
  misc_feature (62)..(411): NCBI GI NO: 15233248 NR Description: putative protein; protein id: At3g55350
  misc_feature (29)..(414): NCBI GI NO: 25553597 NR Description: OJ1656_E11.28
  misc_feature (29)..(414): NCBI GI NO: 18412695 NR Description: putative protein; protein id: At3g63270
  misc_feature (145)..(414): NCBI GI NO: 11357482 NR Description: hypothetical protein F16M2
  misc_feature (29)..(160): NCBI GI NO: 11357482 NR Description: hypothetical protein F16M2
  misc_feature (77)..(414): NCBI GI NO: 15239835 NR Description: putative protein; protein id: At5g12010
  misc_feature (88)..(386): NCBI GI NO: 31207419 NR Description: ENSANGP00000015380 [Anopheles gambiae]
  misc_feature (74)..(382): NCBI GI NO: 21902022 NR Description: B1097D05.23
  misc_feature (61)..(369): NCBI GI NO: 21592524 NR Description: unknown [Arabidopsis thaliana]
LYFARRGHNISDLQSSSPRCASLDLLASMAPVRGAKKRKRPEKPAPAPTPGLPLPPLPDGSDWWGVFYRRVAGHSPFPREHQNMESVLKMSRRTFDYICSLVKKDLTTKTYGFRNFRFGDKKVLGVEDQVAVALMRLTTGESLQNIGMWFGMNHSAISNITWRFIESVEERAICHLKWPSPEEMATIKTRFDKVYGLPNCCGAIDTTHILMCSSAQPNSKVWLDNENKNSMVLQAVVDADLRFRDVVSGWPGSMDDTCILRTSGLYRLCEKGLRLGGQMELPGGSAVREYLVGDASYPLLPWLMTPYREHGLQAAKVEFNKRHTAAAAVVQTALATLKGRWRVIQGELWRPDKHRLPRIIFVCCLITNIIIDMEGTPSRDELVSGNHDLGYKQQFSDAADDNAIKQRDDLSRHVDNAIKRRDDLSHHVTAGE

SEQ ID NO: 24986 - protein, 404 aa, Zea mays subsp. mays
  peptide (1)..(404): Ceres Seq. ID no. 12407310
  misc_feature (1)..(386): NCBI GI NO: 34908114 NR Description: P0031D11.14
  misc_feature (34)..(383): NCBI GI NO: 15233248 NR Description: putative protein; protein id: At3g55350
  misc_feature (1)..(386): NCBI GI NO: 25553597 NR Description: OJ1656_E11.28
  misc_feature (1)..(386): NCBI GI NO: 18412695 NR Description: putative protein; protein id: At3g63270
  misc_feature (117)..(386): NCBI GI NO: 11357482 NR Description: hypothetical protein F16M2
  misc_feature (1)..(132): NCBI GI NO: 11357482 NR Description: hypothetical protein F16M2
  misc_feature (49)..(386): NCBI GI NO: 15239835 NR Description: putative protein; protein id: At5g12010
  misc_feature (60)..(358): NCBI GI NO: 31207419 NR Description: ENSANGP00000015380 [Anopheles gambiae]
  misc_feature (46)..(354): NCBI GI NO: 21902022 NR Description: B1097D05.23
  misc_feature (33)..(341): NCBI GI NO: 21592524 NR Description: unknown [Arabidopsis thaliana]
MAPVRGAKKRKRPEKPAPAPTPGLPLPPLPDGSDWWGVFYRRVAGHSPFPREHQNMESVLKMSRRTFDYICSLVKKDLTTKTYGFRNFRFGDKKVLGVEDQVAVALMRLTTGESLQNIGMWFGMNHSAISNITWRFIESVEERAICHLKWPSPEEMATIKTRFDKVYGLPNCCGAIDTTHILMCSSAQPNSKVWLDNENKNSMVLQAVVDADLRFRDVVSGWPGSMDDTCILRTSGLYRLCEKGLRLGGQMELPGGSAVREYLVGDASYPLLPWLMTPYREHGLQAAKVEFNKRHTAAAAVVQTALATLKGRWRVIQGELWRPDKHRLPRIIFVCCLITNIIIDMEGTPSRDELVSGNHDLGYKQQFSDAADDNAIKQRDDLSRHVDNAIKRRDDLSHHVTAGE

SEQ ID NO: 24987 - protein, 349 aa, Zea mays subsp. mays
  peptide (1)..(349): Ceres Seq. ID no. 12407311
  misc_feature (1)..(331): NCBI GI NO: 34908114 NR Description: P0031D11.14
  misc_feature (1)..(328): NCBI GI NO: 15233248 NR Description: putative protein; protein id: At3g55350
  misc_feature (1)..(331): NCBI GI NO: 25553597 NR Description: OJ1656_E11.28
  misc_feature (1)..(331): NCBI GI NO: 18412695 NR Description: putative protein; protein id: At3g63270
  misc_feature (62)..(331): NCBI GI NO: 11357482 NR Description: hypothetical protein F16M2
  misc_feature (1)..(77): NCBI GI NO: 11357482 NR Description: hypothetical protein F16M2
  misc_feature (1)..(331): NCBI GI NO: 15239835 NR Description: putative protein; protein id: At5g12010
  misc_feature (5)..(303): NCBI GI NO: 31207419 NR Description: ENSANGP00000015380 [Anopheles gambiae]
  misc_feature (1)..(299): NCBI GI NO: 21902022 NR Description: B1097D05.23
  misc_feature (1)..(286): NCBI GI NO: 21592524 NR Description: unknown [Arabidopsis thaliana]
MESVLKMSRRTFDYICSLVKKDLTTKTYGFRNFRFGDKKVLGVEDQVAVALMRLTTGESLQNIGMWFGMNHSAISNITWRFIESVEERAICHLKWPSPEEMATIKTRFDKVYGLPNCCGAIDTTHILMCSSAQPNSKVWLDNENKNSMVLQAVVDADLRFRDVVSGWPGSMDDTCILRTSGLYRLCEKGLRLGGQMELPGGSAVREYLVGDASYPLLPWLMTPYREHGLQAAKVEFNKRHTAAAAVVQTALATLKGRWRVIQGELWRPDKHRLPRIIFVCCLITNIIIDMEGTPSRDELVSGNHDLGYKQQFSDAADDNAIKQRDDLSRHVDNAIKRRDDLSHHVTAGE

SEQ ID NO: 24988 - DNA, 1331 bp, Zea mays subsp. mays
  misc_feature (1)..(1331): Ceres Seq. ID no. 12352196
aaaaaggggaagttctcgccagcgtgctgccttgcaagctgctaactagaataggaattcgacgtcgcccccgcccccccctgtgaaaattcgtgatgcggagaacagctaccgccgccctcgtcctcgtccccctcctcgctgcggcggtacagacctccgccctgcctttcatcgtcctgcacgggattggggaccagtgcgccaaccatggcgttgccaagttcactaaacttctcgccgattggtccggctccgacggctactgcctagagattggcagaggaacatgggactcttgggtcatgcctcttcaacaacaggctgatataatctgcaacaaggtcaaggaaatgaaacaactgagaggtggctacaacatagttggtctgtctcaggggaacttgattggtcgagcagtggttgagtactgtgatgatggaccgccggtcaagaatttcatctctctaggaggtcctcatgctggtaccgcttcagtgcctctttgtggttctggatttttttgcattattgttgatgctctgatcaaattggagatctactcagactatgtgcaggaacatcttgcacctagtggctacctcaaaatcccaactgatatggcagattatctgaagagttgtaggtttcttccaaaacttaacaatgaaattccagataaaagaaatgccacctacaaggaaagattcagtagcttagagaatttggttctgattatgtttcaggatgatgcagtcctgataccacgagaaacggcatggtttggttactaccctgatggagcctttgatccagttctaccacctcagaagacgaaactgtatgaggaagactggattggtttgaagacactggatgaagcagggcgggtgaagtttgtgtctgtgccgggaggtcatcttggtatctccaaaggtgacatgaagaagtacattgtgccttacctgacaaacaaaaaggcatcggtgacggtttctgatttgctagttgccatttggcacgctgtgcttgggctggcactggcagagggtgatgacgctgttttgatttgatgcatgggcttccgacagtggcttggattgttacgctgcctctgcttggttggcttggcactcagtcacaaataagattcatctcatctcatattctgttctgttggaaggccctttgattcatggtcacagaaataacagaatgcatgcatgcatgcatccaactagctagctagcttatagtcggagacaatctgtgcggtgcagctagttaattatctatctatacagggcaggcccatgccatgagtattgttg

SEQ ID NO: 24989 - protein, 325 aa, Zea mays subsp. mays
  peptide (1)..(325): Ceres Seq. ID no. 12352197
  misc_feature (22)..(273): Pfam Name: Pfam Description:  Palmitoyl protein thioesterase
  misc_feature (1)..(273): NCBI GI NO: 37536884 NR Description: putative palmitoyl-protein thioesterase
  misc_feature (8)..(306): NCBI GI NO: 15232301 NR Description: palmitoyl-protein thioesterase precursor - like
  misc_feature (8)..(306): NCBI GI NO: 14334718 NR Description: putative palmitoyl-protein thioesterase precursor
  misc_feature (8)..(306): NCBI GI NO: 21593393 NR Description: palmitoyl-protein thioesterase precursor-like
  misc_feature (1)..(298): NCBI GI NO: 15238063 NR Description: palmitoyl-protein thioesterase precursor-like
  misc_feature (1)..(298): NCBI GI NO: 28393539 NR Description: putative palmitoyl-protein thioesterase precursor
  misc_feature (2)..(291): NCBI GI NO: 15236079 NR Description: putative protein; protein id: At4g17483.1
  misc_feature (6)..(303): NCBI GI NO: 15236078 NR Description: putative protein; protein id: At4g17480
  misc_feature (6)..(303): NCBI GI NO: 21554369 NR Description: palmitoyl-protein thioesterase precursor-like
  misc_feature (6)..(294): NCBI GI NO: 15236077 NR Description: putative protein; protein id: At4g17470.1
MRRTATAALVLVPLLAAAVQTSALPFIVLHGIGDQCANHGVAKFTKLLADWSGSDGYCLEIGRGTWDSWVMPLQQQADIICNKVKEMKQLRGGYNIVGLSQGNLIGRAVVEYCDDGPPVKNFISLGGPHAGTASVPLCGSGFFCIIVDALIKLEIYSDYVQEHLAPSGYLKIPTDMADYLKSCRFLPKLNNEIPDKRNATYKERFSSLENLVLIMFQDDAVLIPRETAWFGYYPDGAFDPVLPPQKTKLYEEDWIGLKTLDEAGRVKFVSVPGGHLGISKGDMKKYIVPYLTNKKASVTVSDLLVAIWHAVLGLALAEGDDAVLI

SEQ ID NO: 24990 - protein, 255 aa, Zea mays subsp. mays
  peptide (1)..(255): Ceres Seq. ID no. 12352198
  misc_feature (1)..(203): Pfam Name: Pfam Description:  Palmitoyl protein thioesterase
  misc_feature (1)..(203): NCBI GI NO: 37536884 NR Description: putative palmitoyl-protein thioesterase
  misc_feature (1)..(236): NCBI GI NO: 15232301 NR Description: palmitoyl-protein thioesterase precursor - like
  misc_feature (1)..(236): NCBI GI NO: 14334718 NR Description: putative palmitoyl-protein thioesterase precursor
  misc_feature (1)..(236): NCBI GI NO: 21593393 NR Description: palmitoyl-protein thioesterase precursor-like
  misc_feature (1)..(228): NCBI GI NO: 15238063 NR Description: palmitoyl-protein thioesterase precursor-like
  misc_feature (1)..(228): NCBI GI NO: 28393539 NR Description: putative palmitoyl-protein thioesterase precursor
  misc_feature (1)..(221): NCBI GI NO: 15236079 NR Description: putative protein; protein id: At4g17483.1
  misc_feature (1)..(233): NCBI GI NO: 15236078 NR Description: putative protein; protein id: At4g17480
  misc_feature (1)..(233): NCBI GI NO: 21554369 NR Description: palmitoyl-protein thioesterase precursor-like
  misc_feature (1)..(224): NCBI GI NO: 15236077 NR Description: putative protein; protein id: At4g17470.1
MPLQQQADIICNKVKEMKQLRGGYNIVGLSQGNLIGRAVVEYCDDGPPVKNFISLGGPHAGTASVPLCGSGFFCIIVDALIKLEIYSDYVQEHLAPSGYLKIPTDMADYLKSCRFLPKLNNEIPDKRNATYKERFSSLENLVLIMFQDDAVLIPRETAWFGYYPDGAFDPVLPPQKTKLYEEDWIGLKTLDEAGRVKFVSVPGGHLGISKGDMKKYIVPYLTNKKASVTVSDLLVAIWHAVLGLALAEGDDAVLI

SEQ ID NO: 24991 - protein, 239 aa, Zea mays subsp. mays
  peptide (1)..(239): Ceres Seq. ID no. 12352199
  misc_feature (1)..(187): Pfam Name: Pfam Description:  Palmitoyl protein thioesterase
  misc_feature (1)..(187): NCBI GI NO: 37536884 NR Description: putative palmitoyl-protein thioesterase
  misc_feature (1)..(220): NCBI GI NO: 15232301 NR Description: palmitoyl-protein thioesterase precursor - like
  misc_feature (1)..(220): NCBI GI NO: 14334718 NR Description: putative palmitoyl-protein thioesterase precursor
  misc_feature (1)..(220): NCBI GI NO: 21593393 NR Description: palmitoyl-protein thioesterase precursor-like
  misc_feature (1)..(212): NCBI GI NO: 15238063 NR Description: palmitoyl-protein thioesterase precursor-like
  misc_feature (1)..(212): NCBI GI NO: 28393539 NR Description: putative palmitoyl-protein thioesterase precursor
  misc_feature (1)..(205): NCBI GI NO: 15236079 NR Description: putative protein; protein id: At4g17483.1
  misc_feature (1)..(217): NCBI GI NO: 15236078 NR Description: putative protein; protein id: At4g17480
  misc_feature (1)..(217): NCBI GI NO: 21554369 NR Description: palmitoyl-protein thioesterase precursor-like
  misc_feature (1)..(208): NCBI GI NO: 15236077 NR Description: putative protein; protein id: At4g17470.1
MKQLRGGYNIVGLSQGNLIGRAVVEYCDDGPPVKNFISLGGPHAGTASVPLCGSGFFCIIVDALIKLEIYSDYVQEHLAPSGYLKIPTDMADYLKSCRFLPKLNNEIPDKRNATYKERFSSLENLVLIMFQDDAVLIPRETAWFGYYPDGAFDPVLPPQKTKLYEEDWIGLKTLDEAGRVKFVSVPGGHLGISKGDMKKYIVPYLTNKKASVTVSDLLVAIWHAVLGLALAEGDDAVLI

SEQ ID NO: 24992 - DNA, 1030 bp, Zea mays subsp. mays
  misc_feature (1)..(1030): Ceres Seq. ID no. 12361972
cccagattttcccgcgttcgtggtctccactctccagttctccgttccccaaccccaacctagcatccttgcatcccggggctcagttagcgttgccgccgcaccgtactacacctccggtggccggtgcgcccatttcccgccgatcaagcgcgatggcctcgacgagggatctagccatagcttctctctcagctgcgaccggcgccgttgttgccgccgctgcactgcgcctcttgtcttcccgcagaacatcctccgtcagaccccagaacctccccgccgccgctaacggatctgcctccgagcgcccgctggctcagtcccccttcgatcctgtcaagagggaaggatatatttcctgggacgactacttcatggcgatcgccttcctttcggctgagcgatctaaggatcctaaccggcaggttggagcatgcttggttagccaagagggaataatcctaggaattggctacaatggcttccctagaggttgttccgatgacaagcttccttgggcaaagaaatctgcaagtggagatccattagagacaaaattcccctacgttgtccatgctgaggttaatgcaattctaaataccaaccatgcttcagcggctggacagaaattatatgtcaccatgttcccatgcaatgaatgtgccaagattattattcagtcaggcgtatctgaggtcatatatttcgttgaaaaaaagattgacaactcagctcacgtttatgttgcctctcacaagctattgtcgatggctggtgtcaaggtcaggaagcatcagccccagatggcgcaaataccgatccagttccaggagccatgaagccggtactagttccagccttccagaagcactagtgagcgaataaacagtgcaagatacctgttgaccgcggcacctgtgacaaccgacaatggccgacccgcagcggtctcggtatgcggcgtcgatccctctccctccctcagaggctgttgtaaaactatagctagaatgagtaaagtttggcg

SEQ ID NO: 24993 - protein, 279 aa, Zea mays subsp. mays
  peptide (1)..(279): Ceres Seq. ID no. 12361973
  misc_feature (119)..(235): Pfam Name: Pfam Description:  Cytidine and deoxycytidylate deaminase zinc-binding region
  misc_feature (52)..(145): NCBI GI NO: 34909822 NR Description: P0403C05.19
  misc_feature (189)..(262): NCBI GI NO: 34909822 NR Description: P0403C05.19
  misc_feature (54)..(156): NCBI GI NO: 15228398 NR Description: putative protein; protein id: At3g48540.1
  misc_feature (209)..(264): NCBI GI NO: 15228398 NR Description: putative protein; protein id: At3g48540.1
  misc_feature (105)..(276): NCBI GI NO: 24667298 NR Description: CG6951-PA [Drosophila melanogaster]
  misc_feature (114)..(279): NCBI GI NO: 23503055 NR Description: Deoxycytidylate deaminase (dCMP deaminase)
  misc_feature (114)..(279): NCBI GI NO: 4503277 NR Description: dCMP deaminase [Homo sapiens]
  misc_feature (114)..(279): NCBI GI NO: 12654885 NR Description: Similar to dCMP deaminase [Homo sapiens]
  misc_feature (114)..(279): NCBI GI NO: 21619349 NR Description: Similar to dCMP deaminase [Mus musculus]
  misc_feature (114)..(279): NCBI GI NO: 30520263 NR Description: RIKEN cDNA 6030466N05 gene [Mus musculus]
QIFPRSWSPLSSSPFPNPNLASLHPGAQLALPPHRTTPPVAGAPISRRSSAMASTRDLAIASLSAATGAVVAAAALRLLSSRRTSSVRPQNLPAAANGSASERPLAQSPFDPVKREGYISWDDYFMAIAFLSAERSKDPNRQVGACLVSQEGIILGIGYNGFPRGCSDDKLPWAKKSASGDPLETKFPYVVHAEVNAILNTNHASAAGQKLYVTMFPCNECAKIIIQSGVSEVIYFVEKKIDNSAHVYVASHKLLSMAGVKVRKHQPQMAQIPIQFQEP

SEQ ID NO: 24994 - protein, 228 aa, Zea mays subsp. mays
  peptide (1)..(228): Ceres Seq. ID no. 12361974
  misc_feature (68)..(184): Pfam Name: Pfam Description:  Cytidine and deoxycytidylate deaminase zinc-binding region
  misc_feature (1)..(94): NCBI GI NO: 34909822 NR Description: P0403C05.19
  misc_feature (138)..(211): NCBI GI NO: 34909822 NR Description: P0403C05.19
  misc_feature (3)..(105): NCBI GI NO: 15228398 NR Description: putative protein; protein id: At3g48540.1
  misc_feature (158)..(213): NCBI GI NO: 15228398 NR Description: putative protein; protein id: At3g48540.1
  misc_feature (54)..(225): NCBI GI NO: 24667298 NR Description: CG6951-PA [Drosophila melanogaster]
  misc_feature (63)..(228): NCBI GI NO: 23503055 NR Description: Deoxycytidylate deaminase (dCMP deaminase)
  misc_feature (63)..(228): NCBI GI NO: 4503277 NR Description: dCMP deaminase [Homo sapiens]
  misc_feature (63)..(228): NCBI GI NO: 12654885 NR Description: Similar to dCMP deaminase [Homo sapiens]
  misc_feature (63)..(228): NCBI GI NO: 21619349 NR Description: Similar to dCMP deaminase [Mus musculus]
  misc_feature (63)..(228): NCBI GI NO: 30520263 NR Description: RIKEN cDNA 6030466N05 gene [Mus musculus]
MASTRDLAIASLSAATGAVVAAAALRLLSSRRTSSVRPQNLPAAANGSASERPLAQSPFDPVKREGYISWDDYFMAIAFLSAERSKDPNRQVGACLVSQEGIILGIGYNGFPRGCSDDKLPWAKKSASGDPLETKFPYVVHAEVNAILNTNHASAAGQKLYVTMFPCNECAKIIIQSGVSEVIYFVEKKIDNSAHVYVASHKLLSMAGVKVRKHQPQMAQIPIQFQEP

SEQ ID NO: 24995 - protein, 154 aa, Zea mays subsp. mays
  peptide (1)..(154): Ceres Seq. ID no. 12361975
  misc_feature (1)..(110): Pfam Name: Pfam Description:  Cytidine and deoxycytidylate deaminase zinc-binding region
  misc_feature (1)..(20): NCBI GI NO: 34909822 NR Description: P0403C05.19
  misc_feature (64)..(137): NCBI GI NO: 34909822 NR Description: P0403C05.19
  misc_feature (1)..(31): NCBI GI NO: 15228398 NR Description: putative protein; protein id: At3g48540.1
  misc_feature (84)..(139): NCBI GI NO: 15228398 NR Description: putative protein; protein id: At3g48540.1
  misc_feature (1)..(151): NCBI GI NO: 24667298 NR Description: CG6951-PA [Drosophila melanogaster]
  misc_feature (1)..(154): NCBI GI NO: 23503055 NR Description: Deoxycytidylate deaminase (dCMP deaminase)
  misc_feature (1)..(154): NCBI GI NO: 4503277 NR Description: dCMP deaminase [Homo sapiens]
  misc_feature (1)..(154): NCBI GI NO: 12654885 NR Description: Similar to dCMP deaminase [Homo sapiens]
  misc_feature (1)..(154): NCBI GI NO: 21619349 NR Description: Similar to dCMP deaminase [Mus musculus]
  misc_feature (1)..(154): NCBI GI NO: 30520263 NR Description: RIKEN cDNA 6030466N05 gene [Mus musculus]
MAIAFLSAERSKDPNRQVGACLVSQEGIILGIGYNGFPRGCSDDKLPWAKKSASGDPLETKFPYVVHAEVNAILNTNHASAAGQKLYVTMFPCNECAKIIIQSGVSEVIYFVEKKIDNSAHVYVASHKLLSMAGVKVRKHQPQMAQIPIQFQEP

SEQ ID NO: 24996 - DNA, 1628 bp, Zea mays subsp. mays
  misc_feature (1)..(1628): Ceres Seq. ID no. 13498801
gcagcagccactcgctctccccacctcgtctctcttccactcatcccctccctcgccccttcgcctcgcctctcttcttcggatcgagcagcagtactgcactgcatgccgccgatacaaatcccatcctctccctcctctactgcacctgcaccacagtagctagctagctatctttgctacggcggctctgtaatctggtccactagcgctccattcgaccccacccacagccatggctgccgtgaccgcggcggccgtctctctgccctcctcctcctcctcccctgccgccgccaaggccaaggcgtccgcgtccgcgtccccgtcgtctccatgcggccacctccagttcccgcggcggcacggcggcccgcgcgcggtgcggctgcgcgtgcaggtgtccaccaccgagaccgcggaggcggagccggtcaagaagctggagaaggtgtccaagaagcaggaggaggggctcgtcaccaacaagtacaagcccaaggagccgtacgtcgggaggtgcctgctcaacaccaggatcaccggcgaccaagcgcccggggagacgtggcacatggtcttcagcacagaaggcgaggtcccctacagagagggccagtccatcggcgtcatcgcggatggcgaggacaagaacggcaagccgcacaagctcaggctctactccatcgccagcagcgccctcggagatttcggcgactccaagacggtgtcgctgtgcgtgaagaggctggtctacaccaacgatcagggggaggtcgtcaaaggagtctgctcgaacttcctctgtgacttgaagccaggcgctgaggtgaagatcacagggccagtgggcaaggagatgctcatgcccaaagaccccaacgcaacaatcatcatgctcgcaacgggtaccggcatcgctccgttccgctccttcttgtggaagatgttcttcgaggagcacgaggactacaagtacaccgggctggcgtggctgttcctgggcgtcccgaccagcgacaccctgctgtacaaggaggagctggagaagatgaaggagatggcgccggacaacttccggctggacttcgcggtgagccgggagcagacgaacgcggccggggagaagatgtacatccagacgcgcatggcggagtacaaggaggagctgtgggagctgctcaagaaggacaacacctacgtctacatgtgcgggctcaagggcatggagaagggcatcgacgacatcatgctcgacctcgcagccaaggacgggatcaactggttggactacaagaagcagctcaagaagagcgagcaatggaacgtcgaagtctactgatgatgatccttcattgtattgttcagctcaagcaatctggtggtgatgagtttgcattgcattgtacgtagtattgcggagatcaatcgaatcgtttggctcgtcgtcattctatcgatgtacatacattatatatgatgaaagacatatataatcgtttctttcaggaatttgttgtctctctgcacgtgaatttgttgcgagaaagaaaggacacacattagccttttctttattagggcaattatgaattatacccttctctgattctgattttacttttttc

SEQ ID NO: 24997 - protein, 368 aa, Zea mays subsp. mays
  peptide (1)..(368): Ceres Seq. ID no. 13498802
  misc_feature (216)..(338): Pfam Name: Pfam Description:  Oxidoreductase NAD-binding domain
  misc_feature (1)..(368): NCBI GI NO: 6561891 NR Description: ferredoxin [Zea mays]
  misc_feature (1)..(368): NCBI GI NO: 20302473 NR Description: ferredoxin-NADP(H) oxidoreductase
  misc_feature (1)..(368): NCBI GI NO: 6561889 NR Description: ferredoxin [Zea mays]
  misc_feature (1)..(368): NCBI GI NO: 15239282 NR Description: ferredoxin--NADP
  misc_feature (1)..(368): NCBI GI NO: 6899972 NR Description: chloroplast ferredoxin-NADP+ oxidoreductaseprecursor
  misc_feature (1)..(368): NCBI GI NO: 20302471 NR Description: ferredoxin-NADP(H) oxidoreductase
  misc_feature (1)..(368): NCBI GI NO: 3913651 NR Description: Ferredoxin--NADP reductase
  misc_feature (1)..(368): NCBI GI NO: 5730139 NR Description: ferredoxin-NADP+ reductase [Arabidopsis thaliana]
  misc_feature (1)..(368): NCBI GI NO: 729479 NR Description: Ferredoxin--NADP reductase, chloroplast precursor
  misc_feature (75)..(368): NCBI GI NO: 16331051 NR Description: ferredoxin-NADP oxidoreductase
MAAVTAAAVSLPSSSSSPAAAKAKASASASPSSPCGHLQFPRRHGGPRAVRLRVQVSTTETAEAEPVKKLEKVSKKQEEGLVTNKYKPKEPYVGRCLLNTRITGDQAPGETWHMVFSTEGEVPYREGQSIGVIADGEDKNGKPHKLRLYSIASSALGDFGDSKTVSLCVKRLVYTNDQGEVVKGVCSNFLCDLKPGAEVKITGPVGKEMLMPKDPNATIIMLATGTGIAPFRSFLWKMFFEEHEDYKYTGLAWLFLGVPTSDTLLYKEELEKMKEMAPDNFRLDFAVSREQTNAAGEKMYIQTRMAEYKEELWELLKKDNTYVYMCGLKGMEKGIDDIMLDLAAKDGINWLDYKKQLKKSEQWNVEVY

SEQ ID NO: 24998 - protein, 255 aa, Zea mays subsp. mays
  peptide (1)..(255): Ceres Seq. ID no. 13498803
  misc_feature (103)..(225): Pfam Name: Pfam Description:  Oxidoreductase NAD-binding domain
  misc_feature (1)..(255): NCBI GI NO: 6561891 NR Description: ferredoxin [Zea mays]
  misc_feature (1)..(255): NCBI GI NO: 20302473 NR Description: ferredoxin-NADP(H) oxidoreductase
  misc_feature (1)..(255): NCBI GI NO: 6561889 NR Description: ferredoxin [Zea mays]
  misc_feature (1)..(255): NCBI GI NO: 15239282 NR Description: ferredoxin--NADP
  misc_feature (1)..(255): NCBI GI NO: 6899972 NR Description: chloroplast ferredoxin-NADP+ oxidoreductaseprecursor
  misc_feature (1)..(255): NCBI GI NO: 20302471 NR Description: ferredoxin-NADP(H) oxidoreductase
  misc_feature (1)..(255): NCBI GI NO: 3913651 NR Description: Ferredoxin--NADP reductase
  misc_feature (1)..(255): NCBI GI NO: 5730139 NR Description: ferredoxin-NADP+ reductase [Arabidopsis thaliana]
  misc_feature (1)..(255): NCBI GI NO: 729479 NR Description: Ferredoxin--NADP reductase, chloroplast precursor
  misc_feature (1)..(255): NCBI GI NO: 16331051 NR Description: ferredoxin-NADP oxidoreductase
MVFSTEGEVPYREGQSIGVIADGEDKNGKPHKLRLYSIASSALGDFGDSKTVSLCVKRLVYTNDQGEVVKGVCSNFLCDLKPGAEVKITGPVGKEMLMPKDPNATIIMLATGTGIAPFRSFLWKMFFEEHEDYKYTGLAWLFLGVPTSDTLLYKEELEKMKEMAPDNFRLDFAVSREQTNAAGEKMYIQTRMAEYKEELWELLKKDNTYVYMCGLKGMEKGIDDIMLDLAAKDGINWLDYKKQLKKSEQWNVEVY

SEQ ID NO: 24999 - DNA, 1181 bp, Zea mays subsp. mays
  misc_feature (1)..(1181): Ceres Seq. ID no. 12434843
  misc_feature (500)..(500): n is a, c, t, g, unknown, or other
atcccaacccactcacagtctcacgctactatcgctatctagagctccggccgtcacagacacgagctagagctagagctgcagggaagaagaagaaggaggaggaggagaagatgagggcgtccgcgctggtctgcttcgtggcggtgtcggcgtgcatagcgtgcatcgcgcatggcggcaacttctaccaggacacggagatgacctgggggcaggggcgcggcaaggtggtggacggcgggcgcgggctggacctgagcctggacagggcctccgggtccgggttccagtccaaggacgagtacctgttcggcaagatcgagatgcagatgaagctggtgcctggcaactcggcgggcaccgtgacgaccttgtacctgtcgtcgcagggcgacgcgcacgacgagatcgacctggagttcctgggcaacgtgtcgggcgagccctacacgctgcacacgaacgtgttcacgcgcgggcgggggcagcgggagcancagttccgcctctggttcgaccccaccgccgacttccacacctactccgtggtgtggaacccgcggcacgtcatcttcgcggtggacggcacgccggtgagggacttcgccaaccgcgaggcccgcggggtggcgttcccgcggacgcagcccatgcgggtgtacgccagcctctggaacgccgacgactgggccacgcagggcggccgcgtcaaggcggactgggcgcgggcgccgttcgtcgcctcgttccgcgggttcagcgccgacgcctgcgtctggtccggcggcaggtcgcagtgccccgtcggcaccatggaggaggcgggaggaggcggcggctggtggaaccagcagctcaccgacgccagctaccgccgcatgcgctgggtgcagaggaagttcatgatctacaactactgcaccgacgccaagcggttcccgcagggccggggcgtgcccgctgaatgcaggctccggcgataaaggtggctggatgagcgaacgcgaagccacctgcgtgcgtgcacgacgatcgatcccctcgtcgtcgttcacttcagaccagagatcggtggtctggcgaataatgtttgggtttttttttttgccatgggcgatggcaatgtaaatgtagcacgtgacgcacgtcgcagtgatattctttcatctgttttctgc

SEQ ID NO: 25000 - protein, 327 aa, Zea mays subsp. mays
  peptide (1)..(327): Ceres Seq. ID no. 12434844
  misc_feature (62)..(243): Pfam Name: Pfam Description:  Glycosyl hydrolases family 16
  misc_feature (47)..(326): NCBI GI NO: 7447413 NR Description: xyloglucan endo-1,4-beta-D-glucanase (EC 3
  misc_feature (39)..(326): NCBI GI NO: 14330332 NR Description: Xet1 protein [Festuca pratensis]
  misc_feature (40)..(323): NCBI GI NO: 8886867 NR Description: xyloglucan endotransglycosylase XET2
  misc_feature (46)..(324): NCBI GI NO: 8886865 NR Description: xyloglucan endotransglycosylase XET1
  misc_feature (38)..(325): NCBI GI NO: 29500891 NR Description: putative xyloglucan endotransglycosylase
  misc_feature (39)..(325): NCBI GI NO: 7447412 NR Description: xyloglucan endo-1,4-beta-D-glucanase (EC 3
  misc_feature (61)..(323): NCBI GI NO: 15242781 NR Description: xyloglucan endotransglycosylase
  misc_feature (47)..(323): NCBI GI NO: 15235997 NR Description: xyloglucan endotransglycosylase
  misc_feature (47)..(323): NCBI GI NO: 17064792 NR Description: xyloglucan endo-1, 4-beta-D-glucanase (XTR-6)
  misc_feature (60)..(323): NCBI GI NO: 22947852 NR Description: xyloglucan endotransglycosylase
  misc_feature (166)..(166): Xaa is any aa, unknown or other
PNPLTVSRYYRYLELRPSQTRARARAAGKKKKEEEEKMRASALVCFVAVSACIACIAHGGNFYQDTEMTWGQGRGKVVDGGRGLDLSLDRASGSGFQSKDEYLFGKIEMQMKLVPGNSAGTVTTLYLSSQGDAHDEIDLEFLGNVSGEPYTLHTNVFTRGRGQREXQFRLWFDPTADFHTYSVVWNPRHVIFAVDGTPVRDFANREARGVAFPRTQPMRVYASLWNADDWATQGGRVKADWARAPFVASFRGFSADACVWSGGRSQCPVGTMEEAGGGGGWWNQQLTDASYRRMRWVQRKFMIYNYCTDAKRFPQGRGVPAECRLRR

SEQ ID NO: 25001 - protein, 290 aa, Zea mays subsp. mays
  peptide (1)..(290): Ceres Seq. ID no. 12434845
  misc_feature (25)..(206): Pfam Name: Pfam Description:  Glycosyl hydrolases family 16
  misc_feature (10)..(289): NCBI GI NO: 7447413 NR Description: xyloglucan endo-1,4-beta-D-glucanase (EC 3
  misc_feature (2)..(289): NCBI GI NO: 14330332 NR Description: Xet1 protein [Festuca pratensis]
  misc_feature (3)..(286): NCBI GI NO: 8886867 NR Description: xyloglucan endotransglycosylase XET2
  misc_feature (9)..(287): NCBI GI NO: 8886865 NR Description: xyloglucan endotransglycosylase XET1
  misc_feature (1)..(288): NCBI GI NO: 29500891 NR Description: putative xyloglucan endotransglycosylase
  misc_feature (2)..(288): NCBI GI NO: 7447412 NR Description: xyloglucan endo-1,4-beta-D-glucanase (EC 3
  misc_feature (24)..(286): NCBI GI NO: 15242781 NR Description: xyloglucan endotransglycosylase
  misc_feature (10)..(286): NCBI GI NO: 15235997 NR Description: xyloglucan endotransglycosylase
  misc_feature (10)..(286): NCBI GI NO: 17064792 NR Description: xyloglucan endo-1, 4-beta-D-glucanase (XTR-6)
  misc_feature (23)..(286): NCBI GI NO: 22947852 NR Description: xyloglucan endotransglycosylase
  misc_feature (129)..(129): Xaa is any aa, unknown or other
MRASALVCFVAVSACIACIAHGGNFYQDTEMTWGQGRGKVVDGGRGLDLSLDRASGSGFQSKDEYLFGKIEMQMKLVPGNSAGTVTTLYLSSQGDAHDEIDLEFLGNVSGEPYTLHTNVFTRGRGQREXQFRLWFDPTADFHTYSVVWNPRHVIFAVDGTPVRDFANREARGVAFPRTQPMRVYASLWNADDWATQGGRVKADWARAPFVASFRGFSADACVWSGGRSQCPVGTMEEAGGGGGWWNQQLTDASYRRMRWVQRKFMIYNYCTDAKRFPQGRGVPAECRLRR

SEQ ID NO: 25002 - protein, 260 aa, Zea mays subsp. mays
  peptide (1)..(260): Ceres Seq. ID no. 12434846
  misc_feature (1)..(176): Pfam Name: Pfam Description:  Glycosyl hydrolases family 16
  misc_feature (1)..(259): NCBI GI NO: 7447413 NR Description: xyloglucan endo-1,4-beta-D-glucanase (EC 3
  misc_feature (1)..(259): NCBI GI NO: 14330332 NR Description: Xet1 protein [Festuca pratensis]
  misc_feature (1)..(256): NCBI GI NO: 8886867 NR Description: xyloglucan endotransglycosylase XET2
  misc_feature (1)..(257): NCBI GI NO: 8886865 NR Description: xyloglucan endotransglycosylase XET1
  misc_feature (1)..(258): NCBI GI NO: 29500891 NR Description: putative xyloglucan endotransglycosylase
  misc_feature (1)..(258): NCBI GI NO: 7447412 NR Description: xyloglucan endo-1,4-beta-D-glucanase (EC 3
  misc_feature (1)..(256): NCBI GI NO: 15242781 NR Description: xyloglucan endotransglycosylase
  misc_feature (1)..(256): NCBI GI NO: 15235997 NR Description: xyloglucan endotransglycosylase
  misc_feature (1)..(256): NCBI GI NO: 17064792 NR Description: xyloglucan endo-1, 4-beta-D-glucanase (XTR-6)
  misc_feature (1)..(256): NCBI GI NO: 22947852 NR Description: xyloglucan endotransglycosylase
  misc_feature (99)..(99): Xaa is any aa, unknown or other
MTWGQGRGKVVDGGRGLDLSLDRASGSGFQSKDEYLFGKIEMQMKLVPGNSAGTVTTLYLSSQGDAHDEIDLEFLGNVSGEPYTLHTNVFTRGRGQREXQFRLWFDPTADFHTYSVVWNPRHVIFAVDGTPVRDFANREARGVAFPRTQPMRVYASLWNADDWATQGGRVKADWARAPFVASFRGFSADACVWSGGRSQCPVGTMEEAGGGGGWWNQQLTDASYRRMRWVQRKFMIYNYCTDAKRFPQGRGVPAECRLRR

SEQ ID NO: 25003 - DNA, 1029 bp, Zea mays subsp. mays
  misc_feature (1)..(1029): Ceres Seq. ID no. 13496156
atgaattgctgctgggtgctggccgttgcgggcgaacccgaaaatcacgagcgcgagagatcggagcacggcatgtcggaggagcagttcctcgccgtggcggtggaagccgccaagagcgccggcgagattattcgcaagggattctaccagaccaagaacgtcgagcacaagggccaggtggatttggtgacggagacggacaaggcctgcgaggacctcatcttcaaccacctccggaagcacttcccggaccacaagttcatcggggaggaggagtccgcggcgctcggggccaccgctgacctcaccgacgaccccacctggatcgtcgatcccctcgacgggaccactaatttcgtccatggtttcccatttgtatgtgtctccgttggcctcaccattgggaaaattcccactgtcggagtcgtcttcaaccccatcatgaacgagcttttcacggcggttcgtggaaaaggggctttcctgaatggctctccaattaaagcatcatctcaagatgagttagtgaaggctcttctggtaacagaggctggaaccaatagagacaagaccactgtggatgatacaaccaacagaatcaacaggctactatacaagattcgatccatacggatgtgtggatcattggctttaaacatgtgtggagttgcctgtggtagactagatttgtgttatgagataggatttggtggtccatgggatgttgctgctggtgctgtaattcttcaggaagccggtggccttgtttttgacccaagcggcggagagtttgatttgatgtcgcgaagaatggcaggatcaaacagcttgctgaaggataagttcgtcaaggaactgggggatactaattgaaacaaatgttagtattattcgtggaacagattaagacaataaggttgccccgccgcatggtgattaacttattgtttgggcaacaaaattccatgtaattctgcacctgtacaactatgttggacgcagaacattttattgagttttgtgatt

SEQ ID NO: 25004 - protein, 291 aa, Zea mays subsp. mays
  peptide (1)..(291): Ceres Seq. ID no. 13496157
  misc_feature (21)..(289): NCBI GI NO: 1709205 NR Description: Inositol-1
  misc_feature (26)..(287): NCBI GI NO: 15232993 NR Description: myo-inositol monophosphatase -related
  misc_feature (26)..(287): NCBI GI NO: 21553679 NR Description: putative myo-inositol monophosphatase
  misc_feature (26)..(287): NCBI GI NO: 1709203 NR Description: Inositol-1
  misc_feature (30)..(285): NCBI GI NO: 3914097 NR Description: Inositol-1
  misc_feature (26)..(287): NCBI GI NO: 30143275 NR Description: myo inositol monophosphatase isoform 1
  misc_feature (28)..(290): NCBI GI NO: 1709204 NR Description: Inositol-1
  misc_feature (28)..(290): NCBI GI NO: 30143277 NR Description: myo inositol monophosphatase isoform 2
  misc_feature (23)..(291): NCBI GI NO: 21357329 NR Description: CG9391-PA [Drosophila melanogaster]
  misc_feature (12)..(277): NCBI GI NO: 26449166 NR Description: inositol (myo)-1(or 4)-monophosphatase 2
MNCCWVLAVAGEPENHERERSEHGMSEEQFLAVAVEAAKSAGEIIRKGFYQTKNVEHKGQVDLVTETDKACEDLIFNHLRKHFPDHKFIGEEESAALGATADLTDDPTWIVDPLDGTTNFVHGFPFVCVSVGLTIGKIPTVGVVFNPIMNELFTAVRGKGAFLNGSPIKASSQDELVKALLVTEAGTNRDKTTVDDTTNRINRLLYKIRSIRMCGSLALNMCGVACGRLDLCYEIGFGGPWDVAAGAVILQEAGGLVFDPSGGEFDLMSRRMAGSNSLLKDKFVKELGDTN

SEQ ID NO: 25005 - protein, 267 aa, Zea mays subsp. mays
  peptide (1)..(267): Ceres Seq. ID no. 13496158
  misc_feature (1)..(265): NCBI GI NO: 1709205 NR Description: Inositol-1
  misc_feature (2)..(263): NCBI GI NO: 15232993 NR Description: myo-inositol monophosphatase -related
  misc_feature (2)..(263): NCBI GI NO: 21553679 NR Description: putative myo-inositol monophosphatase
  misc_feature (2)..(263): NCBI GI NO: 1709203 NR Description: Inositol-1
  misc_feature (6)..(261): NCBI GI NO: 3914097 NR Description: Inositol-1
  misc_feature (2)..(263): NCBI GI NO: 30143275 NR Description: myo inositol monophosphatase isoform 1
  misc_feature (4)..(266): NCBI GI NO: 1709204 NR Description: Inositol-1
  misc_feature (4)..(266): NCBI GI NO: 30143277 NR Description: myo inositol monophosphatase isoform 2
  misc_feature (1)..(267): NCBI GI NO: 21357329 NR Description: CG9391-PA [Drosophila melanogaster]
  misc_feature (1)..(253): NCBI GI NO: 26449166 NR Description: inositol (myo)-1(or 4)-monophosphatase 2
MSEEQFLAVAVEAAKSAGEIIRKGFYQTKNVEHKGQVDLVTETDKACEDLIFNHLRKHFPDHKFIGEEESAALGATADLTDDPTWIVDPLDGTTNFVHGFPFVCVSVGLTIGKIPTVGVVFNPIMNELFTAVRGKGAFLNGSPIKASSQDELVKALLVTEAGTNRDKTTVDDTTNRINRLLYKIRSIRMCGSLALNMCGVACGRLDLCYEIGFGGPWDVAAGAVILQEAGGLVFDPSGGEFDLMSRRMAGSNSLLKDKFVKELGDTN

SEQ ID NO: 25006 - DNA, 1615 bp, Zea mays subsp. mays
  misc_feature (1)..(1615): Ceres Seq. ID no. 13498314
  misc_feature (1173)..(1173): n is a, c, t, g, unknown, or other
  misc_feature (1041)..(1041): n is a, c, t, g, unknown, or other
  misc_feature (1040)..(1040): n is a, c, t, g, unknown, or other
  misc_feature (1036)..(1036): n is a, c, t, g, unknown, or other
  misc_feature (1148)..(1148): n is a, c, t, g, unknown, or other
  misc_feature (1037)..(1037): n is a, c, t, g, unknown, or other
  misc_feature (1174)..(1174): n is a, c, t, g, unknown, or other
  misc_feature (976)..(976): n is a, c, t, g, unknown, or other
gtcccttagttgtaccatcgtgtccttttcctcctacctcctccttggctggccctcttccccgtcttcctccctcttccttcgtctctccgtttcaagccctaccgacaggcatttgcttctgctccagtgatcagccccctcccctcctggcctcctctccacccggccaaaaactgatctttttttttcggttctggtaccatagctattagtagtcgtagcggctaacttgcaagccgattgtctctagcacgcaagtgtttttccctcccctgagattggtgggtgatcgagagttcgagacagtgtacacatacatactctgctcgtctgctgaggatcgatcgcttggtctcgttgttgcgtagataggtactagaggactatagctactagtaggactaggagaggatccgagggagagagagcaaggccaagatgatgcgcgcgaaccgggagcagagagtggccttctcgtcgacgaaggaggccgccgcggtgcccaaggaggaggtgtgggaggtccggcccggcgggatgctggtgcagaagcggagccccgacgcggacccgccccccggcggcgcgcccgtgcccaccatccgcgtcaaggtcaagttcaacggcgtctaccacgagatctacatcaactcccaggcatccttcggcgagctcaagaagctgctgtcggagaagacgggcctgcacccggacgaccagaaggtggtgtacaaggacaaggagagggactccaaggcgttcctggacatggccggcgtcaaggaccgctccaagatggtcatgctcgaggaccccgccgccaaggccaagcgcctcctcgaggagcgccggaccggcaaggccgagcgcgccgccaaggccatcgcccgcgccgccctcgacgtcgacaagctcgcaaccaaggtgtcggcgctggagacgatcgtgagcaagggcggcaaggtcgtggacncggacgtggtgacgctgaccgaggcgctgatgaacgagctggtgaagctggactccgtcnncgnngaaggggaggtgaaggcggcgcggcgggcgcaggagaagcgggtgcagaagtacgtggagacgctggacgccatccgcgccaagaacaaggcggcggcggcggcggngccggccaaggcccgctagcggcannaacaaggcgcggccgccgcgcccgcccccggcttcggcgcacgcgcatcagagccagcagcagcgccggcagttccagccgccggcgccggtgtcgcagacccagacggcgagctgggagacgttcgacctcctgtcgtcagtgccgtcgacgtcggcggcccccgtgacgaccatggcccccgcgaccagcaccacgccgtccccgcgcttcgactgggagctcttctagatggctcctcaaggcgccagcctgccacacccccctggcctggcccccatctctcgccacttgtgtgcctgtccattggctcggccagtaccttctcctgttcgccttggccatggtgcatgtcaatcgccattgtttctttctttctttccttcccgctctctttattctgtcattcttgctgtcctttgagcgattgaaagtctgtgt

SEQ ID NO: 25007 - protein, 241 aa, Zea mays subsp. mays
  peptide (1)..(241): Ceres Seq. ID no. 13498315
  misc_feature (53)..(126): Pfam Name: Pfam Description:  Ubiquitin family
  misc_feature (21)..(231): NCBI GI NO: 25553557 NR Description: OSJNBa0038F22.4
  misc_feature (21)..(231): NCBI GI NO: 34898024 NR Description: ESTs AU082174
  misc_feature (28)..(232): NCBI GI NO: 15242267 NR Description: BAG domain containing protein
  misc_feature (27)..(231): NCBI GI NO: 21537107 NR Description: unknown [Arabidopsis thaliana]
  misc_feature (27)..(231): NCBI GI NO: 15240726 NR Description: BAG domain containing protein
  misc_feature (28)..(237): NCBI GI NO: 30697630 NR Description: BAG domain containing protein
  misc_feature (28)..(237): NCBI GI NO: 21553443 NR Description: unknown [Arabidopsis thaliana]
  misc_feature (28)..(237): NCBI GI NO: 30697627 NR Description: BAG domain containing protein
  misc_feature (12)..(229): NCBI GI NO: 38344334 NR Description: OSJNBa0058K23.16
  misc_feature (28)..(237): NCBI GI NO: 10176928 NR Description: contains similarity to unknownprotein~emb|CAB87278
  misc_feature (179)..(179): Xaa is any aa, unknown or other
  misc_feature (199)..(199): Xaa is any aa, unknown or other
  misc_feature (200)..(200): Xaa is any aa, unknown or other
  misc_feature (236)..(236): Xaa is any aa, unknown or other
MMRANREQRVAFSSTKEAAAVPKEEVWEVRPGGMLVQKRSPDADPPPGGAPVPTIRVKVKFNGVYHEIYINSQASFGELKKLLSEKTGLHPDDQKVVYKDKERDSKAFLDMAGVKDRSKMVMLEDPAAKAKRLLEERRTGKAERAAKAIARAALDVDKLATKVSALETIVSKGGKVVDXDVVTLTEALMNELVKLDSVXXEGEVKAARRAQEKRVQKYVETLDAIRAKNKAAAAAXPAKAR

SEQ ID NO: 25008 - protein, 240 aa, Zea mays subsp. mays
  peptide (1)..(240): Ceres Seq. ID no. 13498316
  misc_feature (52)..(125): Pfam Name: Pfam Description:  Ubiquitin family
  misc_feature (20)..(230): NCBI GI NO: 25553557 NR Description: OSJNBa0038F22.4
  misc_feature (20)..(230): NCBI GI NO: 34898024 NR Description: ESTs AU082174
  misc_feature (27)..(231): NCBI GI NO: 15242267 NR Description: BAG domain containing protein
  misc_feature (26)..(230): NCBI GI NO: 21537107 NR Description: unknown [Arabidopsis thaliana]
  misc_feature (26)..(230): NCBI GI NO: 15240726 NR Description: BAG domain containing protein
  misc_feature (27)..(236): NCBI GI NO: 30697630 NR Description: BAG domain containing protein
  misc_feature (27)..(236): NCBI GI NO: 21553443 NR Description: unknown [Arabidopsis thaliana]
  misc_feature (27)..(236): NCBI GI NO: 30697627 NR Description: BAG domain containing protein
  misc_feature (11)..(228): NCBI GI NO: 38344334 NR Description: OSJNBa0058K23.16
  misc_feature (27)..(236): NCBI GI NO: 10176928 NR Description: contains similarity to unknownprotein~emb|CAB87278
  misc_feature (178)..(178): Xaa is any aa, unknown or other
  misc_feature (198)..(198): Xaa is any aa, unknown or other
  misc_feature (199)..(199): Xaa is any aa, unknown or other
  misc_feature (235)..(235): Xaa is any aa, unknown or other
MRANREQRVAFSSTKEAAAVPKEEVWEVRPGGMLVQKRSPDADPPPGGAPVPTIRVKVKFNGVYHEIYINSQASFGELKKLLSEKTGLHPDDQKVVYKDKERDSKAFLDMAGVKDRSKMVMLEDPAAKAKRLLEERRTGKAERAAKAIARAALDVDKLATKVSALETIVSKGGKVVDXDVVTLTEALMNELVKLDSVXXEGEVKAARRAQEKRVQKYVETLDAIRAKNKAAAAAXPAKAR

SEQ ID NO: 25009 - protein, 208 aa, Zea mays subsp. mays
  peptide (1)..(208): Ceres Seq. ID no. 13498317
  misc_feature (20)..(93): Pfam Name: Pfam Description:  Ubiquitin family
  misc_feature (1)..(198): NCBI GI NO: 25553557 NR Description: OSJNBa0038F22.4
  misc_feature (1)..(198): NCBI GI NO: 34898024 NR Description: ESTs AU082174
  misc_feature (1)..(199): NCBI GI NO: 15242267 NR Description: BAG domain containing protein
  misc_feature (1)..(198): NCBI GI NO: 21537107 NR Description: unknown [Arabidopsis thaliana]
  misc_feature (1)..(198): NCBI GI NO: 15240726 NR Description: BAG domain containing protein
  misc_feature (1)..(204): NCBI GI NO: 30697630 NR Description: BAG domain containing protein
  misc_feature (1)..(204): NCBI GI NO: 21553443 NR Description: unknown [Arabidopsis thaliana]
  misc_feature (1)..(204): NCBI GI NO: 30697627 NR Description: BAG domain containing protein
  misc_feature (1)..(196): NCBI GI NO: 38344334 NR Description: OSJNBa0058K23.16
  misc_feature (1)..(204): NCBI GI NO: 10176928 NR Description: contains similarity to unknownprotein~emb|CAB87278
  misc_feature (146)..(146): Xaa is any aa, unknown or other
  misc_feature (166)..(166): Xaa is any aa, unknown or other
  misc_feature (167)..(167): Xaa is any aa, unknown or other
  misc_feature (203)..(203): Xaa is any aa, unknown or other
MLVQKRSPDADPPPGGAPVPTIRVKVKFNGVYHEIYINSQASFGELKKLLSEKTGLHPDDQKVVYKDKERDSKAFLDMAGVKDRSKMVMLEDPAAKAKRLLEERRTGKAERAAKAIARAALDVDKLATKVSALETIVSKGGKVVDXDVVTLTEALMNELVKLDSVXXEGEVKAARRAQEKRVQKYVETLDAIRAKNKAAAAAXPAKAR

SEQ ID NO: 25010 - DNA, 1884 bp, Zea mays subsp. mays
  misc_feature (1)..(1884): Ceres Seq. ID no. 12379414
gcacgagaccattacctagaacatcctaatcaaaaagagctgttcggtgacgatggtagctagctagctactactgtagtaggtaaagcctgcggcgctcgagcgagcaggaagacaaaggcaagcatggccgggggtggcttcgccgtggccgatggcccgtccgtcgactacggcggccgggtgaccttctcggtcgtcgtgacctgcctcatggcggcctccggcggcctcatcttcggttacgacatcggcatctcggggggcgtgacggcgatggagtcgttcctgtcggccttcttcccgggggtgctgcgcaggatggccgcggcgcggcgggacgagtactgcgtctacgacagccacgtcctcacggcgttcacctcgtcgctgtacctggccgggctggccgcctctctcgtcgccagccgcgtcaccagggcgatcggcaggcaggccgtcatgctcgcgggcggcgcgctcttcttcgccggcgccgccgtcaacgccgccgccgtcaacgtcgctatgctcatcgtcggacgcatgctgctgggcttcggcatcggctttaccaaccaggcggcgccggtgtacctggcggagacggcgccggccaagtggcggggcgccttcacgacggggttccagctcttcctcagcatcggcaacctggcggcgaacctggtgaactacggcacctcgcgcatcccggcgtgggggtggcgcctctcgctgggcctggccgcggcgcccgccgccgtcatcctcgcgggggcgctgctcatcccggacacgcccagcagcctcctcgtgcgcgggcgcgcggaggaggcccgcgccgcgctgcggcgcgtcaggggcgccaaggcggacgtggacgcggagctggaggacgtggcccgcgccgtggaggccgcgcgcgcccacgagcagggcgcgttccgcaggatcctccggcgggagcaccggcaccacctggccgtggccgtggcggtcccgctgttccagcagctcacgggggtcatcgtcatcgccttcttctcgcccgtgctgttccagacggccgggttcggcagcaacgccgcgctcatgggcgccgtcatcctcggcgccgtcaacctcgcctccacgctcttgtccatcgtcacggtcgaccggtacggccggcggccgctgttcctcaccggcggcttcgtcatgatcgtttgccaggtcgcggtcgcgtggatcatggggtcccagatcggggccgacggcgggtccgcgatggccaggccctactccctcgcggtgctggcgctgacgtgcgtcttctcggcggcgttcggctggtcgtggggcccgctgacctgggtgatcccaggcgagatattccccgtggagatccggtcggcggggcagggcatcagcgtggccgtcaacctgggcgccacgttcctgctcacgcagacgttcctctccatgctgtgcacgctcaagtacgccaccttcatctactacgcggcctgggtagccgtcatgaccgccttcgtcgtggcgttcctgccggagaccaagggggtgccgctcgaggccatgggcgccatctgggagcgccactggtactggagacggttcgtgcagccttctgttgcggaggacccctgatgagtgactgatgcggccttctgttgtggacgtgacacgcttccggacgttgtgtgtgtcaatggttgcagtttgtctgctgtggtcgtcgtctgaggaagagttgtctgtggacgaaggctggaaatcaatgcgtgtgccctgtccgtggtttttctaatacaggagtacgtcatgcaaggttgttaatgttaagcgaacgttcgcagtgatatagacgttatattttaagtt

SEQ ID NO: 25011 - protein, 507 aa, Zea mays subsp. mays
  peptide (1)..(507): Ceres Seq. ID no. 12379415
  misc_feature (27)..(489): Pfam Name: and other Pfam Description: Sugar
  misc_feature (1)..(504): NCBI GI NO: 32489200 NR Description: OSJNBa0027G07.27
  misc_feature (1)..(506): NCBI GI NO: 11991110 NR Description: monosaccharide transporter 1 [Oryza sativa]
  misc_feature (1)..(499): NCBI GI NO: 21740734 NR Description: OSJNBa0086B14.28
  misc_feature (15)..(498): NCBI GI NO: 21741620 NR Description: OSJNBa0027G07.12
  misc_feature (1)..(502): NCBI GI NO: 15218693 NR Description: monosaccharide transporter, putative
  misc_feature (1)..(501): NCBI GI NO: 347855 NR Description: glucose transporter
  misc_feature (1)..(499): NCBI GI NO: 34915514 NR Description: monosaccharide transporter 3
  misc_feature (2)..(499): NCBI GI NO: 3915039 NR Description: Sugar carrier protein C
  misc_feature (1)..(500): NCBI GI NO: 15220330 NR Description: glucose transporter; protein id: At1g11260
  misc_feature (1)..(499): NCBI GI NO: 34914246 NR Description: putative monosaccharide transporter 3
MAGGGFAVADGPSVDYGGRVTFSVVVTCLMAASGGLIFGYDIGISGGVTAMESFLSAFFPGVLRRMAAARRDEYCVYDSHVLTAFTSSLYLAGLAASLVASRVTRAIGRQAVMLAGGALFFAGAAVNAAAVNVAMLIVGRMLLGFGIGFTNQAAPVYLAETAPAKWRGAFTTGFQLFLSIGNLAANLVNYGTSRIPAWGWRLSLGLAAAPAAVILAGALLIPDTPSSLLVRGRAEEARAALRRVRGAKADVDAELEDVARAVEAARAHEQGAFRRILRREHRHHLAVAVAVPLFQQLTGVIVIAFFSPVLFQTAGFGSNAALMGAVILGAVNLASTLLSIVTVDRYGRRPLFLTGGFVMIVCQVAVAWIMGSQIGADGGSAMARPYSLAVLALTCVFSAAFGWSWGPLTWVIPGEIFPVEIRSAGQGISVAVNLGATFLLTQTFLSMLCTLKYATFIYYAAWVAVMTAFVVAFLPETKGVPLEAMGAIWERHWYWRRFVQPSVAEDP

SEQ ID NO: 25012 - protein, 478 aa, Zea mays subsp. mays
  peptide (1)..(478): Ceres Seq. ID no. 12379416
  misc_feature (1)..(460): Pfam Name: and other Pfam Description: Sugar
  misc_feature (1)..(475): NCBI GI NO: 32489200 NR Description: OSJNBa0027G07.27
  misc_feature (1)..(477): NCBI GI NO: 11991110 NR Description: monosaccharide transporter 1 [Oryza sativa]
  misc_feature (1)..(470): NCBI GI NO: 21740734 NR Description: OSJNBa0086B14.28
  misc_feature (1)..(469): NCBI GI NO: 21741620 NR Description: OSJNBa0027G07.12
  misc_feature (1)..(473): NCBI GI NO: 15218693 NR Description: monosaccharide transporter, putative
  misc_feature (1)..(472): NCBI GI NO: 347855 NR Description: glucose transporter
  misc_feature (1)..(470): NCBI GI NO: 34915514 NR Description: monosaccharide transporter 3
  misc_feature (1)..(470): NCBI GI NO: 3915039 NR Description: Sugar carrier protein C
  misc_feature (1)..(471): NCBI GI NO: 15220330 NR Description: glucose transporter; protein id: At1g11260
  misc_feature (1)..(470): NCBI GI NO: 34914246 NR Description: putative monosaccharide transporter 3
MAASGGLIFGYDIGISGGVTAMESFLSAFFPGVLRRMAAARRDEYCVYDSHVLTAFTSSLYLAGLAASLVASRVTRAIGRQAVMLAGGALFFAGAAVNAAAVNVAMLIVGRMLLGFGIGFTNQAAPVYLAETAPAKWRGAFTTGFQLFLSIGNLAANLVNYGTSRIPAWGWRLSLGLAAAPAAVILAGALLIPDTPSSLLVRGRAEEARAALRRVRGAKADVDAELEDVARAVEAARAHEQGAFRRILRREHRHHLAVAVAVPLFQQLTGVIVIAFFSPVLFQTAGFGSNAALMGAVILGAVNLASTLLSIVTVDRYGRRPLFLTGGFVMIVCQVAVAWIMGSQIGADGGSAMARPYSLAVLALTCVFSAAFGWSWGPLTWVIPGEIFPVEIRSAGQGISVAVNLGATFLLTQTFLSMLCTLKYATFIYYAAWVAVMTAFVVAFLPETKGVPLEAMGAIWERHWYWRRFVQPSVAEDP

SEQ ID NO: 25013 - protein, 457 aa, Zea mays subsp. mays
  peptide (1)..(457): Ceres Seq. ID no. 12379417
  misc_feature (1)..(439): Pfam Name: and other Pfam Description: Sugar
  misc_feature (1)..(454): NCBI GI NO: 32489200 NR Description: OSJNBa0027G07.27
  misc_feature (1)..(456): NCBI GI NO: 11991110 NR Description: monosaccharide transporter 1 [Oryza sativa]
  misc_feature (1)..(449): NCBI GI NO: 21740734 NR Description: OSJNBa0086B14.28
  misc_feature (1)..(448): NCBI GI NO: 21741620 NR Description: OSJNBa0027G07.12
  misc_feature (1)..(452): NCBI GI NO: 15218693 NR Description: monosaccharide transporter, putative
  misc_feature (1)..(451): NCBI GI NO: 347855 NR Description: glucose transporter
  misc_feature (1)..(449): NCBI GI NO: 34915514 NR Description: monosaccharide transporter 3
  misc_feature (1)..(449): NCBI GI NO: 3915039 NR Description: Sugar carrier protein C
  misc_feature (1)..(450): NCBI GI NO: 15220330 NR Description: glucose transporter; protein id: At1g11260
  misc_feature (1)..(449): NCBI GI NO: 34914246 NR Description: putative monosaccharide transporter 3
MESFLSAFFPGVLRRMAAARRDEYCVYDSHVLTAFTSSLYLAGLAASLVASRVTRAIGRQAVMLAGGALFFAGAAVNAAAVNVAMLIVGRMLLGFGIGFTNQAAPVYLAETAPAKWRGAFTTGFQLFLSIGNLAANLVNYGTSRIPAWGWRLSLGLAAAPAAVILAGALLIPDTPSSLLVRGRAEEARAALRRVRGAKADVDAELEDVARAVEAARAHEQGAFRRILRREHRHHLAVAVAVPLFQQLTGVIVIAFFSPVLFQTAGFGSNAALMGAVILGAVNLASTLLSIVTVDRYGRRPLFLTGGFVMIVCQVAVAWIMGSQIGADGGSAMARPYSLAVLALTCVFSAAFGWSWGPLTWVIPGEIFPVEIRSAGQGISVAVNLGATFLLTQTFLSMLCTLKYATFIYYAAWVAVMTAFVVAFLPETKGVPLEAMGAIWERHWYWRRFVQPSVAEDP

SEQ ID NO: 25014 - DNA, 1439 bp, Zea mays subsp. mays
  misc_feature (1)..(1439): Ceres Seq. ID no. 12343992
atctttgcgcttggggcaatgacgcagcttatgaggtcataccgaggcgcgtcaattgctggttgaaaactatttccaaaccccctctttggcccactgggccactgagaatttctggaagggctccttttcctcggataagcaatcttgagtcctgggtcttcgctgccagtgccagcacgcttgtggccaagaaacgttgggggcagtttggacctcggagcagcatcatccatggcgggagaggaggccgggaggaggggcgttccctctctgctgaacccgccgtccgcttccagcgaggggcagcaagagcacatcgcctctgatgtcacacagctcatcggatggacacctctggtcgagctcaagcgaatcgccgccaaggaaggggtatgcgcgcgcatcgtcggcaaggtggaggcgtaccagcctctgtgctccgtcaaggatcgcagcgctctgagaatgatcgaagacgcagaggagagggggctgatctcgcccggcaccacgacgctcgtggagccgacgagcggcaacctggggctgggcctggtcctcgtcgccctccgcaagggctacaggttcgtcgcggtcatgccaggccagtactcgctcgacaagcagatcctgctgacatacatgggcgcagagctgtacgtaacagatccatccctcgggttcccgggcataaccgccaaggtcgaggagctcaagaaggagctgcccaacgtgcacgtcctcgaccagttctccaacagagcgaatcctgaagcgcatgttagatggactgggcctgagatctggaaggacaccgccggcaaggtggacgtattcgtggccggttcaggctcgggaggcacggtgtctggcgtcggcaagtacctcaagacgcagaaccccagcgtcaaggtcatctgcgttgagcctgccgagagcccagttgtttcaggcggggaaccaggcagccacaagatccagggaatagggccgggattcataccggaagtgctggacacctccgtcatcgacgaggccgtcacggtgaccaccgaggaggcgatggcgggcgcccggaggctggccagggaggagggcctgctcgtcggcatctcttccggagccaacctggcggcctgcttgaaggtcgcggcgcgagaagagagcaaggggaagatgatcgtcaccgtgtttccgagcgggggcgagaggtacatgacctccgacctgttcgccgccgccagagaggagtgtattgccatgacgttttgatcttcccccccaccccacagaaacatgtacggattaactggaggataaaaggacaaccgatatgttactccctcagttattgaaatagtattcgttttggccttgtaaccttttgttttgcaatcagctaaagttggttacaagaattgatgtgctctaacttt

SEQ ID NO: 25015 - protein, 346 aa, Zea mays subsp. mays
  peptide (1)..(346): Ceres Seq. ID no. 12343993
  misc_feature (33)..(324): Pfam Name: Pfam Description:  Pyridoxal-phosphate dependent enzyme
  misc_feature (4)..(346): NCBI GI NO: 4574141 NR Description: cysteine synthase [Oryza sativa]
  misc_feature (1)..(346): NCBI GI NO: 4574137 NR Description: cysteine synthase [Oryza sativa]
  misc_feature (15)..(341): NCBI GI NO: 303902 NR Description: cysteine synthase [Spinacia oleracea]
  misc_feature (15)..(341): NCBI GI NO: 12644209 NR Description: CYSTEINE SYNTHASE, CHLOROPLAST PRECURSOR
  misc_feature (15)..(341): NCBI GI NO: 421795 NR Description: cysteine synthase (EC 4
  misc_feature (17)..(344): NCBI GI NO: 11131628 NR Description: Cysteine synthase, chloroplast precursor
  misc_feature (17)..(344): NCBI GI NO: 12081919 NR Description: plastidic cysteine synthase 1 [Solanum tuberosum]
  misc_feature (25)..(346): NCBI GI NO: 18252506 NR Description: cysteine synthase [Glycine max]
  misc_feature (25)..(344): NCBI GI NO: 231970 NR Description: Cysteine synthase
  misc_feature (29)..(346): NCBI GI NO: 11131564 NR Description: Cysteine synthase
MAGEEAGRRGVPSLLNPPSASSEGQQEHIASDVTQLIGWTPLVELKRIAAKEGVCARIVGKVEAYQPLCSVKDRSALRMIEDAEERGLISPGTTTLVEPTSGNLGLGLVLVALRKGYRFVAVMPGQYSLDKQILLTYMGAELYVTDPSLGFPGITAKVEELKKELPNVHVLDQFSNRANPEAHVRWTGPEIWKDTAGKVDVFVAGSGSGGTVSGVGKYLKTQNPSVKVICVEPAESPVVSGGEPGSHKIQGIGPGFIPEVLDTSVIDEAVTVTTEEAMAGARRLAREEGLLVGISSGANLAACLKVAAREESKGKMIVTVFPSGGERYMTSDLFAAAREECIAMTF

SEQ ID NO: 25016 - protein, 268 aa, Zea mays subsp. mays
  peptide (1)..(268): Ceres Seq. ID no. 12343994
  misc_feature (1)..(246): Pfam Name: Pfam Description:  Pyridoxal-phosphate dependent enzyme
  misc_feature (1)..(268): NCBI GI NO: 4574141 NR Description: cysteine synthase [Oryza sativa]
  misc_feature (1)..(268): NCBI GI NO: 4574137 NR Description: cysteine synthase [Oryza sativa]
  misc_feature (1)..(263): NCBI GI NO: 303902 NR Description: cysteine synthase [Spinacia oleracea]
  misc_feature (1)..(263): NCBI GI NO: 12644209 NR Description: CYSTEINE SYNTHASE, CHLOROPLAST PRECURSOR
  misc_feature (1)..(263): NCBI GI NO: 421795 NR Description: cysteine synthase (EC 4
  misc_feature (1)..(266): NCBI GI NO: 11131628 NR Description: Cysteine synthase, chloroplast precursor
  misc_feature (1)..(266): NCBI GI NO: 12081919 NR Description: plastidic cysteine synthase 1 [Solanum tuberosum]
  misc_feature (1)..(268): NCBI GI NO: 18252506 NR Description: cysteine synthase [Glycine max]
  misc_feature (1)..(266): NCBI GI NO: 231970 NR Description: Cysteine synthase
  misc_feature (1)..(268): NCBI GI NO: 11131564 NR Description: Cysteine synthase
MIEDAEERGLISPGTTTLVEPTSGNLGLGLVLVALRKGYRFVAVMPGQYSLDKQILLTYMGAELYVTDPSLGFPGITAKVEELKKELPNVHVLDQFSNRANPEAHVRWTGPEIWKDTAGKVDVFVAGSGSGGTVSGVGKYLKTQNPSVKVICVEPAESPVVSGGEPGSHKIQGIGPGFIPEVLDTSVIDEAVTVTTEEAMAGARRLAREEGLLVGISSGANLAACLKVAAREESKGKMIVTVFPSGGERYMTSDLFAAAREECIAMTF

SEQ ID NO: 25017 - protein, 224 aa, Zea mays subsp. mays
  peptide (1)..(224): Ceres Seq. ID no. 12343995
  misc_feature (1)..(202): Pfam Name: Pfam Description:  Pyridoxal-phosphate dependent enzyme
  misc_feature (1)..(224): NCBI GI NO: 4574141 NR Description: cysteine synthase [Oryza sativa]
  misc_feature (1)..(224): NCBI GI NO: 4574137 NR Description: cysteine synthase [Oryza sativa]
  misc_feature (1)..(219): NCBI GI NO: 303902 NR Description: cysteine synthase [Spinacia oleracea]
  misc_feature (1)..(219): NCBI GI NO: 12644209 NR Description: CYSTEINE SYNTHASE, CHLOROPLAST PRECURSOR
  misc_feature (1)..(219): NCBI GI NO: 421795 NR Description: cysteine synthase (EC 4
  misc_feature (1)..(222): NCBI GI NO: 11131628 NR Description: Cysteine synthase, chloroplast precursor
  misc_feature (1)..(222): NCBI GI NO: 12081919 NR Description: plastidic cysteine synthase 1 [Solanum tuberosum]
  misc_feature (1)..(224): NCBI GI NO: 18252506 NR Description: cysteine synthase [Glycine max]
  misc_feature (1)..(222): NCBI GI NO: 231970 NR Description: Cysteine synthase
  misc_feature (1)..(224): NCBI GI NO: 11131564 NR Description: Cysteine synthase
MPGQYSLDKQILLTYMGAELYVTDPSLGFPGITAKVEELKKELPNVHVLDQFSNRANPEAHVRWTGPEIWKDTAGKVDVFVAGSGSGGTVSGVGKYLKTQNPSVKVICVEPAESPVVSGGEPGSHKIQGIGPGFIPEVLDTSVIDEAVTVTTEEAMAGARRLAREEGLLVGISSGANLAACLKVAAREESKGKMIVTVFPSGGERYMTSDLFAAAREECIAMTF

SEQ ID NO: 25018 - DNA, 1104 bp, Zea mays subsp. mays
  misc_feature (1)..(1104): Ceres Seq. ID no. 12410301
atccgccccgatccgaacccattcaattccaaattcacaaccctgccagtggttggcccgccgctgccaaatcgaatcggactccgatccgtgcagcccaccggcgagacggcgagacgccgaagctagcacacttcatgccatctgtctgacgtgatgcgtgtggcctctctgcttttactggatccctagccagctcaggagaaactcagaatagtactatagccaagtccatccagtcctttcgcggcgtcttccttgctcaccgcggctccggcgatgtcggccgccggctcggcggctctacctctccgtctacaactgggtcgtcttctccgtctacaacagccgccatcatggagattcttcatgggcttgtagggttggtgagttctccagcgtccacaactcttccagaaattggatccagattattccttatgtgaggtatcttctggagttttcccgagacccagtcacatcttcttgctactgccctgatcataagctggtctgtcactgagatcatcaggtactctttctttgcaatgaaggaggcatttggctctgcaccttcctggctatcatggcttaggtacaccgatcctactagaaaaccgaagaggtataggtatgcatgctgttcacatctcataactaccattttatttatgttccgggtaagcctttccgtcctcgaccgccctccatttttttttttctgttcgcttcagtgccttagactatctccagcagtttatttatactcgtacttgtattcaaactttactctacaaacagtgtgttaccgtgcttatagataaactttaagtaaactgctggaccaccgccgcatgcaggaagtccgcacatgtactgttacatgctctcccagaggaagaaggcactgtcaaaggccaaagcagcataattctgctcaagagctgtagaatggtagaatcaagttctcgacatttcaggtagaatctagtggttcacatgaattgcgccataggtgttgtacccggatttgtattggctatcagctgtgttcgatggttaaattgtaatttgctctgaatcacccccagttgtatcagggcc

SEQ ID NO: 25019 - protein, 91 aa, Zea mays subsp. mays
  peptide (1)..(91): Ceres Seq. ID no. 12410302
  misc_feature (1)..(18): NCBI GI NO: 38344078 NR Description: OSJNBb0056F09.1
  misc_feature (1)..(18): NCBI GI NO: 34895852 NR Description: P0009G03.5
  misc_feature (1)..(73): NCBI GI NO: 22326707 NR Description: putative protein phosphatase; protein id:At5g10480
  misc_feature (1)..(18): NCBI GI NO: 34895864 NR Description: P0009G03.12
  misc_feature (1)..(18): NCBI GI NO: 34895854 NR Description: P0009G03.6
  misc_feature (1)..(18): NCBI GI NO: 34895856 NR Description: P0009G03.7
  misc_feature (1)..(18): NCBI GI NO: 34895862 NR Description: P0009G03.11
  misc_feature (1)..(18): NCBI GI NO: 6179406 NR Description: hypothetical membrane protein [Candida albicans]
  misc_feature (1)..(17): NCBI GI NO: 19112492 NR Description: hypothetical protein [Schizosaccharomyces pombe]
  misc_feature (1)..(18): NCBI GI NO: 39594383 NR Description: Hypothetical protein CBG19031
MKEAFGSAPSWLSWLRYTDPTRKPKRYRYACCSHLITTILFMFRVSLSVLDRPPFFFFCSLQCLRLSPAVYLYSYLYSNFTLQTVCYRAYR

SEQ ID NO: 25020 - protein, 51 aa, Zea mays subsp. mays
  peptide (1)..(51): Ceres Seq. ID no. 12410303
SAPIRTHSIPNSQPCQWLARRCQIESDSDPCSPPARRRDAEASTLHAICLT

SEQ ID NO: 25021 - protein, 50 aa, Zea mays subsp. mays
  peptide (1)..(50): Ceres Seq. ID no. 12410304
  misc_feature (1)..(32): NCBI GI NO: 22326707 NR Description: putative protein phosphatase; protein id:At5g10480
  misc_feature (1)..(40): NCBI GI NO: 6179407 NR Description: hypothetical membrane protein [Candida albicans]
  misc_feature (1)..(25): NCBI GI NO: 11358666 NR Description: probable protein phosphatase - Arabidopsis thaliana
MFRVSLSVLDRPPFFFFCSLQCLRLSPAVYLYSYLYSNFTLQTVCYRAYR

SEQ ID NO: 25022 - DNA, 1631 bp, Zea mays subsp. mays
  misc_feature (1)..(1631): Ceres Seq. ID no. 12410297
gcgcagcaatcctgcctcgcttccctccaaattcccaaagctctcgcgcgcggtgccatggcggagcgcctcgccgcctccctcctccctgccgcctcgccgtccccgtccgcccgccgcgcaacggtcgcagccgcagccgccgcctctttcccctccccatgctccgcccgcgcggggctgcgcctacgctcccgcccgcccctcttctcgcagaaggcggccgggcgcgggtgtggcctgcgggtggtgcggtgcatggcagcgtcggacgcggcgcagctcaaggccgcgcgggaggacatcaaggaactccttaagagcacatactgccaccccatcatggtccgtctggggtggcatgattctggtacctatgacaaggatattaaggactggccacagcgaggtggagctaatggaagtttaaggttcgatgctgagctgagtcatggagccaatgccggcctgattaatgcattgaagcttatccagcctatcaaggacaaatacccaggtatcacttatgcagatttgttccagttagcaagtgctacggcgattgaggaagctggtggtccaaaacttccaatgaaatatggacgtgttgatgtcacagcagctgaacagtgtccgcccgaggggaggcttcctgatgctggcccacgtgatcctgctgaacaccttagggaggtattttatagaatgggccttgatgacaaggaaattgttgcactatctggagcacacacacttggaagagcaaggcctgaccggagtggctggggaaagctagaaacaaaatatactaaggatgggcctggtgagcctggagggcaatcatggacagttgagtggttgaagtttgataatagttacttcaaggagatgaagttattttttttgaacgaaattcaggacatgaagtttttgagccagcttccctggaaagagcagaaggaacaggatcttctagttttgcctacagatgctgcattatttgaggacccatcgttcaaggtatacgcagaaaagtatgcagatgaccaggaagcgttctttaaagactatggtgaagctcatgctaagctgagcgatcttggtgcaaagtttgatcctcctgagggattctcactcgacgatgacacaagctcttcaccttccgacgagaagacggaagaacctacactggtagcggtaggagcggcagtagcaacagcgacagcggacgacaacaacggcgcagctccgcagccggagcccttcgtcgctgccaaatactcgtatggaaagagggagttgtcggatgcgatgaagcaaaagatcagggcggagtacgaggggtttggaggcagcccggacaagcccatgcagtccaactacttcctcaacatcatgatcctgattgcggggttggcgttcttgacatctctgcttgggaactgagtgttatatcatcatatgattatgatccgatttctgaagtctacgagtgtccactattgcaaactctgtaaacgtatgaaacatatctacgactagcattagagctacgtacactgtgcaaacagtttttttttttcgcgaattttggagagagacgagcaaaagaaatgtataacgagtgttcg

SEQ ID NO: 25023 - protein, 481 aa, Zea mays subsp. mays
  peptide (1)..(481): Ceres Seq. ID no. 12410298
  misc_feature (98)..(298): Pfam Name: Pfam Description:  Peroxidase
  misc_feature (20)..(481): NCBI GI NO: 32879783 NR Description: thylakoid-bound ascorbate peroxidase
  misc_feature (14)..(298): NCBI GI NO: 15223971 NR Description: thylakoid-bound ascorbate peroxidase, putative
  misc_feature (317)..(381): NCBI GI NO: 15223971 NR Description: thylakoid-bound ascorbate peroxidase, putative
  misc_feature (419)..(480): NCBI GI NO: 15223971 NR Description: thylakoid-bound ascorbate peroxidase, putative
  misc_feature (14)..(298): NCBI GI NO: 1419390 NR Description: thylakoid-bound ascorbate peroxidase
  misc_feature (317)..(381): NCBI GI NO: 1419390 NR Description: thylakoid-bound ascorbate peroxidase
  misc_feature (419)..(480): NCBI GI NO: 1419390 NR Description: thylakoid-bound ascorbate peroxidase
  misc_feature (21)..(298): NCBI GI NO: 32879781 NR Description: stromal ascorbate peroxidase
  misc_feature (317)..(380): NCBI GI NO: 32879781 NR Description: stromal ascorbate peroxidase
  misc_feature (24)..(347): NCBI GI NO: 4996602 NR Description: thylakoid-bound ascorbate peroxidase
AQQSCLASLQIPKALARGAMAERLAASLLPAASPSPSARRATVAAAAAASFPSPCSARAGLRLRSRPPLFSQKAAGRGCGLRVVRCMAASDAAQLKAAREDIKELLKSTYCHPIMVRLGWHDSGTYDKDIKDWPQRGGANGSLRFDAELSHGANAGLINALKLIQPIKDKYPGITYADLFQLASATAIEEAGGPKLPMKYGRVDVTAAEQCPPEGRLPDAGPRDPAEHLREVFYRMGLDDKEIVALSGAHTLGRARPDRSGWGKLETKYTKDGPGEPGGQSWTVEWLKFDNSYFKEMKLFFLNEIQDMKFLSQLPWKEQKEQDLLVLPTDAALFEDPSFKVYAEKYADDQEAFFKDYGEAHAKLSDLGAKFDPPEGFSLDDDTSSSPSDEKTEEPTLVAVGAAVATATADDNNGAAPQPEPFVAAKYSYGKRELSDAMKQKIRAEYEGFGGSPDKPMQSNYFLNIMILIAGLAFLTSLLGN

SEQ ID NO: 25024 - protein, 462 aa, Zea mays subsp. mays
  peptide (1)..(462): Ceres Seq. ID no. 12410299
  misc_feature (79)..(279): Pfam Name: Pfam Description:  Peroxidase
  misc_feature (1)..(462): NCBI GI NO: 32879783 NR Description: thylakoid-bound ascorbate peroxidase
  misc_feature (1)..(279): NCBI GI NO: 15223971 NR Description: thylakoid-bound ascorbate peroxidase, putative
  misc_feature (298)..(362): NCBI GI NO: 15223971 NR Description: thylakoid-bound ascorbate peroxidase, putative
  misc_feature (400)..(461): NCBI GI NO: 15223971 NR Description: thylakoid-bound ascorbate peroxidase, putative
  misc_feature (1)..(279): NCBI GI NO: 1419390 NR Description: thylakoid-bound ascorbate peroxidase
  misc_feature (298)..(362): NCBI GI NO: 1419390 NR Description: thylakoid-bound ascorbate peroxidase
  misc_feature (400)..(461): NCBI GI NO: 1419390 NR Description: thylakoid-bound ascorbate peroxidase
  misc_feature (2)..(279): NCBI GI NO: 32879781 NR Description: stromal ascorbate peroxidase
  misc_feature (298)..(361): NCBI GI NO: 32879781 NR Description: stromal ascorbate peroxidase
  misc_feature (5)..(328): NCBI GI NO: 4996602 NR Description: thylakoid-bound ascorbate peroxidase
MAERLAASLLPAASPSPSARRATVAAAAAASFPSPCSARAGLRLRSRPPLFSQKAAGRGCGLRVVRCMAASDAAQLKAAREDIKELLKSTYCHPIMVRLGWHDSGTYDKDIKDWPQRGGANGSLRFDAELSHGANAGLINALKLIQPIKDKYPGITYADLFQLASATAIEEAGGPKLPMKYGRVDVTAAEQCPPEGRLPDAGPRDPAEHLREVFYRMGLDDKEIVALSGAHTLGRARPDRSGWGKLETKYTKDGPGEPGGQSWTVEWLKFDNSYFKEMKLFFLNEIQDMKFLSQLPWKEQKEQDLLVLPTDAALFEDPSFKVYAEKYADDQEAFFKDYGEAHAKLSDLGAKFDPPEGFSLDDDTSSSPSDEKTEEPTLVAVGAAVATATADDNNGAAPQPEPFVAAKYSYGKRELSDAMKQKIRAEYEGFGGSPDKPMQSNYFLNIMILIAGLAFLTSLLGN

SEQ ID NO: 25025 - protein, 395 aa, Zea mays subsp. mays
  peptide (1)..(395): Ceres Seq. ID no. 12410300
  misc_feature (12)..(212): Pfam Name: Pfam Description:  Peroxidase
  misc_feature (1)..(395): NCBI GI NO: 32879783 NR Description: thylakoid-bound ascorbate peroxidase
  misc_feature (1)..(212): NCBI GI NO: 15223971 NR Description: thylakoid-bound ascorbate peroxidase, putative
  misc_feature (231)..(295): NCBI GI NO: 15223971 NR Description: thylakoid-bound ascorbate peroxidase, putative
  misc_feature (333)..(394): NCBI GI NO: 15223971 NR Description: thylakoid-bound ascorbate peroxidase, putative
  misc_feature (1)..(212): NCBI GI NO: 1419390 NR Description: thylakoid-bound ascorbate peroxidase
  misc_feature (231)..(295): NCBI GI NO: 1419390 NR Description: thylakoid-bound ascorbate peroxidase
  misc_feature (333)..(394): NCBI GI NO: 1419390 NR Description: thylakoid-bound ascorbate peroxidase
  misc_feature (1)..(212): NCBI GI NO: 32879781 NR Description: stromal ascorbate peroxidase
  misc_feature (231)..(294): NCBI GI NO: 32879781 NR Description: stromal ascorbate peroxidase
  misc_feature (1)..(261): NCBI GI NO: 4996602 NR Description: thylakoid-bound ascorbate peroxidase
MAASDAAQLKAAREDIKELLKSTYCHPIMVRLGWHDSGTYDKDIKDWPQRGGANGSLRFDAELSHGANAGLINALKLIQPIKDKYPGITYADLFQLASATAIEEAGGPKLPMKYGRVDVTAAEQCPPEGRLPDAGPRDPAEHLREVFYRMGLDDKEIVALSGAHTLGRARPDRSGWGKLETKYTKDGPGEPGGQSWTVEWLKFDNSYFKEMKLFFLNEIQDMKFLSQLPWKEQKEQDLLVLPTDAALFEDPSFKVYAEKYADDQEAFFKDYGEAHAKLSDLGAKFDPPEGFSLDDDTSSSPSDEKTEEPTLVAVGAAVATATADDNNGAAPQPEPFVAAKYSYGKRELSDAMKQKIRAEYEGFGGSPDKPMQSNYFLNIMILIAGLAFLTSLLGN

SEQ ID NO: 25026 - DNA, 770 bp, Zea mays subsp. mays
  misc_feature (1)..(770): Ceres Seq. ID no. 12412983
  misc_feature (239)..(239): n is a, c, t, g, unknown, or other
  misc_feature (243)..(243): n is a, c, t, g, unknown, or other
gaattcccctgcgcctctcacctccctgctcgaatccagcgctcacccgcgccgcgtcgagacatgtcgaagaaaatcgtggtgaagctggacctgcacgacaacaaggacaagcagaaggcgctgaaggccatctccgtgctcgtcggcatcgacgccgtgtcggtggacatggcggcgcacaagatgacggtgatcgggacggtggacccggtgcaggtggtgagcaagctgcgcanaagntcgtgggcggcgcacatcgactccgtcgggccggccaaggagcccgagaagaaggaggagaagaaggacggcggcggcgagaagaaggacggcggcggtggcgagggcaagaaggaggaaggggacgggaagaaggacggcggcggcggtggcgacggcaagaaagacggcgagggcaagaaggaggacggcgacggcaagaagcaggacggcgagggcaagaaggaggatggcgatggcaagaaggacgacaagaaggacggcggcggcggcggcgcagaggagaagaagcccgccgccgcggtgcccctgcccaagaagaccgctgagaaggcggcggccaaggaggccaagtcgcccaagaaggccgccaagtcccccaagaaggcatagaggggcgggcgcctttaccgctgtgatgttgaatgctcgtgttcagtagatctttacgtctgtagtgtcgtcgttgttattggaactggttagtagatctgtgcattgtggttgaaacgtgattccctgatttc

SEQ ID NO: 25027 - protein, 211 aa, Zea mays subsp. mays
  peptide (1)..(211): Ceres Seq. ID no. 12412984
  misc_feature (26)..(96): Pfam Name: Pfam Description:  Heavy-metal-associated domain
  misc_feature (22)..(186): NCBI GI NO: 34902246 NR Description: Unknown protein
  misc_feature (22)..(148): NCBI GI NO: 37536388 NR Description: hypothetical protein
  misc_feature (24)..(157): NCBI GI NO: 15223416 NR Description: expressed protein; protein id: At1g01490
  misc_feature (25)..(157): NCBI GI NO: 25517980 NR Description: F22L4.5 protein - Arabidopsis thaliana
  misc_feature (24)..(165): NCBI GI NO: 13543783 NR Description: Unknown (protein for MGC:7642) [Mus musculus]
  misc_feature (26)..(156): NCBI GI NO: 37534752 NR Description: putative metal-binding protein
  misc_feature (82)..(162): NCBI GI NO: 37536388 NR Description: hypothetical protein
  misc_feature (147)..(201): NCBI GI NO: 37534752 NR Description: putative metal-binding protein
  misc_feature (24)..(127): NCBI GI NO: 29124977 NR Description: unknown [Populus tremuloides]
  misc_feature (22)..(110): NCBI GI NO: 21929729 NR Description: barley stem rust resistance protein
  misc_feature (80)..(80): Xaa is any aa, unknown or other
  misc_feature (81)..(81): Xaa is any aa, unknown or other
EFPCASHLPARIQRSPAPRRDMSKKIVVKLDLHDNKDKQKALKAISVLVGIDAVSVDMAAHKMTVIGTVDPVQVVSKLRXXSWAAHIDSVGPAKEPEKKEEKKDGGGEKKDGGGGEGKKEEGDGKKDGGGGGDGKKDGEGKKEDGDGKKQDGEGKKEDGDGKKDDKKDGGGGGAEEKKPAAAVPLPKKTAEKAAAKEAKSPKKAAKSPKKA

SEQ ID NO: 25028 - protein, 190 aa, Zea mays subsp. mays
  peptide (1)..(190): Ceres Seq. ID no. 12412985
  misc_feature (5)..(75): Pfam Name: Pfam Description:  Heavy-metal-associated domain
  misc_feature (1)..(165): NCBI GI NO: 34902246 NR Description: Unknown protein
  misc_feature (1)..(127): NCBI GI NO: 37536388 NR Description: hypothetical protein
  misc_feature (3)..(136): NCBI GI NO: 15223416 NR Description: expressed protein; protein id: At1g01490
  misc_feature (4)..(136): NCBI GI NO: 25517980 NR Description: F22L4.5 protein - Arabidopsis thaliana
  misc_feature (3)..(144): NCBI GI NO: 13543783 NR Description: Unknown (protein for MGC:7642) [Mus musculus]
  misc_feature (5)..(135): NCBI GI NO: 37534752 NR Description: putative metal-binding protein
  misc_feature (61)..(141): NCBI GI NO: 37536388 NR Description: hypothetical protein
  misc_feature (126)..(180): NCBI GI NO: 37534752 NR Description: putative metal-binding protein
  misc_feature (3)..(106): NCBI GI NO: 29124977 NR Description: unknown [Populus tremuloides]
  misc_feature (1)..(89): NCBI GI NO: 21929729 NR Description: barley stem rust resistance protein
  misc_feature (59)..(59): Xaa is any aa, unknown or other
  misc_feature (60)..(60): Xaa is any aa, unknown or other
MSKKIVVKLDLHDNKDKQKALKAISVLVGIDAVSVDMAAHKMTVIGTVDPVQVVSKLRXXSWAAHIDSVGPAKEPEKKEEKKDGGGEKKDGGGGEGKKEEGDGKKDGGGGGDGKKDGEGKKEDGDGKKQDGEGKKEDGDGKKDDKKDGGGGGAEEKKPAAAVPLPKKTAEKAAAKEAKSPKKAAKSPKKA

SEQ ID NO: 25029 - protein, 189 aa, Zea mays subsp. mays
  peptide (1)..(189): Ceres Seq. ID no. 12412986
  misc_feature (2)..(189): Pfam Name: Pfam Description:  High molecular weight glutenin subunit
  misc_feature (27)..(189): NCBI GI NO: 24664664 NR Description: Argonaute 2 CG7439-PB
  misc_feature (27)..(189): NCBI GI NO: 28317062 NR Description: RE04347p [Drosophila melanogaster]
  misc_feature (27)..(189): NCBI GI NO: 24664668 NR Description: Argonaute 2 CG7439-PC
  misc_feature (34)..(189): NCBI GI NO: 23480318 NR Description: Drosop hila melanogaster CG8797 gene product-related
  misc_feature (21)..(189): NCBI GI NO: 23480318 NR Description: Drosop hila melanogaster CG8797 gene product-related
  misc_feature (23)..(189): NCBI GI NO: 9837379 NR Description: retinitis pigmentosa GTPase regulator
  misc_feature (23)..(189): NCBI GI NO: 20452161 NR Description: retinitis pigmentosa GTPase regulator
  misc_feature (20)..(189): NCBI GI NO: 20452161 NR Description: retinitis pigmentosa GTPase regulator
  misc_feature (35)..(189): NCBI GI NO: 20452161 NR Description: retinitis pigmentosa GTPase regulator
  misc_feature (28)..(189): NCBI GI NO: 21757162 NR Description: unnamed protein product [Homo sapiens]
  misc_feature (79)..(79): Xaa is any aa, unknown or other
  misc_feature (81)..(81): Xaa is any aa, unknown or other
IPLRLSPPCSNPALTRAASRHVEENRGEAGPARQQGQAEGAEGHLRARRHRRRVGGHGGAQDDGDRDGGPGAGGEQAAXKXVGGAHRLRRAGQGAREEGGEEGRRRREEGRRRWRGQEGGRGREEGRRRRWRRQERRRGQEGGRRRQEAGRRGQEGGWRWQEGRQEGRRRRRRRGEEARRRGAPAQEDR

SEQ ID NO: 25030 - DNA, 1206 bp, Zea mays subsp. mays
  misc_feature (1)..(1206): Ceres Seq. ID no. 12406176
gcacgagaccattacctagaacatcctaatcaaaagatcgggctgccctgccgcctcttgctcccttcctcctctcgcccagcagcctagctacttgagcgagacgagctccagctgaggaagtgagaggtcgtggtccgagaggcgtgcgtgcgtggccatggacggcgccgaggacgacgggacggagtggatgatgcatggtgccggagggaagggaaaaggcggcggcgcgctcgacaagaacaagaagcgcttcagcgacgagcagaccaagtcgctggagtccatgttcgcgacgcaggccaagctggagccgcgccagaagctgcagctggcgcgggagctcggcctgcagccgcgccaggtcgccatctggttccagaacaagcgcgcgcgctggaagtccaagcagctggagcgcgagtactcggcgctgcgcgacgactaccacgcgctcctctgcagctacgagtccctcaaggacgagaagcgcgcgctcctcaagcagctggagaagctggccgagatgctgcacgagccgccgcagggcaagtactacggcggcaatgcggacgacgtgcgctcgggcggcgtcggcggcacgaaggaggaggaggagtccacagacgcctgcgccggggccgcgctctactcgtccgagtgcgctggcggtggcaggttcatcgcgcacttcttggcggacgacgacgtgggagcagccctcttccggccgccgtcgtctccgcagccgaccgctggcttactcacgtcgtcggggccgccggagcaccagccgttccagttccactccggctactgctggccgtcgtcgtcggcggagcagacctgcagcggctcgcaatggtgggagttcgagtccctcagcgagtgacgtacgatgatcacaagcggccgggggtcactcggttccaagcacacgtaagggccgggccaatacgagttcgttcgtagcggtctcgtcactcgtcagctagccctgcagagcaacggtgtatgcatagcttcagtagatcgaagtccaggtccaggactgcccatcaagcagtttcttcttctcgccatcgatcatcgatcatgcatgcaaaagatttttttttctctcccttgctatcagatcatgtaatccagcagaggaacatgtagagaaagatcaaacgaggttatagagagaaggtcgcctgc

SEQ ID NO: 25031 - protein, 244 aa, Zea mays subsp. mays
  peptide (1)..(244): Ceres Seq. ID no. 12406177
  misc_feature (30)..(83): Pfam Name: Pfam Description:  Homeobox domain
  misc_feature (1)..(173): NCBI GI NO: 5006857 NR Description: homeodomain leucine zipper protein [Oryza sativa]
  misc_feature (224)..(241): NCBI GI NO: 5006857 NR Description: homeodomain leucine zipper protein [Oryza sativa]
  misc_feature (10)..(173): NCBI GI NO: 29367373 NR Description: homeodomain leucine zipper protein-like protein
  misc_feature (25)..(131): NCBI GI NO: 5031277 NR Description: homeobox leucine zipper protein [Prunus armeniaca]
  misc_feature (29)..(130): NCBI GI NO: 629527 NR Description: homeotic protein Athb-7 - Arabidopsis thaliana
  misc_feature (29)..(130): NCBI GI NO: 15226424 NR Description: homeodomain transcription factor
  misc_feature (29)..(134): NCBI GI NO: 15228625 NR Description: homeobox-leucine zipper protein ATHB-12
  misc_feature (29)..(134): NCBI GI NO: 11357332 NR Description: homeobox-leucine zipper protein ATHB-12
  misc_feature (28)..(125): NCBI GI NO: 37147908 NR Description: HD-ZIP [Capsicum annuum]
  misc_feature (1)..(220): NCBI GI NO: 5006853 NR Description: homeodomain leucine zipper protein [Oryza sativa]
MDGAEDDGTEWMMHGAGGKGKGGGALDKNKKRFSDEQTKSLESMFATQAKLEPRQKLQLARELGLQPRQVAIWFQNKRARWKSKQLEREYSALRDDYHALLCSYESLKDEKRALLKQLEKLAEMLHEPPQGKYYGGNADDVRSGGVGGTKEEEESTDACAGAALYSSECAGGGRFIAHFLADDDVGAALFRPPSSPQPTAGLLTSSGPPEHQPFQFHSGYCWPSSSAEQTCSGSQWWEFESLSE

SEQ ID NO: 25032 - protein, 234 aa, Zea mays subsp. mays
  peptide (1)..(234): Ceres Seq. ID no. 12406178
  misc_feature (1)..(232): NCBI GI NO: 6649242 NR Description: splicing coactivator subunit SRm300 [Homo sapiens]
  misc_feature (1)..(234): NCBI GI NO: 6649242 NR Description: splicing coactivator subunit SRm300 [Homo sapiens]
  misc_feature (5)..(234): NCBI GI NO: 6649242 NR Description: splicing coactivator subunit SRm300 [Homo sapiens]
  misc_feature (1)..(234): NCBI GI NO: 6649242 NR Description: splicing coactivator subunit SRm300 [Homo sapiens]
  misc_feature (9)..(234): NCBI GI NO: 15901602 NR Description: cell wall surface anchor family protein
  misc_feature (1)..(234): NCBI GI NO: 15901602 NR Description: cell wall surface anchor family protein
  misc_feature (9)..(234): NCBI GI NO: 15901602 NR Description: cell wall surface anchor family protein
  misc_feature (9)..(234): NCBI GI NO: 15901602 NR Description: cell wall surface anchor family protein
  misc_feature (1)..(234): NCBI GI NO: 15901602 NR Description: cell wall surface anchor family protein
  misc_feature (9)..(234): NCBI GI NO: 15901602 NR Description: cell wall surface anchor family protein
MVPEGREKAAARSTRTRSASATSRPSRWSPCSRRRPSWSRARSCSWRGSSACSRARSPSGSRTSARAGSPSSWSASTRRCATTTTRSSAATSPSRTRSARSSSSWRSWPRCCTSRRRASTTAAMRTTCARAASAARRRRRSPQTPAPGPRSTRPSALAVAGSSRTSWRTTTWEQPSSGRRRLRSRPLAYSRRRGRRSTSRSSSTPATAGRRRRRSRPAAARNGGSSSPSASDVR

SEQ ID NO: 25033 - protein, 233 aa, Zea mays subsp. mays
  peptide (1)..(233): Ceres Seq. ID no. 12406179
  misc_feature (19)..(72): Pfam Name: Pfam Description:  Homeobox domain
  misc_feature (1)..(162): NCBI GI NO: 5006857 NR Description: homeodomain leucine zipper protein [Oryza sativa]
  misc_feature (213)..(230): NCBI GI NO: 5006857 NR Description: homeodomain leucine zipper protein [Oryza sativa]
  misc_feature (1)..(162): NCBI GI NO: 29367373 NR Description: homeodomain leucine zipper protein-like protein
  misc_feature (14)..(120): NCBI GI NO: 5031277 NR Description: homeobox leucine zipper protein [Prunus armeniaca]
  misc_feature (18)..(119): NCBI GI NO: 629527 NR Description: homeotic protein Athb-7 - Arabidopsis thaliana
  misc_feature (18)..(119): NCBI GI NO: 15226424 NR Description: homeodomain transcription factor
  misc_feature (18)..(123): NCBI GI NO: 15228625 NR Description: homeobox-leucine zipper protein ATHB-12
  misc_feature (18)..(123): NCBI GI NO: 11357332 NR Description: homeobox-leucine zipper protein ATHB-12
  misc_feature (17)..(114): NCBI GI NO: 37147908 NR Description: HD-ZIP [Capsicum annuum]
  misc_feature (1)..(209): NCBI GI NO: 5006853 NR Description: homeodomain leucine zipper protein [Oryza sativa]
MMHGAGGKGKGGGALDKNKKRFSDEQTKSLESMFATQAKLEPRQKLQLARELGLQPRQVAIWFQNKRARWKSKQLEREYSALRDDYHALLCSYESLKDEKRALLKQLEKLAEMLHEPPQGKYYGGNADDVRSGGVGGTKEEEESTDACAGAALYSSECAGGGRFIAHFLADDDVGAALFRPPSSPQPTAGLLTSSGPPEHQPFQFHSGYCWPSSSAEQTCSGSQWWEFESLSE

SEQ ID NO: 25034 - DNA, 1343 bp, Zea mays subsp. mays
  misc_feature (1)..(1343): Ceres Seq. ID no. 12410293
atatcttagttgcacggttaggtaagacatatggacacaggcagttgcgtctctgtctcttatatacatatgctagatttgctatattgagttgacatgccgttagttgcgatttgcgaagctagctcccaccatctgcgacgccatgtcttcttcctctgtccaacaaacggcctttcccgagcaagaagccgatgcggaaggcgaaacgaaccctgagctctaccagcatttcgccaacttggtctcctccctgccgagctccaaaggcttgtccaacaacaaattctaccgccacgaccaaggctggcactgcagcgtggtgggcatagtgggcgccatggtcgccgacgcgtgcttcagcgcgcgcccctcggacgtcatcgtcgccaccctgcccaagtccggcaccacgtggatgaagtcgctcctgtacgccaccgtgcaccggagagagcgtcccgtcgtcggcgccgccgccgaccagcatcctctcaacagctggggcccccacgaactcatcaagttcttcgagtaccagctctacacgcgggacagggtcccggacctggacaggctccccgaccctcggctcttcgcgacgcacgtccctttcgtgtcgctgccgagctccgtggtcgccacgccgggctgcaagatcgtctacgtgtgccgcgaccccaaggaccacctcgtctccctgtgggacttcgtcaacaaatacttcagggtcaaggatgggctcgagcctctctccgtggaggccgccgccgagctgttctgcgccggcctgaccccgttcgggccgtactgggaccacgtgctcggctactggcgcgcgcaccgcgcggaccccgacaaggtgctcttcttcaggtacgaggagatgcagagggaccccgcggcgcacgtccgcaggctggcggagttcgtcggcctcccattcagctccgaggaggaggacggcggcgtggtggatgccgtcgtggggctgtgctcgttcgagcgcatgaggggcatggcgccgaccaaggcgtggcaggactgagttcccgatcggcgtggtgcccaacagctccttcttccggcagggcgtggtgggggactgggtgaaccacctgtcaccggagatggcgcgccgcattgacgcgatcactgcagacaagttcaggggttcgagtctcgtcgtctagctagctgttacggatcaatcatcactcatcatcagtgcgccactctaccgtggtttctcaaatgctcaataatgcaaggactacctattagtattctatatctatactattctattaataagaacttatatatgttgctatcgcggctcc

SEQ ID NO: 25035 - protein, 300 aa, Zea mays subsp. mays
  peptide (1)..(300): Ceres Seq. ID no. 12410294
  misc_feature (77)..(291): Pfam Name: Pfam Description:  Sulfotransferase domain
  misc_feature (1)..(297): NCBI GI NO: 38344441 NR Description: OSJNBa0038O10.13
  misc_feature (16)..(291): NCBI GI NO: 34894524 NR Description: putative steroid sulfotransferase
  misc_feature (12)..(297): NCBI GI NO: 9759556 NR Description: steroid sulfotransferase-like protein
  misc_feature (12)..(297): NCBI GI NO: 30681703 NR Description: sulfotransferase family [Arabidopsis thaliana]
  misc_feature (1)..(300): NCBI GI NO: 15221820 NR Description: flavonol 4'-sulfotransferase, putative
  misc_feature (19)..(297): NCBI GI NO: 9759557 NR Description: steroid sulfotransferase-like protein
  misc_feature (19)..(297): NCBI GI NO: 18415376 NR Description: steroid sulfotransferase-like protein
  misc_feature (19)..(297): NCBI GI NO: 15809903 NR Description: AT5g07010/MOJ9_18 [Arabidopsis thaliana]
  misc_feature (1)..(292): NCBI GI NO: 38346451 NR Description: OSJNBa0018J19.12
  misc_feature (14)..(296): NCBI GI NO: 15222843 NR Description: steroid sulfotransferase, putative
MSSSSVQQTAFPEQEADAEGETNPELYQHFANLVSSLPSSKGLSNNKFYRHDQGWHCSVVGIVGAMVADACFSARPSDVIVATLPKSGTTWMKSLLYATVHRRERPVVGAAADQHPLNSWGPHELIKFFEYQLYTRDRVPDLDRLPDPRLFATHVPFVSLPSSVVATPGCKIVYVCRDPKDHLVSLWDFVNKYFRVKDGLEPLSVEAAAELFCAGLTPFGPYWDHVLGYWRAHRADPDKVLFFRYEEMQRDPAAHVRRLAEFVGLPFSSEEEDGGVVDAVVGLCSFERMRGMAPTKAWQD

SEQ ID NO: 25036 - protein, 235 aa, Zea mays subsp. mays
  peptide (1)..(235): Ceres Seq. ID no. 12410295
  misc_feature (12)..(226): Pfam Name: Pfam Description:  Sulfotransferase domain
  misc_feature (1)..(232): NCBI GI NO: 38344441 NR Description: OSJNBa0038O10.13
  misc_feature (1)..(226): NCBI GI NO: 34894524 NR Description: putative steroid sulfotransferase
  misc_feature (1)..(232): NCBI GI NO: 9759556 NR Description: steroid sulfotransferase-like protein
  misc_feature (1)..(232): NCBI GI NO: 30681703 NR Description: sulfotransferase family [Arabidopsis thaliana]
  misc_feature (1)..(235): NCBI GI NO: 15221820 NR Description: flavonol 4'-sulfotransferase, putative
  misc_feature (1)..(232): NCBI GI NO: 9759557 NR Description: steroid sulfotransferase-like protein
  misc_feature (1)..(232): NCBI GI NO: 18415376 NR Description: steroid sulfotransferase-like protein
  misc_feature (1)..(232): NCBI GI NO: 15809903 NR Description: AT5g07010/MOJ9_18 [Arabidopsis thaliana]
  misc_feature (1)..(227): NCBI GI NO: 38346451 NR Description: OSJNBa0018J19.12
  misc_feature (1)..(231): NCBI GI NO: 15222843 NR Description: steroid sulfotransferase, putative
MVADACFSARPSDVIVATLPKSGTTWMKSLLYATVHRRERPVVGAAADQHPLNSWGPHELIKFFEYQLYTRDRVPDLDRLPDPRLFATHVPFVSLPSSVVATPGCKIVYVCRDPKDHLVSLWDFVNKYFRVKDGLEPLSVEAAAELFCAGLTPFGPYWDHVLGYWRAHRADPDKVLFFRYEEMQRDPAAHVRRLAEFVGLPFSSEEEDGGVVDAVVGLCSFERMRGMAPTKAWQD

SEQ ID NO: 25037 - protein, 209 aa, Zea mays subsp. mays
  peptide (1)..(209): Ceres Seq. ID no. 12410296
  misc_feature (1)..(200): Pfam Name: Pfam Description:  Sulfotransferase domain
  misc_feature (1)..(206): NCBI GI NO: 38344441 NR Description: OSJNBa0038O10.13
  misc_feature (1)..(200): NCBI GI NO: 34894524 NR Description: putative steroid sulfotransferase
  misc_feature (1)..(206): NCBI GI NO: 9759556 NR Description: steroid sulfotransferase-like protein
  misc_feature (1)..(206): NCBI GI NO: 30681703 NR Description: sulfotransferase family [Arabidopsis thaliana]
  misc_feature (1)..(209): NCBI GI NO: 15221820 NR Description: flavonol 4'-sulfotransferase, putative
  misc_feature (1)..(206): NCBI GI NO: 9759557 NR Description: steroid sulfotransferase-like protein
  misc_feature (1)..(206): NCBI GI NO: 18415376 NR Description: steroid sulfotransferase-like protein
  misc_feature (1)..(206): NCBI GI NO: 15809903 NR Description: AT5g07010/MOJ9_18 [Arabidopsis thaliana]
  misc_feature (1)..(201): NCBI GI NO: 38346451 NR Description: OSJNBa0018J19.12
  misc_feature (1)..(205): NCBI GI NO: 15222843 NR Description: steroid sulfotransferase, putative
MKSLLYATVHRRERPVVGAAADQHPLNSWGPHELIKFFEYQLYTRDRVPDLDRLPDPRLFATHVPFVSLPSSVVATPGCKIVYVCRDPKDHLVSLWDFVNKYFRVKDGLEPLSVEAAAELFCAGLTPFGPYWDHVLGYWRAHRADPDKVLFFRYEEMQRDPAAHVRRLAEFVGLPFSSEEEDGGVVDAVVGLCSFERMRGMAPTKAWQD

SEQ ID NO: 25038 - DNA, 1332 bp, Zea mays subsp. mays
  misc_feature (1)..(1332): Ceres Seq. ID no. 12407298
aatataggcaccccgcaccccgttggcgtttgcccgtcctgactcctcgtccccgtgcacaccaccctcgtctccgcgcccgcgccactcacatcgtgatcgagacgacccgcgtcctccgcggtccgcgcccgcgcaccatctcgcctcgcattcccgaaagtatctgtattccttgatcaacatgtcgcgggaggagaatgtttatatggccaagctggctgagcaagcagaacggtacgaggaaatggttgaatacatggagaaggtggctaagaccacagatgtgcaagagctcactgttgaggagcgtaaccttctatctgttgcctacaagaatgtgattgcggccccccgtgcctcatggcgcattatctcctccatcgagcagaaagaggagtcccgtaagaatgaggaacatgttgcacagatcaaggaataccgtggcaagattgaggctgaattgagcaacatttgtgatggtatcctaaagctgcttgacacgcaccttgtgccttcctccactgccacagagtcgaaggtgttttacctcaagatgaagggtgattatcacaggtaccttgctgagtttaagactggtgctgagaggaaggaatctgcagagagcacaatggtagcttataaggcagctcaggatattgcattggctgaactgccacctattcatcccataaggcttggacttgcacttaacttctcagttttctattacgagattcagaactctccagacaaagcttgcaatcttgccaaggaggcgtttgatgaagctatttctcagttggacatgcttggtgaggattcctacaaagatagcaacttgattatgcagctcctgagggacaacttgaccctctggacggaggacggcattgaggagggcttagaatcctctaagggcgatgctggtgagggtcagtagcctggtaaacttagattgatggttcgacgtgtttctcaagcacatcgtgttggacgcccagtgctgacaaaaggcttttgctgctccatgcattccaagcttctgccccctcgttcgcaccctctttatgttgttggctggtagtggtcagatttagtcccattggtttagttggccctgggtccatctgaactgatgtattgttactgctatggaagtcattcctttagttttgctctggcagtggattgctgttgggtcgtgttttcagtctttattggtttccgatcggacgctgttgcgggcaaaccacccctgtagatactcttcacatgctgaagaaaactaccagcagccgtttagcctgaataattgctaaatgataggtt

SEQ ID NO: 25039 - protein, 252 aa, Zea mays subsp. mays
  peptide (1)..(252): Ceres Seq. ID no. 12407299
  misc_feature (3)..(240): Pfam Name: Pfam Description:  14-3-3 protein
  misc_feature (1)..(252): NCBI GI NO: 37903393 NR Description: 14-3-3-like protein
  misc_feature (1)..(252): NCBI GI NO: 7435022 NR Description: GF14-c protein - rice
  misc_feature (1)..(252): NCBI GI NO: 7271253 NR Description: 14-3-3-like protein [Oryza sativa]
  misc_feature (2)..(252): NCBI GI NO: 2921512 NR Description: GF14 protein [Fritillaria agrestis]
  misc_feature (2)..(252): NCBI GI NO: 12229593 NR Description: 14-3-3-like protein
  misc_feature (1)..(252): NCBI GI NO: 7435021 NR Description: GF14-b protein - rice
  misc_feature (1)..(252): NCBI GI NO: 2492487 NR Description: 14-3-3-LIKE PROTEIN B (14-3-3B)
  misc_feature (2)..(251): NCBI GI NO: 13702816 NR Description: putative 14-3-3 protein [Oryza sativa]
  misc_feature (1)..(252): NCBI GI NO: 7435015 NR Description: 14-3-3 protein - barley
  misc_feature (2)..(250): NCBI GI NO: 3023187 NR Description: 14-3-3-LIKE PROTEIN (G-BOX BINDING FACTOR)
MSREENVYMAKLAEQAERYEEMVEYMEKVAKTTDVQELTVEERNLLSVAYKNVIAAPRASWRIISSIEQKEESRKNEEHVAQIKEYRGKIEAELSNICDGILKLLDTHLVPSSTATESKVFYLKMKGDYHRYLAEFKTGAERKESAESTMVAYKAAQDIALAELPPIHPIRLGLALNFSVFYYEIQNSPDKACNLAKEAFDEAISQLDMLGEDSYKDSNLIMQLLRDNLTLWTEDGIEEGLESSKGDAGEGQ

SEQ ID NO: 25040 - protein, 244 aa, Zea mays subsp. mays
  peptide (1)..(244): Ceres Seq. ID no. 12407300
  misc_feature (1)..(232): Pfam Name: Pfam Description:  14-3-3 protein
  misc_feature (1)..(244): NCBI GI NO: 37903393 NR Description: 14-3-3-like protein
  misc_feature (1)..(244): NCBI GI NO: 7435022 NR Description: GF14-c protein - rice
  misc_feature (1)..(244): NCBI GI NO: 7271253 NR Description: 14-3-3-like protein [Oryza sativa]
  misc_feature (1)..(244): NCBI GI NO: 2921512 NR Description: GF14 protein [Fritillaria agrestis]
  misc_feature (1)..(244): NCBI GI NO: 12229593 NR Description: 14-3-3-like protein
  misc_feature (1)..(244): NCBI GI NO: 7435021 NR Description: GF14-b protein - rice
  misc_feature (1)..(244): NCBI GI NO: 2492487 NR Description: 14-3-3-LIKE PROTEIN B (14-3-3B)
  misc_feature (1)..(243): NCBI GI NO: 13702816 NR Description: putative 14-3-3 protein [Oryza sativa]
  misc_feature (1)..(244): NCBI GI NO: 7435015 NR Description: 14-3-3 protein - barley
  misc_feature (1)..(242): NCBI GI NO: 3023187 NR Description: 14-3-3-LIKE PROTEIN (G-BOX BINDING FACTOR)
MAKLAEQAERYEEMVEYMEKVAKTTDVQELTVEERNLLSVAYKNVIAAPRASWRIISSIEQKEESRKNEEHVAQIKEYRGKIEAELSNICDGILKLLDTHLVPSSTATESKVFYLKMKGDYHRYLAEFKTGAERKESAESTMVAYKAAQDIALAELPPIHPIRLGLALNFSVFYYEIQNSPDKACNLAKEAFDEAISQLDMLGEDSYKDSNLIMQLLRDNLTLWTEDGIEEGLESSKGDAGEGQ

SEQ ID NO: 25041 - protein, 231 aa, Zea mays subsp. mays
  peptide (1)..(231): Ceres Seq. ID no. 12407301
  misc_feature (1)..(219): Pfam Name: Pfam Description:  14-3-3 protein
  misc_feature (1)..(231): NCBI GI NO: 37903393 NR Description: 14-3-3-like protein
  misc_feature (1)..(231): NCBI GI NO: 7435022 NR Description: GF14-c protein - rice
  misc_feature (1)..(231): NCBI GI NO: 7271253 NR Description: 14-3-3-like protein [Oryza sativa]
  misc_feature (1)..(231): NCBI GI NO: 2921512 NR Description: GF14 protein [Fritillaria agrestis]
  misc_feature (1)..(231): NCBI GI NO: 12229593 NR Description: 14-3-3-like protein
  misc_feature (1)..(231): NCBI GI NO: 7435021 NR Description: GF14-b protein - rice
  misc_feature (1)..(231): NCBI GI NO: 2492487 NR Description: 14-3-3-LIKE PROTEIN B (14-3-3B)
  misc_feature (1)..(230): NCBI GI NO: 13702816 NR Description: putative 14-3-3 protein [Oryza sativa]
  misc_feature (1)..(231): NCBI GI NO: 7435015 NR Description: 14-3-3 protein - barley
  misc_feature (1)..(229): NCBI GI NO: 3023187 NR Description: 14-3-3-LIKE PROTEIN (G-BOX BINDING FACTOR)
MVEYMEKVAKTTDVQELTVEERNLLSVAYKNVIAAPRASWRIISSIEQKEESRKNEEHVAQIKEYRGKIEAELSNICDGILKLLDTHLVPSSTATESKVFYLKMKGDYHRYLAEFKTGAERKESAESTMVAYKAAQDIALAELPPIHPIRLGLALNFSVFYYEIQNSPDKACNLAKEAFDEAISQLDMLGEDSYKDSNLIMQLLRDNLTLWTEDGIEEGLESSKGDAGEGQ

SEQ ID NO: 25042 - DNA, 1538 bp, Zea mays subsp. mays
  misc_feature (1)..(1538): Ceres Seq. ID no. 12410280
gcgatctcggtttttacccaaagacgaagccgacgacaaggagaacagagactccggcgagccccagccaccgtgaagccgcgcgaattgcaggagcgaagcaaaggagatgcttctcgaggagctgctccggtgccaaatccacgagtggtacccggccttccgtcgccactccatccccaccgtcatcatcccgctccccgccgccttcctccgctacctcgccggccagcgggcctaccccaacgccgacgccgacgctgaagatggcgctgatgaggagccactaccgttcctccttccggcgataacttccggccgccagcccttcgcgcccatccacgcgcaccaccccgaccccgactctctcctcaactccgacttgttcttcggctccagcagcgaagacgtcttcgaccccgacgccgaccacccgctccggccggaattcccggagctggaggtggccatcgactccgccatcgccgagctaggcggcgccgcgctccccaagctcaactggagcgcgcccaaggatgccaccttcatgtctgccgatggcacgagtcggtgcacgtgcttcgccgaggttgccatgctgctccgctcctccgactgtgtagcccacgaccttgcctccgcgcgacaatcatgcaaggatttcgtgcgcccggagggtgctcgacggaatgcccaaaaagttagtgccggttctgaggaaggtgctcgaccaaatgccgatgggattcgtggctgcgaaggcaccaatggagcaccaagtaattcaagcaagacaggtgaggagggaggcaagacaaatgatggggactgtgatgttgaagatgcaaccgaagaagaacataacgagaatacttgggtggacgatgggttccaatactaccttgccctccgcaagtggtacccaggcctacgccctgagtcagagttccgatgcttcgttcgggagcagaagctggttgctgtgtcccagagagacccatcagcttactacccatcactgcctggatggagttccgaggtgcaaccgaaaattgaggctttcttcaacgaagtgattgagccacagtttgcttcaaacaattatacgtttgatgtgtatgtgaggacagatgggcgagtcaagctcatagatttcaatccatggggtggttataccttgccgctgctgtttacttgggaggagcttgagaaggggagagggtctgagctggagtttcgggtggtcatgcagcagggtgcagtgaggccaggattgatgacagctgtgccatatgatatgctggattggggtgaggggagtggctgggatgtttttctgaagaaggctgacgaggagcttgacagacagatatgaactccctggatggtgattcatgattgtggttcgaaaaaaaagtcttaattatgctgtaggcacacaatttaaagtgatgactgctgttttttttacctgctactgtgctacatactagcagtcacctcctttcttaaaattgctatgcagtctcttgccattt

SEQ ID NO: 25043 - protein, 421 aa, Zea mays subsp. mays
  peptide (1)..(421): Ceres Seq. ID no. 12410281
  misc_feature (263)..(419): NCBI GI NO: 15235584 NR Description: D123 -like protein; protein id: At4g05440.1
  misc_feature (84)..(189): NCBI GI NO: 15235584 NR Description: D123 -like protein; protein id: At4g05440.1
  misc_feature (4)..(38): NCBI GI NO: 15235584 NR Description: D123 -like protein; protein id: At4g05440.1
  misc_feature (258)..(403): NCBI GI NO: 19527052 NR Description: expressed sequence AA959893 [Mus musculus]
  misc_feature (83)..(184): NCBI GI NO: 19527052 NR Description: expressed sequence AA959893 [Mus musculus]
  misc_feature (1)..(38): NCBI GI NO: 19527052 NR Description: expressed sequence AA959893 [Mus musculus]
  misc_feature (258)..(403): NCBI GI NO: 25742671 NR Description: D123 gene product [Rattus norvegicus]
  misc_feature (83)..(184): NCBI GI NO: 25742671 NR Description: D123 gene product [Rattus norvegicus]
  misc_feature (1)..(38): NCBI GI NO: 25742671 NR Description: D123 gene product [Rattus norvegicus]
  misc_feature (258)..(403): NCBI GI NO: 23959082 NR Description: similar to expressed sequence AA959893
MLLEELLRCQIHEWYPAFRRHSIPTVIIPLPAAFLRYLAGQRAYPNADADAEDGADEEPLPFLLPAITSGRQPFAPIHAHHPDPDSLLNSDLFFGSSSEDVFDPDADHPLRPEFPELEVAIDSAIAELGGAALPKLNWSAPKDATFMSADGTSRCTCFAEVAMLLRSSDCVAHDLASARQSCKDFVRPEGARRNAQKVSAGSEEGARPNADGIRGCEGTNGAPSNSSKTGEEGGKTNDGDCDVEDATEEEHNENTWVDDGFQYYLALRKWYPGLRPESEFRCFVREQKLVAVSQRDPSAYYPSLPGWSSEVQPKIEAFFNEVIEPQFASNNYTFDVYVRTDGRVKLIDFNPWGGYTLPLLFTWEELEKGRGSELEFRVVMQQGAVRPGLMTAVPYDMLDWGEGSGWDVFLKKADEELDRQI

SEQ ID NO: 25044 - protein, 275 aa, Zea mays subsp. mays
  peptide (1)..(275): Ceres Seq. ID no. 12410282
  misc_feature (117)..(273): NCBI GI NO: 15235584 NR Description: D123 -like protein; protein id: At4g05440.1
  misc_feature (1)..(43): NCBI GI NO: 15235584 NR Description: D123 -like protein; protein id: At4g05440.1
  misc_feature (112)..(257): NCBI GI NO: 19527052 NR Description: expressed sequence AA959893 [Mus musculus]
  misc_feature (1)..(38): NCBI GI NO: 19527052 NR Description: expressed sequence AA959893 [Mus musculus]
  misc_feature (112)..(257): NCBI GI NO: 25742671 NR Description: D123 gene product [Rattus norvegicus]
  misc_feature (1)..(38): NCBI GI NO: 25742671 NR Description: D123 gene product [Rattus norvegicus]
  misc_feature (112)..(257): NCBI GI NO: 23959082 NR Description: similar to expressed sequence AA959893
  misc_feature (1)..(38): NCBI GI NO: 23959082 NR Description: similar to expressed sequence AA959893
  misc_feature (1)..(38): NCBI GI NO: 28829467 NR Description: similar to Homo sapiens (Human)
  misc_feature (112)..(220): NCBI GI NO: 28829467 NR Description: similar to Homo sapiens (Human)
MSADGTSRCTCFAEVAMLLRSSDCVAHDLASARQSCKDFVRPEGARRNAQKVSAGSEEGARPNADGIRGCEGTNGAPSNSSKTGEEGGKTNDGDCDVEDATEEEHNENTWVDDGFQYYLALRKWYPGLRPESEFRCFVREQKLVAVSQRDPSAYYPSLPGWSSEVQPKIEAFFNEVIEPQFASNNYTFDVYVRTDGRVKLIDFNPWGGYTLPLLFTWEELEKGRGSELEFRVVMQQGAVRPGLMTAVPYDMLDWGEGSGWDVFLKKADEELDRQI

SEQ ID NO: 25045 - protein, 259 aa, Zea mays subsp. mays
  peptide (1)..(259): Ceres Seq. ID no. 12410283
  misc_feature (101)..(257): NCBI GI NO: 15235584 NR Description: D123 -like protein; protein id: At4g05440.1
  misc_feature (1)..(27): NCBI GI NO: 15235584 NR Description: D123 -like protein; protein id: At4g05440.1
  misc_feature (96)..(241): NCBI GI NO: 19527052 NR Description: expressed sequence AA959893 [Mus musculus]
  misc_feature (1)..(22): NCBI GI NO: 19527052 NR Description: expressed sequence AA959893 [Mus musculus]
  misc_feature (96)..(241): NCBI GI NO: 25742671 NR Description: D123 gene product [Rattus norvegicus]
  misc_feature (1)..(22): NCBI GI NO: 25742671 NR Description: D123 gene product [Rattus norvegicus]
  misc_feature (96)..(241): NCBI GI NO: 23959082 NR Description: similar to expressed sequence AA959893
  misc_feature (1)..(22): NCBI GI NO: 23959082 NR Description: similar to expressed sequence AA959893
  misc_feature (1)..(22): NCBI GI NO: 28829467 NR Description: similar to Homo sapiens (Human)
  misc_feature (96)..(204): NCBI GI NO: 28829467 NR Description: similar to Homo sapiens (Human)
MLLRSSDCVAHDLASARQSCKDFVRPEGARRNAQKVSAGSEEGARPNADGIRGCEGTNGAPSNSSKTGEEGGKTNDGDCDVEDATEEEHNENTWVDDGFQYYLALRKWYPGLRPESEFRCFVREQKLVAVSQRDPSAYYPSLPGWSSEVQPKIEAFFNEVIEPQFASNNYTFDVYVRTDGRVKLIDFNPWGGYTLPLLFTWEELEKGRGSELEFRVVMQQGAVRPGLMTAVPYDMLDWGEGSGWDVFLKKADEELDRQI

SEQ ID NO: 25046 - DNA, 1885 bp, Zea mays subsp. mays
  misc_feature (1)..(1885): Ceres Seq. ID no. 13629041
accgagtcgagtccacagtccacaccaccaccgcgaggtccactaaaaaaacaagagcattaccggcaccaatcaatcaggctggcagtggagtgacagcggcggcaacaccacgcccacgcggcgccggagccgaagccgatcccccgatggatctcccgccgctctcccaccaggccctcttcgccggccgtccgatccgccgacgcgcccgccgtccgcgcgctcctggtcgacgccgaggcgtcgggcacctcgttggccgcgctcgccgccgctcagacggacgccggggaaaccgcgctgtacgttgccgcggaggccggaagcgaggaggtcgtgcgcctcctcctcccgctctacgacttcgaggcagccaccgtccgctcacgccttgacctcgacgccttccatgtcgccgccaagcagggccacaccggggttgtgaaagagttcttggggcggtggccagggctttgctcagtctgtgactcttccaacactagtcccctctactctgctgctgtcaaggatcacttggatgtggtaaatgctatactggacactgatgatagctgcataaagattgtgcggaagaatgggaaaacatccctacatactgctgcaagaattggataccatcgtattgtcaaagcactcatagagagagatccaggaattgttccgatcaatgataggaagggacaaactgcacttcacatggctgtgaagggcaaaaatacagatgtagtggaagagttattgatggctgatgtttccattctcaatgtgagggacaagaaaggaaatactgctttgcacatagctacacggaaatggaggccccagatggtacagcttcttcttagctatgaatcacttgaagttaatgctatcaacagtcaaaatgaaacagctatggatttggctgacaaagttccttatggtgagtctaaaacggaaataatagagtggctgacagaagctggtgcaaagaatgccagaaatgttgggaaaattgatgaggcatcagaactgaggagaactgtgagcgatatcaagcacaatgttcaggcacagcttagcgagaatgctaagaccaacaaacgggtgactgggattcgcaaagagttgcagaaactgcatagagaagctatccagaacaccatcaattcagtcaccttggtagcgaccctgatcgcctccattgccttcgtcgccatattcaatctgccaggtcaatacttccaggatgtgaatagtgggggagatattggtgaggctgaaatagccaagcttaccggtttccgtgtcttctgccttctgaacgctactgctctcttcatctccctcgcggtggtcgtggtgcagatcaccttggttgcctgggaaactggtgcccagaagcaagttatcaagatcgtgaataagctcatgtggacggcatgccttagcacgggtgtggcttttatctcgctggcctatgttgtagttggcccgcagcatgcctggatggccttcacggcatcagccatcggagggccgatcatgattggaactttcctgttcctagcctatctgctgttgcgcccacggttcaagttcggcgaagacagacagcgccgcatcaagagggcaagcggcagcaaatccttctcctggtcaatccatgatgggttttcagatctggaagccttctctgatcacgagaagaggatctatgccctgtaggagggtgtaacagtaactactcctgcaagaggcaactgggagagtacaaatggttcatgtatatatttggtttagccgttttagcctagccgctgttagacctttctccccatgtacaatatctaataatgaagagctgcagctattgtaaagc

SEQ ID NO: 25047 - protein, 336 aa, Zea mays subsp. mays
  peptide (1)..(336): Ceres Seq. ID no. 13629042
  misc_feature (1)..(336): NCBI GI NO: 21537142 NR Description: unknown [Arabidopsis thaliana]
  misc_feature (1)..(336): NCBI GI NO: 18379277 NR Description: ankyrin repeat protein family
  misc_feature (1)..(336): NCBI GI NO: 15225141 NR Description: ankyrin repeat protein family
  misc_feature (1)..(336): NCBI GI NO: 15222993 NR Description: ankyrin repeat protein family
  misc_feature (1)..(336): NCBI GI NO: 15220595 NR Description: ankyrin repeat protein family
  misc_feature (1)..(336): NCBI GI NO: 24796797 NR Description: putative ankyrin repeat containing protein
  misc_feature (1)..(336): NCBI GI NO: 34908074 NR Description: P0506B12.26
  misc_feature (1)..(336): NCBI GI NO: 15238604 NR Description: ankyrin repeat protein family
  misc_feature (1)..(336): NCBI GI NO: 11357168 NR Description: ankyrin-like protein - Arabidopsis thaliana
  misc_feature (1)..(336): NCBI GI NO: 30679697 NR Description: ankyrin repeat protein family
MAVKGKNTDVVEELLMADVSILNVRDKKGNTALHIATRKWRPQMVQLLLSYESLEVNAINSQNETAMDLADKVPYGESKTEIIEWLTEAGAKNARNVGKIDEASELRRTVSDIKHNVQAQLSENAKTNKRVTGIRKELQKLHREAIQNTINSVTLVATLIASIAFVAIFNLPGQYFQDVNSGGDIGEAEIAKLTGFRVFCLLNATALFISLAVVVVQITLVAWETGAQKQVIKIVNKLMWTACLSTGVAFISLAYVVVGPQHAWMAFTASAIGGPIMIGTFLFLAYLLLRPRFKFGEDRQRRIKRASGSKSFSWSIHDGFSDLEAFSDHEKRIYAL

SEQ ID NO: 25048 - protein, 321 aa, Zea mays subsp. mays
  peptide (1)..(321): Ceres Seq. ID no. 13629043
  misc_feature (1)..(321): NCBI GI NO: 21537142 NR Description: unknown [Arabidopsis thaliana]
  misc_feature (1)..(321): NCBI GI NO: 18379277 NR Description: ankyrin repeat protein family
  misc_feature (1)..(321): NCBI GI NO: 15225141 NR Description: ankyrin repeat protein family
  misc_feature (1)..(321): NCBI GI NO: 15222993 NR Description: ankyrin repeat protein family
  misc_feature (1)..(321): NCBI GI NO: 15220595 NR Description: ankyrin repeat protein family
  misc_feature (1)..(321): NCBI GI NO: 24796797 NR Description: putative ankyrin repeat containing protein
  misc_feature (1)..(321): NCBI GI NO: 34908074 NR Description: P0506B12.26
  misc_feature (1)..(321): NCBI GI NO: 15238604 NR Description: ankyrin repeat protein family
  misc_feature (1)..(321): NCBI GI NO: 11357168 NR Description: ankyrin-like protein - Arabidopsis thaliana
  misc_feature (1)..(321): NCBI GI NO: 30679697 NR Description: ankyrin repeat protein family
MADVSILNVRDKKGNTALHIATRKWRPQMVQLLLSYESLEVNAINSQNETAMDLADKVPYGESKTEIIEWLTEAGAKNARNVGKIDEASELRRTVSDIKHNVQAQLSENAKTNKRVTGIRKELQKLHREAIQNTINSVTLVATLIASIAFVAIFNLPGQYFQDVNSGGDIGEAEIAKLTGFRVFCLLNATALFISLAVVVVQITLVAWETGAQKQVIKIVNKLMWTACLSTGVAFISLAYVVVGPQHAWMAFTASAIGGPIMIGTFLFLAYLLLRPRFKFGEDRQRRIKRASGSKSFSWSIHDGFSDLEAFSDHEKRIYAL

SEQ ID NO: 25049 - protein, 293 aa, Zea mays subsp. mays
  peptide (1)..(293): Ceres Seq. ID no. 13629044
  misc_feature (1)..(293): NCBI GI NO: 21537142 NR Description: unknown [Arabidopsis thaliana]
  misc_feature (1)..(293): NCBI GI NO: 18379277 NR Description: ankyrin repeat protein family
  misc_feature (1)..(293): NCBI GI NO: 15225141 NR Description: ankyrin repeat protein family
  misc_feature (1)..(293): NCBI GI NO: 15222993 NR Description: ankyrin repeat protein family
  misc_feature (1)..(293): NCBI GI NO: 15220595 NR Description: ankyrin repeat protein family
  misc_feature (1)..(293): NCBI GI NO: 24796797 NR Description: putative ankyrin repeat containing protein
  misc_feature (1)..(293): NCBI GI NO: 34908074 NR Description: P0506B12.26
  misc_feature (1)..(293): NCBI GI NO: 15238604 NR Description: ankyrin repeat protein family
  misc_feature (1)..(293): NCBI GI NO: 11357168 NR Description: ankyrin-like protein - Arabidopsis thaliana
  misc_feature (1)..(293): NCBI GI NO: 30679697 NR Description: ankyrin repeat protein family
MVQLLLSYESLEVNAINSQNETAMDLADKVPYGESKTEIIEWLTEAGAKNARNVGKIDEASELRRTVSDIKHNVQAQLSENAKTNKRVTGIRKELQKLHREAIQNTINSVTLVATLIASIAFVAIFNLPGQYFQDVNSGGDIGEAEIAKLTGFRVFCLLNATALFISLAVVVVQITLVAWETGAQKQVIKIVNKLMWTACLSTGVAFISLAYVVVGPQHAWMAFTASAIGGPIMIGTFLFLAYLLLRPRFKFGEDRQRRIKRASGSKSFSWSIHDGFSDLEAFSDHEKRIYAL

SEQ ID NO: 25050 - DNA, 1519 bp, Zea mays subsp. mays
  misc_feature (1)..(1519): Ceres Seq. ID no. 13577756
gtctcgtttctcccttcctcagctgctggcccccctgcctgcagccattgccccgctcctcgaggtcaaatggcccctgcccccgctctcaccgccacatccgtcctgaagcgatcccacctacccggcgtccactcgttggccggtcgccggcagccggggcggggaccgcgtctcggtgctttctccagcgatcccgccgccccgcgtttcatggcagcaaggatctggagtggttgctaagaggctcctctgggcgagtgcgagtggttccttcgagaaagataacatcggggaggacgtggtgttgccttctcagatagcggtggagaataaagtagatttgttgaagattttgaagagtgccaactcaattattccccatatagtgctggggagtacaattctcgcgctggtgtacccgccttcgttcacatggttcactaccaggtactatgcaccagctttggggttcttgatgtttgctgttggtgtaaactcaagcgccaatgatttcattgaagcaataaaaaggccagatgctattgctgcgggctatatcggacagtttgtcattaagcctttgtttggattcctttttgacactcttgcagttgcagttcttaacctcccagctgctctaggtgctggcataatgttggtttcatgcgtgagcggagcacaactttcaaactacgcaactttcttgacggatccacatatggctcctctcagcattgttatgacgtcattgtcaacagctactgcagtttttgtcaccccaacattatcttactttcttattggccagaaattacctgtagatgtcaaggggatgatgtccagcatcattcaaatagttgttgctccaattgctgccggattgcttctgaatagattccttccaaggctctgtgcagctattcagccatttctcccttcgatgtcggtgtttgtcactgccctgtgtgttggctcaccattggcaataaatatcaaggctgttttgtcgccatttggattaaccatagtgctgctcctttttgcattccacacctcatcttttgtagctggttatcatcttgctggtacttggtttagcaagtcagacgacgtaaaggcactacaaaggacaatatctttcgagacaggaatgcaaagcagccttcttgctcttgctttagcaaataagttcttcccagatccactagtgggtgtgcctccagccatatcggttgtgttgatgtccttaatgggatttgctcttgtcatggtatggtccaagaaaagagaagcctaattttctgaatcaattaagcgctgttgttttctgctcttatttatgtagagtaggcagaattttcatggttcaaatttgaaactcttgtatcgttccttctctcctctgagtgagcttgcaagggctctctctctctctcgctaaattattttccagatttacattttttttttgaatcgtgctggcatgccgccccaagagctgatggagttcaattcc

SEQ ID NO: 25051 - protein, 273 aa, Zea mays subsp. mays
  peptide (1)..(273): Ceres Seq. ID no. 13577757
  misc_feature (1)..(179): Pfam Name: Pfam Description:  Sodium Bile acid symporter family
  misc_feature (1)..(271): NCBI GI NO: 18416020 NR Description: bile acid:sodium symporter family
  misc_feature (1)..(271): NCBI GI NO: 7486890 NR Description: hypothetical protein T12H17
  misc_feature (1)..(272): NCBI GI NO: 18413732 NR Description: bile acid:sodium symporter family
  misc_feature (1)..(253): NCBI GI NO: 7485566 NR Description: hypothetical protein F16J13
  misc_feature (1)..(267): NCBI GI NO: 18404505 NR Description: bile acid:sodium symporter family
  misc_feature (1)..(267): NCBI GI NO: 21554890 NR Description: unknown [Arabidopsis thaliana]
  misc_feature (1)..(255): NCBI GI NO: 9279722 NR Description: contains similarity to transporterprotein~gene_id:MWL2
  misc_feature (1)..(267): NCBI GI NO: 20269901 NR Description: putative sodium-dependent bile acid symporter
  misc_feature (1)..(267): NCBI GI NO: 30683305 NR Description: bile acid:sodium symporter family
  misc_feature (1)..(270): NCBI GI NO: 34911708 NR Description: P0707D10.18
MFAVGVNSSANDFIEAIKRPDAIAAGYIGQFVIKPLFGFLFDTLAVAVLNLPAALGAGIMLVSCVSGAQLSNYATFLTDPHMAPLSIVMTSLSTATAVFVTPTLSYFLIGQKLPVDVKGMMSSIIQIVVAPIAAGLLLNRFLPRLCAAIQPFLPSMSVFVTALCVGSPLAINIKAVLSPFGLTIVLLLFAFHTSSFVAGYHLAGTWFSKSDDVKALQRTISFETGMQSSLLALALANKFFPDPLVGVPPAISVVLMSLMGFALVMVWSKKREA

SEQ ID NO: 25052 - protein, 214 aa, Zea mays subsp. mays
  peptide (1)..(214): Ceres Seq. ID no. 13577758
  misc_feature (1)..(120): Pfam Name: Pfam Description:  Sodium Bile acid symporter family
  misc_feature (1)..(212): NCBI GI NO: 18416020 NR Description: bile acid:sodium symporter family
  misc_feature (1)..(212): NCBI GI NO: 7486890 NR Description: hypothetical protein T12H17
  misc_feature (1)..(213): NCBI GI NO: 18413732 NR Description: bile acid:sodium symporter family
  misc_feature (1)..(194): NCBI GI NO: 7485566 NR Description: hypothetical protein F16J13
  misc_feature (1)..(208): NCBI GI NO: 18404505 NR Description: bile acid:sodium symporter family
  misc_feature (1)..(208): NCBI GI NO: 21554890 NR Description: unknown [Arabidopsis thaliana]
  misc_feature (1)..(196): NCBI GI NO: 9279722 NR Description: contains similarity to transporterprotein~gene_id:MWL2
  misc_feature (1)..(208): NCBI GI NO: 20269901 NR Description: putative sodium-dependent bile acid symporter
  misc_feature (1)..(208): NCBI GI NO: 30683305 NR Description: bile acid:sodium symporter family
  misc_feature (1)..(211): NCBI GI NO: 34911708 NR Description: P0707D10.18
MLVSCVSGAQLSNYATFLTDPHMAPLSIVMTSLSTATAVFVTPTLSYFLIGQKLPVDVKGMMSSIIQIVVAPIAAGLLLNRFLPRLCAAIQPFLPSMSVFVTALCVGSPLAINIKAVLSPFGLTIVLLLFAFHTSSFVAGYHLAGTWFSKSDDVKALQRTISFETGMQSSLLALALANKFFPDPLVGVPPAISVVLMSLMGFALVMVWSKKREA

SEQ ID NO: 25053 - protein, 192 aa, Zea mays subsp. mays
  peptide (1)..(192): Ceres Seq. ID no. 13577759
  misc_feature (1)..(98): Pfam Name: Pfam Description:  Sodium Bile acid symporter family
  misc_feature (1)..(190): NCBI GI NO: 18416020 NR Description: bile acid:sodium symporter family
  misc_feature (1)..(190): NCBI GI NO: 7486890 NR Description: hypothetical protein T12H17
  misc_feature (1)..(191): NCBI GI NO: 18413732 NR Description: bile acid:sodium symporter family
  misc_feature (1)..(172): NCBI GI NO: 7485566 NR Description: hypothetical protein F16J13
  misc_feature (1)..(186): NCBI GI NO: 18404505 NR Description: bile acid:sodium symporter family
  misc_feature (1)..(186): NCBI GI NO: 21554890 NR Description: unknown [Arabidopsis thaliana]
  misc_feature (1)..(174): NCBI GI NO: 9279722 NR Description: contains similarity to transporterprotein~gene_id:MWL2
  misc_feature (1)..(186): NCBI GI NO: 20269901 NR Description: putative sodium-dependent bile acid symporter
  misc_feature (1)..(186): NCBI GI NO: 30683305 NR Description: bile acid:sodium symporter family
  misc_feature (1)..(189): NCBI GI NO: 34911708 NR Description: P0707D10.18
MAPLSIVMTSLSTATAVFVTPTLSYFLIGQKLPVDVKGMMSSIIQIVVAPIAAGLLLNRFLPRLCAAIQPFLPSMSVFVTALCVGSPLAINIKAVLSPFGLTIVLLLFAFHTSSFVAGYHLAGTWFSKSDDVKALQRTISFETGMQSSLLALALANKFFPDPLVGVPPAISVVLMSLMGFALVMVWSKKREA

SEQ ID NO: 25054 - DNA, 1432 bp, Zea mays subsp. mays
  misc_feature (1)..(1432): Ceres Seq. ID no. 12406172
  misc_feature (1035)..(1035): n is a, c, t, g, unknown, or other
  misc_feature (274)..(274): n is a, c, t, g, unknown, or other
  misc_feature (276)..(276): n is a, c, t, g, unknown, or other
  misc_feature (342)..(342): n is a, c, t, g, unknown, or other
  misc_feature (991)..(991): n is a, c, t, g, unknown, or other
  misc_feature (364)..(364): n is a, c, t, g, unknown, or other
  misc_feature (425)..(425): n is a, c, t, g, unknown, or other
  misc_feature (296)..(296): n is a, c, t, g, unknown, or other
atgtccacggtcaccgtggcgagggcagccccgccgagcgttagtcacagttgttgcctgcctaccatgcggctctaactcgatccgtgcagcagacgccgagtcgcggcaaggagtagctaggaactaggaaggaggaggcagggaaaggccaggccatggcgctcgaagctgtggtgttcccgaagagcacccggggtgtacggcggtcaaggcgcgcccggcgtcgctgggctgcggcttccacaccgaggagctcgaggtcgaggacaangncggcgtggttctgcaagganaagccgccgacgcgctgccgccgcccggtggtgccgccaccacgtnggactgggacgcggtgctctgnccgtgctccactacaccagctgcaggcgccgtggaggagtgctgggacgtgcatgcagcancagcatcagctcctgtccgtgtccccgccgccctcgtccgccgtcgcagcgtcgtcgtctgggcgccgcaaggctgccgcgtcggaggcggcgcggcgacggcggcgacgccccaaggcggtgaggaacacggacgagatggagagccagcgccgcaaccacattgccgtggagcgcaaccggcggcggcagatgaacgagtacctctccgtgctccgctccgccatgccgccttcctacacgcagcggggtgaccaggcgtcgatcgtggctggtgccatcaacttcgtcaaggagctggagcaactgctgcagtcgctggaggcgcagaagcggcgacagaggtgcaccgagccattggcggcgtcgtcgttcgccggcttcttcatcttccctcagtactccaccaccgccgcgacgagtggtgcggttggctctagtagcgacagcgctggctccggcggcgatcagagtggcggcggcgggggagcgcggcgaggcgtggccgacatcgaggtgtccctggcggagagccacgccaacgtgaaggtgctcgcggcgcggcnggccgcggcagctgctgaggatggtggtggcgctgcagtgcctnggccctcaccgtgctcccacctcaccgtgaccaccaccgccgaccacctggccttgtactccctcagcctcaagatgggaggacgagtgccggctgtcgccgtcggtcgacgacatcgccgccgcggtgaacgagatactcgacgagtgcgcccgcgggggggcccactgatgattagccgcttagcctaatatatatcttagcgagtgccatgtattgttgtgacgtacgtcgatttgatcctagtacacggataacactggcaagctagcgtggcagctcgctcgcgccactgtcaggcaggcggtaccactaccactccatatgtttgcgtgcaagtaaacatgtaccgattggaccagcttacgtactactacgactctttttttgcagcgcc

SEQ ID NO: 25055 - protein, 355 aa, Zea mays subsp. mays
  peptide (1)..(355): Ceres Seq. ID no. 12406173
  misc_feature (139)..(190): Pfam Name: Pfam Description:  Helix-loop-helix DNA-binding domain
  misc_feature (106)..(318): NCBI GI NO: 34902426 NR Description: Unknown protein
  misc_feature (101)..(318): NCBI GI NO: 37533680 NR Description: putative helix-loop-helix DNA-binding protein
  misc_feature (214)..(324): NCBI GI NO: 38346722 NR Description: OSJNBa0086O06.20
  misc_feature (113)..(201): NCBI GI NO: 38346722 NR Description: OSJNBa0086O06.20
  misc_feature (115)..(318): NCBI GI NO: 15234187 NR Description: bHLH protein; protein id: At4g01460
  misc_feature (99)..(318): NCBI GI NO: 15218391 NR Description: bHLH protein; protein id: At1g72210.1
  misc_feature (121)..(318): NCBI GI NO: 18395124 NR Description: expressed protein; protein id: At1g22490
  misc_feature (95)..(318): NCBI GI NO: 15238424 NR Description: bHLH protein; protein id: At5g65320
  misc_feature (121)..(318): NCBI GI NO: 21593808 NR Description: unknown [Arabidopsis thaliana]
  misc_feature (98)..(318): NCBI GI NO: 28558779 NR Description: helix-loop-helix-like protein [Cucumis melo]
  misc_feature (39)..(39): Xaa is any aa, unknown or other
  misc_feature (40)..(40): Xaa is any aa, unknown or other
  misc_feature (46)..(46): Xaa is any aa, unknown or other
  misc_feature (62)..(62): Xaa is any aa, unknown or other
  misc_feature (69)..(69): Xaa is any aa, unknown or other
  misc_feature (89)..(89): Xaa is any aa, unknown or other
  misc_feature (278)..(278): Xaa is any aa, unknown or other
  misc_feature (293)..(293): Xaa is any aa, unknown or other
MALEAVVFPKSTRGVRRSRRARRRWAAASTPRSSRSRTXXAWFCKXKPPTRCRRPVVPPPRXTGTRCSXRAPLHQLQAPWRSAGTCMQXQHQLLSVSPPPSSAVAASSSGRRKAAASEAARRRRRRPKAVRNTDEMESQRRNHIAVERNRRRQMNEYLSVLRSAMPPSYTQRGDQASIVAGAINFVKELEQLLQSLEAQKRRQRCTEPLAASSFAGFFIFPQYSTTAATSGAVGSSSDSAGSGGDQSGGGGGARRGVADIEVSLAESHANVKVLAARXAAAAAEDGGGAAVPXPSPCSHLTVTTTADHLALYSLSLKMGGRVPAVAVGRRHRRRGERDTRRVRPRGGPLMISRLA

SEQ ID NO: 25056 - protein, 269 aa, Zea mays subsp. mays
  peptide (1)..(269): Ceres Seq. ID no. 12406174
  misc_feature (53)..(104): Pfam Name: Pfam Description:  Helix-loop-helix DNA-binding domain
  misc_feature (20)..(232): NCBI GI NO: 34902426 NR Description: Unknown protein
  misc_feature (15)..(232): NCBI GI NO: 37533680 NR Description: putative helix-loop-helix DNA-binding protein
  misc_feature (128)..(238): NCBI GI NO: 38346722 NR Description: OSJNBa0086O06.20
  misc_feature (27)..(115): NCBI GI NO: 38346722 NR Description: OSJNBa0086O06.20
  misc_feature (29)..(232): NCBI GI NO: 15234187 NR Description: bHLH protein; protein id: At4g01460
  misc_feature (13)..(232): NCBI GI NO: 15218391 NR Description: bHLH protein; protein id: At1g72210.1
  misc_feature (35)..(232): NCBI GI NO: 18395124 NR Description: expressed protein; protein id: At1g22490
  misc_feature (9)..(232): NCBI GI NO: 15238424 NR Description: bHLH protein; protein id: At5g65320
  misc_feature (35)..(232): NCBI GI NO: 21593808 NR Description: unknown [Arabidopsis thaliana]
  misc_feature (12)..(232): NCBI GI NO: 28558779 NR Description: helix-loop-helix-like protein [Cucumis melo]
  misc_feature (3)..(3): Xaa is any aa, unknown or other
  misc_feature (192)..(192): Xaa is any aa, unknown or other
  misc_feature (207)..(207): Xaa is any aa, unknown or other
MQXQHQLLSVSPPPSSAVAASSSGRRKAAASEAARRRRRRPKAVRNTDEMESQRRNHIAVERNRRRQMNEYLSVLRSAMPPSYTQRGDQASIVAGAINFVKELEQLLQSLEAQKRRQRCTEPLAASSFAGFFIFPQYSTTAATSGAVGSSSDSAGSGGDQSGGGGGARRGVADIEVSLAESHANVKVLAARXAAAAAEDGGGAAVPXPSPCSHLTVTTTADHLALYSLSLKMGGRVPAVAVGRRHRRRGERDTRRVRPRGGPLMISRLA

SEQ ID NO: 25057 - protein, 220 aa, Zea mays subsp. mays
  peptide (1)..(220): Ceres Seq. ID no. 12406175
  misc_feature (4)..(55): Pfam Name: Pfam Description:  Helix-loop-helix DNA-binding domain
  misc_feature (1)..(183): NCBI GI NO: 34902426 NR Description: Unknown protein
  misc_feature (1)..(183): NCBI GI NO: 37533680 NR Description: putative helix-loop-helix DNA-binding protein
  misc_feature (79)..(189): NCBI GI NO: 38346722 NR Description: OSJNBa0086O06.20
  misc_feature (1)..(66): NCBI GI NO: 38346722 NR Description: OSJNBa0086O06.20
  misc_feature (1)..(183): NCBI GI NO: 15234187 NR Description: bHLH protein; protein id: At4g01460
  misc_feature (1)..(183): NCBI GI NO: 15218391 NR Description: bHLH protein; protein id: At1g72210.1
  misc_feature (1)..(183): NCBI GI NO: 18395124 NR Description: expressed protein; protein id: At1g22490
  misc_feature (1)..(183): NCBI GI NO: 15238424 NR Description: bHLH protein; protein id: At5g65320
  misc_feature (1)..(183): NCBI GI NO: 21593808 NR Description: unknown [Arabidopsis thaliana]
  misc_feature (1)..(183): NCBI GI NO: 28558779 NR Description: helix-loop-helix-like protein [Cucumis melo]
  misc_feature (143)..(143): Xaa is any aa, unknown or other
  misc_feature (158)..(158): Xaa is any aa, unknown or other
MESQRRNHIAVERNRRRQMNEYLSVLRSAMPPSYTQRGDQASIVAGAINFVKELEQLLQSLEAQKRRQRCTEPLAASSFAGFFIFPQYSTTAATSGAVGSSSDSAGSGGDQSGGGGGARRGVADIEVSLAESHANVKVLAARXAAAAAEDGGGAAVPXPSPCSHLTVTTTADHLALYSLSLKMGGRVPAVAVGRRHRRRGERDTRRVRPRGGPLMISRLA

SEQ ID NO: 25058 - DNA, 996 bp, Zea mays subsp. mays
  misc_feature (1)..(996): Ceres Seq. ID no. 12413160
aatcaaaaaccccgaaggttcggactgaatgaagcgaaagcccaaatccccttccccttccccctcttcgtctccgtcggcggcgtcggaccgaacccgatcccgcagccctaactaaccctaggaggcaggcggcggcggggatggtgtactacgcgctgttggtgggcgcggagctggatggcctcaccaacctgcagcccccgccacggctgcgacgaccccagcttcccctactacctcaagctcaagtgcgagaactgcggggaggtcaccgccaagtccacctacgtcaccctcagcgagcaagtcgacctgcccagaggacacggcgccgctcacctcgtccagaagtgcaagctttgtgggagagatggaacaattgtgatgattcctggtcaggggacaccacttactattgagcagagccagaaagaggagaagacttgtttgatggtgtttgactgcagaggctatgaacctgttgagttttcctttggcactggctggaaggctgaatctgtgcatgggactccttttgaaattgactgctctgaaggtgaattttctgagtatgatgagaagggagaatgccccgttgagctaggcaagctgcagtcaacattcaaagtggtgaagaagcatgagaagggtgggaagactagatttgtctagatcgagtgacttggaatctggcagatattggagttggcggtgtgtataaatggtagatttgggctgaaggtcatgcgtgatccgacctcctttttcttctatctgttgattctgtggatgcagtgaaccatgcgaagctttcggtgatagtgtccacaggggcattaccctgtaccgaaactgatctttataacttaccaccaatgctcgaacatgttgctggttgctggtatttttagcactgttctctctggctaatgggtctgaagacatctcaaggggatatgtggtgcaatctgagttctttaaagggcatcgtct

SEQ ID NO: 25059 - protein, 164 aa, Zea mays subsp. mays
  peptide (1)..(164): Ceres Seq. ID no. 12413161
  misc_feature (1)..(152): Pfam Name: DUF866 Pfam Description: Eukaryotic protein of unknown function
  misc_feature (1)..(162): NCBI GI NO: 34914208 NR Description: OSJNBb0049O23.17
  misc_feature (8)..(153): NCBI GI NO: 18418118 NR Description: putative protein; protein id: At4g32930
  misc_feature (8)..(153): NCBI GI NO: 7486215 NR Description: hypothetical protein F26P21
  misc_feature (13)..(157): NCBI GI NO: 7503539 NR Description: hypothetical protein F46B6
  misc_feature (21)..(157): NCBI GI NO: 17561054 NR Description: Putative protein of eukaryotic origin
  misc_feature (21)..(157): NCBI GI NO: 39594673 NR Description: Hypothetical protein CBG19371
  misc_feature (17)..(153): NCBI GI NO: 8923541 NR Description: hypothetical protein FLJ20580 [Homo sapiens]
  misc_feature (17)..(153): NCBI GI NO: 27715611 NR Description: similar to hypothetical protein FLJ20580
  misc_feature (17)..(153): NCBI GI NO: 21539639 NR Description: RIKEN cDNA 0610037L13 [Mus musculus]
  misc_feature (17)..(153): NCBI GI NO: 26328397 NR Description: unnamed protein product [Mus musculus]
MASPTCSPRHGCDDPSFPYYLKLKCENCGEVTAKSTYVTLSEQVDLPRGHGAAHLVQKCKLCGRDGTIVMIPGQGTPLTIEQSQKEEKTCLMVFDCRGYEPVEFSFGTGWKAESVHGTPFEIDCSEGEFSEYDEKGECPVELGKLQSTFKVVKKHEKGGKTRFV

SEQ ID NO: 25060 - protein, 95 aa, Zea mays subsp. mays
  peptide (1)..(95): Ceres Seq. ID no. 12413162
  misc_feature (1)..(83): Pfam Name: DUF866 Pfam Description: Eukaryotic protein of unknown function
  misc_feature (1)..(93): NCBI GI NO: 34914208 NR Description: OSJNBb0049O23.17
  misc_feature (1)..(84): NCBI GI NO: 18418118 NR Description: putative protein; protein id: At4g32930
  misc_feature (1)..(84): NCBI GI NO: 7486215 NR Description: hypothetical protein F26P21
  misc_feature (1)..(88): NCBI GI NO: 7503539 NR Description: hypothetical protein F46B6
  misc_feature (1)..(88): NCBI GI NO: 17561054 NR Description: Putative protein of eukaryotic origin
  misc_feature (1)..(88): NCBI GI NO: 39594673 NR Description: Hypothetical protein CBG19371
  misc_feature (1)..(84): NCBI GI NO: 8923541 NR Description: hypothetical protein FLJ20580 [Homo sapiens]
  misc_feature (1)..(84): NCBI GI NO: 27715611 NR Description: similar to hypothetical protein FLJ20580
  misc_feature (1)..(84): NCBI GI NO: 21539639 NR Description: RIKEN cDNA 0610037L13 [Mus musculus]
  misc_feature (1)..(84): NCBI GI NO: 26328397 NR Description: unnamed protein product [Mus musculus]
MIPGQGTPLTIEQSQKEEKTCLMVFDCRGYEPVEFSFGTGWKAESVHGTPFEIDCSEGEFSEYDEKGECPVELGKLQSTFKVVKKHEKGGKTRFV

SEQ ID NO: 25061 - protein, 92 aa, Zea mays subsp. mays
  peptide (1)..(92): Ceres Seq. ID no. 12413163
MVYYALLVGAELDGLTNLQPPPRLRRPQLPLLPQAQVRELRGGHRQVHLRHPQRASRPAQRTRRRSPRPEVQALWERWNNCDDSWSGDTTYY

SEQ ID NO: 25062 - DNA, 1277 bp, Zea mays subsp. mays
  misc_feature (1)..(1277): Ceres Seq. ID no. 12406397
actcatcaaacccgcccttacagtcttatccatcgcggcctcgccgtccagcagctagctacgacctagctctgggcctctggccctgtgcctcgcccgagctgcagctccactccggtgcaccatggccgtcctgacgaaggtgcttctccgtctcttcttcaccactggcggcctcatcgtcttcctgttgtgtcccgcgtcctgccttgctcgtcctcctcattccagcagcaactccaactactactgcgactggtgccctcgccgttccaccgcctcccccgacctcgacgcgtcgttgctgcgttcttgtggaactagtagagacggcgacgacggtggcttcggctgcgggtacggggctgcggagcagctggacggaggtggagctccccacgtcgctgccgcgggcgccgactccttcagcgctggcgctggctgcggcgcctgctaccagttgaggtgcagagaccggagggtgtgcggcgacggcggcgtcaaggtcgtcgtggtagccggcttggccaaccggacggggttcttgctcaccagggaggccttcgctgcgatgatggccaggccgcgcgtgtcgtccaatgaccaactgctgcccggcttgggtggcaatgttgttgaggtcgacttcaggaggataccttgcgagtacaagaacagaaacctgtcggtacgcatcgacgaggaagggagccggcacccggcgcacctggccatcaccttcctgtaccagggcgggcagacggacatcgcggccgtcgagctctcgcacgcgcacgcgcagccgccgtcgtggcggcccatggcgcccgtgggcaggcgcggcatcgtgacgtggcgcacctcaagcgcgccggcggggccgctgcagctccgcctcgtcgtcacggccggcgtcggcggcaagtggctgcgggccggcggggacgtgctgccggcggactggcggcctgggcaggtgcacgacacggggctccggatccgcgacgtcgccctgagctcctgcgcccgctcctgccgcggcgccgctacagccggcgccagcgaggagctcaggtagtagagtagattagatgtaggcatggcatacaatggcattgggctggaggcgagcgagattagcttgctgcttgagtgcccatgaaggatgctcgtgctcgtccattgaggaaaattaaaagcaaaccagcagagagctgatctctgatgatctgacgcagtccatggaaatggaagcaaattaagttggtttcttgctg

SEQ ID NO: 25063 - protein, 317 aa, Zea mays subsp. mays
  peptide (1)..(317): Ceres Seq. ID no. 12406398
  misc_feature (187)..(277): Pfam Name: Pfam Description:  Pollen allergen
  misc_feature (77)..(300): NCBI GI NO: 21654743 NR Description: expansin-like protein 1 [Oryza sativa]
  misc_feature (43)..(300): NCBI GI NO: 20502989 NR Description: Putative pollen allergen
  misc_feature (86)..(300): NCBI GI NO: 25136297 NR Description: expansin-like protein
  misc_feature (73)..(300): NCBI GI NO: 34901594 NR Description: P0571D04.11
  misc_feature (57)..(300): NCBI GI NO: 37536544 NR Description: putative pollen allergen
  misc_feature (37)..(300): NCBI GI NO: 15231303 NR Description: putative protein; protein id: At3g45970
  misc_feature (37)..(300): NCBI GI NO: 21555265 NR Description: Expansin-like 1 precursor
  misc_feature (77)..(301): NCBI GI NO: 33111959 NR Description: expansin-like protein [Quercus robur]
  misc_feature (37)..(300): NCBI GI NO: 15233841 NR Description: putative pollen allergen; protein id: At4g38400
  misc_feature (37)..(300): NCBI GI NO: 20138389 NR Description: Expansin-like 3 precursor
MAVLTKVLLRLFFTTGGLIVFLLCPASCLARPPHSSSNSNYYCDWCPRRSTASPDLDASLLRSCGTSRDGDDGGFGCGYGAAEQLDGGGAPHVAAAGADSFSAGAGCGACYQLRCRDRRVCGDGGVKVVVVAGLANRTGFLLTREAFAAMMARPRVSSNDQLLPGLGGNVVEVDFRRIPCEYKNRNLSVRIDEEGSRHPAHLAITFLYQGGQTDIAAVELSHAHAQPPSWRPMAPVGRRGIVTWRTSSAPAGPLQLRLVVTAGVGGKWLRAGGDVLPADWRPGQVHDTGLRIRDVALSSCARSCRGAATAGASEELR

SEQ ID NO: 25064 - protein, 168 aa, Zea mays subsp. mays
  peptide (1)..(168): Ceres Seq. ID no. 12406399
  misc_feature (38)..(128): Pfam Name: Pfam Description:  Pollen allergen
  misc_feature (1)..(151): NCBI GI NO: 21654743 NR Description: expansin-like protein 1 [Oryza sativa]
  misc_feature (1)..(151): NCBI GI NO: 20502989 NR Description: Putative pollen allergen
  misc_feature (1)..(151): NCBI GI NO: 25136297 NR Description: expansin-like protein
  misc_feature (1)..(151): NCBI GI NO: 34901594 NR Description: P0571D04.11
  misc_feature (1)..(151): NCBI GI NO: 37536544 NR Description: putative pollen allergen
  misc_feature (1)..(151): NCBI GI NO: 15231303 NR Description: putative protein; protein id: At3g45970
  misc_feature (1)..(151): NCBI GI NO: 21555265 NR Description: Expansin-like 1 precursor
  misc_feature (1)..(152): NCBI GI NO: 33111959 NR Description: expansin-like protein [Quercus robur]
  misc_feature (1)..(151): NCBI GI NO: 15233841 NR Description: putative pollen allergen; protein id: At4g38400
  misc_feature (1)..(151): NCBI GI NO: 20138389 NR Description: Expansin-like 3 precursor
MMARPRVSSNDQLLPGLGGNVVEVDFRRIPCEYKNRNLSVRIDEEGSRHPAHLAITFLYQGGQTDIAAVELSHAHAQPPSWRPMAPVGRRGIVTWRTSSAPAGPLQLRLVVTAGVGGKWLRAGGDVLPADWRPGQVHDTGLRIRDVALSSCARSCRGAATAGASEELR

SEQ ID NO: 25065 - protein, 167 aa, Zea mays subsp. mays
  peptide (1)..(167): Ceres Seq. ID no. 12406400
  misc_feature (37)..(127): Pfam Name: Pfam Description:  Pollen allergen
  misc_feature (1)..(150): NCBI GI NO: 21654743 NR Description: expansin-like protein 1 [Oryza sativa]
  misc_feature (1)..(150): NCBI GI NO: 20502989 NR Description: Putative pollen allergen
  misc_feature (1)..(150): NCBI GI NO: 25136297 NR Description: expansin-like protein
  misc_feature (1)..(150): NCBI GI NO: 34901594 NR Description: P0571D04.11
  misc_feature (1)..(150): NCBI GI NO: 37536544 NR Description: putative pollen allergen
  misc_feature (1)..(150): NCBI GI NO: 15231303 NR Description: putative protein; protein id: At3g45970
  misc_feature (1)..(150): NCBI GI NO: 21555265 NR Description: Expansin-like 1 precursor
  misc_feature (1)..(151): NCBI GI NO: 33111959 NR Description: expansin-like protein [Quercus robur]
  misc_feature (1)..(150): NCBI GI NO: 15233841 NR Description: putative pollen allergen; protein id: At4g38400
  misc_feature (1)..(150): NCBI GI NO: 20138389 NR Description: Expansin-like 3 precursor
MARPRVSSNDQLLPGLGGNVVEVDFRRIPCEYKNRNLSVRIDEEGSRHPAHLAITFLYQGGQTDIAAVELSHAHAQPPSWRPMAPVGRRGIVTWRTSSAPAGPLQLRLVVTAGVGGKWLRAGGDVLPADWRPGQVHDTGLRIRDVALSSCARSCRGAATAGASEELR

SEQ ID NO: 25066 - DNA, 1057 bp, Zea mays subsp. mays
  misc_feature (1)..(1057): Ceres Seq. ID no. 12410273
catgcaaatttagtcgtggccagcgtcgctgtctttttttcttccgttacctctccaggcagctcctctccctctctgtcgccgacgactacgccaggtcttcttcggggcccaggtcgctgccgcctacatcaggggccccaagttttcctaggacccctcgccggcgacgagcaccaccagcttggttcactcccaacaaaatgtcagccaatgtgggtgaatcaactagcggtgtcagcagcagcgatgcagctggggggagctttgagtgcaacatatgcttcgagctgcctcaggagccaatagtgactctctgtggccacctcttctgctggccgtgcctttaccggtggctgcacattcacgcacactcgccagagtgcccagtgtgcaaggccctcgtggaggaggacaagctcgtccccctttatgggcgtggcaaggatcgcgtcgacccgaggtcgaagaacatgcccgagggcgagattcctcaccgcccaacgggccagaggcctgccacagccccccgggcccatgctaacagcaactttgccaatgccaatgccaatgccaatccatggttcccgggcgcaggagtccctctggcaaatgcgcgatgggggaactacgcattctcagctgctttcgggggactgttccctatgcttagcttccaagttcatgggtttccagatgccgccgcttacgcgcagcctgctgggttccactatgaatacgggcatgggcatgggcatgggttccaccatggcgggcatatgggacaagcacaagcccatggcgtccaccgacaggcaccgttggggcaacaacagcagcaggcagatatttatctgaaggccctgctcttcatgattgtaattctagtgctcgcaagcctcctcgcgttttaaagcttgtttggcaacgtctcctcgtcatggtttggaaattgtaattctggggagtgctcctcctggcatttcagtgctgttggcatggcagtttgacattgtgatggcgtattggcctatgagaatcgccagaatatttcact

SEQ ID NO: 25067 - protein, 303 aa, Zea mays subsp. mays
  peptide (1)..(303): Ceres Seq. ID no. 12410274
  misc_feature (91)..(131): Pfam Name: RING finger Pfam Description: Zinc finger, C3HC4 type
  misc_feature (68)..(303): NCBI GI NO: 29150403 NR Description: unknown protein
  misc_feature (68)..(303): NCBI GI NO: 34909840 NR Description: P0403C05.28
  misc_feature (70)..(300): NCBI GI NO: 18394721 NR Description: expressed protein; protein id: At1g19310
  misc_feature (73)..(301): NCBI GI NO: 15224062 NR Description: putative RING zinc finger protein
  misc_feature (73)..(301): NCBI GI NO: 21553849 NR Description: putative RING zinc finger protein
  misc_feature (80)..(190): NCBI GI NO: 15222064 NR Description: putative RING zinc finger protein
  misc_feature (74)..(301): NCBI GI NO: 17554742 NR Description: Ring finger protein RNF-5 (24.9 kD) (rnf-5)
  misc_feature (80)..(229): NCBI GI NO: 21912604 NR Description: putative ubiquitin ligase [Taenia solium]
  misc_feature (76)..(194): NCBI GI NO: 22795037 NR Description: putative RING protein [Populus x canescens]
  misc_feature (74)..(297): NCBI GI NO: 39581891 NR Description: Hypothetical protein CBG20152
CKFSRGQRRCLFFFRYLSRQLLSLSVADDYARSSSGPRSLPPTSGAPSFPRTPRRRRAPPAWFTPNKMSANVGESTSGVSSSDAAGGSFECNICFELPQEPIVTLCGHLFCWPCLYRWLHIHAHSPECPVCKALVEEDKLVPLYGRGKDRVDPRSKNMPEGEIPHRPTGQRPATAPRAHANSNFANANANANPWFPGAGVPLANARWGNYAFSAAFGGLFPMLSFQVHGFPDAAAYAQPAGFHYEYGHGHGHGFHHGGHMGQAQAHGVHRQAPLGQQQQQADIYLKALLFMIVILVLASLLAF

SEQ ID NO: 25068 - protein, 236 aa, Zea mays subsp. mays
  peptide (1)..(236): Ceres Seq. ID no. 12410275
  misc_feature (24)..(64): Pfam Name: RING finger Pfam Description: Zinc finger, C3HC4 type
  misc_feature (1)..(236): NCBI GI NO: 29150403 NR Description: unknown protein
  misc_feature (1)..(236): NCBI GI NO: 34909840 NR Description: P0403C05.28
  misc_feature (3)..(233): NCBI GI NO: 18394721 NR Description: expressed protein; protein id: At1g19310
  misc_feature (6)..(234): NCBI GI NO: 15224062 NR Description: putative RING zinc finger protein
  misc_feature (6)..(234): NCBI GI NO: 21553849 NR Description: putative RING zinc finger protein
  misc_feature (13)..(123): NCBI GI NO: 15222064 NR Description: putative RING zinc finger protein
  misc_feature (7)..(234): NCBI GI NO: 17554742 NR Description: Ring finger protein RNF-5 (24.9 kD) (rnf-5)
  misc_feature (13)..(162): NCBI GI NO: 21912604 NR Description: putative ubiquitin ligase [Taenia solium]
  misc_feature (9)..(127): NCBI GI NO: 22795037 NR Description: putative RING protein [Populus x canescens]
  misc_feature (7)..(230): NCBI GI NO: 39581891 NR Description: Hypothetical protein CBG20152
MSANVGESTSGVSSSDAAGGSFECNICFELPQEPIVTLCGHLFCWPCLYRWLHIHAHSPECPVCKALVEEDKLVPLYGRGKDRVDPRSKNMPEGEIPHRPTGQRPATAPRAHANSNFANANANANPWFPGAGVPLANARWGNYAFSAAFGGLFPMLSFQVHGFPDAAAYAQPAGFHYEYGHGHGHGFHHGGHMGQAQAHGVHRQAPLGQQQQQADIYLKALLFMIVILVLASLLAF

SEQ ID NO: 25069 - DNA, 1981 bp, Zea mays subsp. mays
  misc_feature (1)..(1981): Ceres Seq. ID no. 12410269
atcgaccccatcgcgttgccggatcgagctcagctctatctcgaaccttggttcgccgcacggcaccagaagcacggccgtgttctcatcccctccacacgtttccgcctcccgatccacgtccgccgttagccgcggccgacacagctcctcctcctcctcgcagctcttctccagctctcggaggcccgaggtttcatcgacccgcgctccttcatcctcgacacctcactccggcggcgcgggtccgcagtgctgcacatcgcgagccgcgcggcacagccgcacttgttgtccttcgtgcgtggggtgcggttcgacgcgggcggcgggatggcggcgagcgcgcgggacagcaccgatgcagcggagcgagttgtggatgaccacgacggctgggcgtcggacgccgagatggacgtggagatggatgtggtggaaggcgagttccacgaccgcgatgccgaccggagggacggcggcgcggatggtgatgatgagtacttgctgctcactaggataagggacacatcagcagctgaagcaagggcaggaaaggatatacaaggtataccatgggagaggatacacatagccaggcaagattaccgaaaagctaggttggaacagtataagaactatgaaaatttccctcaatcaggagagctcatggataagctgtgcaagcaagtggagaagagcagcaagtattatgaatttcagcacaacactagatcagtgaagccatcaattctccattttcaggaatttgttatgggcaacatcgaagcatgatgtctattttatgtcaaattccacagtaagccactggtcatcattgtctcacaaattatcagaggttcttgacttctctgggcatgttgctccagcggagaagtatcctggcagtttactagaaggtttctctggtgttcaagttagcacacttgctgtgaatgagggtttggtggtagctggtggttttcaaggagaactaattggcaaagatgtggaaggctgtagtgtaaaattctgtatgaggacaactttgagtgacaatgccataacaaatgccatagatatacacagatcgataagtggaagcctgcacattacagtatctaacaacgattgtggtgttcgtgaatatgatatggagagatatcagctcgtgaaccactaccgatataactggccggttaatcacacatccgtgagcccagataagaaacttttggctgtggttggagatgatcgagatgctcttcttgtggattcacgaaatggaaaggtaacctctaccctagttggccatctggactactcatttgctacggcatggcacccggacagccggacattcgcgaccgggaaccaggacaaaacctgccgcatctgggacacccgcaacttgtcgacctcacttgcagtactgcggggcaacatcggcgcgatccggtgcatccgctactcctccgacgggcggttcctggtgttctcggagcctgccgacttcgtccatgtgtacagtgtggctgcggactacaagaaacggcaggagattgacttctttggtgaggtgtccgggatcacgctcagcccggacgatgagtccctgttcatcggagtgtgcgaccgcgtctatgccagcctgttgcagtacaggatgatccgcggattcgactatcttgactcatacgtgtgaagaactgagctttggtgactggtgttgtgctaggtgctggctgaaggttctgatgcgcggttcagggaatatatctgcctgctcttagttcatggcgaatgatggttcggtgggactcgacgccagcgaatctgccgtgtaaatagtttagaatttgaagcgtagtgtagtgctgtggaccaatgctgtctctgaacatacatatgatcagagtaatgtgtgtttgcgctgttagtttcagactccggaatacaaatagttttggaccaaattcct

SEQ ID NO: 25070 - protein, 299 aa, Zea mays subsp. mays
  peptide (1)..(299): Ceres Seq. ID no. 12410270
  misc_feature (1)..(162): NCBI GI NO: 8096398 NR Description: ESTs AU082471
  misc_feature (168)..(299): NCBI GI NO: 8096398 NR Description: ESTs AU082471
  misc_feature (1)..(299): NCBI GI NO: 27948448 NR Description: GAMYB-binding protein
  misc_feature (1)..(297): NCBI GI NO: 30696707 NR Description: WD-40 repeat protein family [Arabidopsis thaliana]
  misc_feature (1)..(297): NCBI GI NO: 18423837 NR Description: WD-repeat protein-like; protein id: At5g56190
  misc_feature (1)..(297): NCBI GI NO: 21536732 NR Description: WD-repeat protein-like [Arabidopsis thaliana]
  misc_feature (1)..(297): NCBI GI NO: 9758639 NR Description: WD-repeat protein-like [Arabidopsis thaliana]
  misc_feature (1)..(299): NCBI GI NO: 18399975 NR Description: expressed protein; protein id: At3g13340
  misc_feature (1)..(299): NCBI GI NO: 18405485 NR Description: expressed protein; protein id: At1g55680
  misc_feature (1)..(299): NCBI GI NO: 9294540 NR Description: WD domain protein-like [Arabidopsis thaliana]
MSNSTVSHWSSLSHKLSEVLDFSGHVAPAEKYPGSLLEGFSGVQVSTLAVNEGLVVAGGFQGELIGKDVEGCSVKFCMRTTLSDNAITNAIDIHRSISGSLHITVSNNDCGVREYDMERYQLVNHYRYNWPVNHTSVSPDKKLLAVVGDDRDALLVDSRNGKVTSTLVGHLDYSFATAWHPDSRTFATGNQDKTCRIWDTRNLSTSLAVLRGNIGAIRCIRYSSDGRFLVFSEPADFVHVYSVAADYKKRQEIDFFGEVSGITLSPDDESLFIGVCDRVYASLLQYRMIRGFDYLDSYV

SEQ ID NO: 25071 - protein, 222 aa, Zea mays subsp. mays
  peptide (1)..(222): Ceres Seq. ID no. 12410271
  misc_feature (1)..(85): NCBI GI NO: 8096398 NR Description: ESTs AU082471
  misc_feature (91)..(222): NCBI GI NO: 8096398 NR Description: ESTs AU082471
  misc_feature (1)..(222): NCBI GI NO: 27948448 NR Description: GAMYB-binding protein
  misc_feature (1)..(220): NCBI GI NO: 30696707 NR Description: WD-40 repeat protein family [Arabidopsis thaliana]
  misc_feature (1)..(220): NCBI GI NO: 18423837 NR Description: WD-repeat protein-like; protein id: At5g56190
  misc_feature (1)..(220): NCBI GI NO: 21536732 NR Description: WD-repeat protein-like [Arabidopsis thaliana]
  misc_feature (1)..(220): NCBI GI NO: 9758639 NR Description: WD-repeat protein-like [Arabidopsis thaliana]
  misc_feature (1)..(222): NCBI GI NO: 18399975 NR Description: expressed protein; protein id: At3g13340
  misc_feature (1)..(222): NCBI GI NO: 18405485 NR Description: expressed protein; protein id: At1g55680
  misc_feature (1)..(222): NCBI GI NO: 9294540 NR Description: WD domain protein-like [Arabidopsis thaliana]
MRTTLSDNAITNAIDIHRSISGSLHITVSNNDCGVREYDMERYQLVNHYRYNWPVNHTSVSPDKKLLAVVGDDRDALLVDSRNGKVTSTLVGHLDYSFATAWHPDSRTFATGNQDKTCRIWDTRNLSTSLAVLRGNIGAIRCIRYSSDGRFLVFSEPADFVHVYSVAADYKKRQEIDFFGEVSGITLSPDDESLFIGVCDRVYASLLQYRMIRGFDYLDSYV

SEQ ID NO: 25072 - protein, 183 aa, Zea mays subsp. mays
  peptide (1)..(183): Ceres Seq. ID no. 12410272
  misc_feature (1)..(46): NCBI GI NO: 8096398 NR Description: ESTs AU082471
  misc_feature (52)..(183): NCBI GI NO: 8096398 NR Description: ESTs AU082471
  misc_feature (1)..(183): NCBI GI NO: 27948448 NR Description: GAMYB-binding protein
  misc_feature (1)..(181): NCBI GI NO: 30696707 NR Description: WD-40 repeat protein family [Arabidopsis thaliana]
  misc_feature (1)..(181): NCBI GI NO: 18423837 NR Description: WD-repeat protein-like; protein id: At5g56190
  misc_feature (1)..(181): NCBI GI NO: 21536732 NR Description: WD-repeat protein-like [Arabidopsis thaliana]
  misc_feature (1)..(181): NCBI GI NO: 9758639 NR Description: WD-repeat protein-like [Arabidopsis thaliana]
  misc_feature (1)..(183): NCBI GI NO: 18399975 NR Description: expressed protein; protein id: At3g13340
  misc_feature (1)..(183): NCBI GI NO: 18405485 NR Description: expressed protein; protein id: At1g55680
  misc_feature (1)..(183): NCBI GI NO: 9294540 NR Description: WD domain protein-like [Arabidopsis thaliana]
MERYQLVNHYRYNWPVNHTSVSPDKKLLAVVGDDRDALLVDSRNGKVTSTLVGHLDYSFATAWHPDSRTFATGNQDKTCRIWDTRNLSTSLAVLRGNIGAIRCIRYSSDGRFLVFSEPADFVHVYSVAADYKKRQEIDFFGEVSGITLSPDDESLFIGVCDRVYASLLQYRMIRGFDYLDSYV

SEQ ID NO: 25073 - DNA, 857 bp, Zea mays subsp. mays
  misc_feature (1)..(857): Ceres Seq. ID no. 12412972
atcgccgcaactgcccgtctgctcctgcttttcatccagtcgcaaaacaaagagaagagatctccgcgtccgcaaccgcatcgcttccctcccggcagaagaagaagattcggttgggttgtttgtctcttgcaaaccgcaatggctgctgctgccactgctactccggccgtggcgccggaggccggcgaccggaaggcggtggcaccgccggtcgacgcggtggatctggagctggagctggaggagaagcacgtgctggcggtggacgacagctccgtggaccgcgcggtgatcgccaagatcctacgcagctccaaatacagagtgacgaccgtggactcggcgacgcgcgcgctggagctgctggcgctggggctggtccccgacgtgaacatgatcatcacggactactggatgcccgggatgaccgggtacgagctgctgaagcacgtgaaggagtcgtcggcgctgcgggccatcccgggtggtgatcatgtcgtcggagaacgtgcccacccgcatcagccggtgcctggaggagggcgccgaggacttcctcctcaagcccgtccgccccgccgacgtctcccgcctctgcagccggatccggtgaccgcccgcgcaaggatggaggatctggttgcgcgctctgacttaattagaggagttgttaggatccaattttttgtgtgttcgttcgttcgttcgttcttttctttctttcttcttggacatagatctgctgccgccgctgctgccgtcgactgaaacaagaagctaacttagttttagggtccaggttgttgttgttgttgttaggaaggcgagtcgttgggggcagcagatctatgtcc

SEQ ID NO: 25074 - protein, 256 aa, Zea mays subsp. mays
  peptide (1)..(256): Ceres Seq. ID no. 12412973
  misc_feature (84)..(162): Pfam Name: Pfam Description:  Response regulator receiver domain
  misc_feature (48)..(162): NCBI GI NO: 11358972 NR Description: repsonse regulator ZmRR2 [imported] - maize
  misc_feature (44)..(162): NCBI GI NO: 11358973 NR Description: response regulator Cip1 [imported] - maize
  misc_feature (85)..(162): NCBI GI NO: 11041692 NR Description: response regulator [Zea mays]
  misc_feature (73)..(162): NCBI GI NO: 34901288 NR Description: similar to response regulator
  misc_feature (79)..(162): NCBI GI NO: 15218550 NR Description: putative response regulator 3
  misc_feature (85)..(162): NCBI GI NO: 12060386 NR Description: response regulator 5 [Zea mays]
  misc_feature (85)..(162): NCBI GI NO: 15242000 NR Description: response regulator 6 (ARR6); protein id:At5g62920
  misc_feature (79)..(162): NCBI GI NO: 15218957 NR Description: response regulator 3; protein id: At1g59940
  misc_feature (85)..(162): NCBI GI NO: 11358763 NR Description: response regulator 5
  misc_feature (85)..(162): NCBI GI NO: 11358906 NR Description: two-component response regulator homolog
IAATARLLLLFIQSQNKEKRSPRPQPHRFPPGRRRRFGWVVCLLQTAMAAAATATPAVAPEAGDRKAVAPPVDAVDLELELEEKHVLAVDDSSVDRAVIAKILRSSKYRVTTVDSATRALELLALGLVPDVNMIITDYWMPGMTGYELLKHVKESSALRAIPGGDHVVGERAHPHQPVPGGGRRGLPPQARPPRRRLPPLQPDPVTARARMEDLVARSDLIRGVVRIQFFVCSFVRSFFSFFLLGHRSAAAAAAVD

SEQ ID NO: 25075 - protein, 209 aa, Zea mays subsp. mays
  peptide (1)..(209): Ceres Seq. ID no. 12412974
  misc_feature (37)..(115): Pfam Name: Pfam Description:  Response regulator receiver domain
  misc_feature (1)..(115): NCBI GI NO: 11358972 NR Description: repsonse regulator ZmRR2 [imported] - maize
  misc_feature (1)..(115): NCBI GI NO: 11358973 NR Description: response regulator Cip1 [imported] - maize
  misc_feature (38)..(115): NCBI GI NO: 11041692 NR Description: response regulator [Zea mays]
  misc_feature (26)..(115): NCBI GI NO: 34901288 NR Description: similar to response regulator
  misc_feature (32)..(115): NCBI GI NO: 15218550 NR Description: putative response regulator 3
  misc_feature (38)..(115): NCBI GI NO: 12060386 NR Description: response regulator 5 [Zea mays]
  misc_feature (38)..(115): NCBI GI NO: 15242000 NR Description: response regulator 6 (ARR6); protein id:At5g62920
  misc_feature (32)..(115): NCBI GI NO: 15218957 NR Description: response regulator 3; protein id: At1g59940
  misc_feature (38)..(115): NCBI GI NO: 11358763 NR Description: response regulator 5
  misc_feature (38)..(115): NCBI GI NO: 15228338 NR Description: response reactor 2 (ATRR2); protein id:At3g48100
MAAAATATPAVAPEAGDRKAVAPPVDAVDLELELEEKHVLAVDDSSVDRAVIAKILRSSKYRVTTVDSATRALELLALGLVPDVNMIITDYWMPGMTGYELLKHVKESSALRAIPGGDHVVGERAHPHQPVPGGGRRGLPPQARPPRRRLPPLQPDPVTARARMEDLVARSDLIRGVVRIQFFVCSFVRSFFSFFLLGHRSAAAAAAVD

SEQ ID NO: 25076 - protein, 163 aa, Zea mays subsp. mays
  peptide (1)..(163): Ceres Seq. ID no. 12412975
RRNCPSAPAFHPVAKQREEISASATASLPSRQKKKIRLGCLSLANRNGCCCHCYSGRGAGGRRPEGGGTAGRRGGSGAGAGGEARAGGGRQLRGPRGDRQDPTQLQIQSDDRGLGDARAGAAGAGAGPRREHDHHGLLDARDDRVRAAEAREGVVGAAGHPGW

SEQ ID NO: 25077 - DNA, 978 bp, Zea mays subsp. mays
  misc_feature (1)..(978): Ceres Seq. ID no. 12356047
gctcgatctgttttcgttttgtaagattcattcacgtctgcgctgtggctctattcagatttggtcgagatttctgggtttgaccagctgatggctgatgtcgacgagtaccgttgcttcattgggaacctgtcctggtcaacgactgatgaaagcctcaaggatgcgttcagcaaattcggcaacctcactgaggcaaaggtggttcttgacaaattttcaggacgttctcgtggtttcggctttgtaacttttgatgagaagcaagccatggaggatgctattgagggaatgaatggactggacttggacgggaggaacatcactgttgataaagctcagccacaaggacctggtagagaccgtaatggtgaccgtgattatgaccgcgagcgtggatctcgttatgaacgtggtcgtgactatggtggtgggcgtgcaccgcgaggtggtggtggtggtggtggtggtggtggtgactgcttcaagtgtgggaaacctggtcattttgctagagagtgcccatctggggatggtgggagaggggacagatatggtgggagagatgacaggtatggtggcggtggcggtggcggtcgttatggttctgaccgtggtggtgaccgatactctggccgtagccgagatggcggcagctatgggggtggcgatcgctacagccgtgaccgatcaggtccttactgatggccttagttcttgattgagaagtatgtgccatccaggtatgaaagtctatctactattataaggcttgttattgtgtctggaactttgttatcctgtagttggagtcgacatgtaccgtgagaaatcagctgctttgttatagaccgtattactgaccggtttattatcgtttcctgcttgccaggcatatgacttggtcatagtgcttggcgcttggatcctgcatgtttgcttgatgtgctatttggctattaaaagatggattttgtc

SEQ ID NO: 25078 - protein, 204 aa, Zea mays subsp. mays
  peptide (1)..(204): Ceres Seq. ID no. 12356048
  misc_feature (9)..(80): Pfam Name: a.k.a. RRM, RBD, or RNP domain Pfam Description: RNA recognition motif.
  misc_feature (1)..(204): NCBI GI NO: 40714682 NR Description: putative RNA binding protein
  misc_feature (1)..(204): NCBI GI NO: 2129944 NR Description: RNA-binding protein RZ-1 - wood tobacco
  misc_feature (1)..(183): NCBI GI NO: 12659074 NR Description: RNA-binding protein [Triticum aestivum]
  misc_feature (1)..(202): NCBI GI NO: 15231557 NR Description: glycine-rich RNA-binding protein
  misc_feature (1)..(146): NCBI GI NO: 15982739 NR Description: AT3g26420/F20C19_14 [Arabidopsis thaliana]
  misc_feature (1)..(194): NCBI GI NO: 1076672 NR Description: probable glycine rich RNA binding protein - potato
  misc_feature (1)..(203): NCBI GI NO: 33146923 NR Description: glycine-rich RNA-binding protein-like
  misc_feature (1)..(171): NCBI GI NO: 544426 NR Description: Glycine-rich RNA-binding protein
  misc_feature (5)..(183): NCBI GI NO: 21388660 NR Description: glycine-rich RNA-binding protein
  misc_feature (1)..(169): NCBI GI NO: 1346181 NR Description: Glycine-rich RNA-binding protein GRP2A
MADVDEYRCFIGNLSWSTTDESLKDAFSKFGNLTEAKVVLDKFSGRSRGFGFVTFDEKQAMEDAIEGMNGLDLDGRNITVDKAQPQGPGRDRNGDRDYDRERGSRYERGRDYGGGRAPRGGGGGGGGGGDCFKCGKPGHFARECPSGDGGRGDRYGGRDDRYGGGGGGGRYGSDRGGDRYSGRSRDGGSYGGGDRYSRDRSGPY

SEQ ID NO: 25079 - protein, 144 aa, Zea mays subsp. mays
  peptide (1)..(144): Ceres Seq. ID no. 12356049
  misc_feature (1)..(144): NCBI GI NO: 40714682 NR Description: putative RNA binding protein
  misc_feature (1)..(144): NCBI GI NO: 2129944 NR Description: RNA-binding protein RZ-1 - wood tobacco
  misc_feature (1)..(123): NCBI GI NO: 12659074 NR Description: RNA-binding protein [Triticum aestivum]
  misc_feature (1)..(142): NCBI GI NO: 15231557 NR Description: glycine-rich RNA-binding protein
  misc_feature (1)..(86): NCBI GI NO: 15982739 NR Description: AT3g26420/F20C19_14 [Arabidopsis thaliana]
  misc_feature (1)..(134): NCBI GI NO: 1076672 NR Description: probable glycine rich RNA binding protein - potato
  misc_feature (1)..(143): NCBI GI NO: 33146923 NR Description: glycine-rich RNA-binding protein-like
  misc_feature (1)..(111): NCBI GI NO: 544426 NR Description: Glycine-rich RNA-binding protein
  misc_feature (1)..(123): NCBI GI NO: 21388660 NR Description: glycine-rich RNA-binding protein
  misc_feature (1)..(109): NCBI GI NO: 1346181 NR Description: Glycine-rich RNA-binding protein GRP2A
MEDAIEGMNGLDLDGRNITVDKAQPQGPGRDRNGDRDYDRERGSRYERGRDYGGGRAPRGGGGGGGGGGDCFKCGKPGHFARECPSGDGGRGDRYGGRDDRYGGGGGGGRYGSDRGGDRYSGRSRDGGSYGGGDRYSRDRSGPY

SEQ ID NO: 25080 - protein, 141 aa, Zea mays subsp. mays
  peptide (1)..(141): Ceres Seq. ID no. 12356050
MDWTWTGGTSLLIKLSHKDLVETVMVTVIMTASVDLVMNVVVTMVVGVHREVVVVVVVVVVTASSVGNLVILLESAHLGMVGEGTDMVGEMTGMVAVAVAVVMVLTVVVTDTLAVAEMAAAMGVAIATAVTDQVLTDGLSS

SEQ ID NO: 25081 - DNA, 1930 bp, Zea mays subsp. mays
  misc_feature (1)..(1930): Ceres Seq. ID no. 12367909
aggcaggcagcgggctggcggaaaagcctagtgcgcgctcgtgctcgtgctccccgaccagactagaccagcttgctagcgccagcaaggcgagcggcgatgctcgcacgatctactacagctgccgccgcggccgccgccgggatctgcctgtgattaaggatgtcggcgtcgcggagcgggaggcggcggaccggtagcgtggcgctcggagaccttctgcagcgggaggcgtcggcggagcgggccgcgttgggatgcggcgagcggccctcggtcgcggcggggcaggcctgccgggcgaagaagggcgaggacttcgcgctgctcaagcccgcctgcgagcgacgccccggcgcgccgtccacctccttctccgccttcgccctgttcgatgggcataacgggagcgccgccgcggtgtacgccaaggagcacctcctcggcaacgtgctcagctgcgtcccgaccgatctggcctgggacgactggctcgccgcgctgccgagggccctcgtcgcggggttcgtcaagaccgacaaggatttccagactaaagctcattcctcggggacaaccgtgacgcttgccataattgatggctccgttgtaactgttgcatctgttggtgattcacgttgtgtccttgaagctgagggatccatctactatttgtcggctgaccatcgcttcgacgctaatgaagaggaggtgggacgtgtaaccgaatgtggaggtgaagttggaaggctaaatgtcgtcggtggtgctgagattggtccccttagatgttggccaggtggtttatgcctctcaagatcgattggtgatcaggatgtaggtgaatttattattccggttccttatgtgaagcaaattaagctgtctaatgctggaggccgtcttattatttcaagcgacggtgtttgggatgctttgactgcagaaatggcttttaaatgtgcacgagggcttcctcctgaggctgcagctgagcaaattgttaaagaagcagttgaagcaaaaggattgagagatgatacaacttgcattgtcattgacataatatcaccagagaaaccaaaacgcactatacaatctcaaagatcgccaagaaaaggccttgtgcttctaaaaaatttctttttaaggaaaacagcatctgactcgttgtctctccctgataaggataattatcctgagccagatttagaggaggtctttgaggacggatgcccatccctttcaaggaggcttaattctgagtatcctgtccgagacatgttcaaactttttgcatgtgcaatttgtcaaattgacttggaatctggccaaggcatatccatacacgagggtttgtcaaggccaggaaagctgcgtccctgggatggccctttcctttgtcacagctgccaggaaaagaaagaggcgatggaggggaagcgccattcacgagattcctcgtcgagaaatagcgggtcaagtgaatcgtgactgaagccgagaatcatcttgaggcaaacgcctagcggtgtgacgagctaattattgttgctgctgtcgttcttgcagcactttctcatggattaccattgaattgagacatgttggaagtcgccatgcctatatatatgttggagctgtacggtactggaccgtagagcaaatccaatcgcctctagataccacaccagcgtcttcggcagggcttgtggcagcagctcacgcagggaatgatgacaagaggttgttattattagtgaagaatgtcgacagtggccaatagtcatgtaaattattcgtcgtgtagaggtgcaagtgacaaatagccacggttttgtaattctcaactaggattaggtattgagacctgtaattcgtctgggcagacctcaaactgaaggtcaacaacgtagcgtggccctattgt

SEQ ID NO: 25082 - protein, 443 aa, Zea mays subsp. mays
  peptide (1)..(443): Ceres Seq. ID no. 12367910
  misc_feature (42)..(294): Pfam Name: Pfam Description:  Protein phosphatase 2C
  misc_feature (1)..(442): NCBI GI NO: 38344839 NR Description: OSJNBa0064H22.20
  misc_feature (4)..(438): NCBI GI NO: 18401703 NR Description: expressed protein; protein id: At1g47380.1
  misc_feature (4)..(438): NCBI GI NO: 15292869 NR Description: unknown protein [Arabidopsis thaliana]
  misc_feature (12)..(429): NCBI GI NO: 14029015 NR Description: Unknown protein [Oryza sativa]
  misc_feature (3)..(430): NCBI GI NO: 15221404 NR Description: putative protein phosphatase; protein id:At1g68410
  misc_feature (1)..(436): NCBI GI NO: 34394411 NR Description: protein phosphatase 2C-like
  misc_feature (1)..(433): NCBI GI NO: 15217454 NR Description: putative protein phosphatase 2C
  misc_feature (36)..(430): NCBI GI NO: 34914644 NR Description: OSJNBa0054L14.21
  misc_feature (1)..(364): NCBI GI NO: 34898168 NR Description: protein phosphatase 2C-like
  misc_feature (1)..(363): NCBI GI NO: 16930415 NR Description: At1g09160/T12M4_13 [Arabidopsis thaliana]
MSASRSGRRRTGSVALGDLLQREASAERAALGCGERPSVAAGQACRAKKGEDFALLKPACERRPGAPSTSFSAFALFDGHNGSAAAVYAKEHLLGNVLSCVPTDLAWDDWLAALPRALVAGFVKTDKDFQTKAHSSGTTVTLAIIDGSVVTVASVGDSRCVLEAEGSIYYLSADHRFDANEEEVGRVTECGGEVGRLNVVGGAEIGPLRCWPGGLCLSRSIGDQDVGEFIIPVPYVKQIKLSNAGGRLIISSDGVWDALTAEMAFKCARGLPPEAAAEQIVKEAVEAKGLRDDTTCIVIDIISPEKPKRTIQSQRSPRKGLVLLKNFFLRKTASDSLSLPDKDNYPEPDLEEVFEDGCPSLSRRLNSEYPVRDMFKLFACAICQIDLESGQGISIHEGLSRPGKLRPWDGPFLCHSCQEKKEAMEGKRHSRDSSSRNSGSSES

SEQ ID NO: 25083 - DNA, 1961 bp, Zea mays subsp. mays
  misc_feature (1)..(1961): Ceres Seq. ID no. 12410265
atatatttatattagaaaagaaaactctgttcaaccacccgccgagttcagcagcactctcctccgccctcttccaggtccagcagagattgggggcgcgtgggcatcggagattgcctcgggagcgcgtttcctggtcaactaaggccggcatgaagggctgctcagagcgcttgctgtttctgctgctgctgctggcatcgtcgtcgttactgtccgctgtgattgccgcgcagcagacttgccccgccgacctcgacagcaaatgcgatggtggcgcgtctgatgatgattgggagggggagttcttccccggcgtcccgaaaatcaagtatgagggtccaacaagcaagaaccctcttgcttataagtggtataacaaggaggaagtgattctcggtaagaagatgaaggattggatgcgcttcagtgttgcgttctggcacacgttccgcggtactggcgctgatcctttcggtgctcctacaaagacttggccttgggaggatggcacaaattcgttggccatggctaagagaagaatgagagctcactttgagttcatggagaagttgggagtcgacaaatggtgcttccatgacagggatattgccccggatgggaagacacttgaagaaacaaattctaacttggatgagatagtccagctggcaaagcagctgcagggtgagaccaatataaagccattgtggggtaccgcacagctctttatgcatccacgttacatgcatggtgctgctacgagcccagaggttaaagtatatgcttatgcggctgcacaagttaagaaagctttggaggtcactcactacctaggtggtgaaaactatgtgttctggggtggaagagagggttaccaaactcttctgaatactgatatgaagagagaacttgaccatctggctaactttcttcaagctgctgttgactacaagaagaagattggattcaacggaacactattgatagagcctaaaccacaggaaccaacaaaacaccagtatgactgggatgttgcgactacgtttgcttttctacagaagtacggtcttacaggagagttcaagattaatgttgagtgcaaccatgctactctatctggacacagctgccatcatgaattggagactgcacggattaatgggctgcttggaaatatcgatgcaaacactggtgatcctcaagttggttgggacacagatcagttcatgacagacattgcagaggctactttggttatgtcaagtgtagttaagaatggtggacttgcacctggtggtttcaactttgatgccaaattgcggagggaaagtactgatgttgaggacatgtttcttgtccatatctccggaatggacaccctggcacgtggcctccgcaacgttgccaagctgattgaggatggttccctagatgatcttgtccgcaagcggtaccagagctttgatagtgatatcggtgccttgatcgaggctgggaaaggagactttgagacgctagaaaagaaggttctagagtggggtgagcccactgttgcatccggcaagcaggaactggcggagattctgttccagtctgccctatagatggtgccatgtccataggtccaggaataagcaagggtgcgccctcctccgaacacgcactcgtcctcctcatcacggggatgttatggttccgtgcgatggactacctacaataagcatggaactgagataattaggatgtaatctgtcagaaaatttccagaattgttacctccttttgtttagagtggattagtggaatcaaactggagttagttaaagcttatcctgcattttggtgtggcgatcgtgtttggtccttccttgaatgctgtttcatagcgtggcaacgatgttgctgcttagtcctacaactggtggtagtaatggatcatagttcgaatgtttcttccc

SEQ ID NO: 25084 - protein, 534 aa, Zea mays subsp. mays
  peptide (1)..(534): Ceres Seq. ID no. 12410266
  misc_feature (128)..(534): Pfam Name: Pfam Description:  Xylose isomerase
  misc_feature (61)..(534): NCBI GI NO: 34899308 NR Description: putative xylose isomerase
  misc_feature (61)..(534): NCBI GI NO: 6175480 NR Description: Xylose isomerase
  misc_feature (61)..(534): NCBI GI NO: 2130051 NR Description: xylose isomerase (EC 5.3.1.5) - barley
  misc_feature (56)..(534): NCBI GI NO: 30696904 NR Description: expressed protein [Arabidopsis thaliana]
  misc_feature (56)..(534): NCBI GI NO: 21537178 NR Description: xylose isomerase [Arabidopsis thaliana]
  misc_feature (56)..(523): NCBI GI NO: 17433690 NR Description: Xylose isomerase
  misc_feature (101)..(532): NCBI GI NO: 1175034 NR Description: Xylose isomerase
  misc_feature (101)..(532): NCBI GI NO: 3319057 NR Description: Chain A
  misc_feature (101)..(534): NCBI GI NO: 139827 NR Description: Xylose isomerase
  misc_feature (101)..(534): NCBI GI NO: 2581797 NR Description: xylose isomerase; XylA
IFILEKKTLFNHPPSSAALSSALFQVQQRLGARGHRRLPRERVSWSTKAGMKGCSERLLFLLLLLASSSLLSAVIAAQQTCPADLDSKCDGGASDDDWEGEFFPGVPKIKYEGPTSKNPLAYKWYNKEEVILGKKMKDWMRFSVAFWHTFRGTGADPFGAPTKTWPWEDGTNSLAMAKRRMRAHFEFMEKLGVDKWCFHDRDIAPDGKTLEETNSNLDEIVQLAKQLQGETNIKPLWGTAQLFMHPRYMHGAATSPEVKVYAYAAAQVKKALEVTHYLGGENYVFWGGREGYQTLLNTDMKRELDHLANFLQAAVDYKKKIGFNGTLLIEPKPQEPTKHQYDWDVATTFAFLQKYGLTGEFKINVECNHATLSGHSCHHELETARINGLLGNIDANTGDPQVGWDTDQFMTDIAEATLVMSSVVKNGGLAPGGFNFDAKLRRESTDVEDMFLVHISGMDTLARGLRNVAKLIEDGSLDDLVRKRYQSFDSDIGALIEAGKGDFETLEKKVLEWGEPTVASGKQELAEILFQSAL

SEQ ID NO: 25085 - protein, 484 aa, Zea mays subsp. mays
  peptide (1)..(484): Ceres Seq. ID no. 12410267
  misc_feature (78)..(484): Pfam Name: Pfam Description:  Xylose isomerase
  misc_feature (11)..(484): NCBI GI NO: 34899308 NR Description: putative xylose isomerase
  misc_feature (11)..(484): NCBI GI NO: 6175480 NR Description: Xylose isomerase
  misc_feature (11)..(484): NCBI GI NO: 2130051 NR Description: xylose isomerase (EC 5.3.1.5) - barley
  misc_feature (6)..(484): NCBI GI NO: 30696904 NR Description: expressed protein [Arabidopsis thaliana]
  misc_feature (6)..(484): NCBI GI NO: 21537178 NR Description: xylose isomerase [Arabidopsis thaliana]
  misc_feature (6)..(473): NCBI GI NO: 17433690 NR Description: Xylose isomerase
  misc_feature (51)..(482): NCBI GI NO: 1175034 NR Description: Xylose isomerase
  misc_feature (51)..(482): NCBI GI NO: 3319057 NR Description: Chain A
  misc_feature (51)..(484): NCBI GI NO: 139827 NR Description: Xylose isomerase
  misc_feature (51)..(484): NCBI GI NO: 2581797 NR Description: xylose isomerase; XylA
MKGCSERLLFLLLLLASSSLLSAVIAAQQTCPADLDSKCDGGASDDDWEGEFFPGVPKIKYEGPTSKNPLAYKWYNKEEVILGKKMKDWMRFSVAFWHTFRGTGADPFGAPTKTWPWEDGTNSLAMAKRRMRAHFEFMEKLGVDKWCFHDRDIAPDGKTLEETNSNLDEIVQLAKQLQGETNIKPLWGTAQLFMHPRYMHGAATSPEVKVYAYAAAQVKKALEVTHYLGGENYVFWGGREGYQTLLNTDMKRELDHLANFLQAAVDYKKKIGFNGTLLIEPKPQEPTKHQYDWDVATTFAFLQKYGLTGEFKINVECNHATLSGHSCHHELETARINGLLGNIDANTGDPQVGWDTDQFMTDIAEATLVMSSVVKNGGLAPGGFNFDAKLRRESTDVEDMFLVHISGMDTLARGLRNVAKLIEDGSLDDLVRKRYQSFDSDIGALIEAGKGDFETLEKKVLEWGEPTVASGKQELAEILFQSAL

SEQ ID NO: 25086 - protein, 399 aa, Zea mays subsp. mays
  peptide (1)..(399): Ceres Seq. ID no. 12410268
  misc_feature (1)..(399): Pfam Name: Pfam Description:  Xylose isomerase
  misc_feature (1)..(399): NCBI GI NO: 34899308 NR Description: putative xylose isomerase
  misc_feature (1)..(399): NCBI GI NO: 6175480 NR Description: Xylose isomerase
  misc_feature (1)..(399): NCBI GI NO: 2130051 NR Description: xylose isomerase (EC 5.3.1.5) - barley
  misc_feature (1)..(399): NCBI GI NO: 30696904 NR Description: expressed protein [Arabidopsis thaliana]
  misc_feature (1)..(399): NCBI GI NO: 21537178 NR Description: xylose isomerase [Arabidopsis thaliana]
  misc_feature (1)..(388): NCBI GI NO: 17433690 NR Description: Xylose isomerase
  misc_feature (1)..(397): NCBI GI NO: 1175034 NR Description: Xylose isomerase
  misc_feature (1)..(397): NCBI GI NO: 3319057 NR Description: Chain A
  misc_feature (1)..(399): NCBI GI NO: 139827 NR Description: Xylose isomerase
  misc_feature (1)..(399): NCBI GI NO: 2581797 NR Description: xylose isomerase; XylA
MKDWMRFSVAFWHTFRGTGADPFGAPTKTWPWEDGTNSLAMAKRRMRAHFEFMEKLGVDKWCFHDRDIAPDGKTLEETNSNLDEIVQLAKQLQGETNIKPLWGTAQLFMHPRYMHGAATSPEVKVYAYAAAQVKKALEVTHYLGGENYVFWGGREGYQTLLNTDMKRELDHLANFLQAAVDYKKKIGFNGTLLIEPKPQEPTKHQYDWDVATTFAFLQKYGLTGEFKINVECNHATLSGHSCHHELETARINGLLGNIDANTGDPQVGWDTDQFMTDIAEATLVMSSVVKNGGLAPGGFNFDAKLRRESTDVEDMFLVHISGMDTLARGLRNVAKLIEDGSLDDLVRKRYQSFDSDIGALIEAGKGDFETLEKKVLEWGEPTVASGKQELAEILFQSAL

SEQ ID NO: 25087 - DNA, 1465 bp, Zea mays subsp. mays
  misc_feature (1)..(1465): Ceres Seq. ID no. 12410261
acggcagagccaccaccagcagcagccccagaaatcgagcaaacacaagctgctccatggcctcaccaacccgaacaccatcgcctccgccggcggtcgagcccatcgcgccttctctctcttcagaacatccgcctgtcaacccctcctgtgacggatccttctcgccggagaacccagcgccagctccacctcctccccctgctactccgcatcctcatactcccggcgatagctctccttcctcaattccgcatccctcggcgccacagcctcttccatctccgcctcctcatactcccgacgatagctctccttcctcaactccgcatccctcggcgccacagcccccaccatctccgcctccgccgagcgctgatgtttctcctcccctctcgcgacagggcgaaacgtcaccgcggcgcccattgccccctccctcacccgctccagtatccccgcctactccagcgccggcgtcctcggaagccaagtcggagcaggaggaggcggaatcggctagcgaatcggggagcatgacgctagccatcgttctagccaaaactgaagatgcaacgccgcctaaggcctcctcggccgaggcgtccccaaccagatcgccgcagaaggaatcggccgtcaccatcgcgaagctcctctccgccgaagacctcgcggcgatggaggctaaggccacgccggacaaggttacacctccgagcgacgctgggtccctcgccgccgccgttactaccgttgggggagtcagtggcggcgtggggtccaagaggtggctcctaggcggcgtcccggagaaggtgcggcgcgctgagctgaggagggccgagctagggtttagggtttcggccgccgtgttctgcctggtcgcgctctccgtcatggcggccgataccacgacgggctggtccggcgactccttccgccgctacaacgagtacaggtacgtacttgctgcgagcgtcgtgacttttacctactgtggattccagttggtagccgaggtgcattacgttgtcacagggagacacatgattcgagccccattccgcagctacttcaatcttgccatggatcagatgttagcttacctcctgttgtcagcatcttcagcagcgctttctcgtaatggtgtttggatgtcacggtttggaggggatcagtttaccaaactgatcaatgtctcggcttccatggcattcctagctttcattgctctgggtcttaactcggtgatctctgcttactgcttcttcagcttggtttcatagagctaccgttgtgcattgcatgatgtgaataatactacctgtatgcttcttggagcactgaaccttgattcatgtgaaatttctacatgatttctgtgaaatccctaaactccaaagtgggcctatattgtagcagtacattgagtcaaggttggcctttaaaattttggaagcgg

SEQ ID NO: 25088 - protein, 428 aa, Zea mays subsp. mays
  peptide (1)..(428): Ceres Seq. ID no. 12410262
  misc_feature (278)..(411): Pfam Name: DUF588 Pfam Description: Domain of unknown function
  misc_feature (152)..(425): NCBI GI NO: 27754604 NR Description: unknown protein [Arabidopsis thaliana]
  misc_feature (283)..(428): NCBI GI NO: 15241975 NR Description: putative protein; protein id: At5g62820.1
  misc_feature (8)..(345): NCBI GI NO: 34911616 NR Description: P0039G05.10
  misc_feature (366)..(427): NCBI GI NO: 34911616 NR Description: P0039G05.10
  misc_feature (270)..(428): NCBI GI NO: 15242642 NR Description: putative protein; protein id: At5g40300.1
  misc_feature (8)..(267): NCBI GI NO: 20138131 NR Description: Vegetative cell wall protein gp1 precursor
  misc_feature (18)..(265): NCBI GI NO: 20138131 NR Description: Vegetative cell wall protein gp1 precursor
  misc_feature (22)..(158): NCBI GI NO: 6523547 NR Description: hydroxyproline-rich glycoprotein DZ-HRGP
  misc_feature (3)..(219): NCBI GI NO: 81286 NR Description: extensin - Volvox carteri (fragment)
  misc_feature (22)..(158): NCBI GI NO: 6523547 NR Description: hydroxyproline-rich glycoprotein DZ-HRGP
GRATTSSSPRNRANTSCSMASPTRTPSPPPAVEPIAPSLSSEHPPVNPSCDGSFSPENPAPAPPPPPATPHPHTPGDSSPSSIPHPSAPQPLPSPPPHTPDDSSPSSTPHPSAPQPPPSPPPPSADVSPPLSRQGETSPRRPLPPPSPAPVSPPTPAPASSEAKSEQEEAESASESGSMTLAIVLAKTEDATPPKASSAEASPTRSPQKESAVTIAKLLSAEDLAAMEAKATPDKVTPPSDAGSLAAAVTTVGGVSGGVGSKRWLLGGVPEKVRRAELRRAELGFRVSAAVFCLVALSVMAADTTTGWSGDSFRRYNEYRYVLAASVVTFTYCGFQLVAEVHYVVTGRHMIRAPFRSYFNLAMDQMLAYLLLSASSAALSRNGVWMSRFGGDQFTKLINVSASMAFLAFIALGLNSVISAYCFFSLVS

SEQ ID NO: 25089 - protein, 410 aa, Zea mays subsp. mays
  peptide (1)..(410): Ceres Seq. ID no. 12410263
  misc_feature (260)..(393): Pfam Name: DUF588 Pfam Description: Domain of unknown function
  misc_feature (134)..(407): NCBI GI NO: 27754604 NR Description: unknown protein [Arabidopsis thaliana]
  misc_feature (265)..(410): NCBI GI NO: 15241975 NR Description: putative protein; protein id: At5g62820.1
  misc_feature (1)..(327): NCBI GI NO: 34911616 NR Description: P0039G05.10
  misc_feature (348)..(409): NCBI GI NO: 34911616 NR Description: P0039G05.10
  misc_feature (252)..(410): NCBI GI NO: 15242642 NR Description: putative protein; protein id: At5g40300.1
  misc_feature (1)..(249): NCBI GI NO: 20138131 NR Description: Vegetative cell wall protein gp1 precursor
  misc_feature (1)..(247): NCBI GI NO: 20138131 NR Description: Vegetative cell wall protein gp1 precursor
  misc_feature (4)..(140): NCBI GI NO: 6523547 NR Description: hydroxyproline-rich glycoprotein DZ-HRGP
  misc_feature (1)..(201): NCBI GI NO: 81286 NR Description: extensin - Volvox carteri (fragment)
  misc_feature (4)..(140): NCBI GI NO: 6523547 NR Description: hydroxyproline-rich glycoprotein DZ-HRGP
MASPTRTPSPPPAVEPIAPSLSSEHPPVNPSCDGSFSPENPAPAPPPPPATPHPHTPGDSSPSSIPHPSAPQPLPSPPPHTPDDSSPSSTPHPSAPQPPPSPPPPSADVSPPLSRQGETSPRRPLPPPSPAPVSPPTPAPASSEAKSEQEEAESASESGSMTLAIVLAKTEDATPPKASSAEASPTRSPQKESAVTIAKLLSAEDLAAMEAKATPDKVTPPSDAGSLAAAVTTVGGVSGGVGSKRWLLGGVPEKVRRAELRRAELGFRVSAAVFCLVALSVMAADTTTGWSGDSFRRYNEYRYVLAASVVTFTYCGFQLVAEVHYVVTGRHMIRAPFRSYFNLAMDQMLAYLLLSASSAALSRNGVWMSRFGGDQFTKLINVSASMAFLAFIALGLNSVISAYCFFSLVS

SEQ ID NO: 25090 - protein, 250 aa, Zea mays subsp. mays
  peptide (1)..(250): Ceres Seq. ID no. 12410264
  misc_feature (100)..(233): Pfam Name: DUF588 Pfam Description: Domain of unknown function
  misc_feature (1)..(247): NCBI GI NO: 27754604 NR Description: unknown protein [Arabidopsis thaliana]
  misc_feature (105)..(250): NCBI GI NO: 15241975 NR Description: putative protein; protein id: At5g62820.1
  misc_feature (1)..(167): NCBI GI NO: 34911616 NR Description: P0039G05.10
  misc_feature (188)..(249): NCBI GI NO: 34911616 NR Description: P0039G05.10
  misc_feature (92)..(250): NCBI GI NO: 15242642 NR Description: putative protein; protein id: At5g40300.1
  misc_feature (1)..(89): NCBI GI NO: 20138131 NR Description: Vegetative cell wall protein gp1 precursor
  misc_feature (1)..(87): NCBI GI NO: 20138131 NR Description: Vegetative cell wall protein gp1 precursor
  misc_feature (1)..(41): NCBI GI NO: 81286 NR Description: extensin - Volvox carteri (fragment)
  misc_feature (1)..(70): NCBI GI NO: 23017082 NR Description: hypothetical protein [Thermobifida fusca]
  misc_feature (1)..(83): NCBI GI NO: 20138131 NR Description: Vegetative cell wall protein gp1 precursor
MTLAIVLAKTEDATPPKASSAEASPTRSPQKESAVTIAKLLSAEDLAAMEAKATPDKVTPPSDAGSLAAAVTTVGGVSGGVGSKRWLLGGVPEKVRRAELRRAELGFRVSAAVFCLVALSVMAADTTTGWSGDSFRRYNEYRYVLAASVVTFTYCGFQLVAEVHYVVTGRHMIRAPFRSYFNLAMDQMLAYLLLSASSAALSRNGVWMSRFGGDQFTKLINVSASMAFLAFIALGLNSVISAYCFFSLVS

SEQ ID NO: 25091 - DNA, 1529 bp, Zea mays subsp. mays
  misc_feature (1)..(1529): Ceres Seq. ID no. 12407871
accacacgaattgcacatctccacagctcacgattccaacactagctacatatatatgtagctttctaggctactatatacactcaccaccaagtgtgaagtgtgtatatatagtgacagctactgcaatatatacatacgcgtcacctatatattagccaagctagctatatgagcttggttgcggcgccaatggcgatcgtcgacgtggccaacgcccagctgcagcaagcagcagcagcagctgccaagaaagacgaggacggccatgagcagcaggagtcgtcctacgactacggcgcgctgatgaaaggcgtgaggcacctgtcggacagcggcattaccaggctgcccgacaggtacgtcctgcccgcgtccgaccgccccggcgtccttgccgtctcgtcgtccgtgggcgggcagcggcagggtcaagctccctgtcgtcaacctcgccggcctccgcgacccctgccagcgcgccgccgtgctggccacgctcgacgccgcgtgccgggagtacggcttctttcaggtggtaaaccacgggttcgggagcgacgtgagcggcgggatgctggacgtggcgcagcgcttcttcgagctgccgctggccgagcgagcgcggcacatgtcggcggacgtgcgggcgccggtgcgctacggcaccagcttcaaccaggccaaggacgacgtgctctgctggcgcgacttcctcaagctcgtctgccagccgctgcaggcggtgctcccgtactggccccagcagccggcggacctcagggacgtggccaccaggtacgccacggcgagccaccggctgttcatggaggtcatggaggcggcgctggaggccctgggcatccccacggccggcggcgtgctcggggagctggcagcgtcgtcgtcgcacatgatgacggtgaactgctacccggcttgcccgcagcctgagctcacgctggggatgccctcgcactcggactacggcctcttcacgttcgtcctgcaggaccacgtcgagggcctccaggtcatgcacgacggccgctggctcaccatcgaccccatcccgggatcgttcgtcgtcaacgtcggcgaccacctagagatctacagcaacgggcggtacaagagcgcgctgcaccgggtgcacgtgaactccacgcggccgcgcatctcggtggcgtcgttccacagcctgccggcggagcgagtgatcgggccggcgccggagctggtggacgacgaggccggcaacccgcggcggtacatggacaccgacttcgctaccttcctcgcctacctcgcatccgcggacggcaagaacaagaccttcctccagtcaaggaagctgcctgctgctgctcctccatgcctctagctaactagatagctgcttattaatctgacagaataaaattaatcagttcagcgcacaattccacaagcgaaaacaaacctggatttgttttaattagctctgcccttcattattacattcaagctagctcttggtcaacgcatgc

SEQ ID NO: 25092 - protein, 269 aa, Zea mays subsp. mays
  peptide (1)..(269): Ceres Seq. ID no. 12407872
  misc_feature (112)..(209): Pfam Name: II Pfam Description: 2OG-Fe
  misc_feature (1)..(261): NCBI GI NO: 15228020 NR Description: putative giberellin beta-hydroxylase
  misc_feature (1)..(260): NCBI GI NO: 7433240 NR Description: probable flavonol synthase
  misc_feature (1)..(260): NCBI GI NO: 30689834 NR Description: flavonol synthase family [Arabidopsis thaliana]
  misc_feature (1)..(241): NCBI GI NO: 15235124 NR Description: putative flavanone 3-beta-hydroxylase
  misc_feature (1)..(226): NCBI GI NO: 15235126 NR Description: putative Fe
  misc_feature (1)..(227): NCBI GI NO: 37536444 NR Description: unknown protein
  misc_feature (1)..(233): NCBI GI NO: 38345873 NR Description: OSJNBa0064M23.15
  misc_feature (64)..(260): NCBI GI NO: 15232291 NR Description: SRG1 - like protein; protein id: At3g60290.1
  misc_feature (1)..(29): NCBI GI NO: 15232291 NR Description: SRG1 - like protein; protein id: At3g60290.1
  misc_feature (1)..(261): NCBI GI NO: 15240797 NR Description: putative protein; protein id: At5g07480.1
MLDVAQRFFELPLAERARHMSADVRAPVRYGTSFNQAKDDVLCWRDFLKLVCQPLQAVLPYWPQQPADLRDVATRYATASHRLFMEVMEAALEALGIPTAGGVLGELAASSSHMMTVNCYPACPQPELTLGMPSHSDYGLFTFVLQDHVEGLQVMHDGRWLTIDPIPGSFVVNVGDHLEIYSNGRYKSALHRVHVNSTRPRISVASFHSLPAERVIGPAPELVDDEAGNPRRYMDTDFATFLAYLASADGKNKTFLQSRKLPAAAPPCL

SEQ ID NO: 25093 - protein, 260 aa, Zea mays subsp. mays
  peptide (1)..(260): Ceres Seq. ID no. 12407873
  misc_feature (99)..(258): Pfam Name: Pfam Description:  Aminotransferase class-III
  misc_feature (47)..(81): NCBI GI NO: 15228020 NR Description: putative giberellin beta-hydroxylase
  misc_feature (52)..(82): NCBI GI NO: 7433240 NR Description: probable flavonol synthase
  misc_feature (52)..(82): NCBI GI NO: 30689834 NR Description: flavonol synthase family [Arabidopsis thaliana]
  misc_feature (30)..(71): NCBI GI NO: 119640 NR Description: 1-AMINOCYCLOPROPANE-1-CARBOXYLATE OXIDASE HOMOLOG
MSLVAAPMAIVDVANAQLQQAAAAAAKKDEDGHEQQESSYDYGALMKGVRHLSDSGITRLPDRYVLPASDRPGVLAVSSSVGGQRQGQAPCRQPRRPPRPLPARRRAGHARRRVPGVRLLSGGKPRVRERRERRDAGRGAALLRAAAGRASAAHVGGRAGAGALRHQLQPGQGRRALLARLPQARLPAAAGGAPVLAPAAGGPQGRGHQVRHGEPPAVHGGHGGGAGGPGHPHGRRRARGAGSVVVAHDDGELLPGLPAA

SEQ ID NO: 25094 - protein, 253 aa, Zea mays subsp. mays
  peptide (1)..(253): Ceres Seq. ID no. 12407874
  misc_feature (92)..(251): Pfam Name: Pfam Description:  Aminotransferase class-III
  misc_feature (40)..(74): NCBI GI NO: 15228020 NR Description: putative giberellin beta-hydroxylase
  misc_feature (45)..(75): NCBI GI NO: 7433240 NR Description: probable flavonol synthase
  misc_feature (45)..(75): NCBI GI NO: 30689834 NR Description: flavonol synthase family [Arabidopsis thaliana]
  misc_feature (23)..(64): NCBI GI NO: 119640 NR Description: 1-AMINOCYCLOPROPANE-1-CARBOXYLATE OXIDASE HOMOLOG
MAIVDVANAQLQQAAAAAAKKDEDGHEQQESSYDYGALMKGVRHLSDSGITRLPDRYVLPASDRPGVLAVSSSVGGQRQGQAPCRQPRRPPRPLPARRRAGHARRRVPGVRLLSGGKPRVRERRERRDAGRGAALLRAAAGRASAAHVGGRAGAGALRHQLQPGQGRRALLARLPQARLPAAAGGAPVLAPAAGGPQGRGHQVRHGEPPAVHGGHGGGAGGPGHPHGRRRARGAGSVVVAHDDGELLPGLPAA

SEQ ID NO: 25095 - DNA, 1334 bp, Zea mays subsp. mays
  misc_feature (1)..(1334): Ceres Seq. ID no. 12414173
aaacaacttgggcgcggccggattcgtataggttagcagcacacagtagcaagctcgcgatctgtgcgcccaccatcaccaccaccgccgggaggagaggaccgaccgaccgaccgaagatgcggatgagctgcaacggctgccgcgtcctgcgcaagggctgcagcgacgcctgcaccatccgcccctgcctgcagtggatcgacagccccgaggcgcaggcaaacgccaccgtcttcctcgccaagttctacggccgcgcggggctgctcaacctgctggccgccgcgcccgacgacgccgcccgcccggccgtcttccgctccctgctctacgaggcgtgcggccgcatcgtcaaccccgtctacggctccgtcggcctgctctggtcgcgccggtggcagagctgcgtcgacgccgtcgaggccgtgctcaagggggaccccgtcgtgcaggtcgacgccggctccgaggccgccgccgccccggcgccgctgctcggcgccagcaggccagccgcgccgccggccgcctacgacatccgccacgtcgccagggatcccgacgccgccgccgccgccgacctcctccgcgtcgcgcgcggcggcggccgcaggaggttcaagcgcgccggctcgccttccaacgcctgcaaggcgaaacccctcaagggaaaggctagcagcaacgagcgcgcgtcgcccagccctactcagaggcagcatcagcaggagacggaggagctggagctggaaccggtgccgatggtcgtcgagcttgagcacggcgaggagtccgccggcagccacgaccaccaccaccaccacttgcagccgcagggatcgtcggaggacaccgacgtggaggccgcctcccacgtgagcccaggcccgaggccgagccgccggtcagcagccagagccaggcgctggtggcggacccaggagggagaggaggtcaggctggagctcacgctcggcttcgagccagtcgtcaggcagcagccgaggctgtcgtgctgcgactcgagcggcttgagcgccgcgtcgagcctcatcggcttgcggctgcagctgccagccgcctgagcagaggaggtcatctcatttcacaaggcacagtggcacaccaagtgcagttttgcaaccaatgcggtgtttgcttaaagaaaaggttttggacgccgagcagccgactatttcctaggttttgttttttcattttcttttcttggctgtaattgtaaaggctgatgaactgcacagttttagcgtcgtcataataggagttttgcaattccatatgagattataagctattaaaaagtttgattg

SEQ ID NO: 25096 - protein, 361 aa, Zea mays subsp. mays
  peptide (1)..(361): Ceres Seq. ID no. 12414174
  misc_feature (43)..(149): Pfam Name: Pfam Description:  Protein of unknown function DUF260
  misc_feature (40)..(360): NCBI GI NO: 34914608 NR Description: P0520B06.17
  misc_feature (40)..(249): NCBI GI NO: 18396229 NR Description: expressed protein; protein id: At3g02550
  misc_feature (40)..(249): NCBI GI NO: 21554191 NR Description: unknown [Arabidopsis thaliana]
  misc_feature (40)..(216): NCBI GI NO: 34895540 NR Description: unnamed protein product
  misc_feature (40)..(187): NCBI GI NO: 15221429 NR Description: expressed protein; protein id: At1g68510
  misc_feature (40)..(186): NCBI GI NO: 15219829 NR Description: hypothetical protein; protein id: At1g67100.1
  misc_feature (42)..(164): NCBI GI NO: 15229644 NR Description: putative protein; protein id: At3g49940
  misc_feature (42)..(164): NCBI GI NO: 21553886 NR Description: unknown [Arabidopsis thaliana]
  misc_feature (42)..(164): NCBI GI NO: 15240739 NR Description: putative protein; protein id: At5g67420
  misc_feature (42)..(164): NCBI GI NO: 21593577 NR Description: unknown [Arabidopsis thaliana]
TTWARPDSYRLAAHSSKLAICAPTITTTAGRRGPTDRPKMRMSCNGCRVLRKGCSDACTIRPCLQWIDSPEAQANATVFLAKFYGRAGLLNLLAAAPDDAARPAVFRSLLYEACGRIVNPVYGSVGLLWSRRWQSCVDAVEAVLKGDPVVQVDAGSEAAAAPAPLLGASRPAAPPAAYDIRHVARDPDAAAAADLLRVARGGGRRRFKRAGSPSNACKAKPLKGKASSNERASPSPTQRQHQQETEELELEPVPMVVELEHGEESAGSHDHHHHHLQPQGSSEDTDVEAASHVSPGPRPSRRSAARARRWWRTQEGEEVRLELTLGFEPVVRQQPRLSCCDSSGLSAASSLIGLRLQLPAA

SEQ ID NO: 25097 - protein, 322 aa, Zea mays subsp. mays
  peptide (1)..(322): Ceres Seq. ID no. 12414175
  misc_feature (4)..(110): Pfam Name: Pfam Description:  Protein of unknown function DUF260
  misc_feature (1)..(321): NCBI GI NO: 34914608 NR Description: P0520B06.17
  misc_feature (1)..(210): NCBI GI NO: 18396229 NR Description: expressed protein; protein id: At3g02550
  misc_feature (1)..(210): NCBI GI NO: 21554191 NR Description: unknown [Arabidopsis thaliana]
  misc_feature (1)..(177): NCBI GI NO: 34895540 NR Description: unnamed protein product
  misc_feature (1)..(148): NCBI GI NO: 15221429 NR Description: expressed protein; protein id: At1g68510
  misc_feature (1)..(147): NCBI GI NO: 15219829 NR Description: hypothetical protein; protein id: At1g67100.1
  misc_feature (3)..(125): NCBI GI NO: 15229644 NR Description: putative protein; protein id: At3g49940
  misc_feature (3)..(125): NCBI GI NO: 21553886 NR Description: unknown [Arabidopsis thaliana]
  misc_feature (3)..(125): NCBI GI NO: 15240739 NR Description: putative protein; protein id: At5g67420
  misc_feature (3)..(125): NCBI GI NO: 21593577 NR Description: unknown [Arabidopsis thaliana]
MRMSCNGCRVLRKGCSDACTIRPCLQWIDSPEAQANATVFLAKFYGRAGLLNLLAAAPDDAARPAVFRSLLYEACGRIVNPVYGSVGLLWSRRWQSCVDAVEAVLKGDPVVQVDAGSEAAAAPAPLLGASRPAAPPAAYDIRHVARDPDAAAAADLLRVARGGGRRRFKRAGSPSNACKAKPLKGKASSNERASPSPTQRQHQQETEELELEPVPMVVELEHGEESAGSHDHHHHHLQPQGSSEDTDVEAASHVSPGPRPSRRSAARARRWWRTQEGEEVRLELTLGFEPVVRQQPRLSCCDSSGLSAASSLIGLRLQLPAA

SEQ ID NO: 25098 - protein, 320 aa, Zea mays subsp. mays
  peptide (1)..(320): Ceres Seq. ID no. 12414176
  misc_feature (2)..(108): Pfam Name: Pfam Description:  Protein of unknown function DUF260
  misc_feature (1)..(319): NCBI GI NO: 34914608 NR Description: P0520B06.17
  misc_feature (1)..(208): NCBI GI NO: 18396229 NR Description: expressed protein; protein id: At3g02550
  misc_feature (1)..(208): NCBI GI NO: 21554191 NR Description: unknown [Arabidopsis thaliana]
  misc_feature (1)..(175): NCBI GI NO: 34895540 NR Description: unnamed protein product
  misc_feature (1)..(146): NCBI GI NO: 15221429 NR Description: expressed protein; protein id: At1g68510
  misc_feature (1)..(145): NCBI GI NO: 15219829 NR Description: hypothetical protein; protein id: At1g67100.1
  misc_feature (1)..(123): NCBI GI NO: 15229644 NR Description: putative protein; protein id: At3g49940
  misc_feature (1)..(123): NCBI GI NO: 21553886 NR Description: unknown [Arabidopsis thaliana]
  misc_feature (1)..(123): NCBI GI NO: 15240739 NR Description: putative protein; protein id: At5g67420
  misc_feature (1)..(123): NCBI GI NO: 21593577 NR Description: unknown [Arabidopsis thaliana]
MSCNGCRVLRKGCSDACTIRPCLQWIDSPEAQANATVFLAKFYGRAGLLNLLAAAPDDAARPAVFRSLLYEACGRIVNPVYGSVGLLWSRRWQSCVDAVEAVLKGDPVVQVDAGSEAAAAPAPLLGASRPAAPPAAYDIRHVARDPDAAAAADLLRVARGGGRRRFKRAGSPSNACKAKPLKGKASSNERASPSPTQRQHQQETEELELEPVPMVVELEHGEESAGSHDHHHHHLQPQGSSEDTDVEAASHVSPGPRPSRRSAARARRWWRTQEGEEVRLELTLGFEPVVRQQPRLSCCDSSGLSAASSLIGLRLQLPAA

SEQ ID NO: 25099 - DNA, 890 bp, Zea mays subsp. mays
  misc_feature (1)..(890): Ceres Seq. ID no. 12595102
gcacgagaccattacctagaacatcctaatcgaaaacctaatcaaaaacagaatctctaattctctcaactcaaaaccctaacatccgtccccactccccaatcaacctgccgccgcccgccagcaccaaacttccatccgccccgagctctgcctccgccgccgccgcgccatgaggcctctcgacgagaaggagacgactcaggtattcgagaagctgttcaagttcacggggcccaacctgaagcacctcctggagcgccccgcagtggagggccccgacgcggagcccggccgctactgcctccggcttcaccgcaatcgcgtctactacgcctccgaggcgctcgtgcgccgcggccaccgccgtgtcccgaccgcgcctcgccggcgtggggacgcccatcggcaagttcacccaccacggcgcgttccaccttacggtccacgcgctcgacctcctcgctgcgcacgcgcgccgccgcgtctggctaaagcccgacaccgagcgttcctttctctttggcaactccgtgcccaagtcttctctcgctcgcatcaccgagaacaccaaggccggggacggggtggtcgtcatgtccatggctgacgtcccgctcgggttcggcattgcggcgaggtcggcgcaggattgcaggaaggccgacaccaacgccgtggtcgtgctgcaccagtcggacgccggggagtacctccgcaaggaggaggagctcatgtgaggtgagcgcataggcttggctggttaggtcatattcatgagtgaattatggaagattgtgccttactgttgtgtgttccaaggcttggggcatatatatatgtactgaatgattaatcactggttatgagatgcgattattgctgttgcc

SEQ ID NO: 25100 - protein, 145 aa, Zea mays subsp. mays
  peptide (1)..(145): Ceres Seq. ID no. 12595103
  misc_feature (1)..(62): Pfam Name: UPF0113 Pfam Description: Uncharacterised protein family
  misc_feature (1)..(62): NCBI GI NO: 22831121 NR Description: putative 60S ribosome subunit biogenesis protein
  misc_feature (1)..(61): NCBI GI NO: 20301988 NR Description: Saccharomyces cerevisiae Nip7p homolog
  misc_feature (1)..(61): NCBI GI NO: 7705437 NR Description: hypothetical protein HSPC031 [Homo sapiens]
  misc_feature (1)..(61): NCBI GI NO: 12852038 NR Description: unnamed protein product [Mus musculus]
  misc_feature (1)..(61): NCBI GI NO: 13928674 NR Description: RIKEN cDNA 1110017C15 [Mus musculus]
  misc_feature (1)..(62): NCBI GI NO: 17506003 NR Description: 60S ribosome biogenesis (20.1 kD)
  misc_feature (1)..(62): NCBI GI NO: 39589582 NR Description: Hypothetical protein CBG12182
  misc_feature (1)..(61): NCBI GI NO: 34876605 NR Description: similar to Saccharomyces cerevisiae Nip7p homolog
  misc_feature (1)..(61): NCBI GI NO: 19075218 NR Description: putative protein involved in 60S ribosome subunitbiogenesis
  misc_feature (1)..(61): NCBI GI NO: 6841580 NR Description: HSPC180 [Homo sapiens]
MRPLDEKETTQVFEKLFKFTGPNLKHLLERPAVEGPDAEPGRYCLRLHRNRVYYASEALVRRGHRRVPTAPRRRGDAHRQVHPPRRVPPYGPRARPPRCARAPPRLAKARHRAFLSLWQLRAQVFSRSHHREHQGRGRGGRHVHG

SEQ ID NO: 25101 - DNA, 872 bp, Zea mays subsp. mays
  misc_feature (1)..(872): Ceres Seq. ID no. 12406168
atccattcccacagcaccaagcaagagcaaagagcaacacaaggcaaggcagcacacgacccgcggcgacgcaacaagagaagccagcagtcgtctggatccatcgattgacatggccatggcggcggcagcggagggcaagagccggaggttcgcgctggcctgcggggtgctgagccagtacgtgaaggccgagcagcagatggcggccgccggggcccctgccccgcgcgccccggccacgacgctgagcctcatgcccggcgcggacgtcggcgccgagcaggagccggccgccgcgagggggcaggagacggccgggtccgcctccacggcggcgccgctcaccatcttctacggcggcagggtggtcgtgttcgacgacttcccggcggagaaggcagccgaggtcatgcgcctcgcagctggcgccgagcgcccggcggccccggccccggcgccggcgccgcgcgacgacctgcctatcgcccggaaggcgtcgctgcagcggttcctggccaagcgcaaggaccgcctcgtggagcgcgccccctacgcccgcccgtccccatccgaggaggcggagaaggcgaagccggcctcctggctcgggctcggcggcacggacgccgagcgcctcaacatcgcgctgtgatttggatctcggttgctacccacccggatcgaccggtggcgatttgattggctgggttcctggcttcttttgggtcttgctggattggggttggtgtggagatcggagacggaggattgtagaaacgtattcttgttttttttctctctcccttacgagagagtttggctgttaattgattcgataatagaaagatggaggatgtacaattcgtgtc

SEQ ID NO: 25102 - protein, 217 aa, Zea mays subsp. mays
  peptide (1)..(217): Ceres Seq. ID no. 12406169
  misc_feature (108)..(142): Pfam Name: Pfam Description:  ZIM motif
  misc_feature (45)..(208): NCBI GI NO: 24960746 NR Description: Unknown protein
  misc_feature (40)..(187): NCBI GI NO: 37533948 NR Description: hypothetical protein
  misc_feature (43)..(205): NCBI GI NO: 37533958 NR Description: unknown protein
  misc_feature (39)..(208): NCBI GI NO: 24960745 NR Description: Unknown protein
  misc_feature (42)..(206): NCBI GI NO: 24960744 NR Description: Unknown protein
  misc_feature (46)..(202): NCBI GI NO: 37533952 NR Description: hypothetical protein
  misc_feature (144)..(203): NCBI GI NO: 21592605 NR Description: unknown [Arabidopsis thaliana]
  misc_feature (110)..(141): NCBI GI NO: 21592605 NR Description: unknown [Arabidopsis thaliana]
  misc_feature (144)..(203): NCBI GI NO: 18410737 NR Description: expressed protein; protein id: At1g74950
  misc_feature (110)..(141): NCBI GI NO: 18410737 NR Description: expressed protein; protein id: At1g74950
SIPTAPSKSKEQHKARQHTTRGDATREASSRLDPSIDMAMAAAAEGKSRRFALACGVLSQYVKAEQQMAAAGAPAPRAPATTLSLMPGADVGAEQEPAAARGQETAGSASTAAPLTIFYGGRVVVFDDFPAEKAAEVMRLAAGAERPAAPAPAPAPRDDLPIARKASLQRFLAKRKDRLVERAPYARPSPSEEAEKAKPASWLGLGGTDAERLNIAL

SEQ ID NO: 25103 - protein, 180 aa, Zea mays subsp. mays
  peptide (1)..(180): Ceres Seq. ID no. 12406170
  misc_feature (71)..(105): Pfam Name: Pfam Description:  ZIM motif
  misc_feature (8)..(171): NCBI GI NO: 24960746 NR Description: Unknown protein
  misc_feature (3)..(150): NCBI GI NO: 37533948 NR Description: hypothetical protein
  misc_feature (6)..(168): NCBI GI NO: 37533958 NR Description: unknown protein
  misc_feature (2)..(171): NCBI GI NO: 24960745 NR Description: Unknown protein
  misc_feature (5)..(169): NCBI GI NO: 24960744 NR Description: Unknown protein
  misc_feature (9)..(165): NCBI GI NO: 37533952 NR Description: hypothetical protein
  misc_feature (107)..(166): NCBI GI NO: 21592605 NR Description: unknown [Arabidopsis thaliana]
  misc_feature (73)..(104): NCBI GI NO: 21592605 NR Description: unknown [Arabidopsis thaliana]
  misc_feature (107)..(166): NCBI GI NO: 18410737 NR Description: expressed protein; protein id: At1g74950
  misc_feature (73)..(104): NCBI GI NO: 18410737 NR Description: expressed protein; protein id: At1g74950
MAMAAAAEGKSRRFALACGVLSQYVKAEQQMAAAGAPAPRAPATTLSLMPGADVGAEQEPAAARGQETAGSASTAAPLTIFYGGRVVVFDDFPAEKAAEVMRLAAGAERPAAPAPAPAPRDDLPIARKASLQRFLAKRKDRLVERAPYARPSPSEEAEKAKPASWLGLGGTDAERLNIAL

SEQ ID NO: 25104 - protein, 178 aa, Zea mays subsp. mays
  peptide (1)..(178): Ceres Seq. ID no. 12406171
  misc_feature (69)..(103): Pfam Name: Pfam Description:  ZIM motif
  misc_feature (6)..(169): NCBI GI NO: 24960746 NR Description: Unknown protein
  misc_feature (1)..(148): NCBI GI NO: 37533948 NR Description: hypothetical protein
  misc_feature (4)..(166): NCBI GI NO: 37533958 NR Description: unknown protein
  misc_feature (1)..(169): NCBI GI NO: 24960745 NR Description: Unknown protein
  misc_feature (3)..(167): NCBI GI NO: 24960744 NR Description: Unknown protein
  misc_feature (7)..(163): NCBI GI NO: 37533952 NR Description: hypothetical protein
  misc_feature (105)..(164): NCBI GI NO: 21592605 NR Description: unknown [Arabidopsis thaliana]
  misc_feature (71)..(102): NCBI GI NO: 21592605 NR Description: unknown [Arabidopsis thaliana]
  misc_feature (105)..(164): NCBI GI NO: 18410737 NR Description: expressed protein; protein id: At1g74950
  misc_feature (71)..(102): NCBI GI NO: 18410737 NR Description: expressed protein; protein id: At1g74950
MAAAAEGKSRRFALACGVLSQYVKAEQQMAAAGAPAPRAPATTLSLMPGADVGAEQEPAAARGQETAGSASTAAPLTIFYGGRVVVFDDFPAEKAAEVMRLAAGAERPAAPAPAPAPRDDLPIARKASLQRFLAKRKDRLVERAPYARPSPSEEAEKAKPASWLGLGGTDAERLNIAL

SEQ ID NO: 25105 - DNA, 1393 bp, Zea mays subsp. mays
  misc_feature (1)..(1393): Ceres Seq. ID no. 12359989
aatcctaccaggcaccactcgcatcgtgtgctcagtcagatccccgtcccgcatttcctaaggccagctgctggtgtgcagatggtggctgcacgcccttgcatttcggcctcgccaggaattcttaccgcacgggtagcagtttctaggactgattgcatgctcagttaccactgctacattccccaaaatcagctgctcctggcctctaaggtttaagcgcaatgatgttgttgtaagagcaatatcggaagagtgtggcccgcaggggcttcccattgatctcagaggtaaaagggcattcattgctggagttgctgatgataatggctatggatgggcaattgcgaaggcacttgctgcggctggtgctgaaattcttgtgggtacatgggtgccggcacttaacatatttgagacaagtctgaggcgtggaaagtttgatgaatcacggaagctgccagatggatctcttatggatattgttaaagtctatccacttgatgctgtctacgattcccctgatgatgttcctgaagatgtcaaatcgaacaaaagatatgcaggggcatcaaactggacagtaaaggaagttgttgaatcagtgaggaatgattttggcagcattgacatactagtgcattctcttgctaatggcccagaggtaacgaagcctttgttggaaacctcaagaagaggctatcttgcggcaatttctgcatccagttactcctatgtttcattgcttcagcacttccttcctataatgaatcccggtggtgctagcatctctctaacatacattgcatctgaaagggcgattcctgggtatggtggtgggatgagttctgctaaagcagctcttgagagtgatacacgggtgcttgcattcgaagctgggcgaaaaggcaaaatcagagttaacaccatatcagcaggccctcttgggagccgagctgctaaggcaattggatttattgagaagatgatagagtactcatatgttaatgcaccattgcagaaggagctgttggctgatgaggtggggaacacagctgcattcctggtttcttcattggcttctgccatcaccggctcgactgtttatgttgacaatgggctcaatacaatggggcttgcaattgacagccctaccataacgtcatagatgtggttgtggtagatagacgacctttcctgctgcattgcggtatcatccttgaataaagatcatagttagttattagtatgagaggtaagggcaggaaagggggaaaattatgaactggtcttttgcgctttctttgctggagaggaacattagagcgatttccagaatgatgggatgctattatgtgatttcatatgattcagaagcagtacaataactccc

SEQ ID NO: 25106 - protein, 230 aa, Zea mays subsp. mays
  peptide (1)..(230): Ceres Seq. ID no. 12359990
  misc_feature (1)..(230): NCBI GI NO: 38637198 NR Description: putative enoyl-ACP reductase
  misc_feature (1)..(230): NCBI GI NO: 7489537 NR Description: probable enoyl-
  misc_feature (1)..(226): NCBI GI NO: 14422255 NR Description: enoyl-
  misc_feature (1)..(226): NCBI GI NO: 14422259 NR Description: enoyl-
  misc_feature (1)..(226): NCBI GI NO: 14422261 NR Description: enoyl-
  misc_feature (1)..(226): NCBI GI NO: 461461 NR Description: Enoyl-
  misc_feature (1)..(226): NCBI GI NO: 14422257 NR Description: enoyl-
  misc_feature (1)..(226): NCBI GI NO: 1827677 NR Description: Brassica Napus Enoyl Acp ReductaseNADH BINARYCOMPLEX AT Ph 8
  misc_feature (1)..(226): NCBI GI NO: 99805 NR Description: enoyl-
  misc_feature (1)..(226): NCBI GI NO: 6573651 NR Description: Chain A
MDIVKVYPLDAVYDSPDDVPEDVKSNKRYAGASNWTVKEVVESVRNDFGSIDILVHSLANGPEVTKPLLETSRRGYLAAISASSYSYVSLLQHFLPIMNPGGASISLTYIASERAIPGYGGGMSSAKAALESDTRVLAFEAGRKGKIRVNTISAGPLGSRAAKAIGFIEKMIEYSYVNAPLQKELLADEVGNTAAFLVSSLASAITGSTVYVDNGLNTMGLAIDSPTITS

SEQ ID NO: 25107 - protein, 133 aa, Zea mays subsp. mays
  peptide (1)..(133): Ceres Seq. ID no. 12359991
  misc_feature (1)..(133): NCBI GI NO: 38637198 NR Description: putative enoyl-ACP reductase
  misc_feature (1)..(133): NCBI GI NO: 7489537 NR Description: probable enoyl-
  misc_feature (1)..(129): NCBI GI NO: 14422255 NR Description: enoyl-
  misc_feature (1)..(129): NCBI GI NO: 14422259 NR Description: enoyl-
  misc_feature (1)..(129): NCBI GI NO: 14422261 NR Description: enoyl-
  misc_feature (1)..(129): NCBI GI NO: 461461 NR Description: Enoyl-
  misc_feature (1)..(129): NCBI GI NO: 14422257 NR Description: enoyl-
  misc_feature (1)..(129): NCBI GI NO: 1827677 NR Description: Brassica Napus Enoyl Acp ReductaseNADH BINARYCOMPLEX AT Ph 8
  misc_feature (1)..(129): NCBI GI NO: 99805 NR Description: enoyl-
  misc_feature (1)..(129): NCBI GI NO: 6573651 NR Description: Chain A
MNPGGASISLTYIASERAIPGYGGGMSSAKAALESDTRVLAFEAGRKGKIRVNTISAGPLGSRAAKAIGFIEKMIEYSYVNAPLQKELLADEVGNTAAFLVSSLASAITGSTVYVDNGLNTMGLAIDSPTITS

SEQ ID NO: 25108 - DNA, 1725 bp, Zea mays subsp. mays
  misc_feature (1)..(1725): Ceres Seq. ID no. 12410243
aggaggtggggtgagttcgcgggtcgagcggaggagaagcttctggtggtggtggctctcgtcgtcaagcaggaggggagagaggagccggcggcggaggtgaatggcggtggagtaccactgctgctcggcggcctttttcgagcacatcgtcatcatcatcgtgctcgtgctcttcgcgggcctcatgtcgggcctcaccctgggcctcatgtcccttagcctcgtcgatctcgaggtcctcgccaagtccggcaccgagcaggatcgcaagcacgcagctaagattttacctgttgtgaagaaccagcaccttctgctatgcactcttctaatctgcaatgcggctgcaatggaggctttgcccatattccttgatagcttggtgacagcttggggtgctattttaatatcagtgacactgattctgctttttggtgagatcttaccacagtccatctgctcacattatgggctggctattggtgcctcagttgctccattagtccgtgtgcttgtttgggtctgctttcctattgcctatcctataagcaagctattggactatgtgctgggtcatggtcagacagctctcttccgtagagctgaactaaaaacacttgtcactctgcacgggaatgaggctggcaaaggtggagaattaacccatgatgaaactaccataatatcaggagctcttgaactgactgaaaagaaagctaaagatgctatgacacccttgtgtcaaacatttgcaattgatataaatgcaaaacttgacaggaatctaatgcaagaggtacttgagaaagggcatagcagagttcctgtgtattatgaaaagaaaacgaatattattggattgatattggtgaagaatttattatcagttagtgctgatgatgaggttcctataaaaagtgtaactatccgcaaaattcctcgtgttctagaagaaatgcccctctatgacatcctaaacgaatttcagaaaggtcacagccacatggctgtagtcataaggaaaaacaatccaagttaccaaccagctgaacaagctgctaatgatggtggaacttttgaggtgtccattgctattgatgataagaacaacgaaaaggtcgtgaaaaaccttccgccaccactgcaaagatggaagagctaccctaacactcagaacacatcaaatagaggaaataggcctaaaaaatggtccaaagatcaagcagacgttctgcaggtccataaagagcccttgcccacactgagcgaagatgaagaggctgttggtatcataaccatggaggatgtcatagaggagctcctgcaggaggagatatacgacgagacagacgtacatgaggaacaatgacgctggccttgcgccctccctccagctgttagaaagtgcgcttttatgcaaaacttatgtatagataggcagatacactgagagatattttagccgtagcccgtagccgttcattgtagtactataggtggctggctgtctcgagtattggtaaagactgttcggagtgcgtcgttcgttctcgtccagaacagctgggttctgggcatccggggaagaaacggaggcgttgacgcgtgtgtgtaggttcagaagaaaccccaataagataattgcgttgttatatgatgccgctcgcattattaggacgaatctgttgacatatagtcttataaattaaaaacaatgtttcg

SEQ ID NO: 25109 - protein, 422 aa, Zea mays subsp. mays
  peptide (1)..(422): Ceres Seq. ID no. 12410244
  misc_feature (14)..(191): Pfam Name: Pfam Description:  Domain of unknown function DUF21
  misc_feature (1)..(422): NCBI GI NO: 40538933 NR Description: expressed protein
  misc_feature (1)..(421): NCBI GI NO: 30679136 NR Description: CBS domain containing protein
  misc_feature (1)..(421): NCBI GI NO: 22329131 NR Description: putative protein; protein id: At4g33700
  misc_feature (29)..(421): NCBI GI NO: 7487085 NR Description: hypothetical protein T16L1
  misc_feature (180)..(409): NCBI GI NO: 25411569 NR Description: hypothetical protein At2g14520
  misc_feature (1)..(151): NCBI GI NO: 25411569 NR Description: hypothetical protein At2g14520
  misc_feature (1)..(257): NCBI GI NO: 12039276 NR Description: putative ancient conserved domain protein
  misc_feature (1)..(321): NCBI GI NO: 22330087 NR Description: unknown protein; protein id: At1g47330
  misc_feature (377)..(417): NCBI GI NO: 22330087 NR Description: unknown protein; protein id: At1g47330
  misc_feature (7)..(323): NCBI GI NO: 15237264 NR Description: putative protein; protein id: At5g52790.1
MAVEYHCCSAAFFEHIVIIIVLVLFAGLMSGLTLGLMSLSLVDLEVLAKSGTEQDRKHAAKILPVVKNQHLLLCTLLICNAAAMEALPIFLDSLVTAWGAILISVTLILLFGEILPQSICSHYGLAIGASVAPLVRVLVWVCFPIAYPISKLLDYVLGHGQTALFRRAELKTLVTLHGNEAGKGGELTHDETTIISGALELTEKKAKDAMTPLCQTFAIDINAKLDRNLMQEVLEKGHSRVPVYYEKKTNIIGLILVKNLLSVSADDEVPIKSVTIRKIPRVLEEMPLYDILNEFQKGHSHMAVVIRKNNPSYQPAEQAANDGGTFEVSIAIDDKNNEKVVKNLPPPLQRWKSYPNTQNTSNRGNRPKKWSKDQADVLQVHKEPLPTLSEDEEAVGIITMEDVIEELLQEEIYDETDVHEEQ

SEQ ID NO: 25110 - protein, 394 aa, Zea mays subsp. mays
  peptide (1)..(394): Ceres Seq. ID no. 12410245
  misc_feature (1)..(163): Pfam Name: Pfam Description:  Domain of unknown function DUF21
  misc_feature (1)..(394): NCBI GI NO: 40538933 NR Description: expressed protein
  misc_feature (1)..(393): NCBI GI NO: 30679136 NR Description: CBS domain containing protein
  misc_feature (1)..(393): NCBI GI NO: 22329131 NR Description: putative protein; protein id: At4g33700
  misc_feature (1)..(393): NCBI GI NO: 7487085 NR Description: hypothetical protein T16L1
  misc_feature (152)..(381): NCBI GI NO: 25411569 NR Description: hypothetical protein At2g14520
  misc_feature (1)..(123): NCBI GI NO: 25411569 NR Description: hypothetical protein At2g14520
  misc_feature (1)..(229): NCBI GI NO: 12039276 NR Description: putative ancient conserved domain protein
  misc_feature (1)..(293): NCBI GI NO: 22330087 NR Description: unknown protein; protein id: At1g47330
  misc_feature (349)..(389): NCBI GI NO: 22330087 NR Description: unknown protein; protein id: At1g47330
  misc_feature (1)..(295): NCBI GI NO: 15237264 NR Description: putative protein; protein id: At5g52790.1
MSGLTLGLMSLSLVDLEVLAKSGTEQDRKHAAKILPVVKNQHLLLCTLLICNAAAMEALPIFLDSLVTAWGAILISVTLILLFGEILPQSICSHYGLAIGASVAPLVRVLVWVCFPIAYPISKLLDYVLGHGQTALFRRAELKTLVTLHGNEAGKGGELTHDETTIISGALELTEKKAKDAMTPLCQTFAIDINAKLDRNLMQEVLEKGHSRVPVYYEKKTNIIGLILVKNLLSVSADDEVPIKSVTIRKIPRVLEEMPLYDILNEFQKGHSHMAVVIRKNNPSYQPAEQAANDGGTFEVSIAIDDKNNEKVVKNLPPPLQRWKSYPNTQNTSNRGNRPKKWSKDQADVLQVHKEPLPTLSEDEEAVGIITMEDVIEELLQEEIYDETDVHEEQ

SEQ ID NO: 25111 - protein, 386 aa, Zea mays subsp. mays
  peptide (1)..(386): Ceres Seq. ID no. 12410246
  misc_feature (1)..(155): Pfam Name: Pfam Description:  Domain of unknown function DUF21
  misc_feature (1)..(386): NCBI GI NO: 40538933 NR Description: expressed protein
  misc_feature (1)..(385): NCBI GI NO: 30679136 NR Description: CBS domain containing protein
  misc_feature (1)..(385): NCBI GI NO: 22329131 NR Description: putative protein; protein id: At4g33700
  misc_feature (1)..(385): NCBI GI NO: 7487085 NR Description: hypothetical protein T16L1
  misc_feature (144)..(373): NCBI GI NO: 25411569 NR Description: hypothetical protein At2g14520
  misc_feature (1)..(115): NCBI GI NO: 25411569 NR Description: hypothetical protein At2g14520
  misc_feature (1)..(221): NCBI GI NO: 12039276 NR Description: putative ancient conserved domain protein
  misc_feature (1)..(285): NCBI GI NO: 22330087 NR Description: unknown protein; protein id: At1g47330
  misc_feature (341)..(381): NCBI GI NO: 22330087 NR Description: unknown protein; protein id: At1g47330
  misc_feature (1)..(287): NCBI GI NO: 15237264 NR Description: putative protein; protein id: At5g52790.1
MSLSLVDLEVLAKSGTEQDRKHAAKILPVVKNQHLLLCTLLICNAAAMEALPIFLDSLVTAWGAILISVTLILLFGEILPQSICSHYGLAIGASVAPLVRVLVWVCFPIAYPISKLLDYVLGHGQTALFRRAELKTLVTLHGNEAGKGGELTHDETTIISGALELTEKKAKDAMTPLCQTFAIDINAKLDRNLMQEVLEKGHSRVPVYYEKKTNIIGLILVKNLLSVSADDEVPIKSVTIRKIPRVLEEMPLYDILNEFQKGHSHMAVVIRKNNPSYQPAEQAANDGGTFEVSIAIDDKNNEKVVKNLPPPLQRWKSYPNTQNTSNRGNRPKKWSKDQADVLQVHKEPLPTLSEDEEAVGIITMEDVIEELLQEEIYDETDVHEEQ

SEQ ID NO: 25112 - DNA, 1632 bp, Zea mays subsp. mays
  misc_feature (1)..(1632): Ceres Seq. ID no. 12410235
agccctcttcctcgggaagatttcaaatccccgcggcctcttccatctcctgctcggcacggcacctccggctgcccgaaaaatttcgcacatcccagattcccgcccgctctggttcgcgccctcgtctggttcccttgccaacccggtcattcaacgtcgcagccaccccgcgcggctagggctgggactcgaggcctagggtttggctgtaagtttggtaacacgatggcgggggccgcgggggagagcagcggcgagcggcaggggacggtggagcggcggatgctgcggtcgcggtaccacgccgtgaagagcatcatcagcgatgagcgggatgagatgtcgagggcggattcggacaggttcacagccatcatccagcaggtggattgcctacacgagctcgtgcagaggcctagggagcaaatagcggatgcagaagctctgcttggcattacaaacactttggtaacttcggtgaggtcccactcaagtgaaggaatcagcccttctgatttcataacagctttactcaagaagtttgggcagcaagggaatcatgatgatgagtctgtctcattacgatggggtgatcttgggctttctgtttcacatatcttcaggcctgtgcctggatgctgtaccatgcttggtcctatgaatactgaagtaaagcaacggaaagttgtagctgtcggtaggaaacggactgcacggccaacagaaaatacctgtcctgaagagcttgctgagtcttcagaggaagtaaagacagacactgacaggaatgtcttagttatgtttgatatcctcaggcgaaagaagagcgcaaaattggaaaaccttgtgttgaataggctttcatttgcccaaacagttgaaaatgtttttgcactatctttcttagtgaaagatggtagggtggaaataactgtagatgatagcgggcatatagtacggccaaggaatgcacctgctgctagcgctatagcctcaggagaagtctcatacagtcattttgtttttagatttgacttcaaggactggaagcttatgaaagaagttgttacagagggagaagagctgttgccacataggacttcccagagcaatctttgcaacgaagaaaacgaccaaccaaatctggaggcacgtgcgcaaataacacctatcaggaaactcacccggaaccgaggattggtctttcaggatcatgtagtcgaggaaactcctgaagagaaccaagcgtctaagcgcaggcgccttttcaggaatcaagattgacctagcaattgcttggcatgagtagtgtaggcaggcaacctggcttgtgttgtatgcaaaaaattgcctgagcctgagtaacgtgtctttcactaggtctgttgtgccatgctgtcttgttcttggcacagctcgtgcttatctgaacttccagttgtgccagcggagtagagctgtaattataaattgtttgaagttctggtcacatcttgcaactacagaatggtgtttgtagggctgagtgtaactagctagcttggctcggtctggtctgggtcattaactcatttattatcatggcaagatgtgcctcgggtcagcttgttaggctgtcatagcttactg

SEQ ID NO: 25113 - protein, 428 aa, Zea mays subsp. mays
  peptide (1)..(428): Ceres Seq. ID no. 12410236
  misc_feature (87)..(425): NCBI GI NO: 15223745 NR Description: hypothetical protein; protein id: At1g51130.1
  misc_feature (87)..(370): NCBI GI NO: 9294403 NR Description: gene_id:MOE17.7~unknown protein
  misc_feature (87)..(370): NCBI GI NO: 15232359 NR Description: hypothetical protein; protein id: At3g20760.1
  misc_feature (78)..(422): NCBI GI NO: 28411875 NR Description: OSJNBa0016N23.27
  misc_feature (311)..(427): NCBI GI NO: 5441894 NR Description: EST AU030111
  misc_feature (80)..(139): NCBI GI NO: 5441894 NR Description: EST AU030111
  misc_feature (247)..(381): NCBI GI NO: 38344630 NR Description: OSJNBb0003A12.16
  misc_feature (216)..(372): NCBI GI NO: 40741562 NR Description: hypothetical protein AN4710.2
SPLPREDFKSPRPLPSPARHGTSGCPKNFAHPRFPPALVRALVWFPCQPGHSTSQPPRAARAGTRGLGFGCKFGNTMAGAAGESSGERQGTVERRMLRSRYHAVKSIISDERDEMSRADSDRFTAIIQQVDCLHELVQRPREQIADAEALLGITNTLVTSVRSHSSEGISPSDFITALLKKFGQQGNHDDESVSLRWGDLGLSVSHIFRPVPGCCTMLGPMNTEVKQRKVVAVGRKRTARPTENTCPEELAESSEEVKTDTDRNVLVMFDILRRKKSAKLENLVLNRLSFAQTVENVFALSFLVKDGRVEITVDDSGHIVRPRNAPAASAIASGEVSYSHFVFRFDFKDWKLMKEVVTEGEELLPHRTSQSNLCNEENDQPNLEARAQITPIRKLTRNRGLVFQDHVVEETPEENQASKRRRLFRNQD

SEQ ID NO: 25114 - protein, 352 aa, Zea mays subsp. mays
  peptide (1)..(352): Ceres Seq. ID no. 12410237
  misc_feature (11)..(349): NCBI GI NO: 15223745 NR Description: hypothetical protein; protein id: At1g51130.1
  misc_feature (11)..(294): NCBI GI NO: 9294403 NR Description: gene_id:MOE17.7~unknown protein
  misc_feature (11)..(294): NCBI GI NO: 15232359 NR Description: hypothetical protein; protein id: At3g20760.1
  misc_feature (2)..(346): NCBI GI NO: 28411875 NR Description: OSJNBa0016N23.27
  misc_feature (235)..(351): NCBI GI NO: 5441894 NR Description: EST AU030111
  misc_feature (4)..(63): NCBI GI NO: 5441894 NR Description: EST AU030111
  misc_feature (171)..(305): NCBI GI NO: 38344630 NR Description: OSJNBb0003A12.16
  misc_feature (140)..(296): NCBI GI NO: 40741562 NR Description: hypothetical protein AN4710.2
MAGAAGESSGERQGTVERRMLRSRYHAVKSIISDERDEMSRADSDRFTAIIQQVDCLHELVQRPREQIADAEALLGITNTLVTSVRSHSSEGISPSDFITALLKKFGQQGNHDDESVSLRWGDLGLSVSHIFRPVPGCCTMLGPMNTEVKQRKVVAVGRKRTARPTENTCPEELAESSEEVKTDTDRNVLVMFDILRRKKSAKLENLVLNRLSFAQTVENVFALSFLVKDGRVEITVDDSGHIVRPRNAPAASAIASGEVSYSHFVFRFDFKDWKLMKEVVTEGEELLPHRTSQSNLCNEENDQPNLEARAQITPIRKLTRNRGLVFQDHVVEETPEENQASKRRRLFRNQD

SEQ ID NO: 25115 - protein, 333 aa, Zea mays subsp. mays
  peptide (1)..(333): Ceres Seq. ID no. 12410238
  misc_feature (1)..(330): NCBI GI NO: 15223745 NR Description: hypothetical protein; protein id: At1g51130.1
  misc_feature (1)..(275): NCBI GI NO: 9294403 NR Description: gene_id:MOE17.7~unknown protein
  misc_feature (1)..(275): NCBI GI NO: 15232359 NR Description: hypothetical protein; protein id: At3g20760.1
  misc_feature (1)..(327): NCBI GI NO: 28411875 NR Description: OSJNBa0016N23.27
  misc_feature (216)..(332): NCBI GI NO: 5441894 NR Description: EST AU030111
  misc_feature (1)..(44): NCBI GI NO: 5441894 NR Description: EST AU030111
  misc_feature (152)..(286): NCBI GI NO: 38344630 NR Description: OSJNBb0003A12.16
  misc_feature (121)..(277): NCBI GI NO: 40741562 NR Description: hypothetical protein AN4710.2
MLRSRYHAVKSIISDERDEMSRADSDRFTAIIQQVDCLHELVQRPREQIADAEALLGITNTLVTSVRSHSSEGISPSDFITALLKKFGQQGNHDDESVSLRWGDLGLSVSHIFRPVPGCCTMLGPMNTEVKQRKVVAVGRKRTARPTENTCPEELAESSEEVKTDTDRNVLVMFDILRRKKSAKLENLVLNRLSFAQTVENVFALSFLVKDGRVEITVDDSGHIVRPRNAPAASAIASGEVSYSHFVFRFDFKDWKLMKEVVTEGEELLPHRTSQSNLCNEENDQPNLEARAQITPIRKLTRNRGLVFQDHVVEETPEENQASKRRRLFRNQD

SEQ ID NO: 25116 - DNA, 711 bp, Zea mays subsp. mays
  misc_feature (1)..(711): Ceres Seq. ID no. 12345309
cccgtctaggcgacgacgacgacgaagcagcgggaggagcataagcgccgccgatcccgagcctccgagcgtgttctcccctcatcctccgcctcgtgccgcagatccctacgtactccgcccgccagccatggcccgctcctcctcgcagtcgcagtcctccgttggcgccggcgccggcgccggcgcgcgcccggccaccgtcgggccgcgcggcacggccgcggcggccgccgggatgcgccgccgccgcgccaccgcgtccggcgggggtggcggattctcggggggcggcgggagcaacatgctccgcttctacaccgacgaggcgccggggctccggctctcgcctaccatggtgctcgtcatgtcgctctgcttcatcggcttcgtcaccgccctccacatcttcggcaagctctaccgctcccggacggccgcggcctccgcgtgatccgatccgatccgaccgctcttgctcccacacatcggatcagacagacagatcagacggtgaaggttttggtttttgggtgatgaatttgtgtatggcgagacgcgcagcttgttgtgttgcctagcttttggttggtccttactttcgatctgcagatggaaaccctagtactggtcaacttaatgcgccctttctgttattttcttcccttgctttgagaattattactggaataactatgactagtttcttcc

SEQ ID NO: 25117 - protein, 150 aa, Zea mays subsp. mays
  peptide (1)..(150): Ceres Seq. ID no. 12345310
  misc_feature (96)..(141): Pfam Name: Pfam Description:  Sec61beta family
  misc_feature (44)..(147): NCBI GI NO: 15239337 NR Description: protein transport protein subunit - like
  misc_feature (71)..(141): NCBI GI NO: 15225401 NR Description: putative transport protein SEC61 beta-subunit
  misc_feature (71)..(143): NCBI GI NO: 34914212 NR Description: P0697C12.13
  misc_feature (71)..(141): NCBI GI NO: 15232357 NR Description: transport protein subunit - like
  misc_feature (71)..(141): NCBI GI NO: 26450635 NR Description: putative transport protein subunit
  misc_feature (38)..(143): NCBI GI NO: 31226926 NR Description: ENSANGP00000014901 [Anopheles gambiae]
  misc_feature (51)..(143): NCBI GI NO: 31212591 NR Description: ENSANGP00000022309 [Anopheles gambiae]
  misc_feature (59)..(143): NCBI GI NO: 27370895 NR Description: Similar to protein translocation complex beta
  misc_feature (45)..(143): NCBI GI NO: 21356199 NR Description: CG10130-PA [Drosophila melanogaster]
PSRRRRRRSSGRSISAADPEPPSVFSPHPPPRAADPYVLRPPAMARSSSQSQSSVGAGAGAGARPATVGPRGTAAAAAGMRRRRATASGGGGGFSGGGGSNMLRFYTDEAPGLRLSPTMVLVMSLCFIGFVTALHIFGKLYRSRTAAASA

SEQ ID NO: 25118 - protein, 107 aa, Zea mays subsp. mays
  peptide (1)..(107): Ceres Seq. ID no. 12345311
  misc_feature (53)..(98): Pfam Name: Pfam Description:  Sec61beta family
  misc_feature (1)..(104): NCBI GI NO: 15239337 NR Description: protein transport protein subunit - like
  misc_feature (28)..(98): NCBI GI NO: 15225401 NR Description: putative transport protein SEC61 beta-subunit
  misc_feature (28)..(100): NCBI GI NO: 34914212 NR Description: P0697C12.13
  misc_feature (28)..(98): NCBI GI NO: 15232357 NR Description: transport protein subunit - like
  misc_feature (28)..(98): NCBI GI NO: 26450635 NR Description: putative transport protein subunit
  misc_feature (1)..(100): NCBI GI NO: 31226926 NR Description: ENSANGP00000014901 [Anopheles gambiae]
  misc_feature (8)..(100): NCBI GI NO: 31212591 NR Description: ENSANGP00000022309 [Anopheles gambiae]
  misc_feature (16)..(100): NCBI GI NO: 27370895 NR Description: Similar to protein translocation complex beta
  misc_feature (2)..(100): NCBI GI NO: 21356199 NR Description: CG10130-PA [Drosophila melanogaster]
MARSSSQSQSSVGAGAGAGARPATVGPRGTAAAAAGMRRRRATASGGGGGFSGGGGSNMLRFYTDEAPGLRLSPTMVLVMSLCFIGFVTALHIFGKLYRSRTAAASA

SEQ ID NO: 25119 - DNA, 1751 bp, Zea mays subsp. mays
  misc_feature (1)..(1751): Ceres Seq. ID no. 12373788
atccctccacgttctcagaaaagtcgtccacgcgtctataaaccacaccaatcttttggcccttcgcttctccgttctcccccaattcgccttcacctcgccgcttcctccttgaccgccaccgttgacgtcgtcttccggcgaggtagctcgccggaagacctcacctggacttttccgacgcaccctccacacactctttaaccctccggaatggccgcctgcttctagctcgtcgacgccccaatctccgcttgcttcctcgacagccccatccgcctcttctcggctctcgctacggctcctctgcctgttcgccatggcggatccgcatcaccgtctcctactccggctacgtggcgcagaacctcgccgcgtcgctcggccaccgcttctcctccgcctccgcctcgggcagccgcctcctccatgacggcgcctggcgccccttctgcatcttcacctccacccgccagcccgagcagcaccgcggcagcggcagcgaccgccatgacggaggcgactacaaccacccgaagccccaggccatcgccgccggagctcactcgttgctgctcacgcgtgcgtgcttatcgtccaagtcgccgccgccgtctcttgccgtggggctgctctcggtgcttgcgcagaggacgggaccgacgcctggaaccaccggatcggcggcttctctctcaggctcgtcgccgatttccctcggtttcaaccccacctccttcctcccgttcctgcagacagcgaggtggctcccgtgcagcgaccttgcccacctcgtcgtcttcggcaccctcttcccctccccgctcgctggcgccttcggctccccccaagaaggcgttgattggtgcttctactggttctaccggaattgcgacgagcagtggtgctggtgcagcgatgagcaggagcaactggctgtcgaggtgggtcagctcctgctccgatgacgccaagacggcgtttgcggctgtgaccgtgccacttctctacgggtcgtccctggccgagccgaagtccatcccgtccaagtccatgtacccgaccttcgatgtcggtgatcggatacttgctgagaaggtctcatacatattccgggatccagaaatttcggacatcgtgatcttccgggctcccccaggacttcaggtttatggctacagctcaggtgatgtgttcatcaagagagttgtggccaagggaggagactatgttgaagtgcgtgatggcaagctgtttgttaatggagtagttcaggatgaggattttgtgctggagccacacaactacgagatggaaccagtgcttgtgccggaaggttatgtgttcgtgttgggagacaaccgcaacaacagctttgattcccacaactggggtccacttccagtgaggaacattgtcgggagatctatcctccggtattggccaccatcgaagatcaatgatacaatttatgagcctgatgtgtcccgcctcacggtgccgtcctcgtagtagtcgctgcagtgatgctggatatccagtgtgtgtacaatgaccttatacttcgtggagcctcatttgatgagttgagctccagttccaattctctcagaatattgtctcctgagtgttccctgtaaattctctttgcctgactgatttgttttcgctgccggttggcagatgcttgttcaaagcacgggaaagtgcagtaccttgcatcttgcaatacaaactaattaaaccggttg

SEQ ID NO: 25120 - protein, 360 aa, Zea mays subsp. mays
  peptide (1)..(360): Ceres Seq. ID no. 12373789
  misc_feature (170)..(331): Pfam Name: Pfam Description:  Signal peptidase I
  misc_feature (167)..(348): NCBI GI NO: 25408074 NR Description: probable signal peptidase I
  misc_feature (167)..(348): NCBI GI NO: 30684587 NR Description: signal peptidase I -related [Arabidopsis thaliana]
  misc_feature (167)..(354): NCBI GI NO: 15222236 NR Description: chloroplast thylakoidal processing peptidase
  misc_feature (167)..(354): NCBI GI NO: 21553622 NR Description: chloroplast thylakoidal processing peptidase
  misc_feature (145)..(349): NCBI GI NO: 9294054 NR Description: contains similarity to signal peptidase
  misc_feature (145)..(349): NCBI GI NO: 30687572 NR Description: chloroplast thylakoidal processing peptidase -related
  misc_feature (145)..(349): NCBI GI NO: 25082936 NR Description: chloroplast thylakoidal processing peptidase
  misc_feature (164)..(342): NCBI GI NO: 16329254 NR Description: leader peptidase I [Synechocystis sp. PCC 6803]
  misc_feature (187)..(343): NCBI GI NO: 17230467 NR Description: signal peptidase I [Nostoc sp. PCC 7120]
  misc_feature (169)..(343): NCBI GI NO: 23042815 NR Description: hypothetical protein
MTAPGAPSASSPPPASPSSTAAAAATAMTEATTTTRSPRPSPPELTRCCSRVRAYRPSRRRRLLPWGCSRCLRRGRDRRLEPPDRRLLSQARRRFPSVSTPPPSSRSCRQRGGSRAATLPTSSSSAPSSPPRSLAPSAPPKKALIGASTGSTGIATSSGAGAAMSRSNWLSRWVSSCSDDAKTAFAAVTVPLLYGSSLAEPKSIPSKSMYPTFDVGDRILAEKVSYIFRDPEISDIVIFRAPPGLQVYGYSSGDVFIKRVVAKGGDYVEVRDGKLFVNGVVQDEDFVLEPHNYEMEPVLVPEGYVFVLGDNRNNSFDSHNWGPLPVRNIVGRSILRYWPPSKINDTIYEPDVSRLTVPSS

SEQ ID NO: 25121 - protein, 333 aa, Zea mays subsp. mays
  peptide (1)..(333): Ceres Seq. ID no. 12373790
  misc_feature (143)..(304): Pfam Name: Pfam Description:  Signal peptidase I
  misc_feature (140)..(321): NCBI GI NO: 25408074 NR Description: probable signal peptidase I
  misc_feature (140)..(321): NCBI GI NO: 30684587 NR Description: signal peptidase I -related [Arabidopsis thaliana]
  misc_feature (140)..(327): NCBI GI NO: 15222236 NR Description: chloroplast thylakoidal processing peptidase
  misc_feature (140)..(327): NCBI GI NO: 21553622 NR Description: chloroplast thylakoidal processing peptidase
  misc_feature (118)..(322): NCBI GI NO: 9294054 NR Description: contains similarity to signal peptidase
  misc_feature (118)..(322): NCBI GI NO: 30687572 NR Description: chloroplast thylakoidal processing peptidase -related
  misc_feature (118)..(322): NCBI GI NO: 25082936 NR Description: chloroplast thylakoidal processing peptidase
  misc_feature (137)..(315): NCBI GI NO: 16329254 NR Description: leader peptidase I [Synechocystis sp. PCC 6803]
  misc_feature (160)..(316): NCBI GI NO: 17230467 NR Description: signal peptidase I [Nostoc sp. PCC 7120]
  misc_feature (142)..(316): NCBI GI NO: 23042815 NR Description: hypothetical protein
MTEATTTTRSPRPSPPELTRCCSRVRAYRPSRRRRLLPWGCSRCLRRGRDRRLEPPDRRLLSQARRRFPSVSTPPPSSRSCRQRGGSRAATLPTSSSSAPSSPPRSLAPSAPPKKALIGASTGSTGIATSSGAGAAMSRSNWLSRWVSSCSDDAKTAFAAVTVPLLYGSSLAEPKSIPSKSMYPTFDVGDRILAEKVSYIFRDPEISDIVIFRAPPGLQVYGYSSGDVFIKRVVAKGGDYVEVRDGKLFVNGVVQDEDFVLEPHNYEMEPVLVPEGYVFVLGDNRNNSFDSHNWGPLPVRNIVGRSILRYWPPSKINDTIYEPDVSRLTVPSS

SEQ ID NO: 25122 - protein, 197 aa, Zea mays subsp. mays
  peptide (1)..(197): Ceres Seq. ID no. 12373791
  misc_feature (7)..(168): Pfam Name: Pfam Description:  Signal peptidase I
  misc_feature (4)..(185): NCBI GI NO: 25408074 NR Description: probable signal peptidase I
  misc_feature (4)..(185): NCBI GI NO: 30684587 NR Description: signal peptidase I -related [Arabidopsis thaliana]
  misc_feature (4)..(191): NCBI GI NO: 15222236 NR Description: chloroplast thylakoidal processing peptidase
  misc_feature (4)..(191): NCBI GI NO: 21553622 NR Description: chloroplast thylakoidal processing peptidase
  misc_feature (1)..(186): NCBI GI NO: 9294054 NR Description: contains similarity to signal peptidase
  misc_feature (1)..(186): NCBI GI NO: 30687572 NR Description: chloroplast thylakoidal processing peptidase -related
  misc_feature (1)..(186): NCBI GI NO: 25082936 NR Description: chloroplast thylakoidal processing peptidase
  misc_feature (1)..(179): NCBI GI NO: 16329254 NR Description: leader peptidase I [Synechocystis sp. PCC 6803]
  misc_feature (24)..(180): NCBI GI NO: 17230467 NR Description: signal peptidase I [Nostoc sp. PCC 7120]
  misc_feature (6)..(180): NCBI GI NO: 23042815 NR Description: hypothetical protein
MSRSNWLSRWVSSCSDDAKTAFAAVTVPLLYGSSLAEPKSIPSKSMYPTFDVGDRILAEKVSYIFRDPEISDIVIFRAPPGLQVYGYSSGDVFIKRVVAKGGDYVEVRDGKLFVNGVVQDEDFVLEPHNYEMEPVLVPEGYVFVLGDNRNNSFDSHNWGPLPVRNIVGRSILRYWPPSKINDTIYEPDVSRLTVPSS

SEQ ID NO: 25123 - DNA, 1420 bp, Zea mays subsp. mays
  misc_feature (1)..(1420): Ceres Seq. ID no. 12344013
attcaacgtagggtacattatataataataagctaatagcagcgccacgcaccgacaccaatacgccatgggttccatcatggagcaacgctgcaacaacgatcagcaggcgctgctcgacgctcagctcgagctctggcacagcacgttcgcgttcatcaagtccatggcgttcaagtcggcgctggagctcggcatcgccgacgccatccactgccacggcggcaccgccacgctcacccagatagccaccaaggccgcgctccacccgtccaagacaccgtgcctgcgcaggctcatgcgcgcgctcacagtcgccggcatcttcagcgtcgccaagaactcgtccgacgatgacggcgatcagcacgtctacggcctcactccggcctcccgacttcttgtcggctcgtcacagaacttggctccaacactgagcctcatccttaacaacgtcttcgtggccccgttccttgacctcggcacgtggttcgagagcgcgctgccggccacagacctgccgctcttcgagctgtcccaccggaagaacgtgtgggacgtcgtcggccacgacccgtccgtgagccagctcttcaacgccgggatggtcgcggatacccgcttcctcatggacatcgccgtcagggagtgcggcgacgtgtttcaggggatacgctccctggtcgacgttggcggcggccatggcgcggcggcgcaggccatctctgcggcgttccctgccatacagtgcaccgtgctggaccttgcacacgtggtcgcaaccgctcccgcttgcgctgggctcagcttcgttgctggcgacatgtttgaggccattccgccagcgaatgctgtcttcctcaagtggatcatgcacgactggggtgacactgagtgtgtcacgatactaaagaactgcaagaaagctatacctccacgagatgcaggcggcaaggtgataatagtagataccgtggttggtgcagggcctccaaaccttaagaacaaagagacacaggtcatgtctgatctcttctttatgatcgtcaacggccttgagagagatgagcaggaatggaggaacgtcatctttgaagctggtttcagtgactacataatcataccagttttaggtgttcgatcaatcatcgagctatacccctgaaatataatccagcttcctcagccggcggccagctcatcacctacatgttgaatgctttggcgtgtggatctgtgtgtgtgttttttcctttaagaacagtgtgcatgtgtgtttaataaattggtatatatagttatatactcactaaaaggatggtttatgtatgcatgtatgcaagtgttccaaccattattatgtctccaaagtgaagaagttgcgtttttcaattttaaggaatgaactccaggattttct

SEQ ID NO: 25124 - protein, 365 aa, Zea mays subsp. mays
  peptide (1)..(365): Ceres Seq. ID no. 12344014
  misc_feature (96)..(340): Pfam Name: Pfam Description:  O-methyltransferase
  misc_feature (5)..(365): NCBI GI NO: 1353193 NR Description: O-METHYLTRANSFERASE ZRP4 (OMT)
  misc_feature (6)..(365): NCBI GI NO: 37530600 NR Description: putative o-methyltransferase ZRP4
  misc_feature (6)..(365): NCBI GI NO: 37530606 NR Description: putative o-methyltransferase ZRP4
  misc_feature (16)..(365): NCBI GI NO: 4098238 NR Description: o-methyltransferase [Triticum aestivum]
  misc_feature (5)..(365): NCBI GI NO: 20514369 NR Description: orcinol O-methyltransferase [Rosa hybrid cultivar]
  misc_feature (5)..(365): NCBI GI NO: 20514367 NR Description: orcinol O-methyltransferase [Rosa hybrid cultivar]
  misc_feature (12)..(365): NCBI GI NO: 22093735 NR Description: putative o-methyltransferase
  misc_feature (7)..(356): NCBI GI NO: 27527928 NR Description: orcinol O-methyltransferase [Rosa hybrid cultivar]
  misc_feature (7)..(356): NCBI GI NO: 27527926 NR Description: orcinol O-methyltransferase [Rosa hybrid cultivar]
  misc_feature (17)..(365): NCBI GI NO: 38175602 NR Description: putative catechol O-methyltransferase
MGSIMEQRCNNDQQALLDAQLELWHSTFAFIKSMAFKSALELGIADAIHCHGGTATLTQIATKAALHPSKTPCLRRLMRALTVAGIFSVAKNSSDDDGDQHVYGLTPASRLLVGSSQNLAPTLSLILNNVFVAPFLDLGTWFESALPATDLPLFELSHRKNVWDVVGHDPSVSQLFNAGMVADTRFLMDIAVRECGDVFQGIRSLVDVGGGHGAAAQAISAAFPAIQCTVLDLAHVVATAPACAGLSFVAGDMFEAIPPANAVFLKWIMHDWGDTECVTILKNCKKAIPPRDAGGKVIIVDTVVGAGPPNLKNKETQVMSDLFFMIVNGLERDEQEWRNVIFEAGFSDYIIIPVLGVRSIIELYP

SEQ ID NO: 25125 - protein, 361 aa, Zea mays subsp. mays
  peptide (1)..(361): Ceres Seq. ID no. 12344015
  misc_feature (92)..(336): Pfam Name: Pfam Description:  O-methyltransferase
  misc_feature (1)..(361): NCBI GI NO: 1353193 NR Description: O-METHYLTRANSFERASE ZRP4 (OMT)
  misc_feature (2)..(361): NCBI GI NO: 37530600 NR Description: putative o-methyltransferase ZRP4
  misc_feature (2)..(361): NCBI GI NO: 37530606 NR Description: putative o-methyltransferase ZRP4
  misc_feature (12)..(361): NCBI GI NO: 4098238 NR Description: o-methyltransferase [Triticum aestivum]
  misc_feature (1)..(361): NCBI GI NO: 20514369 NR Description: orcinol O-methyltransferase [Rosa hybrid cultivar]
  misc_feature (1)..(361): NCBI GI NO: 20514367 NR Description: orcinol O-methyltransferase [Rosa hybrid cultivar]
  misc_feature (8)..(361): NCBI GI NO: 22093735 NR Description: putative o-methyltransferase
  misc_feature (3)..(352): NCBI GI NO: 27527928 NR Description: orcinol O-methyltransferase [Rosa hybrid cultivar]
  misc_feature (3)..(352): NCBI GI NO: 27527926 NR Description: orcinol O-methyltransferase [Rosa hybrid cultivar]
  misc_feature (13)..(361): NCBI GI NO: 38175602 NR Description: putative catechol O-methyltransferase
MEQRCNNDQQALLDAQLELWHSTFAFIKSMAFKSALELGIADAIHCHGGTATLTQIATKAALHPSKTPCLRRLMRALTVAGIFSVAKNSSDDDGDQHVYGLTPASRLLVGSSQNLAPTLSLILNNVFVAPFLDLGTWFESALPATDLPLFELSHRKNVWDVVGHDPSVSQLFNAGMVADTRFLMDIAVRECGDVFQGIRSLVDVGGGHGAAAQAISAAFPAIQCTVLDLAHVVATAPACAGLSFVAGDMFEAIPPANAVFLKWIMHDWGDTECVTILKNCKKAIPPRDAGGKVIIVDTVVGAGPPNLKNKETQVMSDLFFMIVNGLERDEQEWRNVIFEAGFSDYIIIPVLGVRSIIELYP

SEQ ID NO: 25126 - protein, 332 aa, Zea mays subsp. mays
  peptide (1)..(332): Ceres Seq. ID no. 12344016
  misc_feature (63)..(307): Pfam Name: Pfam Description:  O-methyltransferase
  misc_feature (1)..(332): NCBI GI NO: 1353193 NR Description: O-METHYLTRANSFERASE ZRP4 (OMT)
  misc_feature (1)..(332): NCBI GI NO: 37530600 NR Description: putative o-methyltransferase ZRP4
  misc_feature (1)..(332): NCBI GI NO: 37530606 NR Description: putative o-methyltransferase ZRP4
  misc_feature (1)..(332): NCBI GI NO: 4098238 NR Description: o-methyltransferase [Triticum aestivum]
  misc_feature (1)..(332): NCBI GI NO: 20514369 NR Description: orcinol O-methyltransferase [Rosa hybrid cultivar]
  misc_feature (1)..(332): NCBI GI NO: 20514367 NR Description: orcinol O-methyltransferase [Rosa hybrid cultivar]
  misc_feature (1)..(332): NCBI GI NO: 22093735 NR Description: putative o-methyltransferase
  misc_feature (1)..(323): NCBI GI NO: 27527928 NR Description: orcinol O-methyltransferase [Rosa hybrid cultivar]
  misc_feature (1)..(323): NCBI GI NO: 27527926 NR Description: orcinol O-methyltransferase [Rosa hybrid cultivar]
  misc_feature (1)..(332): NCBI GI NO: 38175602 NR Description: putative catechol O-methyltransferase
MAFKSALELGIADAIHCHGGTATLTQIATKAALHPSKTPCLRRLMRALTVAGIFSVAKNSSDDDGDQHVYGLTPASRLLVGSSQNLAPTLSLILNNVFVAPFLDLGTWFESALPATDLPLFELSHRKNVWDVVGHDPSVSQLFNAGMVADTRFLMDIAVRECGDVFQGIRSLVDVGGGHGAAAQAISAAFPAIQCTVLDLAHVVATAPACAGLSFVAGDMFEAIPPANAVFLKWIMHDWGDTECVTILKNCKKAIPPRDAGGKVIIVDTVVGAGPPNLKNKETQVMSDLFFMIVNGLERDEQEWRNVIFEAGFSDYIIIPVLGVRSIIELYP

SEQ ID NO: 25127 - DNA, 933 bp, Zea mays subsp. mays
  misc_feature (1)..(933): Ceres Seq. ID no. 12344431
cagtcacccaccccatccaaggccctcccaaagtcccaaaggccgccgccgcccgccagcccaccatggccgcgcagtccttcctcctcgccgccactgccgccgccaggtcccccgcggtcttcgccgctccctattcctccgcacgccctttccactcggtccacttcgtcgccggcccgtggggcgccgccgccgccagggcgctcgtcgtcgcggacgccactaagaaggccgtagccgtcctcaagggcgcgtctgaggtcgagggcgtggtcacgctcacgcaggacgacgatggacctacaactgtgaatgtccgtatcactggacttacccctggacttcatggcttccacctccacgagtttggtgatactaccaatgggtgcatatcgacaggaccacattttaatccaaacaatctgacgcacggtgcaccagaagacgaagtccgtcatgcgggtgacctgggaaacattgttgcaaatgctgagggcatagccgaggcaaccattgttgatacccagattcctttgactggcccaaattcagttgttgggagagcatttgtggttcatgagcttgaagatgatttggggaaagggggccatgagctcagcctctctactggaaatgctggtggaagactggcatgtggtgttgttggcctgactccattgtaggttgctcgccgggtgcccgggttgcagttgcagctacgctgttacatccttgccttggtggacttttgtcttcaatcgtgttattgggacagtgacctttttgtattacttggattcattccatgcatgtggtatggtgcgtaatagcctttgcaggtcgactgtataaaaagcaatatttagttgaggaaataagtgttgccacatatccaaatcgatctatgaagcactatgaacatcaaatgtc

SEQ ID NO: 25128 - protein, 227 aa, Zea mays subsp. mays
  peptide (1)..(227): Ceres Seq. ID no. 12344432
  misc_feature (22)..(227): NCBI GI NO: 3915008 NR Description: Superoxide dismutase
  misc_feature (22)..(227): NCBI GI NO: 14326463 NR Description: copper/zinc superoxide dismutase precursor
  misc_feature (22)..(227): NCBI GI NO: 7433318 NR Description: superoxide dismutase (EC 1
  misc_feature (22)..(227): NCBI GI NO: 7433305 NR Description: probable superoxide dismutase (EC 1
  misc_feature (67)..(227): NCBI GI NO: 20900 NR Description: Cu/Zn superoxide dismutase II [Pisum sativum]
  misc_feature (64)..(227): NCBI GI NO: 11358868 NR Description: superoxide dismutase (EC 1
  misc_feature (64)..(227): NCBI GI NO: 18401659 NR Description: copper/zinc superoxide dismutase
  misc_feature (67)..(227): NCBI GI NO: 134683 NR Description: Superoxide dismutase
  misc_feature (64)..(227): NCBI GI NO: 5689611 NR Description: copper/zinc superoxide dismutase
  misc_feature (22)..(227): NCBI GI NO: 38073257 NR Description: superoxide dismutase [Trifolium pratense]
VTHPIQGPPKVPKAAAARQPTMAAQSFLLAATAAARSPAVFAAPYSSARPFHSVHFVAGPWGAAAARALVVADATKKAVAVLKGASEVEGVVTLTQDDDGPTTVNVRITGLTPGLHGFHLHEFGDTTNGCISTGPHFNPNNLTHGAPEDEVRHAGDLGNIVANAEGIAEATIVDTQIPLTGPNSVVGRAFVVHELEDDLGKGGHELSLSTGNAGGRLACGVVGLTPL

SEQ ID NO: 25129 - protein, 206 aa, Zea mays subsp. mays
  peptide (1)..(206): Ceres Seq. ID no. 12344433
  misc_feature (1)..(206): NCBI GI NO: 3915008 NR Description: Superoxide dismutase
  misc_feature (1)..(206): NCBI GI NO: 14326463 NR Description: copper/zinc superoxide dismutase precursor
  misc_feature (1)..(206): NCBI GI NO: 7433318 NR Description: superoxide dismutase (EC 1
  misc_feature (1)..(206): NCBI GI NO: 7433305 NR Description: probable superoxide dismutase (EC 1
  misc_feature (46)..(206): NCBI GI NO: 20900 NR Description: Cu/Zn superoxide dismutase II [Pisum sativum]
  misc_feature (43)..(206): NCBI GI NO: 11358868 NR Description: superoxide dismutase (EC 1
  misc_feature (43)..(206): NCBI GI NO: 18401659 NR Description: copper/zinc superoxide dismutase
  misc_feature (46)..(206): NCBI GI NO: 134683 NR Description: Superoxide dismutase
  misc_feature (43)..(206): NCBI GI NO: 5689611 NR Description: copper/zinc superoxide dismutase
  misc_feature (1)..(206): NCBI GI NO: 38073257 NR Description: superoxide dismutase [Trifolium pratense]
MAAQSFLLAATAAARSPAVFAAPYSSARPFHSVHFVAGPWGAAAARALVVADATKKAVAVLKGASEVEGVVTLTQDDDGPTTVNVRITGLTPGLHGFHLHEFGDTTNGCISTGPHFNPNNLTHGAPEDEVRHAGDLGNIVANAEGIAEATIVDTQIPLTGPNSVVGRAFVVHELEDDLGKGGHELSLSTGNAGGRLACGVVGLTPL

SEQ ID NO: 25130 - DNA, 1848 bp, Zea mays subsp. mays
  misc_feature (1)..(1848): Ceres Seq. ID no. 12363175
gcacgagaccattacctagaacatcctaatcgaaaagaggatagggaaggcatgcatgatagggacttcaaagacccaggtgagagctcagtcgacggtaatgccgccgcagctcctttagtcgccaggcgattggcatgccacggttcctggttcatctcgcagagttagtttgagttcgaggcttgtgtggtgttgctgattgcgcacaagaggtccaggaacatataggcggcggatctggctgcgttctttctgtttcgtcagagaaggggtttcagcgctgccagctttcacataaacaagttggggaagcagttgaggttttctaattcttcttggaaggattgagatctccagttctgataatgggttcttttgggatgaactggaatcagaaggaccccatggtgtgggattgggaacatctagtaccgtctgtctcaaatgcagttacaaggcacggatctgctaattcatctggtggtactcttacttctaactcagagctagggcatggttcatccaagagctctatttcagcgtccattgattcaccctctggagtagggaacagcttagagttcaacttcgccgctgttgagaggcatgttaagaacacgggcacgaacggcagagtcgatgactcggggaattctccatcgtcaatgatagctttcaaccaaggagagccattaatcagcctgaaacttgggaagagggcttacttcgaaaacgcctgcggaggacaggatgccaaggtttctgcagcttcagacgttacttctgcagccagcgtggtcaagaagactaaggtgtctcagcagaatgcaaagaactggtactgtcaggttgaagggtgcaaagttgacctgtcttctgctaaagattacaatcgcaagcacaaggtctgtgtagtccattctaaagctaccaaggtggttgttgctggtctagagcgtcggttttgtcaacagtgtagccgttttcatggtttagcggagtttgatcagaacaaacgaagctgtcgtaggcgtctgatgcatcataatgcacggaggaggaaacctcaggcagacacaatttcattcaattcatcgacaatgttttatgatacaaggcagcggacaaatcttttctttagtcaaccactttatggccaagtgaggagcaatgcagggtcttcatgggataacttgggaggcttaaaattcatggagacgaaacatccgccagtgcatccaacaaaaacagcatcccctgatgaactgcatttctcagccctccagataactagtgctgcggctcacaccgggacatcatcatgatctcgatgggttcatggcgttcaagggaaccagcacaaaggtccttaaccaaggcgtggaggcttgggcggccgcttccagctcgaacaacggaggcccagaaggtgggcgtgctctctctcttctgtcagacggctcgtggggctcgagttcagccgtcatccagcagcccacatctcacgcggacgccggtgcattgctgccgcccctcgccaccgttgccgtctccaacgccgccgccgccgccgggcatcctctggacccgtccccgggaaggttctggccgcaagacgatcatcccccgctcgtcgacggacccgccacgcagattccggagctggcgcacctccggatatggtgaaaggaaacgcatgtgatgcggtgactggtgacatgccagttcgagggcctggctgggaacacatctggttggttagcctgccgctctggcttgaatttgccggcgacgacagtctttgtttgtatcttttgatcagaacggacacagacatgtttgcgc

SEQ ID NO: 25131 - protein, 319 aa, Zea mays subsp. mays
  peptide (1)..(319): Ceres Seq. ID no. 12363176
  misc_feature (160)..(235): Pfam Name: Pfam Description:  SBP domain
  misc_feature (13)..(234): NCBI GI NO: 25456646 NR Description: squamosa promoter binding protein 2
  misc_feature (13)..(234): NCBI GI NO: 15239820 NR Description: squamosa promoter binding protein-like 2
  misc_feature (1)..(319): NCBI GI NO: 9802546 NR Description: F17L21.15 [Arabidopsis thaliana]
  misc_feature (1)..(319): NCBI GI NO: 22329813 NR Description: putative squamosa-promoter binding protein 2
  misc_feature (1)..(319): NCBI GI NO: 18650611 NR Description: At1g27370/F17L21_16 [Arabidopsis thaliana]
  misc_feature (1)..(276): NCBI GI NO: 18396302 NR Description: putative squamosa-promoter binding protein 2
  misc_feature (1)..(276): NCBI GI NO: 25403307 NR Description: protein F17L21.14
  misc_feature (110)..(319): NCBI GI NO: 25352584 NR Description: squamosa promoter binding protein-homolog 4
  misc_feature (160)..(319): NCBI GI NO: 25352582 NR Description: squamosa promoter binding protein-homolog 5
  misc_feature (94)..(315): NCBI GI NO: 15230904 NR Description: squamosa promoter-binding protein homolog
MGSFGMNWNQKDPMVWDWEHLVPSVSNAVTRHGSANSSGGTLTSNSELGHGSSKSSISASIDSPSGVGNSLEFNFAAVERHVKNTGTNGRVDDSGNSPSSMIAFNQGEPLISLKLGKRAYFENACGGQDAKVSAASDVTSAASVVKKTKVSQQNAKNWYCQVEGCKVDLSSAKDYNRKHKVCVVHSKATKVVVAGLERRFCQQCSRFHGLAEFDQNKRSCRRRLMHHNARRRKPQADTISFNSSTMFYDTRQRTNLFFSQPLYGQVRSNAGSSWDNLGGLKFMETKHPPVHPTKTASPDELHFSALQITSAAAHTGTSS

SEQ ID NO: 25132 - protein, 314 aa, Zea mays subsp. mays
  peptide (1)..(314): Ceres Seq. ID no. 12363177
  misc_feature (155)..(230): Pfam Name: Pfam Description:  SBP domain
  misc_feature (8)..(229): NCBI GI NO: 25456646 NR Description: squamosa promoter binding protein 2
  misc_feature (8)..(229): NCBI GI NO: 15239820 NR Description: squamosa promoter binding protein-like 2
  misc_feature (1)..(314): NCBI GI NO: 9802546 NR Description: F17L21.15 [Arabidopsis thaliana]
  misc_feature (1)..(314): NCBI GI NO: 22329813 NR Description: putative squamosa-promoter binding protein 2
  misc_feature (1)..(314): NCBI GI NO: 18650611 NR Description: At1g27370/F17L21_16 [Arabidopsis thaliana]
  misc_feature (1)..(271): NCBI GI NO: 18396302 NR Description: putative squamosa-promoter binding protein 2
  misc_feature (1)..(271): NCBI GI NO: 25403307 NR Description: protein F17L21.14
  misc_feature (105)..(314): NCBI GI NO: 25352584 NR Description: squamosa promoter binding protein-homolog 4
  misc_feature (155)..(314): NCBI GI NO: 25352582 NR Description: squamosa promoter binding protein-homolog 5
  misc_feature (89)..(310): NCBI GI NO: 15230904 NR Description: squamosa promoter-binding protein homolog
MNWNQKDPMVWDWEHLVPSVSNAVTRHGSANSSGGTLTSNSELGHGSSKSSISASIDSPSGVGNSLEFNFAAVERHVKNTGTNGRVDDSGNSPSSMIAFNQGEPLISLKLGKRAYFENACGGQDAKVSAASDVTSAASVVKKTKVSQQNAKNWYCQVEGCKVDLSSAKDYNRKHKVCVVHSKATKVVVAGLERRFCQQCSRFHGLAEFDQNKRSCRRRLMHHNARRRKPQADTISFNSSTMFYDTRQRTNLFFSQPLYGQVRSNAGSSWDNLGGLKFMETKHPPVHPTKTASPDELHFSALQITSAAAHTGTSS

SEQ ID NO: 25133 - protein, 306 aa, Zea mays subsp. mays
  peptide (1)..(306): Ceres Seq. ID no. 12363178
  misc_feature (147)..(222): Pfam Name: Pfam Description:  SBP domain
  misc_feature (1)..(221): NCBI GI NO: 25456646 NR Description: squamosa promoter binding protein 2
  misc_feature (1)..(221): NCBI GI NO: 15239820 NR Description: squamosa promoter binding protein-like 2
  misc_feature (1)..(306): NCBI GI NO: 9802546 NR Description: F17L21.15 [Arabidopsis thaliana]
  misc_feature (1)..(306): NCBI GI NO: 22329813 NR Description: putative squamosa-promoter binding protein 2
  misc_feature (1)..(306): NCBI GI NO: 18650611 NR Description: At1g27370/F17L21_16 [Arabidopsis thaliana]
  misc_feature (1)..(263): NCBI GI NO: 18396302 NR Description: putative squamosa-promoter binding protein 2
  misc_feature (1)..(263): NCBI GI NO: 25403307 NR Description: protein F17L21.14
  misc_feature (97)..(306): NCBI GI NO: 25352584 NR Description: squamosa promoter binding protein-homolog 4
  misc_feature (147)..(306): NCBI GI NO: 25352582 NR Description: squamosa promoter binding protein-homolog 5
  misc_feature (81)..(302): NCBI GI NO: 15230904 NR Description: squamosa promoter-binding protein homolog
MVWDWEHLVPSVSNAVTRHGSANSSGGTLTSNSELGHGSSKSSISASIDSPSGVGNSLEFNFAAVERHVKNTGTNGRVDDSGNSPSSMIAFNQGEPLISLKLGKRAYFENACGGQDAKVSAASDVTSAASVVKKTKVSQQNAKNWYCQVEGCKVDLSSAKDYNRKHKVCVVHSKATKVVVAGLERRFCQQCSRFHGLAEFDQNKRSCRRRLMHHNARRRKPQADTISFNSSTMFYDTRQRTNLFFSQPLYGQVRSNAGSSWDNLGGLKFMETKHPPVHPTKTASPDELHFSALQITSAAAHTGTSS

SEQ ID NO: 25134 - DNA, 1471 bp, Zea mays subsp. mays
  misc_feature (1)..(1471): Ceres Seq. ID no. 12410223
agtccacccccttcccttctttcccctttgcttgctgctgcctgcttctcgccgtcgccgcctcaattccctcctcctcgtccgtcgcctcgtccacgcgcacctcgtcctcctctccgttcccaccacctcctcgaccgcaccgtcgtcgtctagctagcggagcgagctgcgaccagatcggagagccaagcacccaggaagagggggccggggaacaagaagaagccgccggaagccgggcgtggacgtgtggtggttttctgccggcggctgacaagtggtgtaggctacccgctctggccatggatccgtcgggcggcgcgttcctgccgccgctgcagcaagggagctcctccttcccgcggtcctccagcaacgcgtcgctcgccaggagcggcagcggcggcggcggcgttggcgccgggcgcgggaccaggggcaggaagatgatgcgcagggtctgccgcggcgtcatcaccttcatcttcgccatcgctgggctgttcctgggagcggtgaccggcggtctgatcgggctggcgacggagagcggtctgttccgcggcaccgggatcggcgccatcactggcgcgctcgtctccatcgaggtcgtcgactcctccatccgcctctggcaggcgcgccgatccgggatctggagcatcctctacgtgctgaacgtgatctacagcctcctgacgggcaggctggtgcgcgagaaggtcgacccggcggtgcagcgggtggtccgcagccagatgaacgcggtggactcgtcgccgttcagggagtcgccggacctgttcgaggtggaggccaccaacggcatgccgcgggcgtccatcgacaagctccccgagtcgtggatcaccgaggagtacaggcgcgacgccgtcggcgacctctccggctgctccgtctgcctccaggatttccaggtcggggagaaggtgcggagcctgccggactgctggcacgtgttccacgtgccgtgcatcgacggctggctcatcaagcacggctcctgcccgctctgcaggaggaagctgtaggcggatcgaccggacgacgccatgaacgatgttcttctctgcgatcgagccgatgatgtgtgtgtgtgtgcccccgccgccaccaccgatagctgctgctaggatcggaggaggggaggaggaagaagagactgacatctatagaacccttaatttatagagagggcttttgctttgctacttgtacgtgctctactacgtacctattgcatcttttttttttttttgattcaccatgatcgacctccttcctcagatccatccatgcatgtaatataccctggaccggcttgtgcttcgttcgatccattccatgcatctccggactgtgatctcgatctggtgtaatatatataaaaaaactactagtatgtaccatcgcactttggacatctatacatgcatgctggttggtc

SEQ ID NO: 25135 - protein, 350 aa, Zea mays subsp. mays
  peptide (1)..(350): Ceres Seq. ID no. 12410224
  misc_feature (305)..(346): Pfam Name: RING finger Pfam Description: Zinc finger, C3HC4 type
  misc_feature (121)..(350): NCBI GI NO: 18855037 NR Description: putative zinc finger protein [Oryza sativa]
  misc_feature (121)..(350): NCBI GI NO: 37536572 NR Description: hypothetical protein
  misc_feature (154)..(350): NCBI GI NO: 26451101 NR Description: unknown protein [Arabidopsis thaliana]
  misc_feature (150)..(350): NCBI GI NO: 26452210 NR Description: unknown protein [Arabidopsis thaliana]
  misc_feature (154)..(350): NCBI GI NO: 30680091 NR Description: expressed protein [Arabidopsis thaliana]
  misc_feature (154)..(350): NCBI GI NO: 27524902 NR Description: NEP1-interacting protein [Arabidopsis thaliana]
  misc_feature (150)..(350): NCBI GI NO: 15239242 NR Description: putative protein; protein id: At5g66070.1
  misc_feature (154)..(345): NCBI GI NO: 25411815 NR Description: hypothetical protein At2g17730
  misc_feature (158)..(345): NCBI GI NO: 7485279 NR Description: hypothetical protein A_TM017A05
  misc_feature (158)..(347): NCBI GI NO: 34901682 NR Description: P0434A03.5
STPFPSFPFACCCLLLAVAASIPSSSSVASSTRTSSSSPFPPPPRPHRRRLASGASCDQIGEPSTQEEGAGEQEEAAGSRAWTCGGFLPAADKWCRLPALAMDPSGGAFLPPLQQGSSSFPRSSSNASLARSGSGGGGVGAGRGTRGRKMMRRVCRGVITFIFAIAGLFLGAVTGGLIGLATESGLFRGTGIGAITGALVSIEVVDSSIRLWQARRSGIWSILYVLNVIYSLLTGRLVREKVDPAVQRVVRSQMNAVDSSPFRESPDLFEVEATNGMPRASIDKLPESWITEEYRRDAVGDLSGCSVCLQDFQVGEKVRSLPDCWHVFHVPCIDGWLIKHGSCPLCRRKL

SEQ ID NO: 25136 - protein, 249 aa, Zea mays subsp. mays
  peptide (1)..(249): Ceres Seq. ID no. 12410225
  misc_feature (204)..(245): Pfam Name: RING finger Pfam Description: Zinc finger, C3HC4 type
  misc_feature (20)..(249): NCBI GI NO: 18855037 NR Description: putative zinc finger protein [Oryza sativa]
  misc_feature (20)..(249): NCBI GI NO: 37536572 NR Description: hypothetical protein
  misc_feature (53)..(249): NCBI GI NO: 26451101 NR Description: unknown protein [Arabidopsis thaliana]
  misc_feature (49)..(249): NCBI GI NO: 26452210 NR Description: unknown protein [Arabidopsis thaliana]
  misc_feature (53)..(249): NCBI GI NO: 30680091 NR Description: expressed protein [Arabidopsis thaliana]
  misc_feature (53)..(249): NCBI GI NO: 27524902 NR Description: NEP1-interacting protein [Arabidopsis thaliana]
  misc_feature (49)..(249): NCBI GI NO: 15239242 NR Description: putative protein; protein id: At5g66070.1
  misc_feature (53)..(244): NCBI GI NO: 25411815 NR Description: hypothetical protein At2g17730
  misc_feature (57)..(244): NCBI GI NO: 7485279 NR Description: hypothetical protein A_TM017A05
  misc_feature (57)..(246): NCBI GI NO: 34901682 NR Description: P0434A03.5
MDPSGGAFLPPLQQGSSSFPRSSSNASLARSGSGGGGVGAGRGTRGRKMMRRVCRGVITFIFAIAGLFLGAVTGGLIGLATESGLFRGTGIGAITGALVSIEVVDSSIRLWQARRSGIWSILYVLNVIYSLLTGRLVREKVDPAVQRVVRSQMNAVDSSPFRESPDLFEVEATNGMPRASIDKLPESWITEEYRRDAVGDLSGCSVCLQDFQVGEKVRSLPDCWHVFHVPCIDGWLIKHGSCPLCRRKL

SEQ ID NO: 25137 - protein, 201 aa, Zea mays subsp. mays
  peptide (1)..(201): Ceres Seq. ID no. 12410226
  misc_feature (156)..(197): Pfam Name: RING finger Pfam Description: Zinc finger, C3HC4 type
  misc_feature (1)..(201): NCBI GI NO: 18855037 NR Description: putative zinc finger protein [Oryza sativa]
  misc_feature (1)..(201): NCBI GI NO: 37536572 NR Description: hypothetical protein
  misc_feature (5)..(201): NCBI GI NO: 26451101 NR Description: unknown protein [Arabidopsis thaliana]
  misc_feature (1)..(201): NCBI GI NO: 26452210 NR Description: unknown protein [Arabidopsis thaliana]
  misc_feature (5)..(201): NCBI GI NO: 30680091 NR Description: expressed protein [Arabidopsis thaliana]
  misc_feature (5)..(201): NCBI GI NO: 27524902 NR Description: NEP1-interacting protein [Arabidopsis thaliana]
  misc_feature (1)..(201): NCBI GI NO: 15239242 NR Description: putative protein; protein id: At5g66070.1
  misc_feature (5)..(196): NCBI GI NO: 25411815 NR Description: hypothetical protein At2g17730
  misc_feature (9)..(196): NCBI GI NO: 7485279 NR Description: hypothetical protein A_TM017A05
  misc_feature (9)..(198): NCBI GI NO: 34901682 NR Description: P0434A03.5
MMRRVCRGVITFIFAIAGLFLGAVTGGLIGLATESGLFRGTGIGAITGALVSIEVVDSSIRLWQARRSGIWSILYVLNVIYSLLTGRLVREKVDPAVQRVVRSQMNAVDSSPFRESPDLFEVEATNGMPRASIDKLPESWITEEYRRDAVGDLSGCSVCLQDFQVGEKVRSLPDCWHVFHVPCIDGWLIKHGSCPLCRRKL

SEQ ID NO: 25138 - DNA, 1332 bp, Zea mays subsp. mays
  misc_feature (1)..(1332): Ceres Seq. ID no. 12376472
cttcagttcacaaggccaccacgcgcgcccaaaggcccccaaggccccaaccccaaccttgcaggaaaaaaaaagagacgaccccccaaatcggaatccgcacacccatcatccatggccgccgccctgctccgccgctcgccggcggcgcgcgcgctcctctcgccggcactctcgtcccgcctcgtcgcgtccaagccccactcctcgtcccccgcgccgccgccacctgcgaaggccgactccagcacgaagaccttctcgatctaccggtgggacccggactcgccgtcgacgaagccgcacctcaaggactaccaggtggacctgtccgactgcgggccgatggtgctggacgcgctgctcaagatcaagaacgagcaggacccgtcgctcaccttccgccgcagctgccgggagggcatctgcgggagctgcgccatgaacatcgacggggacaacggcctcgcctgcctcaccaagatctcctccgcctcctcggcgtccaccgtctcgccgctgccccacatgttcgtcatcaaggacctggtggtcgacatgaccaacttctacaaccagtacaagagcgtcgagccgtggctcaagcgcaaggacccgccgccgcagctaggcaaggaggtcccgcagaccaaggccgaccgcgccaagctcgacggcatgtacgagtgcatcctctgcgcctgctgctccacctcctgcccatcctactggtggaaccccgaggagtacctcggcccagccgcgctgcttccacgccaataggtggatacaggacagccgtgaccagttcaccaaggagcgcctggacgccatcaacgacgagttcaagctgtaccgctgccacaccatcaagaactgcacgcatgcctgccccaaggggcctgaacccggcaaagcagatcgacacgatcaagaagctccagttgggtgccccaagtgcctgaaaccgagcgtgtcttcccttgaaaacggtcgtggaacagacctgtggaaaaaattgggatgaacttgccacttatttcgttgttgttcttcttctttggtcttcgcgcggtggtttctacctgccaaagacgaataattcccggctggggcccctccagtccactccacccatgcttttgtgtcaggcggagcggaggtagagcatagggagtgaataaccgctaccttatttcatttctatgatgtatctatctaatttggtcctcccctgataatgcacgacccgtagtgttaacaggcgtatttggaccttcaagaagtatttggacatggcaaatgtattttggaatgctcttatctaccgtg

SEQ ID NO: 25139 - protein, 320 aa, Zea mays subsp. mays
  peptide (1)..(320): Ceres Seq. ID no. 12376473
  misc_feature (298)..(320): NCBI GI NO: 4803711 NR Description: iron sulfur subunit of succinate dehydrogenase
  misc_feature (298)..(317): NCBI GI NO: 5688947 NR Description: succinate dehydrogenase iron-protein subunit
  misc_feature (298)..(317): NCBI GI NO: 28611029 NR Description: succinate dehydrogenase [Triticum aestivum]
SVHKATTRAQRPPRPQPQPCRKKKETTPQIGIRTPIIHGRRPAPPLAGGARAPLAGTLVPPRRVQAPLLVPRAAATCEGRLQHEDLLDLPVGPGLAVDEAAPQGLPGGPVRLRADGAGRAAQDQERAGPVAHLPPQLPGGHLRELRHEHRRGQRPRLPHQDLLRLLGVHRLAAAPHVRHQGPGGRHDQLLQPVQERRAVAQAQGPAAAARQGGPADQGRPRQARRHVRVHPLRLLLHLLPILLVEPRGVPRPSRAASTPIGGYRTAVTSSPRSAWTPSTTSSSCTAATPSRTARMPAPRGLNPAKQIDTIKKLQLGAPSA

SEQ ID NO: 25140 - protein, 260 aa, Zea mays subsp. mays
  peptide (1)..(260): Ceres Seq. ID no. 12376474
  misc_feature (99)..(163): Pfam Name: Pfam Description:  2Fe-2S iron-sulfur cluster binding domain
  misc_feature (39)..(257): NCBI GI NO: 4803711 NR Description: iron sulfur subunit of succinate dehydrogenase
  misc_feature (40)..(257): NCBI GI NO: 5688947 NR Description: succinate dehydrogenase iron-protein subunit
  misc_feature (40)..(257): NCBI GI NO: 28611029 NR Description: succinate dehydrogenase [Triticum aestivum]
  misc_feature (39)..(257): NCBI GI NO: 4803710 NR Description: iron sulfur subunit of succinate dehydrogenase
  misc_feature (40)..(257): NCBI GI NO: 5688945 NR Description: mitochondrial ribosomal protein S14
  misc_feature (40)..(257): NCBI GI NO: 28611030 NR Description: chimeric SDH2-RPS14 protein [Triticum aestivum]
  misc_feature (45)..(257): NCBI GI NO: 15237464 NR Description: succinate dehydrogenase iron-protein subunit -like
  misc_feature (45)..(257): NCBI GI NO: 21593098 NR Description: succinate dehydrogenase iron-protein subunit-like
  misc_feature (45)..(257): NCBI GI NO: 12049600 NR Description: mitochondrial succinate dehydrogenase iron-sulphur subunit
  misc_feature (37)..(257): NCBI GI NO: 15232149 NR Description: succinate dehydrogenase iron-protein subunit
LQFTRPPRAPKGPQGPNPNLAGKKKRRPPKSESAHPSSMAAALLRRSPAARALLSPALSSRLVASKPHSSSPAPPPPAKADSSTKTFSIYRWDPDSPSTKPHLKDYQVDLSDCGPMVLDALLKIKNEQDPSLTFRRSCREGICGSCAMNIDGDNGLACLTKISSASSASTVSPLPHMFVIKDLVVDMTNFYNQYKSVEPWLKRKDPPPQLGKEVPQTKADRAKLDGMYECILCACCSTSCPSYWWNPEEYLGPAALLPRQ

SEQ ID NO: 25141 - protein, 222 aa, Zea mays subsp. mays
  peptide (1)..(222): Ceres Seq. ID no. 12376475
  misc_feature (61)..(125): Pfam Name: Pfam Description:  2Fe-2S iron-sulfur cluster binding domain
  misc_feature (1)..(219): NCBI GI NO: 4803711 NR Description: iron sulfur subunit of succinate dehydrogenase
  misc_feature (2)..(219): NCBI GI NO: 5688947 NR Description: succinate dehydrogenase iron-protein subunit
  misc_feature (2)..(219): NCBI GI NO: 28611029 NR Description: succinate dehydrogenase [Triticum aestivum]
  misc_feature (1)..(219): NCBI GI NO: 4803710 NR Description: iron sulfur subunit of succinate dehydrogenase
  misc_feature (2)..(219): NCBI GI NO: 5688945 NR Description: mitochondrial ribosomal protein S14
  misc_feature (2)..(219): NCBI GI NO: 28611030 NR Description: chimeric SDH2-RPS14 protein [Triticum aestivum]
  misc_feature (7)..(219): NCBI GI NO: 15237464 NR Description: succinate dehydrogenase iron-protein subunit -like
  misc_feature (7)..(219): NCBI GI NO: 21593098 NR Description: succinate dehydrogenase iron-protein subunit-like
  misc_feature (7)..(219): NCBI GI NO: 12049600 NR Description: mitochondrial succinate dehydrogenase iron-sulphur subunit
  misc_feature (1)..(219): NCBI GI NO: 15232149 NR Description: succinate dehydrogenase iron-protein subunit
MAAALLRRSPAARALLSPALSSRLVASKPHSSSPAPPPPAKADSSTKTFSIYRWDPDSPSTKPHLKDYQVDLSDCGPMVLDALLKIKNEQDPSLTFRRSCREGICGSCAMNIDGDNGLACLTKISSASSASTVSPLPHMFVIKDLVVDMTNFYNQYKSVEPWLKRKDPPPQLGKEVPQTKADRAKLDGMYECILCACCSTSCPSYWWNPEEYLGPAALLPRQ

SEQ ID NO: 25142 - DNA, 1532 bp, Zea mays subsp. mays
  misc_feature (1)..(1532): Ceres Seq. ID no. 12407804
acagtgtccactgtccagtcgcctagtcgcaaatctcaccccgccgccatggcctcccccgccgccgcctcccccgcgcgccgcctttccgtcattttctcctcgaccaagccacgcgcccgaccacccaaaccggcgccggctccgaaagcgccggccggccaggcggttgcgaaacctgacgagcgctgcgagtcccggaatctcacgaaaatcctgcaggtcatcttccgggagcgcgatccggacaagctggtttcccagttcatcgccgaatcgaccgcgtctgaacgcttccgcaacaagcaccgcgtgtacgacgtggccgtggcccgcctcgcctccttcggccgacacgatggcattgctgccatcatcgactcacagaagccgttcatcgcggcctccagcgtgggcttcgtcgcacgcctcatccgcctctgcggccgcgcctccatgccgtcccacgccgccgcgatcttccatgacctcccaccgaagcacaagtcctccatgactttcaatgccctcctcgggccgcctacctcgacgccagcgacttcgacgcactcgccaccgcgttgcaggaaatcccggccacacaccccactattgctcccaccatatactctcacaatatactcatcagtgcgctgtgcaagaagccggacctctcggccgccgtggatgtcatcacgctcatggagaagcgcggtattacccctgatatcatctctttcaacattctgctcaatgggttttacagcaatgatcgctttgatgacgtcgagaaagtttgggagatgatgaaggagaggaatgttgagccggatgcgaggagctataatgcaaaactgcggggtttggtttcccaagggagggttgaggatgcagctgcattgattgagaggatgcaaaaggagggaccaaagcctgattcagtgtcctacaacgaactgattcgagggtattgcaatgaagggaggttgaatgaagccaagaaggtatatgataatatgataaagaatggatatgcaccaaataggggcacatttcatacccttgtgccacattttgtggaggctggagagcttgatcatgctctaagctgctgccatgagatcttcactaggaagtgcagagtgcagtgctcgttgctgcagggggtagtgactgcgttggttgctgcatcaaggaaggaggaggctaagaggatcgttcatcttggaagggagaactactatcctcgaaagggtttgaggatgccaccacgtactagaaaagacgagggtttgaagatgccgcaacctggtggagaaggcaatgatgtagaagctggaactgattcagaagattctgtatcatatgaagatgggtgcgagcaagaagaggagtcgaaaaatggtcagtgaggatgtacctttgtaatttaagcattgatgtgacatggcgatgcaaactgaatttgctctacttctttgatggcatgatacaacagaattgcctgtgcaattggaattctctcgcacttt

SEQ ID NO: 25143 - protein, 268 aa, Zea mays subsp. mays
  peptide (1)..(268): Ceres Seq. ID no. 12407805
  misc_feature (17)..(178): NCBI GI NO: 34910148 NR Description: B1070A12.17
  misc_feature (72)..(178): NCBI GI NO: 18399887 NR Description: Expressed protein; protein id: At3g13160
  misc_feature (79)..(178): NCBI GI NO: 15222796 NR Description: unknown protein; protein id: At1g55890
  misc_feature (72)..(178): NCBI GI NO: 21617993 NR Description: unknown [Arabidopsis thaliana]
  misc_feature (35)..(178): NCBI GI NO: 15231160 NR Description: hypothetical protein; protein id: At3g13150.1
  misc_feature (68)..(178): NCBI GI NO: 15234493 NR Description: salt-inducible like protein; protein id:At4g36680
  misc_feature (68)..(178): NCBI GI NO: 25455786 NR Description: membrane-associated salt-inducible protein like
  misc_feature (79)..(178): NCBI GI NO: 25406637 NR Description: hypothetical protein F18B13.23
TVSTVQSPSRKSHPAAMASPAAASPARRLSVIFSSTKPRARPPKPAPAPKAPAGQAVAKPDERCESRNLTKILQVIFRERDPDKLVSQFIAESTASERFRNKHRVYDVAVARLASFGRHDGIAAIIDSQKPFIAASSVGFVARLIRLCGRASMPSHAAAIFHDLPPKHKSSMTFNALLGPPTSTPATSTHSPPRCRKSRPHTPLLLPPYTLTIYSSVRCARSRTSRPPWMSSRSWRSAVLPLISSLSTFCSMGFTAMIALMTSRKFGR

SEQ ID NO: 25144 - protein, 252 aa, Zea mays subsp. mays
  peptide (1)..(252): Ceres Seq. ID no. 12407806
  misc_feature (1)..(162): NCBI GI NO: 34910148 NR Description: B1070A12.17
  misc_feature (56)..(162): NCBI GI NO: 18399887 NR Description: Expressed protein; protein id: At3g13160
  misc_feature (63)..(162): NCBI GI NO: 15222796 NR Description: unknown protein; protein id: At1g55890
  misc_feature (56)..(162): NCBI GI NO: 21617993 NR Description: unknown [Arabidopsis thaliana]
  misc_feature (19)..(162): NCBI GI NO: 15231160 NR Description: hypothetical protein; protein id: At3g13150.1
  misc_feature (52)..(162): NCBI GI NO: 15234493 NR Description: salt-inducible like protein; protein id:At4g36680
  misc_feature (52)..(162): NCBI GI NO: 25455786 NR Description: membrane-associated salt-inducible protein like
  misc_feature (63)..(162): NCBI GI NO: 25406637 NR Description: hypothetical protein F18B13.23
MASPAAASPARRLSVIFSSTKPRARPPKPAPAPKAPAGQAVAKPDERCESRNLTKILQVIFRERDPDKLVSQFIAESTASERFRNKHRVYDVAVARLASFGRHDGIAAIIDSQKPFIAASSVGFVARLIRLCGRASMPSHAAAIFHDLPPKHKSSMTFNALLGPPTSTPATSTHSPPRCRKSRPHTPLLLPPYTLTIYSSVRCARSRTSRPPWMSSRSWRSAVLPLISSLSTFCSMGFTAMIALMTSRKFGR

SEQ ID NO: 25145 - protein, 236 aa, Zea mays subsp. mays
  peptide (1)..(236): Ceres Seq. ID no. 12407807
  misc_feature (46)..(80): Pfam Name: Pfam Description:  PPR repeat
  misc_feature (1)..(196): NCBI GI NO: 34910148 NR Description: B1070A12.17
  misc_feature (1)..(191): NCBI GI NO: 18399887 NR Description: Expressed protein; protein id: At3g13160
  misc_feature (1)..(189): NCBI GI NO: 15222796 NR Description: unknown protein; protein id: At1g55890
  misc_feature (1)..(191): NCBI GI NO: 21617993 NR Description: unknown [Arabidopsis thaliana]
  misc_feature (1)..(181): NCBI GI NO: 15231160 NR Description: hypothetical protein; protein id: At3g13150.1
  misc_feature (1)..(182): NCBI GI NO: 15234493 NR Description: salt-inducible like protein; protein id:At4g36680
  misc_feature (1)..(180): NCBI GI NO: 18407365 NR Description: expressed protein; protein id: At1g61870
  misc_feature (1)..(180): NCBI GI NO: 21553755 NR Description: putative membrane-associated salt-inducible protein
  misc_feature (1)..(182): NCBI GI NO: 25455786 NR Description: membrane-associated salt-inducible protein like
  misc_feature (1)..(212): NCBI GI NO: 25406637 NR Description: hypothetical protein F18B13.23
MEKRGITPDIISFNILLNGFYSNDRFDDVEKVWEMMKERNVEPDARSYNAKLRGLVSQGRVEDAAALIERMQKEGPKPDSVSYNELIRGYCNEGRLNEAKKVYDNMIKNGYAPNRGTFHTLVPHFVEAGELDHALSCCHEIFTRKCRVQCSLLQGVVTALVAASRKEEAKRIVHLGRENYYPRKGLRMPPRTRKDEGLKMPQPGGEGNDVEAGTDSEDSVSYEDGCEQEEESKNGQ

SEQ ID NO: 25146 - DNA, 1592 bp, Zea mays subsp. mays
  misc_feature (1)..(1592): Ceres Seq. ID no. 12411477
gtataccagtctagcaccgaactaccaaaaccgaccgagccgcgaacttcacccctgccttctctcccttctccgtccaggccctggtgcccgcgcgttctcgtgcggcaagtgggcgccgccgccggactacgacaggtgcccagttcctcgtcgggtccttcgtcgacgacgagcacccaccaaaaattcgagtattagactctacatgtcaagaaagtatggcgccaggaagcaaggcggagcggaaagcagcactagatgctggcgcatggatgttcaatgtcgtcacatctgttggtatcatcatggtcaacaaaggcttaatggcgactcatggctttagttttgctacaacactgactggacttcattttgcaatgacaaccttgatgacgttagtaatgaaatggctgggatatattcagccatcttatttaccattaccagaactagtaaagtttgccttttttgcaaacctgtcgatcgtcggaatgaacgttagtttgatgtggaactctgttggattctatcagatcgcgaagttgtgtatcattccagtcttatgcattctggaaatcatattcgacaaagttcgttactcaagagatacaaagctcagtatagtgcttgtcctcataggtgttgctgtgtgtactgtgactgatgttagcgtgaactctcaagggctattagctgcagtaatagctgtttggagcacagcactacaacaacattatgttcaccaccttcaatggaagtactcgcttggctcattcaatctcttaggccatactgctccagcgcaggcagcatcattgttaatagtggggccttttgtggacttctggctgactaacaaaagagttgatgcttttaactacacatcaatagttacgttctttatcgtgttgtcgtgcataattgccgttgggacgaatctaagccaattcatatgcatcggaagattcacagccgtctcgttccaagtcctaggccacatgaagacagttctggtgttgaccttggggttccttttctttgggaaagaggggctcaacttccatgtcgcccttggcatgcttctggctgtgatcggcatgatctggtacgggaacgcgtcgtcgaaatctggaggcaaagagcgccaggtctaccccacaccgagcgagaagactcagaagcatggggcgctgtcatcgcagtccgagctcgatcagaaggtctaaacgagacacacaaaggcatccgatgcttgttgagcaccggtcgacctggctttattttttagtacttatttttgagggatgagatgtttctataggattgtaggtggggccatagcagaaagagggtgcctgggtaaaatgcccacgagtttacttttgcagtgagtatgtcaatctaagctggcagatacttgatttgtaatagtctttgtgtgtgtttcgctcttcatgtggcatgttcagtttgatctatagttgtatctttcactttcacactgaaattgaaaagtaaagcgcaaatttccttgtatatgtattacaagtaattaatttggtgctatatatcgcatctgtccggttttt

SEQ ID NO: 25147 - protein, 335 aa, Zea mays subsp. mays
  peptide (1)..(335): Ceres Seq. ID no. 12411478
  misc_feature (1)..(335): NCBI GI NO: 30313364 NR Description: putative transmembrane protein [Oryza sativa]
  misc_feature (1)..(334): NCBI GI NO: 18399097 NR Description: expressed protein; protein id: At1g34020
  misc_feature (1)..(330): NCBI GI NO: 15234794 NR Description: hypothetical protein; protein id: At4g09810.1
  misc_feature (1)..(334): NCBI GI NO: 21595054 NR Description: unknown [Arabidopsis thaliana]
  misc_feature (2)..(335): NCBI GI NO: 18420440 NR Description: putative protein; protein id: At4g39390
  misc_feature (2)..(335): NCBI GI NO: 21593003 NR Description: unknown [Arabidopsis thaliana]
  misc_feature (2)..(335): NCBI GI NO: 7486049 NR Description: hypothetical protein F23K16
  misc_feature (8)..(331): NCBI GI NO: 15238957 NR Description: putative protein; protein id: At5g42420.1
  misc_feature (6)..(318): NCBI GI NO: 18411172 NR Description: expressed protein; protein id: At1g76670
  misc_feature (8)..(313): NCBI GI NO: 18394949 NR Description: expressed protein; protein id: At1g21070
MAPGSKAERKAALDAGAWMFNVVTSVGIIMVNKGLMATHGFSFATTLTGLHFAMTTLMTLVMKWLGYIQPSYLPLPELVKFAFFANLSIVGMNVSLMWNSVGFYQIAKLCIIPVLCILEIIFDKVRYSRDTKLSIVLVLIGVAVCTVTDVSVNSQGLLAAVIAVWSTALQQHYVHHLQWKYSLGSFNLLGHTAPAQAASLLIVGPFVDFWLTNKRVDAFNYTSIVTFFIVLSCIIAVGTNLSQFICIGRFTAVSFQVLGHMKTVLVLTLGFLFFGKEGLNFHVALGMLLAVIGMIWYGNASSKSGGKERQVYPTPSEKTQKHGALSSQSELDQKV

SEQ ID NO: 25148 - protein, 317 aa, Zea mays subsp. mays
  peptide (1)..(317): Ceres Seq. ID no. 12411479
  misc_feature (1)..(317): NCBI GI NO: 30313364 NR Description: putative transmembrane protein [Oryza sativa]
  misc_feature (1)..(316): NCBI GI NO: 18399097 NR Description: expressed protein; protein id: At1g34020
  misc_feature (1)..(312): NCBI GI NO: 15234794 NR Description: hypothetical protein; protein id: At4g09810.1
  misc_feature (1)..(316): NCBI GI NO: 21595054 NR Description: unknown [Arabidopsis thaliana]
  misc_feature (1)..(317): NCBI GI NO: 18420440 NR Description: putative protein; protein id: At4g39390
  misc_feature (1)..(317): NCBI GI NO: 21593003 NR Description: unknown [Arabidopsis thaliana]
  misc_feature (1)..(317): NCBI GI NO: 7486049 NR Description: hypothetical protein F23K16
  misc_feature (1)..(313): NCBI GI NO: 15238957 NR Description: putative protein; protein id: At5g42420.1
  misc_feature (1)..(300): NCBI GI NO: 18411172 NR Description: expressed protein; protein id: At1g76670
  misc_feature (1)..(295): NCBI GI NO: 18394949 NR Description: expressed protein; protein id: At1g21070
MFNVVTSVGIIMVNKGLMATHGFSFATTLTGLHFAMTTLMTLVMKWLGYIQPSYLPLPELVKFAFFANLSIVGMNVSLMWNSVGFYQIAKLCIIPVLCILEIIFDKVRYSRDTKLSIVLVLIGVAVCTVTDVSVNSQGLLAAVIAVWSTALQQHYVHHLQWKYSLGSFNLLGHTAPAQAASLLIVGPFVDFWLTNKRVDAFNYTSIVTFFIVLSCIIAVGTNLSQFICIGRFTAVSFQVLGHMKTVLVLTLGFLFFGKEGLNFHVALGMLLAVIGMIWYGNASSKSGGKERQVYPTPSEKTQKHGALSSQSELDQKV

SEQ ID NO: 25149 - protein, 306 aa, Zea mays subsp. mays
  peptide (1)..(306): Ceres Seq. ID no. 12411480
  misc_feature (1)..(306): NCBI GI NO: 30313364 NR Description: putative transmembrane protein [Oryza sativa]
  misc_feature (1)..(305): NCBI GI NO: 18399097 NR Description: expressed protein; protein id: At1g34020
  misc_feature (1)..(301): NCBI GI NO: 15234794 NR Description: hypothetical protein; protein id: At4g09810.1
  misc_feature (1)..(305): NCBI GI NO: 21595054 NR Description: unknown [Arabidopsis thaliana]
  misc_feature (1)..(306): NCBI GI NO: 18420440 NR Description: putative protein; protein id: At4g39390
  misc_feature (1)..(306): NCBI GI NO: 21593003 NR Description: unknown [Arabidopsis thaliana]
  misc_feature (1)..(306): NCBI GI NO: 7486049 NR Description: hypothetical protein F23K16
  misc_feature (1)..(302): NCBI GI NO: 15238957 NR Description: putative protein; protein id: At5g42420.1
  misc_feature (1)..(289): NCBI GI NO: 18411172 NR Description: expressed protein; protein id: At1g76670
  misc_feature (1)..(284): NCBI GI NO: 18394949 NR Description: expressed protein; protein id: At1g21070
MVNKGLMATHGFSFATTLTGLHFAMTTLMTLVMKWLGYIQPSYLPLPELVKFAFFANLSIVGMNVSLMWNSVGFYQIAKLCIIPVLCILEIIFDKVRYSRDTKLSIVLVLIGVAVCTVTDVSVNSQGLLAAVIAVWSTALQQHYVHHLQWKYSLGSFNLLGHTAPAQAASLLIVGPFVDFWLTNKRVDAFNYTSIVTFFIVLSCIIAVGTNLSQFICIGRFTAVSFQVLGHMKTVLVLTLGFLFFGKEGLNFHVALGMLLAVIGMIWYGNASSKSGGKERQVYPTPSEKTQKHGALSSQSELDQKV

SEQ ID NO: 25150 - DNA, 1340 bp, Zea mays subsp. mays
  misc_feature (1)..(1340): Ceres Seq. ID no. 12406798
atcaaactaaaaaaaatctcaattctcaaagtcgtcgatccagcggtagcagcgcacaaaccgatcgatctcggagagggagagaaccaaccaatttcatcgccgatcaaacaaggaaaaaagatcccggccatggcgacgcggtcgctggagctgacgctgatctcgggcaaggacctcaaggacgtgaacctgatgtccaggatggaggtctacgccgtggtgtcgctctccggcgacccccggtcgcggcagcgggtccaggccgaccgcaccggcggccgcaacccgacctggaacgccacgctccgcttcgccgtcccggccaccggcgccggctccctccacgtcctcctccgcgccgagcgcgccctcggcgaccgcgacgtcggcgaggtccacatcccgctgtccgagctcctctccggcgcccccgacggccccgtccccgccaagttcgtggcctaccaggtgcgcaagatctcctccggcaagccccagggagttctcaacctgtcgtacaagctcggcgaggtcgccaacggctacgcccccgcttccgccgcccagtccgcctacgcccatcctccaccgaccgccgcgtacccgcctccttcaggcaaggctgacgcctacgcgcctcccgccgcgtacccgcctccttcgggcaaggccgacgcgtacgcgccccctgccgcatacccgccggcaaccaaggccgacgcgtacccacctccatacggcgcctacccgcccgccggcggcaaggccgacgctgcttacccgccgtcatccggctacccacccgcggcggcaggcaagccaggcaaggggggcgaaccggtgacggcctacccttcggccggtcccagcacggcggcgccctacgctgctcctccgccgcagtacggcggctacggttacccgccgcagcagggcgcgggctacggctacccgcccccgccgccgcagcaggcggggtacgggtacggctacccgccgccgcaggccgccggctacgggtaccagcagcaggccgtgaggccgcagaagaagaagaacaacttcgggatggggctcggggccgggctgctcggaggcgccgtcgggggcctcctgatcggcgacatgatctcggactcgtcggcgtacgacgccgggttcgacgatggcggcggcttcgatttctagcgcgctccggtggcatgggcgattgggcggtgacgccacgccgcgcatcagagacggagaggttcccgttttggatttgccttttgtgatttgtttccttctgtacgcaatctatgtaattgtcggaacgaaatcaatcaagattatgc

SEQ ID NO: 25151 - protein, 396 aa, Zea mays subsp. mays
  peptide (1)..(396): Ceres Seq. ID no. 12406799
  misc_feature (50)..(134): Pfam Name: Pfam Description:  C2 domain
  misc_feature (45)..(396): NCBI GI NO: 34907166 NR Description: P0423A12.20
  misc_feature (45)..(380): NCBI GI NO: 15228227 NR Description: unknown protein; protein id: At3g16510.1
  misc_feature (45)..(298): NCBI GI NO: 34899340 NR Description: putative shock protein SRC2
  misc_feature (45)..(331): NCBI GI NO: 11358845 NR Description: shock protein SRC2 homolog
  misc_feature (45)..(331): NCBI GI NO: 18390977 NR Description: expressed protein; protein id: At1g09070
  misc_feature (43)..(317): NCBI GI NO: 14091842 NR Description: Putative shock protein [Oryza sativa]
  misc_feature (45)..(317): NCBI GI NO: 34914738 NR Description: putative shock protein SRC2
  misc_feature (45)..(224): NCBI GI NO: 34899336 NR Description: similar to shock protein SRC2
  misc_feature (45)..(277): NCBI GI NO: 7488714 NR Description: shock protein SRC2 - soybean
  misc_feature (263)..(396): NCBI GI NO: 7488714 NR Description: shock protein SRC2 - soybean
IKLKKISILKVVDPAVAAHKPIDLGEGENQPISSPIKQGKKIPAMATRSLELTLISGKDLKDVNLMSRMEVYAVVSLSGDPRSRQRVQADRTGGRNPTWNATLRFAVPATGAGSLHVLLRAERALGDRDVGEVHIPLSELLSGAPDGPVPAKFVAYQVRKISSGKPQGVLNLSYKLGEVANGYAPASAAQSAYAHPPPTAAYPPPSGKADAYAPPAAYPPPSGKADAYAPPAAYPPATKADAYPPPYGAYPPAGGKADAAYPPSSGYPPAAAGKPGKGGEPVTAYPSAGPSTAAPYAAPPPQYGGYGYPPQQGAGYGYPPPPPQQAGYGYGYPPPQAAGYGYQQQAVRPQKKKNNFGMGLGAGLLGGAVGGLLIGDMISDSSAYDAGFDDGGGFDF

SEQ ID NO: 25152 - protein, 352 aa, Zea mays subsp. mays
  peptide (1)..(352): Ceres Seq. ID no. 12406800
  misc_feature (6)..(90): Pfam Name: Pfam Description:  C2 domain
  misc_feature (1)..(352): NCBI GI NO: 34907166 NR Description: P0423A12.20
  misc_feature (1)..(336): NCBI GI NO: 15228227 NR Description: unknown protein; protein id: At3g16510.1
  misc_feature (1)..(254): NCBI GI NO: 34899340 NR Description: putative shock protein SRC2
  misc_feature (1)..(287): NCBI GI NO: 11358845 NR Description: shock protein SRC2 homolog
  misc_feature (1)..(287): NCBI GI NO: 18390977 NR Description: expressed protein; protein id: At1g09070
  misc_feature (1)..(273): NCBI GI NO: 14091842 NR Description: Putative shock protein [Oryza sativa]
  misc_feature (1)..(273): NCBI GI NO: 34914738 NR Description: putative shock protein SRC2
  misc_feature (1)..(180): NCBI GI NO: 34899336 NR Description: similar to shock protein SRC2
  misc_feature (1)..(233): NCBI GI NO: 7488714 NR Description: shock protein SRC2 - soybean
  misc_feature (219)..(352): NCBI GI NO: 7488714 NR Description: shock protein SRC2 - soybean
MATRSLELTLISGKDLKDVNLMSRMEVYAVVSLSGDPRSRQRVQADRTGGRNPTWNATLRFAVPATGAGSLHVLLRAERALGDRDVGEVHIPLSELLSGAPDGPVPAKFVAYQVRKISSGKPQGVLNLSYKLGEVANGYAPASAAQSAYAHPPPTAAYPPPSGKADAYAPPAAYPPPSGKADAYAPPAAYPPATKADAYPPPYGAYPPAGGKADAAYPPSSGYPPAAAGKPGKGGEPVTAYPSAGPSTAAPYAAPPPQYGGYGYPPQQGAGYGYPPPPPQQAGYGYGYPPPQAAGYGYQQQAVRPQKKKNNFGMGLGAGLLGGAVGGLLIGDMISDSSAYDAGFDDGGGFDF

SEQ ID NO: 25153 - protein, 331 aa, Zea mays subsp. mays
  peptide (1)..(331): Ceres Seq. ID no. 12406801
  misc_feature (1)..(69): Pfam Name: Pfam Description:  C2 domain
  misc_feature (1)..(331): NCBI GI NO: 34907166 NR Description: P0423A12.20
  misc_feature (1)..(315): NCBI GI NO: 15228227 NR Description: unknown protein; protein id: At3g16510.1
  misc_feature (1)..(233): NCBI GI NO: 34899340 NR Description: putative shock protein SRC2
  misc_feature (1)..(266): NCBI GI NO: 11358845 NR Description: shock protein SRC2 homolog
  misc_feature (1)..(266): NCBI GI NO: 18390977 NR Description: expressed protein; protein id: At1g09070
  misc_feature (1)..(252): NCBI GI NO: 14091842 NR Description: Putative shock protein [Oryza sativa]
  misc_feature (1)..(252): NCBI GI NO: 34914738 NR Description: putative shock protein SRC2
  misc_feature (1)..(159): NCBI GI NO: 34899336 NR Description: similar to shock protein SRC2
  misc_feature (1)..(212): NCBI GI NO: 7488714 NR Description: shock protein SRC2 - soybean
  misc_feature (198)..(331): NCBI GI NO: 7488714 NR Description: shock protein SRC2 - soybean
MSRMEVYAVVSLSGDPRSRQRVQADRTGGRNPTWNATLRFAVPATGAGSLHVLLRAERALGDRDVGEVHIPLSELLSGAPDGPVPAKFVAYQVRKISSGKPQGVLNLSYKLGEVANGYAPASAAQSAYAHPPPTAAYPPPSGKADAYAPPAAYPPPSGKADAYAPPAAYPPATKADAYPPPYGAYPPAGGKADAAYPPSSGYPPAAAGKPGKGGEPVTAYPSAGPSTAAPYAAPPPQYGGYGYPPQQGAGYGYPPPPPQQAGYGYGYPPPQAAGYGYQQQAVRPQKKKNNFGMGLGAGLLGGAVGGLLIGDMISDSSAYDAGFDDGGGFDF

SEQ ID NO: 25154 - DNA, 1361 bp, Zea mays subsp. mays
  misc_feature (1)..(1361): Ceres Seq. ID no. 12366880
gccagccctcctcttccggcggctcctcggccctcgcggaactcgccacatcccccattgcccccgtcgcccgttcgctccccgtccgaattatttactcaaatcattcatcgccggcccgtcccactcccacctccccaagcaacctgaccacgccaccccgcgaggtccgcgataccgtccaaatccacgcgataacaaccaggccgtcccccttccttccttccctcccgtatatagctagcgaggggcgtggcaatggttcttcagctccgcctgatcccgcgcctggctgccgcagccaggttgacgcccgcgacttcctgcgctccccggctgctcctgcggcgcgcgccgttaccaccggccctcgcgatggcgtcggcgtacagcgccggttacggcgcgggcaggaggctgctattcaggcagctgttcgagaaggagagctccacgtacacctacctcctcgccgacgtcgccgaccccgacaggcccgccgtgctgattgaccctgtcgacagaacagttgacagagatcttaatcttatcaaggaattgggcttaaagctcgtgtttgctatgaatactcatgtacatgctgatcacgtcactggaacaggactaataaaaactaaggtacctggagttaagtctgttatttcaaaagctagtggagcaaaagctgatcattttgttgatcatggggacaaaatacactttggtaaccttttccttgaggtgcgagctactccaggccatacctctggctgtgtgacttatgttacaggtgatgctgatgggcaaccttcaccaaggatggcttttactggtgatgccttaattatccgggcatgtggaaggactgacttccagggaggaagttctgagcagttgtatcagtcagtgcattcacagattttcacattgccaaaggatacactactttatcctgctcatgactataaaggtttcacggtaagtactgttgaagaggaggctgcctataatgctcgactcacaaaagataaggaaactttcaagacgatcatgaataacttgaatttgtcatatccaaagatgatggatgtagctgtacctgccaatttggtctgcggtatccaggatccaccaccgaagatctgagctgttcccgtggaagcctgcaactgcacttctggttgtttatgaactctggatcgccaccagaggcttgcagctgagttgttcattaaataatttgtttgctgcatcctgtgatatcgcgagaaaataatctaaccaatggccggtgtagcctctggttgtatgtggcaaagcactattgtttagagagatcaaaaggaacaatgctgatagcc

SEQ ID NO: 25155 - protein, 295 aa, Zea mays subsp. mays
  peptide (1)..(295): Ceres Seq. ID no. 12366881
  misc_feature (65)..(234): Pfam Name: Pfam Description:  Metallo-beta-lactamase superfamily
  misc_feature (1)..(293): NCBI GI NO: 34910930 NR Description: putative glyoxalase II
  misc_feature (10)..(292): NCBI GI NO: 25405648 NR Description: probable glyoxalase II, 78941-80643
  misc_feature (38)..(292): NCBI GI NO: 1644427 NR Description: glyoxalase II [Arabidopsis thaliana]
  misc_feature (38)..(292): NCBI GI NO: 18404530 NR Description: glyoxalase II, putative
  misc_feature (10)..(241): NCBI GI NO: 8671869 NR Description: Contains similarity to an unknown glyoxalase IIfrom Arabidopsis thaliana gb|U74610 and a Metallo-beta-lactamase PF|00753 domain
  misc_feature (241)..(292): NCBI GI NO: 8671869 NR Description: Contains similarity to an unknown glyoxalase IIfrom Arabidopsis thaliana gb|U74610 and a Metallo-beta-lactamase PF|00753 domain
  misc_feature (37)..(291): NCBI GI NO: 27371293 NR Description: Similar to RIKEN cDNA 0610025L15 gene
  misc_feature (50)..(292): NCBI GI NO: 12963539 NR Description: HSCO protein [Mus musculus]
  misc_feature (49)..(291): NCBI GI NO: 14198377 NR Description: Similar to RIKEN cDNA 0610025L15 gene
  misc_feature (50)..(292): NCBI GI NO: 27676450 NR Description: similar to HSCO protein
MVLQLRLIPRLAAAARLTPATSCAPRLLLRRAPLPPALAMASAYSAGYGAGRRLLFRQLFEKESSTYTYLLADVADPDRPAVLIDPVDRTVDRDLNLIKELGLKLVFAMNTHVHADHVTGTGLIKTKVPGVKSVISKASGAKADHFVDHGDKIHFGNLFLEVRATPGHTSGCVTYVTGDADGQPSPRMAFTGDALIIRACGRTDFQGGSSEQLYQSVHSQIFTLPKDTLLYPAHDYKGFTVSTVEEEAAYNARLTKDKETFKTIMNNLNLSYPKMMDVAVPANLVCGIQDPPPKI

SEQ ID NO: 25156 - protein, 256 aa, Zea mays subsp. mays
  peptide (1)..(256): Ceres Seq. ID no. 12366882
  misc_feature (26)..(195): Pfam Name: Pfam Description:  Metallo-beta-lactamase superfamily
  misc_feature (1)..(254): NCBI GI NO: 34910930 NR Description: putative glyoxalase II
  misc_feature (1)..(253): NCBI GI NO: 25405648 NR Description: probable glyoxalase II, 78941-80643
  misc_feature (1)..(253): NCBI GI NO: 1644427 NR Description: glyoxalase II [Arabidopsis thaliana]
  misc_feature (1)..(253): NCBI GI NO: 18404530 NR Description: glyoxalase II, putative
  misc_feature (1)..(202): NCBI GI NO: 8671869 NR Description: Contains similarity to an unknown glyoxalase IIfrom Arabidopsis thaliana gb|U74610 and a Metallo-beta-lactamase PF|00753 domain
  misc_feature (202)..(253): NCBI GI NO: 8671869 NR Description: Contains similarity to an unknown glyoxalase IIfrom Arabidopsis thaliana gb|U74610 and a Metallo-beta-lactamase PF|00753 domain
  misc_feature (1)..(252): NCBI GI NO: 27371293 NR Description: Similar to RIKEN cDNA 0610025L15 gene
  misc_feature (11)..(253): NCBI GI NO: 12963539 NR Description: HSCO protein [Mus musculus]
  misc_feature (10)..(252): NCBI GI NO: 14198377 NR Description: Similar to RIKEN cDNA 0610025L15 gene
  misc_feature (11)..(253): NCBI GI NO: 27676450 NR Description: similar to HSCO protein
MASAYSAGYGAGRRLLFRQLFEKESSTYTYLLADVADPDRPAVLIDPVDRTVDRDLNLIKELGLKLVFAMNTHVHADHVTGTGLIKTKVPGVKSVISKASGAKADHFVDHGDKIHFGNLFLEVRATPGHTSGCVTYVTGDADGQPSPRMAFTGDALIIRACGRTDFQGGSSEQLYQSVHSQIFTLPKDTLLYPAHDYKGFTVSTVEEEAAYNARLTKDKETFKTIMNNLNLSYPKMMDVAVPANLVCGIQDPPPKI

SEQ ID NO: 25157 - protein, 187 aa, Zea mays subsp. mays
  peptide (1)..(187): Ceres Seq. ID no. 12366883
  misc_feature (1)..(126): Pfam Name: Pfam Description:  Metallo-beta-lactamase superfamily
  misc_feature (1)..(185): NCBI GI NO: 34910930 NR Description: putative glyoxalase II
  misc_feature (1)..(184): NCBI GI NO: 25405648 NR Description: probable glyoxalase II, 78941-80643
  misc_feature (1)..(184): NCBI GI NO: 1644427 NR Description: glyoxalase II [Arabidopsis thaliana]
  misc_feature (1)..(184): NCBI GI NO: 18404530 NR Description: glyoxalase II, putative
  misc_feature (1)..(133): NCBI GI NO: 8671869 NR Description: Contains similarity to an unknown glyoxalase IIfrom Arabidopsis thaliana gb|U74610 and a Metallo-beta-lactamase PF|00753 domain
  misc_feature (133)..(184): NCBI GI NO: 8671869 NR Description: Contains similarity to an unknown glyoxalase IIfrom Arabidopsis thaliana gb|U74610 and a Metallo-beta-lactamase PF|00753 domain
  misc_feature (1)..(183): NCBI GI NO: 27371293 NR Description: Similar to RIKEN cDNA 0610025L15 gene
  misc_feature (1)..(184): NCBI GI NO: 12963539 NR Description: HSCO protein [Mus musculus]
  misc_feature (1)..(183): NCBI GI NO: 14198377 NR Description: Similar to RIKEN cDNA 0610025L15 gene
  misc_feature (1)..(184): NCBI GI NO: 27676450 NR Description: similar to HSCO protein
MNTHVHADHVTGTGLIKTKVPGVKSVISKASGAKADHFVDHGDKIHFGNLFLEVRATPGHTSGCVTYVTGDADGQPSPRMAFTGDALIIRACGRTDFQGGSSEQLYQSVHSQIFTLPKDTLLYPAHDYKGFTVSTVEEEAAYNARLTKDKETFKTIMNNLNLSYPKMMDVAVPANLVCGIQDPPPKI

SEQ ID NO: 25158 - DNA, 1865 bp, Zea mays subsp. mays
  misc_feature (1)..(1865): Ceres Seq. ID no. 12406164
  misc_feature (1432)..(1432): n is a, c, t, g, unknown, or other
  misc_feature (1422)..(1422): n is a, c, t, g, unknown, or other
gaaaaatcggtttctcggaagcctgtcaaacacggactggcttagtcaaagccggctttcagacatataatcgcgctcgccgtcgtgcgcacggcagtcggcaggcagtaccggagcagccgtgccaggccccatggacagctcgagcggcatgtgggccgtgctcggccaggcctcgaacgtggcgcagctggtcggcgtggacgcgctcgggctggtgtccatggtcgtgcaggccgcgctggcggcgcgccgccaccgcgacgcgtgccgccggctggcgcagcacgtggaggtcgtcggcggcctgctgcgggagctggagctcgccgagctgatgcggcgggaggccacgcggcggccgctcgaccagctccgggccgcgctgcggcggtgctacgcgctcgtcacggcgtgccaggactgcgggtacctccgcagcctgctcctcggcgcccggatggccgacgagctccgcgcggcggagaaggaggtcgacttgttcatccgcttagtcccacttatcgccctcgtcgacagcacgcatggtcgcagtggcaagactgccgagggagtaccaggtctactcacgaacggttcaaaccatcatgtcaggttttcaagaagtgtttccgcctccatcaaaatacacattcaacgaactactcaaatctgcagtattgcagaacagccattagcaggagcactggacttgggagaacataaaaatctggactttgaagaattgttggagctttgcatccgtactcaagagagttgctcaggattcagaaggtttttgaattatttcagatcattgacgctacaggcaatttcccggaaagtagaatcatcgggtcgggtggttttgctatagtttacaagggtcagttacctgatggatccatggtcgccatcaaaaggatggatgaaggtgccacaatgtttgatttcagcagtgaatttctggctgcgaggcttcagcataccaatctaattagacttttggggtggtgtatccatgggaaagaaaggattctagtgtatgagttcatgcacaagggtaccctgcacagtttaatctttgacaaaagaatggggttgttgctagactggtctaaacgaatcgatataatcagaggggtagctgaaggacttctttaccttcacaaacagtccaagttatggattgttcatagggatttgaagcccaggaacgtcctattagatcatgacatgaagccaaagcttgctgattttggatcggctagaactctgacttcggattccgctgaagagtgtacaagcagggttgtggggactagtggctacaaagctcctgagtacacgtctcgaggtgtctattcactgaagacagatgtgttcagcttcggggtggtggttctagtgaccatcagcggncgagagaacnccatactggagaagcaaggagactctgttggcacccttgtacgagatgcctggcagctatggaacgatggaaggctgcatgagcttgtagatccagtgctgggtgacggattcgaacttgctgaggtggcgcaggaggagccagcagatcgtcccaccatgtccgacgtcgtgtcgctcctgaactttgaaagcataggtctgctgccagatcctaagcagccgtctgagctttgtaagggaggtggtggtacttctggtgacaggttgccgacatgtggtagccagtcgagcaggaccatagacatcacaatcacaagttcagctcctgtgtcaactagaactagggtccgcatcattgtggacccagagacctaaaatgtagacataaaccgatgttaatatgtaaaagaacatggagaacttttaaggcc

SEQ ID NO: 25159 - protein, 300 aa, Zea mays subsp. mays
  peptide (1)..(300): Ceres Seq. ID no. 12406165
  misc_feature (1)..(294): NCBI GI NO: 38423996 NR Description: receptor-like kinase CHRK1-like
  misc_feature (1)..(251): NCBI GI NO: 28564782 NR Description: P0683C09.26
  misc_feature (1)..(251): NCBI GI NO: 33146474 NR Description: putative receptor-like protein kinase 4
  misc_feature (1)..(251): NCBI GI NO: 34898778 NR Description: OJ1131_E05.14
  misc_feature (1)..(251): NCBI GI NO: 34913760 NR Description: OSJNBa0051H17.28
  misc_feature (1)..(250): NCBI GI NO: 37530904 NR Description: putative protein kinase
  misc_feature (1)..(283): NCBI GI NO: 34915174 NR Description: receptor kinase-like protein
  misc_feature (1)..(285): NCBI GI NO: 15236453 NR Description: serine/threonine kinase - like protein
  misc_feature (1)..(251): NCBI GI NO: 37530902 NR Description: putative receptor-like protein kinase 4
  misc_feature (1)..(250): NCBI GI NO: 7488195 NR Description: probable serine/threonine-specific protein kinase
  misc_feature (172)..(172): Xaa is any aa, unknown or other
  misc_feature (176)..(176): Xaa is any aa, unknown or other
MVAIKRMDEGATMFDFSSEFLAARLQHTNLIRLLGWCIHGKERILVYEFMHKGTLHSLIFDKRMGLLLDWSKRIDIIRGVAEGLLYLHKQSKLWIVHRDLKPRNVLLDHDMKPKLADFGSARTLTSDSAEECTSRVVGTSGYKAPEYTSRGVYSLKTDVFSFGVVVLVTISXRENXILEKQGDSVGTLVRDAWQLWNDGRLHELVDPVLGDGFELAEVAQEEPADRPTMSDVVSLLNFESIGLLPDPKQPSELCKGGGGTSGDRLPTCGSQSSRTIDITITSSAPVSTRTRVRIIVDPET

SEQ ID NO: 25160 - protein, 294 aa, Zea mays subsp. mays
  peptide (1)..(294): Ceres Seq. ID no. 12406166
  misc_feature (1)..(288): NCBI GI NO: 38423996 NR Description: receptor-like kinase CHRK1-like
  misc_feature (1)..(245): NCBI GI NO: 28564782 NR Description: P0683C09.26
  misc_feature (1)..(245): NCBI GI NO: 33146474 NR Description: putative receptor-like protein kinase 4
  misc_feature (1)..(245): NCBI GI NO: 34898778 NR Description: OJ1131_E05.14
  misc_feature (1)..(245): NCBI GI NO: 34913760 NR Description: OSJNBa0051H17.28
  misc_feature (1)..(244): NCBI GI NO: 37530904 NR Description: putative protein kinase
  misc_feature (1)..(277): NCBI GI NO: 34915174 NR Description: receptor kinase-like protein
  misc_feature (1)..(279): NCBI GI NO: 15236453 NR Description: serine/threonine kinase - like protein
  misc_feature (1)..(245): NCBI GI NO: 37530902 NR Description: putative receptor-like protein kinase 4
  misc_feature (1)..(244): NCBI GI NO: 7488195 NR Description: probable serine/threonine-specific protein kinase
  misc_feature (166)..(166): Xaa is any aa, unknown or other
  misc_feature (170)..(170): Xaa is any aa, unknown or other
MDEGATMFDFSSEFLAARLQHTNLIRLLGWCIHGKERILVYEFMHKGTLHSLIFDKRMGLLLDWSKRIDIIRGVAEGLLYLHKQSKLWIVHRDLKPRNVLLDHDMKPKLADFGSARTLTSDSAEECTSRVVGTSGYKAPEYTSRGVYSLKTDVFSFGVVVLVTISXRENXILEKQGDSVGTLVRDAWQLWNDGRLHELVDPVLGDGFELAEVAQEEPADRPTMSDVVSLLNFESIGLLPDPKQPSELCKGGGGTSGDRLPTCGSQSSRTIDITITSSAPVSTRTRVRIIVDPET

SEQ ID NO: 25161 - protein, 288 aa, Zea mays subsp. mays
  peptide (1)..(288): Ceres Seq. ID no. 12406167
  misc_feature (1)..(282): NCBI GI NO: 38423996 NR Description: receptor-like kinase CHRK1-like
  misc_feature (1)..(239): NCBI GI NO: 28564782 NR Description: P0683C09.26
  misc_feature (1)..(239): NCBI GI NO: 33146474 NR Description: putative receptor-like protein kinase 4
  misc_feature (1)..(239): NCBI GI NO: 34898778 NR Description: OJ1131_E05.14
  misc_feature (1)..(239): NCBI GI NO: 34913760 NR Description: OSJNBa0051H17.28
  misc_feature (1)..(238): NCBI GI NO: 37530904 NR Description: putative protein kinase
  misc_feature (1)..(271): NCBI GI NO: 34915174 NR Description: receptor kinase-like protein
  misc_feature (1)..(273): NCBI GI NO: 15236453 NR Description: serine/threonine kinase - like protein
  misc_feature (1)..(239): NCBI GI NO: 37530902 NR Description: putative receptor-like protein kinase 4
  misc_feature (1)..(238): NCBI GI NO: 7488195 NR Description: probable serine/threonine-specific protein kinase
  misc_feature (160)..(160): Xaa is any aa, unknown or other
  misc_feature (164)..(164): Xaa is any aa, unknown or other
MFDFSSEFLAARLQHTNLIRLLGWCIHGKERILVYEFMHKGTLHSLIFDKRMGLLLDWSKRIDIIRGVAEGLLYLHKQSKLWIVHRDLKPRNVLLDHDMKPKLADFGSARTLTSDSAEECTSRVVGTSGYKAPEYTSRGVYSLKTDVFSFGVVVLVTISXRENXILEKQGDSVGTLVRDAWQLWNDGRLHELVDPVLGDGFELAEVAQEEPADRPTMSDVVSLLNFESIGLLPDPKQPSELCKGGGGTSGDRLPTCGSQSSRTIDITITSSAPVSTRTRVRIIVDPET

SEQ ID NO: 25162 - DNA, 1230 bp, Zea mays subsp. mays
  misc_feature (1)..(1230): Ceres Seq. ID no. 12410201
accgcaccgcatcgaccagctacacgaatcagacggcgtcatggccggcacgtgcgcccacgtcgagttcctccgcgcgcagccggcttgggcgctggtgctggccgccgtgggcctgctcgtggctgtccgcgccgctgcccgcttcgcgctctgggtctacgccgcgttcctccgcccggggaagcccctgcgccgccgctacggcgcctgggccgtcgtgacgggcgccaccgacggcatcggccgcgccgtcgcgttccgcctcgccgcggccgggctcgggctcgtcctcgtcggccgcaacccggagaagctggccgccgtggccgccgagatcagggccaagcaccccaaggtccccgaggtgcgcaccttcgtgctcgacttcgccagcgaggggctcgcggccggcgtcgaggcgctcaaggactccatccgtggcctcgacgtcggcgtgctcgtcaacaacgccgggctgtcctacccgtacgcgcgctacttccacgaggtggacgaggagctgatgcgcagcctcatccgggtcaacgtcgagggcgtcacgcgggtcacagcacgccgtgctgccaggcatggtcgagcggaagcgcggcgccattgtcaacatcggctccggcgccgcctccgtcgtgccttctgatccgctctactccgtctacgccgccaccaaagcgtatgttgaccaattctcaagatgcctctatgttgagtacaagagcaagggtattgatgtgcaatgcccaggtgcccctatacgtggcgacaaagatggcatctatcaggaagtcttccttcatggttccatctactgacacctatgctcgtgctgccgttcgtcacattggatacgagcctaggtgcacaccgtactggccacactctgtcgtgtggttcttgatctcgattcttcctgagtcccttatagacagcgtgcgcctgggcatgtgcattaagatccgcaagaaggggctggccaaggacgccaagaagaaggcactgtgattgatgtttcagaatgcaggtccagattcgaagatttcctcatcacctgtagtagacatgtgccttgctgtagtcactttattagctccggagtctgttaagaatcgagaatgccattgctccatccacggttatgatgttaaaaattattattcttcaattcaaaatgtaacactaatacgagtaatgatgaatgcaattaacttg

SEQ ID NO: 25163 - protein, 340 aa, Zea mays subsp. mays
  peptide (1)..(340): Ceres Seq. ID no. 12410202
  misc_feature (255)..(340): NCBI GI NO: 7489808 NR Description: probable beta-keto acyl reductase - maize
  misc_feature (255)..(339): NCBI GI NO: 7489413 NR Description: probable b-keto acyl reductase (EC 1
  misc_feature (255)..(338): NCBI GI NO: 38345332 NR Description: OSJNBa0081L15.5
  misc_feature (255)..(338): NCBI GI NO: 28565601 NR Description: putative 3-ketoacyl-CoA reductase 2
  misc_feature (255)..(338): NCBI GI NO: 28565597 NR Description: putative 3-ketoacyl-CoA reductase 1
  misc_feature (255)..(338): NCBI GI NO: 18408847 NR Description: Expressed protein; protein id: At1g67730
  misc_feature (255)..(340): NCBI GI NO: 2586123 NR Description: b-keto acyl reductase [Allium porrum]
  misc_feature (255)..(338): NCBI GI NO: 11072027 NR Description: F12A21.14 [Arabidopsis thaliana]
  misc_feature (255)..(338): NCBI GI NO: 2586125 NR Description: b-keto acyl reductase [Arabidopsis thaliana]
  misc_feature (255)..(332): NCBI GI NO: 15221751 NR Description: putative b-keto acyl reductase
TAPHRPATRIRRRHGRHVRPRRVPPRAAGLGAGAGRRGPARGCPRRCPLRALGLRRVPPPGEAPAPPLRRLGRRDGRHRRHRPRRRVPPRRGRARARPRRPQPGEAGRRGRRDQGQAPQGPRGAHLRARLRQRGARGRRRGAQGLHPWPRRRRARQQRRAVLPVRALLPRGGRGADAQPHPGQRRGRHAGHSTPCCQAWSSGSAAPLSTSAPAPPPSCLLIRSTPSTPPPKRMLTNSQDASMLSTRARVLMCNAQVPLYVATKMASIRKSSFMVPSTDTYARAAVRHIGYEPRCTPYWPHSVVWFLISILPESLIDSVRLGMCIKIRKKGLAKDAKKKAL

SEQ ID NO: 25164 - protein, 219 aa, Zea mays subsp. mays
  peptide (1)..(219): Ceres Seq. ID no. 12410203
  misc_feature (14)..(191): NCBI GI NO: 7489808 NR Description: probable beta-keto acyl reductase - maize
  misc_feature (14)..(205): NCBI GI NO: 7489413 NR Description: probable b-keto acyl reductase (EC 1
  misc_feature (21)..(205): NCBI GI NO: 38345332 NR Description: OSJNBa0081L15.5
  misc_feature (23)..(191): NCBI GI NO: 28565601 NR Description: putative 3-ketoacyl-CoA reductase 2
  misc_feature (23)..(191): NCBI GI NO: 28565597 NR Description: putative 3-ketoacyl-CoA reductase 1
  misc_feature (23)..(191): NCBI GI NO: 18408847 NR Description: Expressed protein; protein id: At1g67730
  misc_feature (112)..(205): NCBI GI NO: 2586123 NR Description: b-keto acyl reductase [Allium porrum]
  misc_feature (46)..(191): NCBI GI NO: 11072027 NR Description: F12A21.14 [Arabidopsis thaliana]
  misc_feature (88)..(191): NCBI GI NO: 2586125 NR Description: b-keto acyl reductase [Arabidopsis thaliana]
  misc_feature (14)..(191): NCBI GI NO: 15221751 NR Description: putative b-keto acyl reductase
PHRIDQLHESDGVMAGTCAHVEFLRAQPAWALVLAAVGLLVAVRAAARFALWVYAAFLRPGKPLRRRYGAWAVVTGATDGIGRAVAFRLAAAGLGLVLVGRNPEKLAAVAAEIRAKHPKVPEVRTFVLDFASEGLAAGVEALKDSIRGLDVGVLVNNAGLSYPYARYFHEVDEELMRSLIRVNVEGVTRVTARRAARHGRAEARRHCQHRLRRRLRRAF

SEQ ID NO: 25165 - protein, 206 aa, Zea mays subsp. mays
  peptide (1)..(206): Ceres Seq. ID no. 12410204
  misc_feature (1)..(178): NCBI GI NO: 7489808 NR Description: probable beta-keto acyl reductase - maize
  misc_feature (1)..(192): NCBI GI NO: 7489413 NR Description: probable b-keto acyl reductase (EC 1
  misc_feature (8)..(192): NCBI GI NO: 38345332 NR Description: OSJNBa0081L15.5
  misc_feature (10)..(178): NCBI GI NO: 28565601 NR Description: putative 3-ketoacyl-CoA reductase 2
  misc_feature (10)..(178): NCBI GI NO: 28565597 NR Description: putative 3-ketoacyl-CoA reductase 1
  misc_feature (10)..(178): NCBI GI NO: 18408847 NR Description: Expressed protein; protein id: At1g67730
  misc_feature (99)..(192): NCBI GI NO: 2586123 NR Description: b-keto acyl reductase [Allium porrum]
  misc_feature (33)..(178): NCBI GI NO: 11072027 NR Description: F12A21.14 [Arabidopsis thaliana]
  misc_feature (75)..(178): NCBI GI NO: 2586125 NR Description: b-keto acyl reductase [Arabidopsis thaliana]
  misc_feature (1)..(178): NCBI GI NO: 15221751 NR Description: putative b-keto acyl reductase
MAGTCAHVEFLRAQPAWALVLAAVGLLVAVRAAARFALWVYAAFLRPGKPLRRRYGAWAVVTGATDGIGRAVAFRLAAAGLGLVLVGRNPEKLAAVAAEIRAKHPKVPEVRTFVLDFASEGLAAGVEALKDSIRGLDVGVLVNNAGLSYPYARYFHEVDEELMRSLIRVNVEGVTRVTARRAARHGRAEARRHCQHRLRRRLRRAF

SEQ ID NO: 25166 - DNA, 1756 bp, Zea mays subsp. mays
  misc_feature (1)..(1756): Ceres Seq. ID no. 12386932
aagacaggaaggagctatccgcgtctgcctcctcccggccctctgctccctcccagagtctccgctagccaagcccccacatggcaccaccgcccgcgggcctcgtgctcgtggctctgctcgcgctggtcctggcgccggcgccggcgcgcggggacaagccggcgaggggcggggcgtccagctccatcgccgccggggcggatacggagccgtcctccgccgtcttcccgctctacggcgacgtctacccgcacgggttgtactacgtggctatgaacatcggcaacccacccaagccatacttcctggacgtggactccggcagcgacctcacctggctgcagtgcgacgcgccctgcaggagctgcaacgaggtgccgcacccgctgtaccggccgacaaagagcaagctggtgccgtgcgtgcaccggctgtgcgcttccctgcacaacgggctggccggcgggaagcacagatgcgactcgccgcacgagcaatgcgactacgtgatcaagtacgcagaccaggggtcgtccaccggcgtgctcatcaacgacagcttcgcgctccgcctcaccaacggctctgtcgctcgccccagcgtcgcgttcgggtgtggttacgaccagcaggtccgcagcggcgacctgagttggcctaccgacggcgtgctggggctcgggaccggctcagtcagcttgctctcgcagctcaaacagcgtggcgtcaccaagaacgtggtcggccactgcctcagcctgaggggcggcgggttcctcttcttcggtgacgatctcgtgccttaccaacgcgcgacatggactcccatggctcgcagcgcgttccaactactactcccctggctccgcaagcctgtacttcggcgaccggtcactgggcgtgagactgacgaaagtggtcttcgacagtggaagctcgttcacctacttcgctgcaaagccataccaagcacttgtcaccgctcttaaggatggcctgagcaggacgctggaagaggaatccgacccttcgctgccactctgctggaaagggcaggaaccattcaagtctgtgcttgatgtgaggaaggagttcaagtctttggtgctcaactttgccagtggcaagaagacgctcatggagatccctcctgagaactacctcattgtcacagaaaacgggaatgcctgtctgggcatcctcaacggatccgagatcggtctcaaggacctgagcattattggagacattacgatgcaggatcacatggtgatatatgacaatgagaaagggaaaattggatggattcgtgcaccctgtgacagagcccccaacgacaatacggttcatgggtttgaggaaggttactgttggcctcaattcctcccggggatcattggtcttcccaacgaagattgcccagcctattaccgttcaaacaaagagtgatttgccgaggcccaagggggagaggccgctagaatgtcacaagaaggatggtcacggaggctggacactgtgttaggatcgtgtgtgttctttaggaaaggagagaaactagcccatgtaaacatcataatgttcatatcaaatataatgatgatcaccctgttacgagtacaatcttttcggaccttttctttgtacattctttacttggttttctttctgttgatgtgatatatactacggttccaggtgtctcgcgactatggtcctgttcaaaacctgtaaacctaatggttagtcagcc

SEQ ID NO: 25167 - protein, 303 aa, Zea mays subsp. mays
  peptide (1)..(303): Ceres Seq. ID no. 12386933
  misc_feature (68)..(253): Pfam Name: Pfam Description:  Eukaryotic aspartyl protease
  misc_feature (68)..(253): NCBI GI NO: 21805926 NR Description: nucellin-like aspartic protease [Zea mays]
  misc_feature (46)..(253): NCBI GI NO: 18418224 NR Description: nucellin -like protein; protein id: At4g33490
  misc_feature (46)..(253): NCBI GI NO: 26452545 NR Description: putative nucellin [Arabidopsis thaliana]
  misc_feature (46)..(253): NCBI GI NO: 7484812 NR Description: aspartic proteinase homolog F17M5
  misc_feature (43)..(251): NCBI GI NO: 15219354 NR Description: nucellin, putative; protein id: At1g44130.1
  misc_feature (46)..(255): NCBI GI NO: 30699261 NR Description: nucellin protein, putative [Arabidopsis thaliana]
  misc_feature (45)..(253): NCBI GI NO: 33340111 NR Description: nucellin-like protein [Oryza sativa]
  misc_feature (46)..(255): NCBI GI NO: 30699263 NR Description: nucellin protein, putative [Arabidopsis thaliana]
  misc_feature (46)..(255): NCBI GI NO: 25350204 NR Description: nucellin-like protein, 27671-25467
  misc_feature (36)..(251): NCBI GI NO: 18402471 NR Description: expressed protein; protein id: At1g49050
MAPPPAGLVLVALLALVLAPAPARGDKPARGGASSSIAAGADTEPSSAVFPLYGDVYPHGLYYVAMNIGNPPKPYFLDVDSGSDLTWLQCDAPCRSCNEVPHPLYRPTKSKLVPCVHRLCASLHNGLAGGKHRCDSPHEQCDYVIKYADQGSSTGVLINDSFALRLTNGSVARPSVAFGCGYDQQVRSGDLSWPTDGVLGLGTGSVSLLSQLKQRGVTKNVVGHCLSLRGGGFLFFGDDLVPYQRATWTPMARSAFQLLLPWLRKPVLRRPVTGRETDESGLRQWKLVHLLRCKAIPSTCHRS

SEQ ID NO: 25168 - protein, 263 aa, Zea mays subsp. mays
  peptide (1)..(263): Ceres Seq. ID no. 12386934
RQEGAIRVCLLPALCSLPESPLAKPPHGTTARGPRARGSARAGPGAGAGARGQAGEGRGVQLHRRRGGYGAVLRRLPALRRRLPARVVLRGYEHRQPTQAILPGRGLRQRPHLAAVRRALQELQRGAAPAVPADKEQAGAVRAPAVRFPAQRAGRREAQMRLAARAMRLRDQVRRPGVVHRRAHQRQLRAPPHQRLCRSPQRRVRVWLRPAGPQRRPELAYRRRAGARDRLSQLALAAQTAWRHQERGRPLPQPEGRRVPLLR

SEQ ID NO: 25169 - protein, 238 aa, Zea mays subsp. mays
  peptide (1)..(238): Ceres Seq. ID no. 12386935
  misc_feature (3)..(188): Pfam Name: Pfam Description:  Eukaryotic aspartyl protease
  misc_feature (3)..(188): NCBI GI NO: 21805926 NR Description: nucellin-like aspartic protease [Zea mays]
  misc_feature (1)..(188): NCBI GI NO: 18418224 NR Description: nucellin -like protein; protein id: At4g33490
  misc_feature (1)..(188): NCBI GI NO: 26452545 NR Description: putative nucellin [Arabidopsis thaliana]
  misc_feature (1)..(188): NCBI GI NO: 7484812 NR Description: aspartic proteinase homolog F17M5
  misc_feature (1)..(186): NCBI GI NO: 15219354 NR Description: nucellin, putative; protein id: At1g44130.1
  misc_feature (1)..(190): NCBI GI NO: 30699261 NR Description: nucellin protein, putative [Arabidopsis thaliana]
  misc_feature (1)..(188): NCBI GI NO: 33340111 NR Description: nucellin-like protein [Oryza sativa]
  misc_feature (1)..(190): NCBI GI NO: 30699263 NR Description: nucellin protein, putative [Arabidopsis thaliana]
  misc_feature (1)..(190): NCBI GI NO: 25350204 NR Description: nucellin-like protein, 27671-25467
  misc_feature (1)..(186): NCBI GI NO: 18402471 NR Description: expressed protein; protein id: At1g49050
MNIGNPPKPYFLDVDSGSDLTWLQCDAPCRSCNEVPHPLYRPTKSKLVPCVHRLCASLHNGLAGGKHRCDSPHEQCDYVIKYADQGSSTGVLINDSFALRLTNGSVARPSVAFGCGYDQQVRSGDLSWPTDGVLGLGTGSVSLLSQLKQRGVTKNVVGHCLSLRGGGFLFFGDDLVPYQRATWTPMARSAFQLLLPWLRKPVLRRPVTGRETDESGLRQWKLVHLLRCKAIPSTCHRS

SEQ ID NO: 25170 - DNA, 1766 bp, Zea mays subsp. mays
  misc_feature (1)..(1766): Ceres Seq. ID no. 12410193
atcaggatcatcatcaggttctccgttccactccatggccttccctgctgtgcccctcctcgccgctctgctcctggtcgccgccacgcggctgtgggactacgtcttcgtgcgcctcgtatggcggccgtacgccatcaccaaggggttcagagagcaagggatccatggaccctcctacaggttcttcaagggctgcaacgaggagatcaggagcatgaaggagaagaccgacggtctcgtgctggacgtcggcgaccacaagtacctcccgcggatcgcgccgcactacctcgaatggagggctcagtacggagaaccatttctatattggtacggggcacaagcccgaatttgcatatttgactacgaactagcaaggcaaatcctttcgagcaagtctgggcatttcgtgaagaacgatgcgcaccctactttgttggctctggtcggcaagggactcgggttcatggaaggctctgactgggtgcgccatcgcagggtgatcaaccctgctttcaccattgacaagcttaagattgtgaccgagacgatgctggacttcgccgatagcatggcagatgagttggaagctgaagcatcccagaacgagaacggagaaacacaagtggatatatacaaacatttcagcgatctgacagttgacaatatcgcctacgccatctttggaagcagctacaagttaggcaaacaagtgttcgaggcacaaactgagctgctggggatcaccatggctactttccttgacgtgcccataccaggatccaaataccttccaacccaagcgaatcggcgaaaatggatgctggagacgaagctcaagagcttactcacgcggatcatacagccacggttagcaagcggtgagcacggaaacgatctgctgggcgtgatgctggactcctgcactgagaccaagcaaggagggaagcagcagcaagtggatcgtctgcgtctcagcttgagcatggaggagatcatacacgagtgcaagctgttcttcttcgctggccacgagaacacagcccttctcctcacgtggtccgtgtatttgctcagcatataccccgagtggcaagaaaggctccggaaggaggtcttgagggagttcgggagggacgctcctaaccccaacgcgctcaacagattgaaagagatgacaatggtgttgttcgagaccttgaggctctactcgcctgctctcttcatgcaaaggaagaccctggccgacatgaccgtggggccaataaaactgcccaaaggcactgcaattgtgatacccattccgatcatgcatcgagacaagcaggcatggggcgacgacgcagacgagttcagtccgatgagatttgcgaatgggatcacgggagcagcgaaagttcctcacggcctgctggcgttctcgatggggccaaggtcttgcatcggccagaacttgtcgatgctggaagccaagtcgacgctggccctgatgctccgcaagttctccttcgctctctcccctgactacgtgcacgcgcccgtggatctcttcactctcaaacctaagtttggccttcccgtcattctgaggccactggataatgttttgatttgagttgggcatatagtacaacaggaagtaacttaggtacatatcaaatttgctagctggtcaaaacgttatatgatgttctcaaccctccgttgttctatatcgttgaaaacaagtattttaatttaggtgcggtttggtttggcgctgc

SEQ ID NO: 25171 - protein, 538 aa, Zea mays subsp. mays
  peptide (1)..(538): Ceres Seq. ID no. 12410194
  misc_feature (16)..(534): NCBI GI NO: 34896952 NR Description: putative cytochrome P450-related protein
  misc_feature (238)..(531): NCBI GI NO: 28927679 NR Description: putative cytochrome P450, 5'-partial
  misc_feature (73)..(209): NCBI GI NO: 28927679 NR Description: putative cytochrome P450, 5'-partial
  misc_feature (21)..(533): NCBI GI NO: 34913354 NR Description: putative cytochrome P450
  misc_feature (21)..(534): NCBI GI NO: 38112707 NR Description: cytochrome P450 [Triticum aestivum]
  misc_feature (16)..(533): NCBI GI NO: 22324446 NR Description: putative cytochrome P450
  misc_feature (27)..(533): NCBI GI NO: 34913346 NR Description: putative cytochrome P450
  misc_feature (17)..(534): NCBI GI NO: 15226472 NR Description: cytochrome p450, putative; protein id: At2g46950.1
  misc_feature (21)..(538): NCBI GI NO: 14719280 NR Description: cytochrome P450 [Zea mays]
  misc_feature (20)..(535): NCBI GI NO: 18407219 NR Description: cytochrome P450, putative; protein id: At2g46960
SGSSSGSPFHSMAFPAVPLLAALLLVAATRLWDYVFVRLVWRPYAITKGFREQGIHGPSYRFFKGCNEEIRSMKEKTDGLVLDVGDHKYLPRIAPHYLEWRAQYGEPFLYWYGAQARICIFDYELARQILSSKSGHFVKNDAHPTLLALVGKGLGFMEGSDWVRHRRVINPAFTIDKLKIVTETMLDFADSMADELEAEASQNENGETQVDIYKHFSDLTVDNIAYAIFGSSYKLGKQVFEAQTELLGITMATFLDVPIPGSKYLPTQANRRKWMLETKLKSLLTRIIQPRLASGEHGNDLLGVMLDSCTETKQGGKQQQVDRLRLSLSMEEIIHECKLFFFAGHENTALLLTWSVYLLSIYPEWQERLRKEVLREFGRDAPNPNALNRLKEMTMVLFETLRLYSPALFMQRKTLADMTVGPIKLPKGTAIVIPIPIMHRDKQAWGDDADEFSPMRFANGITGAAKVPHGLLAFSMGPRSCIGQNLSMLEAKSTLALMLRKFSFALSPDYVHAPVDLFTLKPKFGLPVILRPLDNVLI

SEQ ID NO: 25172 - protein, 527 aa, Zea mays subsp. mays
  peptide (1)..(527): Ceres Seq. ID no. 12410195
  misc_feature (5)..(523): NCBI GI NO: 34896952 NR Description: putative cytochrome P450-related protein
  misc_feature (227)..(520): NCBI GI NO: 28927679 NR Description: putative cytochrome P450, 5'-partial
  misc_feature (62)..(198): NCBI GI NO: 28927679 NR Description: putative cytochrome P450, 5'-partial
  misc_feature (10)..(522): NCBI GI NO: 34913354 NR Description: putative cytochrome P450
  misc_feature (10)..(523): NCBI GI NO: 38112707 NR Description: cytochrome P450 [Triticum aestivum]
  misc_feature (5)..(522): NCBI GI NO: 22324446 NR Description: putative cytochrome P450
  misc_feature (16)..(522): NCBI GI NO: 34913346 NR Description: putative cytochrome P450
  misc_feature (6)..(523): NCBI GI NO: 15226472 NR Description: cytochrome p450, putative; protein id: At2g46950.1
  misc_feature (10)..(527): NCBI GI NO: 14719280 NR Description: cytochrome P450 [Zea mays]
  misc_feature (9)..(524): NCBI GI NO: 18407219 NR Description: cytochrome P450, putative; protein id: At2g46960
MAFPAVPLLAALLLVAATRLWDYVFVRLVWRPYAITKGFREQGIHGPSYRFFKGCNEEIRSMKEKTDGLVLDVGDHKYLPRIAPHYLEWRAQYGEPFLYWYGAQARICIFDYELARQILSSKSGHFVKNDAHPTLLALVGKGLGFMEGSDWVRHRRVINPAFTIDKLKIVTETMLDFADSMADELEAEASQNENGETQVDIYKHFSDLTVDNIAYAIFGSSYKLGKQVFEAQTELLGITMATFLDVPIPGSKYLPTQANRRKWMLETKLKSLLTRIIQPRLASGEHGNDLLGVMLDSCTETKQGGKQQQVDRLRLSLSMEEIIHECKLFFFAGHENTALLLTWSVYLLSIYPEWQERLRKEVLREFGRDAPNPNALNRLKEMTMVLFETLRLYSPALFMQRKTLADMTVGPIKLPKGTAIVIPIPIMHRDKQAWGDDADEFSPMRFANGITGAAKVPHGLLAFSMGPRSCIGQNLSMLEAKSTLALMLRKFSFALSPDYVHAPVDLFTLKPKFGLPVILRPLDNVLI

SEQ ID NO: 25173 - protein, 466 aa, Zea mays subsp. mays
  peptide (1)..(466): Ceres Seq. ID no. 12410196
  misc_feature (1)..(462): NCBI GI NO: 34896952 NR Description: putative cytochrome P450-related protein
  misc_feature (166)..(459): NCBI GI NO: 28927679 NR Description: putative cytochrome P450, 5'-partial
  misc_feature (1)..(137): NCBI GI NO: 28927679 NR Description: putative cytochrome P450, 5'-partial
  misc_feature (1)..(461): NCBI GI NO: 34913354 NR Description: putative cytochrome P450
  misc_feature (1)..(462): NCBI GI NO: 38112707 NR Description: cytochrome P450 [Triticum aestivum]
  misc_feature (1)..(461): NCBI GI NO: 22324446 NR Description: putative cytochrome P450
  misc_feature (1)..(461): NCBI GI NO: 34913346 NR Description: putative cytochrome P450
  misc_feature (1)..(462): NCBI GI NO: 15226472 NR Description: cytochrome p450, putative; protein id: At2g46950.1
  misc_feature (1)..(466): NCBI GI NO: 14719280 NR Description: cytochrome P450 [Zea mays]
  misc_feature (1)..(463): NCBI GI NO: 18407219 NR Description: cytochrome P450, putative; protein id: At2g46960
MKEKTDGLVLDVGDHKYLPRIAPHYLEWRAQYGEPFLYWYGAQARICIFDYELARQILSSKSGHFVKNDAHPTLLALVGKGLGFMEGSDWVRHRRVINPAFTIDKLKIVTETMLDFADSMADELEAEASQNENGETQVDIYKHFSDLTVDNIAYAIFGSSYKLGKQVFEAQTELLGITMATFLDVPIPGSKYLPTQANRRKWMLETKLKSLLTRIIQPRLASGEHGNDLLGVMLDSCTETKQGGKQQQVDRLRLSLSMEEIIHECKLFFFAGHENTALLLTWSVYLLSIYPEWQERLRKEVLREFGRDAPNPNALNRLKEMTMVLFETLRLYSPALFMQRKTLADMTVGPIKLPKGTAIVIPIPIMHRDKQAWGDDADEFSPMRFANGITGAAKVPHGLLAFSMGPRSCIGQNLSMLEAKSTLALMLRKFSFALSPDYVHAPVDLFTLKPKFGLPVILRPLDNVLI

SEQ ID NO: 25174 - DNA, 1361 bp, Zea mays subsp. mays
  misc_feature (1)..(1361): Ceres Seq. ID no. 12367972
agcctcactctcgcgccggctcaaggtacattgcgtgtcctagccaagacacgcagctcatctcagcctcacacgcacagcaagagcgaggcgtgattcgccatgggcggcctcactatggaccaggctttcgtgcaggcccccgagcaccgccccaagcccctcgtcaccgaggccaccggcatccctctcatcgacctctcgcctctgtccgccagcggcggcgccgtggacgcgctggccgccgaggtgggcgcggcgagccgggactggggcttcttcgtggtcgtgggccacggcgtgcccgcagagaccatggcgcgcgcgacggaggcgcagcgcgcgttcttcgcgctgccggcagagcggaaggccgccgtgcggaggaacgaggcggagccgctcgggtactacgagtcggagcacaccaagaacgtgagggactggaaggaggtgtacgacctcgtgccgcgcgagccgccgccgccggctgccgtggccgacggcgagctcgtgttcgagaacaagtggccccaggatctgccgggcttcagagaggcgctggaggagtacgccaaagcgatggaagagctggcgttcaagctgctggagctgatcgctcggagcctgaagctgaggcccgaccggctgcacggcttcttcaaggaccagacgaccttcatccggctgaaccactaccctccttgcccgagccccgacctggccctcggcgtggggcggcacaaggacgccggcgccctgaccatcctgtaccaggacgacgtcggggggctcgacgtccggcggcgctccgacggcgagtgggtccgcgtcaggcccgtgcccgactcgttcatcatcaacgtcggcgacctcatccaggtgtggagcaacgacaggtacgagagcgcggagcaccggggtgtcggtgaactcggcgagggagaggttctccatgccctacttcttcaacccggcgacctacaccatggtggagccggtggaggagctggtgagcaaggacgatccgcccaggtacgacgcctacaactggggcgacttcttcagcaccaggaagaacagcaacttcaagaagctcaacgtggagaacattcagatcgcgcatttcaagaagagcctcgtcctcgcctaactactgctactgctaggatccatgccattgccatgtcgtcttcagattcagagcacgccatgtcgtcgctagcttcgtggtagaacaaataatgatgtgcgtgctgtgtgtaagcatggatatggatgtgaatatgtaatatgatgagcactcctactttggtatgtttgggaataacagacttgtgttggtctggttcattatttgc

SEQ ID NO: 25175 - protein, 377 aa, Zea mays subsp. mays
  peptide (1)..(377): Ceres Seq. ID no. 12367973
  misc_feature (190)..(275): Pfam Name: II Pfam Description: 2OG-Fe
  misc_feature (1)..(151): NCBI GI NO: 40253917 NR Description: putative Isopenicillin N synthase and relateddioxygenases
  misc_feature (216)..(273): NCBI GI NO: 40253917 NR Description: putative Isopenicillin N synthase and relateddioxygenases
  misc_feature (6)..(275): NCBI GI NO: 18402079 NR Description: expressed protein; protein id: At3g19000
  misc_feature (6)..(275): NCBI GI NO: 21593702 NR Description: unknown [Arabidopsis thaliana]
  misc_feature (6)..(275): NCBI GI NO: 18402081 NR Description: expressed protein; protein id: At3g19010
  misc_feature (6)..(261): NCBI GI NO: 30685157 NR Description: flavonol synthase family [Arabidopsis thaliana]
  misc_feature (43)..(246): NCBI GI NO: 18103924 NR Description: putative oxylase protein [Pinus pinaster]
  misc_feature (19)..(291): NCBI GI NO: 15239179 NR Description: leucoanthocyanidin dioxygenase-like protein
  misc_feature (19)..(291): NCBI GI NO: 21537324 NR Description: leucoanthocyanidin dioxygenase-like protein
  misc_feature (1)..(291): NCBI GI NO: 15229694 NR Description: putative leucoanthocyanidin dioxygenase
MGGLTMDQAFVQAPEHRPKPLVTEATGIPLIDLSPLSASGGAVDALAAEVGAASRDWGFFVVVGHGVPAETMARATEAQRAFFALPAERKAAVRRNEAEPLGYYESEHTKNVRDWKEVYDLVPREPPPPAAVADGELVFENKWPQDLPGFREALEEYAKAMEELAFKLLELIARSLKLRPDRLHGFFKDQTTFIRLNHYPPCPSPDLALGVGRHKDAGALTILYQDDVGGLDVRRRSDGEWVRVRPVPDSFIINVGDLIQVWSNDRYESAEHRGVGELGEGEVLHALLLQPGDLHHGGAGGGAGEQGRSAQVRRLQLGRLLQHQEEQQLQEAQRGEHSDRAFQEEPRPRLTTATARIHAIAMSSSDSEHAMSSLASW

SEQ ID NO: 25176 - protein, 372 aa, Zea mays subsp. mays
  peptide (1)..(372): Ceres Seq. ID no. 12367974
  misc_feature (185)..(270): Pfam Name: II Pfam Description: 2OG-Fe
  misc_feature (1)..(146): NCBI GI NO: 40253917 NR Description: putative Isopenicillin N synthase and relateddioxygenases
  misc_feature (211)..(268): NCBI GI NO: 40253917 NR Description: putative Isopenicillin N synthase and relateddioxygenases
  misc_feature (1)..(270): NCBI GI NO: 18402079 NR Description: expressed protein; protein id: At3g19000
  misc_feature (1)..(270): NCBI GI NO: 21593702 NR Description: unknown [Arabidopsis thaliana]
  misc_feature (1)..(270): NCBI GI NO: 18402081 NR Description: expressed protein; protein id: At3g19010
  misc_feature (1)..(256): NCBI GI NO: 30685157 NR Description: flavonol synthase family [Arabidopsis thaliana]
  misc_feature (38)..(241): NCBI GI NO: 18103924 NR Description: putative oxylase protein [Pinus pinaster]
  misc_feature (14)..(286): NCBI GI NO: 15239179 NR Description: leucoanthocyanidin dioxygenase-like protein
  misc_feature (14)..(286): NCBI GI NO: 21537324 NR Description: leucoanthocyanidin dioxygenase-like protein
  misc_feature (1)..(286): NCBI GI NO: 15229694 NR Description: putative leucoanthocyanidin dioxygenase
MDQAFVQAPEHRPKPLVTEATGIPLIDLSPLSASGGAVDALAAEVGAASRDWGFFVVVGHGVPAETMARATEAQRAFFALPAERKAAVRRNEAEPLGYYESEHTKNVRDWKEVYDLVPREPPPPAAVADGELVFENKWPQDLPGFREALEEYAKAMEELAFKLLELIARSLKLRPDRLHGFFKDQTTFIRLNHYPPCPSPDLALGVGRHKDAGALTILYQDDVGGLDVRRRSDGEWVRVRPVPDSFIINVGDLIQVWSNDRYESAEHRGVGELGEGEVLHALLLQPGDLHHGGAGGGAGEQGRSAQVRRLQLGRLLQHQEEQQLQEAQRGEHSDRAFQEEPRPRLTTATARIHAIAMSSSDSEHAMSSLASW

SEQ ID NO: 25177 - protein, 309 aa, Zea mays subsp. mays
  peptide (1)..(309): Ceres Seq. ID no. 12367975
  misc_feature (101)..(309): Pfam Name: Pfam Description:  HlyD family secretion protein
PHSRAGSRYIACPSQDTQLISASHAQQERGVIRHGRPHYGPGFRAGPRAPPQAPRHRGHRHPSHRPLASVRQRRRRGRAGRRGGRGEPGLGLLRGRGPRRARRDHGARDGGAARVLRAAGRAEGRRAEERGGAARVLRVGAHQEREGLEGGVRPRAARAAAAGCRGRRRARVREQVAPGSAGLQRGAGGVRQSDGRAGVQAAGADRSEPEAEARPAARLLQGPDDLHPAEPLPSLPEPRPGPRRGAAQGRRRPDHPVPGRRRGARRPAALRRRVGPRQARARLVHHQRRRPHPGVEQRQVRERGAPGCR

SEQ ID NO: 25178 - DNA, 1212 bp, Zea mays subsp. mays
  misc_feature (1)..(1212): Ceres Seq. ID no. 12359992
agaacttctccctcagtttccctttatgatccagtccgtccccacgtttgatctcggcgtactgttgtgggagacgcttgcggcgacgatttcccccggtttttatttgaatttctcgggcgctgttatgtgcggcggctagatctgcttgtcgctggtgcagtaggagtttctcgctcggttccgatcctgagaacccgaccgcgcgggtatctgtattccttgatcaacatgtcgcgggaggagaatgtttatatggccaagctggctgagcaagcagaacggtacgaggaaatggttgaatacatggagaaggtggctaagaccacagatgtgcaagagctcactgttgaggagcgtaaccttctatctgttgccttcaagaatgtgattgcggccccccgtgcctcatggcgcattatctcctccatcgagcagaaagaggagtcccgtaagaatgaggaacatgttgcacagatcaaggaataccgtggcaagattgaggctgaattgagcaacatttgtgatggtatcctaaagctgcttgacacgcaccttgtgccttcctccactgccacagagtcgaaggtgttttacctcaagatgaagggtgattatcacaggtaccttgctgagtttaagactggtgctgagaggaaggaatctgcagagagcacaatggtagcttataaggcagctcaggatattgcattggctgaactgccacctattcatcccataaggcttggacttgcacttaacttctcagttttctattacgagattcagaactctccagacaaagcttgcaatcttgccaaggaggcgtttgatgaagctatttctcagttggacatgcttggtgaggattcctacaaagatagcaacttgattatgcagctcctgagggacaacttgaccctctggacggaggacggcattgaggagggcttagaatcctcgaagggcgatgctggtgagggtcagtagcctggtaaacttagattgatggttcgacgtgtttctcaagcacatcgtgttggacgcccagtgctgacagaaggcttttgctgctccatgcattccaagcttctgccctttcgttcgcaccctcttcatgttgttggctggtagtggtcagatttagtcccattggtttagttggccctgggtccatctgaactgatgtattgttactgctaggaagtcaag

SEQ ID NO: 25179 - protein, 252 aa, Zea mays subsp. mays
  peptide (1)..(252): Ceres Seq. ID no. 12359993
  misc_feature (3)..(240): Pfam Name: Pfam Description:  14-3-3 protein
  misc_feature (1)..(252): NCBI GI NO: 37903393 NR Description: 14-3-3-like protein
  misc_feature (1)..(252): NCBI GI NO: 7435022 NR Description: GF14-c protein - rice
  misc_feature (1)..(252): NCBI GI NO: 7271253 NR Description: 14-3-3-like protein [Oryza sativa]
  misc_feature (2)..(252): NCBI GI NO: 2921512 NR Description: GF14 protein [Fritillaria agrestis]
  misc_feature (2)..(252): NCBI GI NO: 12229593 NR Description: 14-3-3-like protein
  misc_feature (1)..(252): NCBI GI NO: 7435021 NR Description: GF14-b protein - rice
  misc_feature (1)..(252): NCBI GI NO: 2492487 NR Description: 14-3-3-LIKE PROTEIN B (14-3-3B)
  misc_feature (2)..(251): NCBI GI NO: 13702816 NR Description: putative 14-3-3 protein [Oryza sativa]
  misc_feature (1)..(252): NCBI GI NO: 7435015 NR Description: 14-3-3 protein - barley
  misc_feature (2)..(250): NCBI GI NO: 3023187 NR Description: 14-3-3-LIKE PROTEIN (G-BOX BINDING FACTOR)
MSREENVYMAKLAEQAERYEEMVEYMEKVAKTTDVQELTVEERNLLSVAFKNVIAAPRASWRIISSIEQKEESRKNEEHVAQIKEYRGKIEAELSNICDGILKLLDTHLVPSSTATESKVFYLKMKGDYHRYLAEFKTGAERKESAESTMVAYKAAQDIALAELPPIHPIRLGLALNFSVFYYEIQNSPDKACNLAKEAFDEAISQLDMLGEDSYKDSNLIMQLLRDNLTLWTEDGIEEGLESSKGDAGEGQ

SEQ ID NO: 25180 - protein, 244 aa, Zea mays subsp. mays
  peptide (1)..(244): Ceres Seq. ID no. 12359994
  misc_feature (1)..(232): Pfam Name: Pfam Description:  14-3-3 protein
  misc_feature (1)..(244): NCBI GI NO: 37903393 NR Description: 14-3-3-like protein
  misc_feature (1)..(244): NCBI GI NO: 7435022 NR Description: GF14-c protein - rice
  misc_feature (1)..(244): NCBI GI NO: 7271253 NR Description: 14-3-3-like protein [Oryza sativa]
  misc_feature (1)..(244): NCBI GI NO: 2921512 NR Description: GF14 protein [Fritillaria agrestis]
  misc_feature (1)..(244): NCBI GI NO: 12229593 NR Description: 14-3-3-like protein
  misc_feature (1)..(244): NCBI GI NO: 7435021 NR Description: GF14-b protein - rice
  misc_feature (1)..(244): NCBI GI NO: 2492487 NR Description: 14-3-3-LIKE PROTEIN B (14-3-3B)
  misc_feature (1)..(243): NCBI GI NO: 13702816 NR Description: putative 14-3-3 protein [Oryza sativa]
  misc_feature (1)..(244): NCBI GI NO: 7435015 NR Description: 14-3-3 protein - barley
  misc_feature (1)..(242): NCBI GI NO: 3023187 NR Description: 14-3-3-LIKE PROTEIN (G-BOX BINDING FACTOR)
MAKLAEQAERYEEMVEYMEKVAKTTDVQELTVEERNLLSVAFKNVIAAPRASWRIISSIEQKEESRKNEEHVAQIKEYRGKIEAELSNICDGILKLLDTHLVPSSTATESKVFYLKMKGDYHRYLAEFKTGAERKESAESTMVAYKAAQDIALAELPPIHPIRLGLALNFSVFYYEIQNSPDKACNLAKEAFDEAISQLDMLGEDSYKDSNLIMQLLRDNLTLWTEDGIEEGLESSKGDAGEGQ

SEQ ID NO: 25181 - protein, 231 aa, Zea mays subsp. mays
  peptide (1)..(231): Ceres Seq. ID no. 12359995
  misc_feature (1)..(219): Pfam Name: Pfam Description:  14-3-3 protein
  misc_feature (1)..(231): NCBI GI NO: 37903393 NR Description: 14-3-3-like protein
  misc_feature (1)..(231): NCBI GI NO: 7435022 NR Description: GF14-c protein - rice
  misc_feature (1)..(231): NCBI GI NO: 7271253 NR Description: 14-3-3-like protein [Oryza sativa]
  misc_feature (1)..(231): NCBI GI NO: 2921512 NR Description: GF14 protein [Fritillaria agrestis]
  misc_feature (1)..(231): NCBI GI NO: 12229593 NR Description: 14-3-3-like protein
  misc_feature (1)..(231): NCBI GI NO: 7435021 NR Description: GF14-b protein - rice
  misc_feature (1)..(231): NCBI GI NO: 2492487 NR Description: 14-3-3-LIKE PROTEIN B (14-3-3B)
  misc_feature (1)..(230): NCBI GI NO: 13702816 NR Description: putative 14-3-3 protein [Oryza sativa]
  misc_feature (1)..(231): NCBI GI NO: 7435015 NR Description: 14-3-3 protein - barley
  misc_feature (1)..(229): NCBI GI NO: 3023187 NR Description: 14-3-3-LIKE PROTEIN (G-BOX BINDING FACTOR)
MVEYMEKVAKTTDVQELTVEERNLLSVAFKNVIAAPRASWRIISSIEQKEESRKNEEHVAQIKEYRGKIEAELSNICDGILKLLDTHLVPSSTATESKVFYLKMKGDYHRYLAEFKTGAERKESAESTMVAYKAAQDIALAELPPIHPIRLGLALNFSVFYYEIQNSPDKACNLAKEAFDEAISQLDMLGEDSYKDSNLIMQLLRDNLTLWTEDGIEEGLESSKGDAGEGQ

SEQ ID NO: 25182 - DNA, 850 bp, Zea mays subsp. mays
  misc_feature (1)..(850): Ceres Seq. ID no. 12342801
atctcagcttcacttccactccacacctcttcagaatggcttctagcaagctctttgcggttggcctcaccgtcttactaagcattattggactgtgcaatgctattagggtggtaaaccacgccaccgcagatggacaaggcggtggaggtggtggaggcggcgggagcggaaccagctatggctccggatccggctccggctacggcgatgccgaggcctatgacggcagtgcccagtccccaacctctggccacgcatatggcagtggatccggggacggtggtggcgtttggcaaggtgacgacgagtgcgcgtccggttacggggcgggcggcgcatccggtgaaggccatggcgactcaggtaactccaacaccgatggcgctgcgaatgcgagcggagctggcggcgggggcggttctggtgggagcaatgggaatggcagcggatctggtggcggcagtggagttggagaaggcgaaggcgataactatggtccctatggttcgagctacgcaaatagcggtggcgccggaaggggaagcggaggcggtcgtaatggtggattcggcggcggttccggtggtggagcggggagcagtggtggtgccgcgtcaggttatgatgatggcagctacaacggatcaacaccttaattatgttcatttgtttgtaccacactgtcaagcaaccgacacgtactgatagggtttttctgtgcttgtgaaataatttggcctttctgagcgatgcagaagtttgttctactcatgtaataagccactgccatttctctgtatacgccatgtttgggctatagatgtcggttagtagacgttcttttgct

SEQ ID NO: 25183 - protein, 218 aa, Zea mays subsp. mays
  peptide (1)..(218): Ceres Seq. ID no. 12342802
  misc_feature (40)..(212): Pfam Name: Pfam Description:  Dehydrin
  misc_feature (12)..(215): NCBI GI NO: 37534920 NR Description: putative glycine-rich protein
  misc_feature (15)..(207): NCBI GI NO: 15887008 NR Description: glycine rich protein [Oryza sativa]
  misc_feature (15)..(207): NCBI GI NO: 37534932 NR Description: putative glycine-rich protein
  misc_feature (12)..(208): NCBI GI NO: 37534934 NR Description: putative glycine-rich protein
  misc_feature (16)..(207): NCBI GI NO: 37534930 NR Description: putative glycine-rich protein
  misc_feature (41)..(211): NCBI GI NO: 37534920 NR Description: putative glycine-rich protein
  misc_feature (12)..(215): NCBI GI NO: 37534924 NR Description: putative glycine-rich protein
  misc_feature (12)..(215): NCBI GI NO: 37534910 NR Description: putative glycine-rich protein
  misc_feature (24)..(215): NCBI GI NO: 121632 NR Description: GLYCINE-RICH CELL WALL STRUCTURAL PROTEIN 1
  misc_feature (12)..(215): NCBI GI NO: 37534900 NR Description: putative glycine-rich protein
LSFTSTPHLFRMASSKLFAVGLTVLLSIIGLCNAIRVVNHATADGQGGGGGGGGGSGTSYGSGSGSGYGDAEAYDGSAQSPTSGHAYGSGSGDGGGVWQGDDECASGYGAGGASGEGHGDSGNSNTDGAANASGAGGGGGSGGSNGNGSGSGGGSGVGEGEGDNYGPYGSSYANSGGAGRGSGGGRNGGFGGGSGGGAGSSGGAASGYDDGSYNGSTP

SEQ ID NO: 25184 - protein, 207 aa, Zea mays subsp. mays
  peptide (1)..(207): Ceres Seq. ID no. 12342803
  misc_feature (29)..(201): Pfam Name: Pfam Description:  Dehydrin
  misc_feature (1)..(204): NCBI GI NO: 37534920 NR Description: putative glycine-rich protein
  misc_feature (4)..(196): NCBI GI NO: 15887008 NR Description: glycine rich protein [Oryza sativa]
  misc_feature (4)..(196): NCBI GI NO: 37534932 NR Description: putative glycine-rich protein
  misc_feature (1)..(197): NCBI GI NO: 37534934 NR Description: putative glycine-rich protein
  misc_feature (5)..(196): NCBI GI NO: 37534930 NR Description: putative glycine-rich protein
  misc_feature (30)..(200): NCBI GI NO: 37534920 NR Description: putative glycine-rich protein
  misc_feature (1)..(204): NCBI GI NO: 37534924 NR Description: putative glycine-rich protein
  misc_feature (1)..(204): NCBI GI NO: 37534910 NR Description: putative glycine-rich protein
  misc_feature (13)..(204): NCBI GI NO: 121632 NR Description: GLYCINE-RICH CELL WALL STRUCTURAL PROTEIN 1
  misc_feature (1)..(204): NCBI GI NO: 37534900 NR Description: putative glycine-rich protein
MASSKLFAVGLTVLLSIIGLCNAIRVVNHATADGQGGGGGGGGGSGTSYGSGSGSGYGDAEAYDGSAQSPTSGHAYGSGSGDGGGVWQGDDECASGYGAGGASGEGHGDSGNSNTDGAANASGAGGGGGSGGSNGNGSGSGGGSGVGEGEGDNYGPYGSSYANSGGAGRGSGGGRNGGFGGGSGGGAGSSGGAASGYDDGSYNGSTP

SEQ ID NO: 25185 - protein, 191 aa, Zea mays subsp. mays
  peptide (1)..(191): Ceres Seq. ID no. 12342804
MDKAVEVVEAAGAEPAMAPDPAPATAMPRPMTAVPSPQPLATHMAVDPGTVVAFGKVTTSARPVTGRAAHPVKAMATQVTPTPMALRMRAELAAGAVLVGAMGMAADLVAAVELEKAKAITMVPMVRATQIAVAPEGEAEAVVMVDSAAVPVVERGAVVVPRQVMMMAATTDQHLNYVHLFVPHCQATDTY

SEQ ID NO: 25186 - DNA, 1336 bp, Zea mays subsp. mays
  misc_feature (1)..(1336): Ceres Seq. ID no. 12342777
  misc_feature (934)..(934): n is a, c, t, g, unknown, or other
  misc_feature (795)..(795): n is a, c, t, g, unknown, or other
  misc_feature (794)..(794): n is a, c, t, g, unknown, or other
  misc_feature (782)..(782): n is a, c, t, g, unknown, or other
  misc_feature (784)..(784): n is a, c, t, g, unknown, or other
  misc_feature (781)..(781): n is a, c, t, g, unknown, or other
agatagatagagtagtagtaggttgttagctgaggggaggcatcgatggctggagccaagagaggaatcctgctcgtcctgtgcctggccgtcgtcttggtggcgctcgggagtggcggcgtggaggcgaggaagcgagggaagcagtccctggggttctacgagctgcgtcggggcgagttctccatggtcgtcaccaactggggcgccaccatcctctccgtcaggctccccgataagaacgggcacatcgacgacgtcgttcttggctacaagaacatcggatcgtacgtcaacgacacgacctacttcggcgcgctggtggggcgcgtggcgaaccgcatcgccggcgggcggttcaccatcagggaccacgcctaccacacgtatcggaacgacggcaacaacacgctccacggcgggccaccgcgggttcaaccaggtgttctggtccgtccgggagcgcgtcacgggggagttcccgcacatcaccttcgcctaccgcagctacgacggcgagcaagggttcccgggcaacctggacgtgctggtcacctacaagatcgacggcgactgctcgtacagcgtcaccatgtacgcgcggccgctggacaagcccacccccgtgaacctggcgcagcacacgtactggaacctccgcggccacggcaacggcaccgtcctgcgccacgccgtccagatcttcgcgtccgcggtcacgcccgtgggccgcggcctcatcccgacgggcgcggtcacccccgtcgccggcactccgttnnanttccgcgccnngtcggcgcccggcgcgcacatcgccgaggtcgagggtgggtacgacatcaactacgtgctggacggcgagacggacgggcaaggcgtgcgcaaggtggccgtggtcagcgaggcggactccgggcgcgtcatggagctntgggccgaccagccgggcctgcagttctacactggcaacatgcttaagggcgacgagggcaagggcggcgccgtctaccccaaatacgctgggatgtgcctggagacgcaagactacccggacgccgtgcacgagccggccttcccggccgaggtgtaccgccctggccaactctacaagcactacatgctctacaagttctcaatcagcaagtaggaacttctagtacctctcgtgcctgatgcctcatagtttcggtaggtttgcaacctgttgcgactagtaataagggttctgagtctttttttttagaaaaaattgcaacagaaatgtatggttcgagttcgtccaaactttgtctagtcaacattttctgccatttgaatgccatcttaatagtct

SEQ ID NO: 25187 - protein, 311 aa, Zea mays subsp. mays
  peptide (1)..(311): Ceres Seq. ID no. 12342778
  misc_feature (39)..(126): Pfam Name: Pfam Description:  Aldose 1-epimerase
  misc_feature (10)..(126): NCBI GI NO: 40882679 NR Description: putative aldose 1-epimerase
  misc_feature (4)..(125): NCBI GI NO: 38567883 NR Description: OSJNBa0036B21.18
  misc_feature (1)..(126): NCBI GI NO: 38567884 NR Description: OSJNBa0036B21.19
  misc_feature (5)..(126): NCBI GI NO: 21537069 NR Description: aldose 1-epimerase-like protein
  misc_feature (5)..(126): NCBI GI NO: 15228261 NR Description: aldose 1-epimerase - like protein
  misc_feature (26)..(126): NCBI GI NO: 15242223 NR Description: putative aldose 1-epimerase - like protein
  misc_feature (9)..(146): NCBI GI NO: 15824567 NR Description: non-cell-autonomous protein pathway2
  misc_feature (8)..(146): NCBI GI NO: 15824565 NR Description: non-cell-autonomous protein pathway1
  misc_feature (26)..(127): NCBI GI NO: 7430313 NR Description: probable aldose 1-epimerase (EC 5
  misc_feature (40)..(126): NCBI GI NO: 37531218 NR Description: putative aldose 1-epimerase - like protein
  misc_feature (246)..(246): Xaa is any aa, unknown or other
  misc_feature (247)..(247): Xaa is any aa, unknown or other
  misc_feature (250)..(250): Xaa is any aa, unknown or other
  misc_feature (297)..(297): Xaa is any aa, unknown or other
MAGAKRGILLVLCLAVVLVALGSGGVEARKRGKQSLGFYELRRGEFSMVVTNWGATILSVRLPDKNGHIDDVVLGYKNIGSYVNDTTYFGALVGRVANRIAGGRFTIRDHAYHTYRNDGNNTLHGGPPRVQPGVLVRPGARHGGVPAHHLRLPQLRRRARVPGQPGRAGHLQDRRRLLVQRHHVRAAAGQAHPREPGAAHVLEPPRPRQRHRPAPRRPDLRVRGHARGPRPHPDGRGHPRRRHSVXXPRXVGARRAHRRGRGWVRHQLRAGRRDGRARRAQGGRGQRGGLRARHGAXGRPAGPAVLHWQHA

SEQ ID NO: 25188 - protein, 264 aa, Zea mays subsp. mays
  peptide (1)..(264): Ceres Seq. ID no. 12342779
  misc_feature (1)..(79): Pfam Name: Pfam Description:  Aldose 1-epimerase
  misc_feature (1)..(79): NCBI GI NO: 40882679 NR Description: putative aldose 1-epimerase
  misc_feature (1)..(78): NCBI GI NO: 38567883 NR Description: OSJNBa0036B21.18
  misc_feature (1)..(79): NCBI GI NO: 38567884 NR Description: OSJNBa0036B21.19
  misc_feature (1)..(79): NCBI GI NO: 21537069 NR Description: aldose 1-epimerase-like protein
  misc_feature (1)..(79): NCBI GI NO: 15228261 NR Description: aldose 1-epimerase - like protein
  misc_feature (1)..(79): NCBI GI NO: 15242223 NR Description: putative aldose 1-epimerase - like protein
  misc_feature (1)..(99): NCBI GI NO: 15824567 NR Description: non-cell-autonomous protein pathway2
  misc_feature (1)..(99): NCBI GI NO: 15824565 NR Description: non-cell-autonomous protein pathway1
  misc_feature (1)..(80): NCBI GI NO: 7430313 NR Description: probable aldose 1-epimerase (EC 5
  misc_feature (1)..(79): NCBI GI NO: 37531218 NR Description: putative aldose 1-epimerase - like protein
  misc_feature (199)..(199): Xaa is any aa, unknown or other
  misc_feature (200)..(200): Xaa is any aa, unknown or other
  misc_feature (203)..(203): Xaa is any aa, unknown or other
  misc_feature (250)..(250): Xaa is any aa, unknown or other
MVVTNWGATILSVRLPDKNGHIDDVVLGYKNIGSYVNDTTYFGALVGRVANRIAGGRFTIRDHAYHTYRNDGNNTLHGGPPRVQPGVLVRPGARHGGVPAHHLRLPQLRRRARVPGQPGRAGHLQDRRRLLVQRHHVRAAAGQAHPREPGAAHVLEPPRPRQRHRPAPRRPDLRVRGHARGPRPHPDGRGHPRRRHSVXXPRXVGARRAHRRGRGWVRHQLRAGRRDGRARRAQGGRGQRGGLRARHGAXGRPAGPAVLHWQHA

SEQ ID NO: 25189 - protein, 185 aa, Zea mays subsp. mays
  peptide (1)..(185): Ceres Seq. ID no. 12342780
  misc_feature (1)..(180): Pfam Name: Pfam Description:  Aldose 1-epimerase
  misc_feature (1)..(185): NCBI GI NO: 40882679 NR Description: putative aldose 1-epimerase
  misc_feature (1)..(182): NCBI GI NO: 38567883 NR Description: OSJNBa0036B21.18
  misc_feature (1)..(182): NCBI GI NO: 38567884 NR Description: OSJNBa0036B21.19
  misc_feature (1)..(182): NCBI GI NO: 21537069 NR Description: aldose 1-epimerase-like protein
  misc_feature (1)..(182): NCBI GI NO: 15228261 NR Description: aldose 1-epimerase - like protein
  misc_feature (1)..(183): NCBI GI NO: 15242223 NR Description: putative aldose 1-epimerase - like protein
  misc_feature (1)..(185): NCBI GI NO: 15824567 NR Description: non-cell-autonomous protein pathway2
  misc_feature (1)..(185): NCBI GI NO: 15824565 NR Description: non-cell-autonomous protein pathway1
  misc_feature (1)..(185): NCBI GI NO: 7430313 NR Description: probable aldose 1-epimerase (EC 5
  misc_feature (1)..(182): NCBI GI NO: 37531218 NR Description: putative aldose 1-epimerase - like protein
  misc_feature (63)..(63): Xaa is any aa, unknown or other
  misc_feature (64)..(64): Xaa is any aa, unknown or other
  misc_feature (68)..(68): Xaa is any aa, unknown or other
  misc_feature (114)..(114): Xaa is any aa, unknown or other
MYARPLDKPTPVNLAQHTYWNLRGHGNGTVLRHAVQIFASAVTPVGRGLIPTGAVTPVAGTPXXFRAXSAPGAHIAEVEGGYDINYVLDGETDGQGVRKVAVVSEADSGRVMEXWADQPGLQFYTGNMLKGDEGKGGAVYPKYAGMCLETQDYPDAVHEPAFPAEVYRPGQLYKHYMLYKFSISK

SEQ ID NO: 25190 - DNA, 1099 bp, Zea mays subsp. mays
  misc_feature (1)..(1099): Ceres Seq. ID no. 13577617
ccaaaagggtcacagttccgcctccttttcctgccttcctcctcactagtcgctcccccgcggctcgcgcaggcgggcgacacaacgaggctaaatccctatcgcgaggaggcgtgtgaggccagcggctttgcgatgacagcaccagcggacaaggggaagaaggccaagactgatgccgacggcggcgaggagaacgaacagatcgacggcgtcctcgtcctctccatcgagaagctccaggagatacaggacgagctcgagaaggtaaatgaggaagcaagtgacaaggttatggaggtggagcagaaatacagtgagatccgcagacctgtctatctcaagaggggtgacattatcaagaccatcccggacttttggctcacagcgtttatgagccatcctctattaagtgagcttctgactgaagaggaccagaagatattcaagtacttagactccattgatgtggatgattctgatgttaaggcaggatactccattcatcttaacttctctgagaacccgtactttgaggacacaaagcttgcaaagacctatatctttgctgatgatggaacaaccacaataaaagcttccgaaattaagtggaaggaaggaatgggacctgcaaatggaaatggtattaacaagaaggggagtaagcggccattagtagaggaaagtttttttagctggtttggtgatacagagctcaagagtcttgctgatggtgtgcaagatgaggtggcggagatcataaaggaagatttgtggcctaatcctttgaagtacttcaacaatgaggttgacgatgaatttgaaggagatgaagatgatgatgatttggatggtgatgatgacgatgaaggcgatgatttggagaactgagcccttgcgcttggttcagaatgttgtccgtggatgatgtggctgggcggaactgtgacccttttgggagattttttgttgttgttgtttgacttagctggaactcaacgtagggaactgtttaatgccttatgaagtcaaccaacttgaaaggagactgcttatatcataatctcggtatatctatctagcaacgcaatttgacccc

SEQ ID NO: 25191 - protein, 296 aa, Zea mays subsp. mays
  peptide (1)..(296): Ceres Seq. ID no. 13577618
  misc_feature (77)..(272): Pfam Name: NAP Pfam Description: Nucleosome assembly protein
  misc_feature (46)..(296): NCBI GI NO: 14550110 NR Description: nucleosome/chromatin assembly factor A [Zea mays]
  misc_feature (46)..(293): NCBI GI NO: 14550112 NR Description: nucleosome/chromatin assembly factor A [Zea mays]
  misc_feature (46)..(293): NCBI GI NO: 21739223 NR Description: OSJNBa0072F16.2
  misc_feature (51)..(296): NCBI GI NO: 25354177 NR Description: hypothetical protein F6A14.10
  misc_feature (51)..(296): NCBI GI NO: 18394656 NR Description: expressed protein [Arabidopsis thaliana]
  misc_feature (50)..(296): NCBI GI NO: 15221298 NR Description: SET protein, phospatase 2A inhibitor -related
  misc_feature (51)..(273): NCBI GI NO: 26451105 NR Description: unknown protein [Arabidopsis thaliana]
  misc_feature (46)..(293): NCBI GI NO: 2253411 NR Description: PP2A inhibitor [Tetraodon fluviatilis]
  misc_feature (46)..(293): NCBI GI NO: 28279779 NR Description: Similar to SET translocation
  misc_feature (46)..(295): NCBI GI NO: 2144100 NR Description: Set beta isoform - rat
PKGSQFRLLFLPSSSLVAPPRLAQAGDTTRLNPYREEACEASGFAMTAPADKGKKAKTDADGGEENEQIDGVLVLSIEKLQEIQDELEKVNEEASDKVMEVEQKYSEIRRPVYLKRGDIIKTIPDFWLTAFMSHPLLSELLTEEDQKIFKYLDSIDVDDSDVKAGYSIHLNFSENPYFEDTKLAKTYIFADDGTTTIKASEIKWKEGMGPANGNGINKKGSKRPLVEESFFSWFGDTELKSLADGVQDEVAEIIKEDLWPNPLKYFNNEVDDEFEGDEDDDDLDGDDDDEGDDLEN

SEQ ID NO: 25192 - protein, 251 aa, Zea mays subsp. mays
  peptide (1)..(251): Ceres Seq. ID no. 13577619
  misc_feature (32)..(227): Pfam Name: NAP Pfam Description: Nucleosome assembly protein
  misc_feature (1)..(251): NCBI GI NO: 14550110 NR Description: nucleosome/chromatin assembly factor A [Zea mays]
  misc_feature (1)..(248): NCBI GI NO: 14550112 NR Description: nucleosome/chromatin assembly factor A [Zea mays]
  misc_feature (1)..(248): NCBI GI NO: 21739223 NR Description: OSJNBa0072F16.2
  misc_feature (6)..(251): NCBI GI NO: 25354177 NR Description: hypothetical protein F6A14.10
  misc_feature (6)..(251): NCBI GI NO: 18394656 NR Description: expressed protein [Arabidopsis thaliana]
  misc_feature (5)..(251): NCBI GI NO: 15221298 NR Description: SET protein, phospatase 2A inhibitor -related
  misc_feature (6)..(228): NCBI GI NO: 26451105 NR Description: unknown protein [Arabidopsis thaliana]
  misc_feature (1)..(248): NCBI GI NO: 2253411 NR Description: PP2A inhibitor [Tetraodon fluviatilis]
  misc_feature (1)..(248): NCBI GI NO: 28279779 NR Description: Similar to SET translocation
  misc_feature (1)..(250): NCBI GI NO: 2144100 NR Description: Set beta isoform - rat
MTAPADKGKKAKTDADGGEENEQIDGVLVLSIEKLQEIQDELEKVNEEASDKVMEVEQKYSEIRRPVYLKRGDIIKTIPDFWLTAFMSHPLLSELLTEEDQKIFKYLDSIDVDDSDVKAGYSIHLNFSENPYFEDTKLAKTYIFADDGTTTIKASEIKWKEGMGPANGNGINKKGSKRPLVEESFFSWFGDTELKSLADGVQDEVAEIIKEDLWPNPLKYFNNEVDDEFEGDEDDDDLDGDDDDEGDDLEN

SEQ ID NO: 25193 - protein, 198 aa, Zea mays subsp. mays
  peptide (1)..(198): Ceres Seq. ID no. 13577620
  misc_feature (1)..(174): Pfam Name: NAP Pfam Description: Nucleosome assembly protein
  misc_feature (1)..(198): NCBI GI NO: 14550110 NR Description: nucleosome/chromatin assembly factor A [Zea mays]
  misc_feature (1)..(195): NCBI GI NO: 14550112 NR Description: nucleosome/chromatin assembly factor A [Zea mays]
  misc_feature (1)..(195): NCBI GI NO: 21739223 NR Description: OSJNBa0072F16.2
  misc_feature (1)..(198): NCBI GI NO: 25354177 NR Description: hypothetical protein F6A14.10
  misc_feature (1)..(198): NCBI GI NO: 18394656 NR Description: expressed protein [Arabidopsis thaliana]
  misc_feature (1)..(198): NCBI GI NO: 15221298 NR Description: SET protein, phospatase 2A inhibitor -related
  misc_feature (1)..(175): NCBI GI NO: 26451105 NR Description: unknown protein [Arabidopsis thaliana]
  misc_feature (1)..(195): NCBI GI NO: 2253411 NR Description: PP2A inhibitor [Tetraodon fluviatilis]
  misc_feature (1)..(195): NCBI GI NO: 28279779 NR Description: Similar to SET translocation
  misc_feature (1)..(197): NCBI GI NO: 2144100 NR Description: Set beta isoform - rat
MEVEQKYSEIRRPVYLKRGDIIKTIPDFWLTAFMSHPLLSELLTEEDQKIFKYLDSIDVDDSDVKAGYSIHLNFSENPYFEDTKLAKTYIFADDGTTTIKASEIKWKEGMGPANGNGINKKGSKRPLVEESFFSWFGDTELKSLADGVQDEVAEIIKEDLWPNPLKYFNNEVDDEFEGDEDDDDLDGDDDDEGDDLEN

SEQ ID NO: 25194 - DNA, 473 bp, Zea mays subsp. mays
  misc_feature (1)..(473): Ceres Seq. ID no. 12567013
  misc_feature (48)..(48): n is a, c, t, g, unknown, or other
  misc_feature (39)..(39): n is a, c, t, g, unknown, or other
  misc_feature (47)..(47): n is a, c, t, g, unknown, or other
atacccattttctcgcaaatccccgccacccccatttynaccgccannttcggtgccgtcagatcgatttcttgtgcatcttggagcatctacaaggggtgggcgactcagcaaaatctgctggcatctcctctcttttcttgcatcgaattttgtaattgccgactgaaccgtgcagagaagtcttgacaagcgcatgggcggaggtggaaatggggaatcgttgcgatctcctccaagtcctttttgagggggccttggctggaggagctgctggtgttgttgttgaaacagctttatatcctattgatacaataaagaccaggcttcaggctgcacaaggcggaagtaaaattcaatggaaaggcatgtatgatgggttagctggaaatattgtcggtgttcttcccgcttctgcaatttttgttggagtatatgaaccagctaaaagaaaactactggaattgtttcct

SEQ ID NO: 25195 - protein, 87 aa, Zea mays subsp. mays
  peptide (1)..(87): Ceres Seq. ID no. 13577844
  misc_feature (2)..(86): NCBI GI NO: 34394981 NR Description: mitochondrial aspartate-glutamate carrier protein-like
  misc_feature (6)..(86): NCBI GI NO: 7486053 NR Description: hypothetical protein F23K16
  misc_feature (6)..(86): NCBI GI NO: 18420458 NR Description: mitochondrial carrier protein family
  misc_feature (1)..(86): NCBI GI NO: 18399114 NR Description: allinase, putative; protein id: At1g34065.1
  misc_feature (12)..(82): NCBI GI NO: 24650120 NR Description: CG4743-PA [Drosophila melanogaster]
  misc_feature (16)..(82): NCBI GI NO: 27754081 NR Description: RIKEN cDNA 4930433D19; expressed sequence AW557176
  misc_feature (12)..(82): NCBI GI NO: 19115553 NR Description: agpet8 protein. [Schizosaccharomyces pombe]
  misc_feature (16)..(82): NCBI GI NO: 34857703 NR Description: similar to RIKEN cDNA 4930433D19
  misc_feature (1)..(40): NCBI GI NO: 25518662 NR Description: hypothetical protein F12G12.11
MGNRCDLLQVLFEGALAGGAAGVVVETALYPIDTIKTRLQAAQGGSKIQWKGMYDGLAGNIVGVLPASAIFVGVYEPAKRKLLELFP

SEQ ID NO: 25196 - protein, 62 aa, Zea mays subsp. mays
  peptide (1)..(62): Ceres Seq. ID no. 13577845
  misc_feature (13)..(13): Xaa is any aa, unknown or other
  misc_feature (16)..(16): Xaa is any aa, unknown or other
IPIFSQIPATPIXTAXFGAVRSISCASWSIYKGWATQQNLLASPLFSCIEFCNCRLNRAEKS

SEQ ID NO: 25197 - protein, 55 aa, Zea mays subsp. mays
  peptide (1)..(55): Ceres Seq. ID no. 13577846
  misc_feature (13)..(13): Xaa is any aa, unknown or other
  misc_feature (16)..(16): Xaa is any aa, unknown or other
YPFSRKSPPPPFXPPXSVPSDRFLVHLGASTRGGRLSKICWHLLSFLASNFVIAD

SEQ ID NO: 25198 - DNA, 1144 bp, Zea mays subsp. mays
  misc_feature (1)..(1144): Ceres Seq. ID no. 12410176
  misc_feature (598)..(598): n is a, c, t, g, unknown, or other
ctctttgcgccgccgcagccccaaaccctcatcccccatcaatctcaggggcgccccagccaccccacccttcactcacctaaccatggcggagcgcggcggcgagcgtggtggagagcgcggcgggttcggccgtggcccgcgccaagaggaagagaagtgggttcccgtcaccaagctcggccgccttgtcaaggagaacaagatcaccaagatcgaggagatctacctgcactcgctccccgtcaaggagcaccagatcgtcgagaccctcgtcccggggctcaaggacgaggtcatgaagatcacgcccgtccagaagcagacccgtgccgggcagcgcacccgcttcaaggccttcgtcgttgtcggcgatggcgacggccacgtcggcctgggagtcaagtgcgccaaggaggtggccaccgccatccgcggcgcccatcatcctagccaagctctccgtcgtccccgtcaggagggggtactgggggaacaagatcggacagccccacaccgtgccctgcaaggtcaccggcaagtgtggctccgtcactgtgcgcatggtgccccgcgcccaggggttctggcatcgtcnccgcgcgcgtgcccaagaaggtgctgcagttcgctggcattgaggatgtcttcacctcgtcccgtggctccactaagacccttggcaacttcgtcaaggcaaccttcgactgcctgatgaagacctacggcttcctcactcctgaattctggagccagaccaagttctccatggccccgttccagcagtacaccgacctgctggcaaagcccaccaagggccttgtgctcgaggccccaactgagacagtagaggagttcgaagacaagatgaaggagcttgaggggatctgcaaccccatcatcgcgaagatgtaccagggcgagggcgcgggcatgggcgctgctgctggcatggatgaggatgccccgtctggtgggagcggtgctggtcccaagatcgaggaggtggattaagttggttagtgttcgaggtttggtttggtgaggtgtgaagtgcctgaactctgatggttgtttgtgaggtgtggtcgcaatagctgcggcctgtggtgaacttctcagaaataaataagttttcgttccc

SEQ ID NO: 25199 - protein, 237 aa, Zea mays subsp. mays
  peptide (1)..(237): Ceres Seq. ID no. 12410177
  misc_feature (95)..(147): Pfam Name: Pfam Description:  Ribosomal protein S5, N-terminal domain
  misc_feature (34)..(147): NCBI GI NO: 34393314 NR Description: putative 40S ribosomal protein S2
  misc_feature (32)..(147): NCBI GI NO: 15217951 NR Description: ribosomal protein S2, putative
  misc_feature (32)..(147): NCBI GI NO: 18406325 NR Description: ribosomal protein S2, putative
  misc_feature (32)..(147): NCBI GI NO: 25294520 NR Description: hypothetical protein RF12
  misc_feature (32)..(147): NCBI GI NO: 21618011 NR Description: ribosomal protein S2, putative
  misc_feature (32)..(147): NCBI GI NO: 15230312 NR Description: 40S ribosomal protein S2 homolog
  misc_feature (32)..(147): NCBI GI NO: 21539457 NR Description: ribosomal protein S2, putative
  misc_feature (31)..(147): NCBI GI NO: 15227443 NR Description: 40S ribosomal protein S2; protein id: At2g41840
  misc_feature (31)..(147): NCBI GI NO: 21553851 NR Description: 40S ribosomal protein S2 [Arabidopsis thaliana]
  misc_feature (34)..(147): NCBI GI NO: 38079225 NR Description: similar to 40S ribosomal protein S2 [Mus musculus]
  misc_feature (199)..(199): Xaa is any aa, unknown or other
SLRRRSPKPSSPINLRGAPATPPFTHLTMAERGGERGGERGGFGRGPRQEEEKWVPVTKLGRLVKENKITKIEEIYLHSLPVKEHQIVETLVPGLKDEVMKITPVQKQTRAGQRTRFKAFVVVGDGDGHVGLGVKCAKEVATAIRGAHHPSQALRRPRQEGVLGEQDRTAPHRALQGHRQVWLRHCAHGAPRPGVLASXPRACPRRCCSSLALRMSSPRPVAPLRPLATSSRQPSTA

SEQ ID NO: 25200 - protein, 209 aa, Zea mays subsp. mays
  peptide (1)..(209): Ceres Seq. ID no. 12410178
  misc_feature (67)..(119): Pfam Name: Pfam Description:  Ribosomal protein S5, N-terminal domain
  misc_feature (6)..(119): NCBI GI NO: 34393314 NR Description: putative 40S ribosomal protein S2
  misc_feature (4)..(119): NCBI GI NO: 15217951 NR Description: ribosomal protein S2, putative
  misc_feature (4)..(119): NCBI GI NO: 25294520 NR Description: hypothetical protein RF12
  misc_feature (4)..(119): NCBI GI NO: 21618011 NR Description: ribosomal protein S2, putative
  misc_feature (4)..(119): NCBI GI NO: 18406325 NR Description: ribosomal protein S2, putative
  misc_feature (4)..(119): NCBI GI NO: 15230312 NR Description: 40S ribosomal protein S2 homolog
  misc_feature (4)..(119): NCBI GI NO: 21539457 NR Description: ribosomal protein S2, putative
  misc_feature (3)..(119): NCBI GI NO: 15227443 NR Description: 40S ribosomal protein S2; protein id: At2g41840
  misc_feature (3)..(119): NCBI GI NO: 21553851 NR Description: 40S ribosomal protein S2 [Arabidopsis thaliana]
  misc_feature (6)..(119): NCBI GI NO: 38079225 NR Description: similar to 40S ribosomal protein S2 [Mus musculus]
  misc_feature (171)..(171): Xaa is any aa, unknown or other
MAERGGERGGERGGFGRGPRQEEEKWVPVTKLGRLVKENKITKIEEIYLHSLPVKEHQIVETLVPGLKDEVMKITPVQKQTRAGQRTRFKAFVVVGDGDGHVGLGVKCAKEVATAIRGAHHPSQALRRPRQEGVLGEQDRTAPHRALQGHRQVWLRHCAHGAPRPGVLASXPRACPRRCCSSLALRMSSPRPVAPLRPLATSSRQPSTA

SEQ ID NO: 25201 - protein, 150 aa, Zea mays subsp. mays
  peptide (1)..(150): Ceres Seq. ID no. 12410179
LFAPPQPQTLIPHQSQGRPSHPTLHSPNHGGARRRAWWRARRVRPWPAPRGREVGSRHQARPPCQGEQDHQDRGDLPALAPRQGAPDRRDPRPGAQGRGHEDHARPEADPCRAAHPLQGLRRCRRWRRPRRPGSQVRQGGGHRHPRRPSS

SEQ ID NO: 25202 - DNA, 1361 bp, Zea mays subsp. mays
  misc_feature (1)..(1361): Ceres Seq. ID no. 12410173
agaaacgggaagttgaagtcgtcgtcgtcaggttacgagccgacgaaactgacagactgtagcaataattggtcgctccccgatccatctgggtttcgcctgccagcggcgagatgtccttcttcttccgggccgcatcgcggcagcgcccgttgccgcaggagatcgcgcgctccatcaaggactccctcgttgccctcgacaccaagaccggcgccaaggctcttgaggatgctgagaaaaacatacttacattgaggcatacacttgctggtgatggagaagtggaaccaaatcaagagcaggttttgcagatagcccttgagatttgcaaggagggtgttctttccctctttgttcagaatcttccttcattgggttgggaggctagaaaggatcttgtccactgctggtgtattttgttgagacagaaggttgatgaaagctattgttgcgtccagtatattgaaaatcattttgatcttttggatttccttgttgtttgctataagaacttggaagtcgcgttgaattgtggaaacatgttgcgagaatgcataaaatatcctacacttgcaaaatatatattggagtcaagcagcttcgagttgtttttccagtatgttgaattgtcaaacttcgatattgcatctgatgctctgaacactttcaaggatttgctaaccaaacatgaagatgccgtctctgaatttctgagctcacattatgagcagttttttggactctacacaaaacttttatcttcaactaattatgtgacacgaagacaatcagtgaagtttctttcagagtttctgttggaggccccaaatgctcaaataatgaagcgttacattttggaagttcattacttaaacattatgatgggcctgctaaaggattcaagcaaaaatatcaggatatgtgccttccacatttttaaggtatttgttgccaatccaaacaagcctcgtgagattattcaggttttggttgagaatcacagagaagtgttgaagctactccacaatctccccacaagcaaaggtgaagatgaacagcttgatgaggagagagatttaattatcaaagaaatcgagaatcttgtgcggttgtcagtataaaccctcaggaaattcgaacgtatccttgaagacatactgtgcaatatgctgccttgtatagagcttgtttttcatgtatggaaaaaaaagtttggccacaaattgcatttttcgcgagaacacttagcatttctgtcagaaaattattgtcgtgtagcagaatttgcaacaggaataatctgcattatggtgtggtgttgataccattaaggattggtgaaagtgcctgccatttgt

SEQ ID NO: 25203 - protein, 336 aa, Zea mays subsp. mays
  peptide (1)..(336): Ceres Seq. ID no. 12410174
  misc_feature (33)..(332): Pfam Name: Pfam Description:  Mo25 protein family
  misc_feature (1)..(336): NCBI GI NO: 33146499 NR Description: unknown protein
  misc_feature (1)..(336): NCBI GI NO: 34898912 NR Description: hypothetical protein
  misc_feature (1)..(331): NCBI GI NO: 18419772 NR Description: putative protein; protein id: At5g18940
  misc_feature (15)..(333): NCBI GI NO: 7706481 NR Description: MO25 protein [Homo sapiens]
  misc_feature (15)..(333): NCBI GI NO: 34877516 NR Description: similar to MO25 protein [Rattus norvegicus]
  misc_feature (1)..(333): NCBI GI NO: 28277560 NR Description: Similar to MO25 protein [Danio rerio]
  misc_feature (10)..(331): NCBI GI NO: 34901086 NR Description: putative MO25 protein (CGI-66)
  misc_feature (15)..(331): NCBI GI NO: 1794137 NR Description: DMO25 [Drosophila melanogaster]
  misc_feature (15)..(331): NCBI GI NO: 17647657 NR Description: Mo25 CG4083-PA
  misc_feature (9)..(331): NCBI GI NO: 37589970 NR Description: Unknown (protein for MGC:27972) [Mus musculus]
MSFFFRAASRQRPLPQEIARSIKDSLVALDTKTGAKALEDAEKNILTLRHTLAGDGEVEPNQEQVLQIALEICKEGVLSLFVQNLPSLGWEARKDLVHCWCILLRQKVDESYCCVQYIENHFDLLDFLVVCYKNLEVALNCGNMLRECIKYPTLAKYILESSSFELFFQYVELSNFDIASDALNTFKDLLTKHEDAVSEFLSSHYEQFFGLYTKLLSSTNYVTRRQSVKFLSEFLLEAPNAQIMKRYILEVHYLNIMMGLLKDSSKNIRICAFHIFKVFVANPNKPREIIQVLVENHREVLKLLHNLPTSKGEDEQLDEERDLIIKEIENLVRLSV

SEQ ID NO: 25204 - protein, 193 aa, Zea mays subsp. mays
  peptide (1)..(193): Ceres Seq. ID no. 12410175
  misc_feature (1)..(189): Pfam Name: Pfam Description:  Mo25 protein family
  misc_feature (1)..(193): NCBI GI NO: 33146499 NR Description: unknown protein
  misc_feature (1)..(193): NCBI GI NO: 34898912 NR Description: hypothetical protein
  misc_feature (1)..(188): NCBI GI NO: 18419772 NR Description: putative protein; protein id: At5g18940
  misc_feature (1)..(190): NCBI GI NO: 7706481 NR Description: MO25 protein [Homo sapiens]
  misc_feature (1)..(190): NCBI GI NO: 34877516 NR Description: similar to MO25 protein [Rattus norvegicus]
  misc_feature (1)..(190): NCBI GI NO: 28277560 NR Description: Similar to MO25 protein [Danio rerio]
  misc_feature (1)..(188): NCBI GI NO: 34901086 NR Description: putative MO25 protein (CGI-66)
  misc_feature (1)..(188): NCBI GI NO: 1794137 NR Description: DMO25 [Drosophila melanogaster]
  misc_feature (1)..(188): NCBI GI NO: 17647657 NR Description: Mo25 CG4083-PA
  misc_feature (1)..(188): NCBI GI NO: 37589970 NR Description: Unknown (protein for MGC:27972) [Mus musculus]
MLRECIKYPTLAKYILESSSFELFFQYVELSNFDIASDALNTFKDLLTKHEDAVSEFLSSHYEQFFGLYTKLLSSTNYVTRRQSVKFLSEFLLEAPNAQIMKRYILEVHYLNIMMGLLKDSSKNIRICAFHIFKVFVANPNKPREIIQVLVENHREVLKLLHNLPTSKGEDEQLDEERDLIIKEIENLVRLSV

SEQ ID NO: 25205 - DNA, 1339 bp, Zea mays subsp. mays
  misc_feature (1)..(1339): Ceres Seq. ID no. 12410169
  misc_feature (201)..(201): n is a, c, t, g, unknown, or other
  misc_feature (1158)..(1158): n is a, c, t, g, unknown, or other
aagtcgggttggttagaagaacccaatgcaagtgtgagtgagctgacggcacggcggacgcgctctcctctcctctcctcttcttccggctctccctctccgcatgccattccaacgcattacaggttggcttttggctatgcctatcctgcctacgaatgctacaagactgttgaactaaacaaaccagagattgcgcantcatattttggtgtcagtattggattttagttgccctgttgacagttttggagagatttggagatttcacaatatcatggctaccattttactcggaagcaaagctgatgttctttgtatacttgtggtaccctaagacaaagggaactacgtatgtttatggaactttctttaaaccatatatttctcagcatgagaatgaaatagaccggaatctccttgagctgagagctcgagccaccgacacggttgtcctttattttcagaaggctgcttcggcaggacaaagtactttctttgacgttttaaaatatgttgctgcccagtcaccttctcagaaatcaaggcaacgccttcatcaggaatcacagcagccgccacaacaacagcaaccacaagtgcaggtgcagcaagcgcaaccacaaaaacaagcagcacctgttatgcgcagagcatcatccattgctgctcggcaagcagcaatggcacagcaatctcaggagactaaacccgtttcatcttctcccaagatcaagcgtcaaacatcagcaagatctggttcagtggcatccacaaagcctccggtagctgcatccgcaccaaaacctggcggtagcccaaagaaaggcgaggtcaaacctgctgccggcccagttcaaactccaaccacaggtgccgattcaccaaaacccgagcctagcgccccatcactccctggagccgaaggggtggacaatatagccatcgatgaggccagtggtgacgccccagagggcgcagaagagcttgaccctgcgctcgaagaggagacgccgatggaggagacgatccgtgtgacgcgcgccaagctaaggaggcgcatgaccaccgaagatcctgctgggaattagctgcaggccattgtttttccttcccctgcacattgtgttggtgttttttttgggggggggggggggntaggctgtcatgttgtttggtgggatggagatgtactgttgaattggttctttgtgacacagctgattactgtaccttgtttccgtgctttcttagtgcccttgtgatttaagttgtaagtaacacttttcctccgcatgtgaatacatgttagtggcacgggcaacgaacgcaacattat

SEQ ID NO: 25206 - protein, 260 aa, Zea mays subsp. mays
  peptide (1)..(260): Ceres Seq. ID no. 12410170
  misc_feature (67)..(247): Pfam Name: chromogranin or secretogranin Pfam Description: Granin
  misc_feature (1)..(100): NCBI GI NO: 37531658 NR Description: putative Magnaporthe grisea pathogenicity protein
  misc_feature (1)..(257): NCBI GI NO: 18394805 NR Description: expressed protein; protein id: At1g19950
  misc_feature (1)..(257): NCBI GI NO: 25513732 NR Description: T20H2.26 protein - Arabidopsis thaliana
  misc_feature (1)..(257): NCBI GI NO: 21553483 NR Description: pathogenicity protein PATH531-like protein
  misc_feature (1)..(85): NCBI GI NO: 21671921 NR Description: Putative protein with HVA22 domain
  misc_feature (1)..(196): NCBI GI NO: 9759014 NR Description: gene_id:K16E1.3~unknown protein
  misc_feature (1)..(196): NCBI GI NO: 18422223 NR Description: expressed protein; protein id: At5g42560
  misc_feature (1)..(196): NCBI GI NO: 21553813 NR Description: unknown [Arabidopsis thaliana]
  misc_feature (1)..(107): NCBI GI NO: 15222332 NR Description: hypothetical protein; protein id: At1g75700.1
  misc_feature (1)..(85): NCBI GI NO: 20502988 NR Description: Putative InsB from Escherichia coli
MFFVYLWYPKTKGTTYVYGTFFKPYISQHENEIDRNLLELRARATDTVVLYFQKAASAGQSTFFDVLKYVAAQSPSQKSRQRLHQESQQPPQQQQPQVQVQQAQPQKQAAPVMRRASSIAARQAAMAQQSQETKPVSSSPKIKRQTSARSGSVASTKPPVAASAPKPGGSPKKGEVKPAAGPVQTPTTGADSPKPEPSAPSLPGAEGVDNIAIDEASGDAPEGAEELDPALEEETPMEETIRVTRAKLRRRMTTEDPAGN

SEQ ID NO: 25207 - protein, 148 aa, Zea mays subsp. mays
  peptide (1)..(148): Ceres Seq. ID no. 12410171
  misc_feature (1)..(135): Pfam Name: chromogranin or secretogranin Pfam Description: Granin
  misc_feature (1)..(145): NCBI GI NO: 18394805 NR Description: expressed protein; protein id: At1g19950
  misc_feature (1)..(145): NCBI GI NO: 25513732 NR Description: T20H2.26 protein - Arabidopsis thaliana
  misc_feature (1)..(145): NCBI GI NO: 21553483 NR Description: pathogenicity protein PATH531-like protein
  misc_feature (1)..(84): NCBI GI NO: 9759014 NR Description: gene_id:K16E1.3~unknown protein
  misc_feature (1)..(84): NCBI GI NO: 18422223 NR Description: expressed protein; protein id: At5g42560
  misc_feature (1)..(84): NCBI GI NO: 21553813 NR Description: unknown [Arabidopsis thaliana]
  misc_feature (1)..(146): NCBI GI NO: 37531658 NR Description: putative Magnaporthe grisea pathogenicity protein
  misc_feature (1)..(45): NCBI GI NO: 30519927 NR Description: DNA segment
  misc_feature (1)..(15): NCBI GI NO: 30519931 NR Description: DNA segment, Chr 6, ERATO Doi 253, expressed
  misc_feature (1)..(143): NCBI GI NO: 21553813 NR Description: unknown [Arabidopsis thaliana]
MRRASSIAARQAAMAQQSQETKPVSSSPKIKRQTSARSGSVASTKPPVAASAPKPGGSPKKGEVKPAAGPVQTPTTGADSPKPEPSAPSLPGAEGVDNIAIDEASGDAPEGAEELDPALEEETPMEETIRVTRAKLRRRMTTEDPAGN

SEQ ID NO: 25208 - protein, 135 aa, Zea mays subsp. mays
  peptide (1)..(135): Ceres Seq. ID no. 12410172
  misc_feature (1)..(122): Pfam Name: chromogranin or secretogranin Pfam Description: Granin
  misc_feature (1)..(132): NCBI GI NO: 18394805 NR Description: expressed protein; protein id: At1g19950
  misc_feature (1)..(132): NCBI GI NO: 25513732 NR Description: T20H2.26 protein - Arabidopsis thaliana
  misc_feature (1)..(132): NCBI GI NO: 21553483 NR Description: pathogenicity protein PATH531-like protein
  misc_feature (1)..(71): NCBI GI NO: 9759014 NR Description: gene_id:K16E1.3~unknown protein
  misc_feature (1)..(71): NCBI GI NO: 21553813 NR Description: unknown [Arabidopsis thaliana]
  misc_feature (1)..(71): NCBI GI NO: 18422223 NR Description: expressed protein; protein id: At5g42560
  misc_feature (1)..(133): NCBI GI NO: 37531658 NR Description: putative Magnaporthe grisea pathogenicity protein
  misc_feature (1)..(32): NCBI GI NO: 30519927 NR Description: DNA segment
  misc_feature (1)..(130): NCBI GI NO: 21553813 NR Description: unknown [Arabidopsis thaliana]
  misc_feature (1)..(130): NCBI GI NO: 18422223 NR Description: expressed protein; protein id: At5g42560
MAQQSQETKPVSSSPKIKRQTSARSGSVASTKPPVAASAPKPGGSPKKGEVKPAAGPVQTPTTGADSPKPEPSAPSLPGAEGVDNIAIDEASGDAPEGAEELDPALEEETPMEETIRVTRAKLRRRMTTEDPAGN

SEQ ID NO: 25209 - DNA, 1360 bp, Zea mays subsp. mays
  misc_feature (1)..(1360): Ceres Seq. ID no. 13496132
ataaattccgaaggcggtcttccgagagcaacagctgctcaggcaggcaggcaggcaggcaccaacagccaacccgacgcaaggaaccaattaaccaccgtcccgctgatgtcgtcggcgacgccagcgcccgcgcgccaccggacgtgccgcacgtactggtgctaccagtgcggccgcgcgctccgcatcatctcctgcccgtccaccgacgtcttctgcccgcgctgcttcggccgcttcctccacgaggaggtcgacccgccgacggcgcgccacgggttcccgccggcgcacttccttccgcacccgttccacccgcagcaccagtacgccggccgtccgcgccgctgggtcatctacggcgaggagccgacgacggtaccaggccgtgcgttccgccagcctgcgccggcacagggacctgccacgcctcctgctcctgcaccggcgctggttggacgacggcgcgtgccttccccgccgccggcgccggtgccgcggcggccgtccacgcccccggccatggaccccggggactacttcatggggccgaacctgaacagcctcatcgaggagctcacgcagaacgacaggccggggccggcgccggcgccaccgtcggcaatcgactcgctcccgacggtgcgggtcgccggggcgcacctgtcggacggctcgcagtgccccgtgtgcaaggaggacttcgagctcggggaggccgcgcggcagctgccgtgcaagcacgtctaccactccgattgcatcgtgccgtggctccgcctgcacaactcctgccccggtctgccgataccagctacctagagccgggtccaacggcagcagccaggccgcacctcgcggcggaagcaacggcaacaacaggaacagggagatggagagagagcccctgacgatggtgcaatgggggccattctcctggctgtttccaccgcgcgggatggacgaccccggggacgcgtgggagcacgggcagcgcggcaggcacgacgcggcggacgccggcgcattctacgcttggtggcgctctctgtttctcatatagatgttctcgtggagtccttatcgcatccaaagatgtacgcctcctacccagtaactatggcgccgttctctcagttcaatgtcaaagatggaagattggtggaagcctgatgccaaaatcagcgtagatgtaaaaatgaaatacgcccactgtaaagacgagtgaattacacatcgttaaagggcacgtaaaacgactgtttggatgatataccatgttaacagtaatttctggaacgcaccgaagacatttctatgtgatgtatctgatacactgaaactctgatgttggtag

SEQ ID NO: 25210 - protein, 303 aa, Zea mays subsp. mays
  peptide (1)..(303): Ceres Seq. ID no. 13496133
  misc_feature (12)..(135): NCBI GI NO: 15839664 NR Description: hypothetical protein
KFRRRSSESNSCSGRQAGRHQQPTRRKEPINHRPADVVGDASARAPPDVPHVLVLPVRPRAPHHLLPVHRRLLPALLRPLPPRGGRPADGAPRVPAGALPSAPVPPAAPVRRPSAPLGHLRRGADDGTRPCVPPACAGTGTCHASCSCTGAGWTTARAFPAAGAGAAAAVHAPGHGPRGLLHGAEPEQPHRGAHAERQAGAGAGATVGNRLAPDGAGRRGAPVGRLAVPRVQGGLRARGGRAAAAVQARLPLRLHRAVAPPAQLLPRSADTSYLEPGPTAAARPHLAAEATATTGTGRWRESP

SEQ ID NO: 25211 - protein, 274 aa, Zea mays subsp. mays
  peptide (1)..(274): Ceres Seq. ID no. 13496134
  misc_feature (229)..(267): Pfam Name: RING finger Pfam Description: Zinc finger, C3HC4 type
  misc_feature (146)..(274): NCBI GI NO: 15219060 NR Description: hypothetical protein [Arabidopsis thaliana]
  misc_feature (35)..(97): NCBI GI NO: 15219060 NR Description: hypothetical protein [Arabidopsis thaliana]
  misc_feature (52)..(274): NCBI GI NO: 18405518 NR Description: RING-H2 finger protein (RHC1a)
  misc_feature (35)..(274): NCBI GI NO: 14719329 NR Description: putative RING-H2 finger protein [Oryza sativa]
  misc_feature (179)..(274): NCBI GI NO: 18410530 NR Description: expressed protein [Arabidopsis thaliana]
  misc_feature (179)..(267): NCBI GI NO: 37535546 NR Description: putative zinc finger protein
  misc_feature (166)..(267): NCBI GI NO: 11994207 NR Description: gene_id:MPN9.20~unknown protein
  misc_feature (166)..(267): NCBI GI NO: 15231003 NR Description: expressed protein [Arabidopsis thaliana]
  misc_feature (181)..(274): NCBI GI NO: 34908968 NR Description: P0003D09.21
  misc_feature (163)..(274): NCBI GI NO: 21362321 NR Description: RIKEN cDNA 2610010O19 [Mus musculus]
INSEGGLPRATAAQAGRQAGTNSQPDARNQLTTVPLMSSATPAPARHRTCRTYWCYQCGRALRIISCPSTDVFCPRCFGRFLHEEVDPPTARHGFPPAHFLPHPFHPQHQYAGRPRRWVIYGEEPTTVPGRAFRQPAPAQGPATPPAPAPALVGRRRVPSPPPAPVPRRPSTPPAMDPGDYFMGPNLNSLIEELTQNDRPGPAPAPPSAIDSLPTVRVAGAHLSDGSQCPVCKEDFELGEAARQLPCKHVYHSDCIVPWLRLHNSCPGLPIPAT

SEQ ID NO: 25212 - protein, 238 aa, Zea mays subsp. mays
  peptide (1)..(238): Ceres Seq. ID no. 13496135
  misc_feature (193)..(231): Pfam Name: RING finger Pfam Description: Zinc finger, C3HC4 type
  misc_feature (110)..(238): NCBI GI NO: 15219060 NR Description: hypothetical protein [Arabidopsis thaliana]
  misc_feature (1)..(61): NCBI GI NO: 15219060 NR Description: hypothetical protein [Arabidopsis thaliana]
  misc_feature (16)..(238): NCBI GI NO: 18405518 NR Description: RING-H2 finger protein (RHC1a)
  misc_feature (1)..(238): NCBI GI NO: 14719329 NR Description: putative RING-H2 finger protein [Oryza sativa]
  misc_feature (143)..(238): NCBI GI NO: 18410530 NR Description: expressed protein [Arabidopsis thaliana]
  misc_feature (143)..(231): NCBI GI NO: 37535546 NR Description: putative zinc finger protein
  misc_feature (130)..(231): NCBI GI NO: 11994207 NR Description: gene_id:MPN9.20~unknown protein
  misc_feature (130)..(231): NCBI GI NO: 15231003 NR Description: expressed protein [Arabidopsis thaliana]
  misc_feature (145)..(238): NCBI GI NO: 34908968 NR Description: P0003D09.21
  misc_feature (127)..(238): NCBI GI NO: 21362321 NR Description: RIKEN cDNA 2610010O19 [Mus musculus]
MSSATPAPARHRTCRTYWCYQCGRALRIISCPSTDVFCPRCFGRFLHEEVDPPTARHGFPPAHFLPHPFHPQHQYAGRPRRWVIYGEEPTTVPGRAFRQPAPAQGPATPPAPAPALVGRRRVPSPPPAPVPRRPSTPPAMDPGDYFMGPNLNSLIEELTQNDRPGPAPAPPSAIDSLPTVRVAGAHLSDGSQCPVCKEDFELGEAARQLPCKHVYHSDCIVPWLRLHNSCPGLPIPAT

SEQ ID NO: 25213 - DNA, 1557 bp, Zea mays subsp. mays
  misc_feature (1)..(1557): Ceres Seq. ID no. 12376476
actcaaatcacaaaccccgctacctcttaactcttcacacgcacaccgtcgtcaaccatggttgctgacatgaaggagaacggcggcgcggtgttggcggcgggcgagaaggcgccgcaggtggtcgtcaagcgcggcgagccgacgctggtgccgccggcggaggcgacgccgacgggcgggcagtactacctgtccaacctggaccagaacatcgcggtgatcgtgcagacggtgtactgctacaagcccagcggcggcggcggcgacgtggcggccgcgctccgcgacgcgctggcgcgcgtgctggtgcactactacccgctggcggggcggctgggcgtaagcccggagatgaagctgaccgtggagctgaccggcgagggcgccgtgttcgtggaggccgacgccgcctgcgaactcgccaccgtcggcgacctcaccaagcccgaccccgccgcgctcggccagctcgtctactccgtccccggcgccaagcacatcctcgagatgcctcccatgaccgcgcaggtgacaaggttcaagtgtgggggcttcgcacttggcctggccatgaaccactgcatgttcgacggcatcggcgccatggagttcgtcaactcgtgggccgagacggcgcgcggcgtcgctgagctcaccgtgccgccgttcctggaccgcagcgtcctgaaggcgcgcgacccgccggtgcacaccttcccgcaccacgagttcgccgagatcccggacgtctccgacacggcggcgctctacggcgcgcaggagctgcagtaccgctccttctgcttcgacccggaccggcctggagcgcgtccgcgggctggcgcttgccgacggcgccctcggccgctgcaccaccttcgaggcgctgtcggggctcgtgtggcgcgcgcgcaccaaggcgctcgggctggcgcccgggcagcgcacgaagctgctgttcgccgtggacggacggcgccggttcgtgccgccgctcccgcggggctacttcggcaacggcatcgtgctgaccaacgccctggccacggccggcgagctgctgtccgcgcccgtgtcgcgcgcagccgggctggtgcaggaggccgtgcggatggtgactgacgactacatgcggtcggcggtggactacttcgaggcgacgcgggcccggccgtcgctggcgtccacgctgctcatcaccacgtggtcgcgcctcgagttccacggcgccgacttcgggtggggcgagcccgtcatgtcgggcccagtcacgctgccggagaaggaggtcatcctcttcctcgcacacggcaaagagaggaagagcatcaacgtgctgctcggcctgccagccaccgcgatggacgccttccaagagctcgtggacgagatatgactgattcatcggtgatgagcagcgatgacggacagggatgggttgctatacatacatatataatgcagggtgcgcctgctttggtttatgtacgaacgtgttaatattccttctatgttggtgtctaagtttaatgagcatatgagaaattgttatcg

SEQ ID NO: 25214 - protein, 355 aa, Zea mays subsp. mays
  peptide (1)..(355): Ceres Seq. ID no. 12376477
  misc_feature (24)..(255): Pfam Name: Pfam Description:  Transferase family
  misc_feature (1)..(255): NCBI GI NO: 30693723 NR Description: transferase family [Arabidopsis thaliana]
  misc_feature (24)..(255): NCBI GI NO: 30693725 NR Description: transferase family [Arabidopsis thaliana]
  misc_feature (21)..(255): NCBI GI NO: 15242820 NR Description: acyltransferase-like protein; protein id:At5g63560
  misc_feature (21)..(255): NCBI GI NO: 21553692 NR Description: acyltransferase-like protein
  misc_feature (21)..(255): NCBI GI NO: 34222064 NR Description: At3g48720 [Arabidopsis thaliana]
  misc_feature (21)..(255): NCBI GI NO: 15229017 NR Description: putative protein; protein id: At3g48720.1
  misc_feature (14)..(306): NCBI GI NO: 20161743 NR Description: N-hydroxycinnamoyl/benzoyltransferase-like protein
  misc_feature (21)..(247): NCBI GI NO: 15218793 NR Description: hypothetical protein; protein id: At1g03390.1
  misc_feature (17)..(238): NCBI GI NO: 40644899 NR Description: hydroxycinnamoyl CoA quinate transferase
  misc_feature (17)..(235): NCBI GI NO: 40644084 NR Description: hydroxycinnamoyl CoA quinate transferase
MVADMKENGGAVLAAGEKAPQVVVKRGEPTLVPPAEATPTGGQYYLSNLDQNIAVIVQTVYCYKPSGGGGDVAAALRDALARVLVHYYPLAGRLGVSPEMKLTVELTGEGAVFVEADAACELATVGDLTKPDPAALGQLVYSVPGAKHILEMPPMTAQVTRFKCGGFALGLAMNHCMFDGIGAMEFVNSWAETARGVAELTVPPFLDRSVLKARDPPVHTFPHHEFAEIPDVSDTAALYGAQELQYRSFCFDPDRPGARPRAGACRRRPRPLHHLRGAVGARVARAHQGARAGARAAHEAAVRRGRTAPVRAAAPAGLLRQRHRADQRPGHGRRAAVRARVARSRAGAGGRADGD

SEQ ID NO: 25215 - protein, 351 aa, Zea mays subsp. mays
  peptide (1)..(351): Ceres Seq. ID no. 12376478
  misc_feature (20)..(251): Pfam Name: Pfam Description:  Transferase family
  misc_feature (1)..(251): NCBI GI NO: 30693723 NR Description: transferase family [Arabidopsis thaliana]
  misc_feature (20)..(251): NCBI GI NO: 30693725 NR Description: transferase family [Arabidopsis thaliana]
  misc_feature (17)..(251): NCBI GI NO: 15242820 NR Description: acyltransferase-like protein; protein id:At5g63560
  misc_feature (17)..(251): NCBI GI NO: 21553692 NR Description: acyltransferase-like protein
  misc_feature (17)..(251): NCBI GI NO: 34222064 NR Description: At3g48720 [Arabidopsis thaliana]
  misc_feature (17)..(251): NCBI GI NO: 15229017 NR Description: putative protein; protein id: At3g48720.1
  misc_feature (10)..(302): NCBI GI NO: 20161743 NR Description: N-hydroxycinnamoyl/benzoyltransferase-like protein
  misc_feature (17)..(243): NCBI GI NO: 15218793 NR Description: hypothetical protein; protein id: At1g03390.1
  misc_feature (13)..(234): NCBI GI NO: 40644899 NR Description: hydroxycinnamoyl CoA quinate transferase
  misc_feature (13)..(231): NCBI GI NO: 40644084 NR Description: hydroxycinnamoyl CoA quinate transferase
MKENGGAVLAAGEKAPQVVVKRGEPTLVPPAEATPTGGQYYLSNLDQNIAVIVQTVYCYKPSGGGGDVAAALRDALARVLVHYYPLAGRLGVSPEMKLTVELTGEGAVFVEADAACELATVGDLTKPDPAALGQLVYSVPGAKHILEMPPMTAQVTRFKCGGFALGLAMNHCMFDGIGAMEFVNSWAETARGVAELTVPPFLDRSVLKARDPPVHTFPHHEFAEIPDVSDTAALYGAQELQYRSFCFDPDRPGARPRAGACRRRPRPLHHLRGAVGARVARAHQGARAGARAAHEAAVRRGRTAPVRAAAPAGLLRQRHRADQRPGHGRRAAVRARVARSRAGAGGRADGD

SEQ ID NO: 25216 - protein, 256 aa, Zea mays subsp. mays
  peptide (1)..(256): Ceres Seq. ID no. 12376479
  misc_feature (1)..(156): Pfam Name: Pfam Description:  Transferase family
  misc_feature (1)..(156): NCBI GI NO: 30693723 NR Description: transferase family [Arabidopsis thaliana]
  misc_feature (1)..(156): NCBI GI NO: 30693725 NR Description: transferase family [Arabidopsis thaliana]
  misc_feature (1)..(156): NCBI GI NO: 15242820 NR Description: acyltransferase-like protein; protein id:At5g63560
  misc_feature (1)..(156): NCBI GI NO: 21553692 NR Description: acyltransferase-like protein
  misc_feature (1)..(156): NCBI GI NO: 34222064 NR Description: At3g48720 [Arabidopsis thaliana]
  misc_feature (1)..(156): NCBI GI NO: 15229017 NR Description: putative protein; protein id: At3g48720.1
  misc_feature (1)..(207): NCBI GI NO: 20161743 NR Description: N-hydroxycinnamoyl/benzoyltransferase-like protein
  misc_feature (1)..(148): NCBI GI NO: 15218793 NR Description: hypothetical protein; protein id: At1g03390.1
  misc_feature (1)..(139): NCBI GI NO: 40644899 NR Description: hydroxycinnamoyl CoA quinate transferase
  misc_feature (1)..(136): NCBI GI NO: 40644084 NR Description: hydroxycinnamoyl CoA quinate transferase
MKLTVELTGEGAVFVEADAACELATVGDLTKPDPAALGQLVYSVPGAKHILEMPPMTAQVTRFKCGGFALGLAMNHCMFDGIGAMEFVNSWAETARGVAELTVPPFLDRSVLKARDPPVHTFPHHEFAEIPDVSDTAALYGAQELQYRSFCFDPDRPGARPRAGACRRRPRPLHHLRGAVGARVARAHQGARAGARAAHEAAVRRGRTAPVRAAAPAGLLRQRHRADQRPGHGRRAAVRARVARSRAGAGGRADGD

SEQ ID NO: 25217 - DNA, 1333 bp, Zea mays subsp. mays
  misc_feature (1)..(1333): Ceres Seq. ID no. 12367911
aactactctactaccaggcacaccgcacacccaatacggaaagaccaccgcaaacgccaccacgcccacgcctcgccgcgcaccacatctgaaacctccagcccgacgccggcgccggcgccgctgctcgcctgctcgtcacatttcctggtgcccgccaagccccgcgacctgggctccccagctccatccatcaaccgcctgcagccgcggaaatggcagcgccgacgacgctgcgctcggcggcggcgcgggcgcgcgcgcgcgcagcggagctcgtgagagggcggtggccgcagcggcgtctggggacgacgtccgcggcggagacggagagcaaaaagaataaggaggaggaggaggagggggccgggtgggagctctcggcggcgcgggagtactacgactaccgcaagtctatctacggcgacgtcacgcaccgcgccctcctcgtcgacgccgtcggcaccctcgtcgtccccgcccagcccaccgcgcaggtgtataagagcattggtgagaagtatggagtgaagtactcggaagacgagatcctgatgagataccggcgggcatacgagcaaccatggggtggatcacgtctcaggtatgtggatgatgggagaaccttttggcagcacatagtcacttcttctacaggatgttcagatgcacagtactttgaggaactctatcaatactttatgacagaaaaggcctggaagctttgtgaccccgatgccgaaagtgtatttaaagctttgaggaaagctggcgttaaaactgcagtcgtctccaatttcgatacccgtctacggccactcctgcaggccttgaaatgtgaccactggtttgatgcagttgcagtcctctgcagaggttgcagcagagaagccgaatccaataatattcttgaaggcctgtgagttactgggcgtgaagcctgaagaagctgtgcacgttggcgacgatcgtagaaatgatatatggggagcgagagatgcaggctgcgatgcttggctctggggcagcgacgttcgctctttcaaggaggttgccgagcggatcggtgttgaggtgacgaagtgactaagtgagctaggatggtgaatatacggaggcagaggtagtacccaggatcgcggtcgtcaaggaagccagtgaccccatccttgtggtgaaattcctgtgctggtttgtaggcttgtagctgtatgtatgacaacttattagggttccgttgaacctgctatgcatgcatgcttgctgccctgacagtgacaggcgaatgcgtcccatgcacttgaatatgagggtctgggttctggacttc

SEQ ID NO: 25218 - protein, 236 aa, Zea mays subsp. mays
  peptide (1)..(236): Ceres Seq. ID no. 12367912
  misc_feature (75)..(218): Pfam Name: Pfam Description:  haloacid dehalogenase-like hydrolase
  misc_feature (1)..(218): NCBI GI NO: 34899086 NR Description: contains ESTsAU091627
  misc_feature (35)..(231): NCBI GI NO: 15227309 NR Description: hypothetical protein; protein id: At2g41250
  misc_feature (78)..(218): NCBI GI NO: 28393346 NR Description: unknown protein [Arabidopsis thaliana]
  misc_feature (78)..(218): NCBI GI NO: 30683719 NR Description: haloacid dehalogenase-like hydrolase family
  misc_feature (76)..(218): NCBI GI NO: 37520921 NR Description: hypothetical protein gll1352
  misc_feature (76)..(225): NCBI GI NO: 27714603 NR Description: similar to RIKEN cDNA 2810435D12
  misc_feature (76)..(218): NCBI GI NO: 17231587 NR Description: hypothetical protein [Nostoc sp. PCC 7120]
  misc_feature (76)..(218): NCBI GI NO: 23041810 NR Description: hypothetical protein
  misc_feature (76)..(204): NCBI GI NO: 17553988 NR Description: Predicted CDS
  misc_feature (76)..(225): NCBI GI NO: 21312204 NR Description: RIKEN cDNA 2810435D12 [Mus musculus]
MAAPTTLRSAAARARARAAELVRGRWPQRRLGTTSAAETESKKNKEEEEEGAGWELSAAREYYDYRKSIYGDVTHRALLVDAVGTLVVPAQPTAQVYKSIGEKYGVKYSEDEILMRYRRAYEQPWGGSRLRYVDDGRTFWQHIVTSSTGCSDAQYFEELYQYFMTEKAWKLCDPDAESVFKALRKAGVKTAVVSNFDTRLRPLLQALKCDHWFDAVAVLCRGCSREAESNNILEGL

SEQ ID NO: 25219 - protein, 122 aa, Zea mays subsp. mays
  peptide (1)..(122): Ceres Seq. ID no. 12367913
  misc_feature (1)..(104): Pfam Name: Pfam Description:  haloacid dehalogenase-like hydrolase
  misc_feature (1)..(104): NCBI GI NO: 34899086 NR Description: contains ESTsAU091627
  misc_feature (1)..(117): NCBI GI NO: 15227309 NR Description: hypothetical protein; protein id: At2g41250
  misc_feature (1)..(104): NCBI GI NO: 28393346 NR Description: unknown protein [Arabidopsis thaliana]
  misc_feature (1)..(104): NCBI GI NO: 30683719 NR Description: haloacid dehalogenase-like hydrolase family
  misc_feature (1)..(104): NCBI GI NO: 37520921 NR Description: hypothetical protein gll1352
  misc_feature (1)..(111): NCBI GI NO: 27714603 NR Description: similar to RIKEN cDNA 2810435D12
  misc_feature (1)..(104): NCBI GI NO: 17231587 NR Description: hypothetical protein [Nostoc sp. PCC 7120]
  misc_feature (1)..(104): NCBI GI NO: 23041810 NR Description: hypothetical protein
  misc_feature (1)..(90): NCBI GI NO: 17553988 NR Description: Predicted CDS
  misc_feature (1)..(111): NCBI GI NO: 21312204 NR Description: RIKEN cDNA 2810435D12 [Mus musculus]
MRYRRAYEQPWGGSRLRYVDDGRTFWQHIVTSSTGCSDAQYFEELYQYFMTEKAWKLCDPDAESVFKALRKAGVKTAVVSNFDTRLRPLLQALKCDHWFDAVAVLCRGCSREAESNNILEGL

SEQ ID NO: 25220 - DNA, 1935 bp, Zea mays subsp. mays
  misc_feature (1)..(1935): Ceres Seq. ID no. 12352214
accccattcgcatctctgcttctttctgcttgggtgccctctgccctgaccacagggcccaaccatatcttcttcctcacacagagacactgagcgagcgagcttgagatcgatctcaggaggcggccggcggcggcagcagcagcagagcttgttggcgccgccatggcgataggtggcttcgtggaagcccctgccggcgccgactacggtggccgcgtgacgtccttcgtggtgctctcctgcatcgtagccggtagcggcggcatcctcttcggctacgacctcggcatctcaggtggggttacctccatggagtcgttccttagaaagttcttcccggacgtgtaccaccagatgaaaggagacaaggacgtgagcaactactgccgcttcgacagcgagcttctcaccgtcttcacctcctccctctacatcgccggcctcgtcgccacgctcttcgcctcctccgtcaccaggaggttcggccgccgcacctccatacttatcggaggcaccgtcttcgtcatcggctccgtcttcggcggggcagccgtcaacgtatacatgctcctactcaacaggatactccttggagtaggcctcggattcacaaaccagtccatcccgctgtacctctcagagatggcgccaccgcagtaccgtggcgccatcaacaacggcttcgagctctgcatcagcatcggcatcctcatcgccaacctcatcaactacggcgtggagaagatagcaggtggatggggctggaggatctctctgtccctggccgccgtgccggccgcgttcctcaccgtcggcgccatctacctgcccgagacgcccagcttcatcatccaacgccgcggcggcagcaacaacgtcgacgaggcaaggctgctcctccagaggctgcgtggcaccaccagggtccagaaagagctcgacgatctcgtgtccgcgaccaggacgaccaccacagggcgtcccttccgcaccatactgaggcgcaagtacaggccgcagctggtcatagctctcctcgtacccttcttcaaccaggtcaccggcatcaacgtcatcaacttctacgcgccggtcatgttccggaccatcgggctcaaggagagcgcgtccctcatgtcggccgtggtcacgcgcgtctgcgccacggccgccaacgtggtggccatggtggtcgtggacaggttcggccgccggaagctcttcctggtgggcggcgtgcagatgatcctgtcgcaggccatggtgggagcggtgctggccgccaagttccaggagcacggagggatggagaaggagtacgcgtacctggtgctcgtcatcatgtgcgtcttcgtcgcgggcttcgcctggtcctggggccctctcacctacctggtgcccaccgagatctgcccgctggagatcaggtcggcggggcagagcgtcgtcatcgccgtcatcttcttcgtcaccttcctcatcggccagaccttcctggcgatgctgtgccacctcaagttcggcaccttcttcctcttcggcggctgggtgtgcgtcatgacgctcttcgtgtatttcttcctgccggagaccaagcagctgcccatggcagcagatggaacaggtctggaggacccactggttttggaaaaggattgtagacgaagatgcagcaggggagcaaccgagagaggaagcagcaggaaccatagctctgtcgtccacgtccaccacaacatagtcatcatcaacaatactcatggcatgggcctgccctgtatagatagataattaactagctgcaccgcacagattgtctccgactataagctagctagctagttggatgcatgcatgcatgcattctgttatttctgtgaccatgaatcaaagggccttccaacagaacagaatatgagatgagatgaatcc

SEQ ID NO: 25221 - protein, 542 aa, Zea mays subsp. mays
  peptide (1)..(542): Ceres Seq. ID no. 12352215
  misc_feature (26)..(482): Pfam Name: and other Pfam Description: Sugar
  misc_feature (1)..(482): NCBI GI NO: 37536854 NR Description: putative monosaccharide transporter
  misc_feature (5)..(482): NCBI GI NO: 1708191 NR Description: Hexose carrier protein HEX6
  misc_feature (8)..(482): NCBI GI NO: 5803244 NR Description: Similar to hexose carrier protein HEX6 &RCCHCP_1
  misc_feature (2)..(486): NCBI GI NO: 3915039 NR Description: Sugar carrier protein C
  misc_feature (2)..(482): NCBI GI NO: 4138724 NR Description: hexose transporter [Vitis vinifera]
  misc_feature (1)..(486): NCBI GI NO: 15231001 NR Description: putative monosaccharide transport protein, STP4
  misc_feature (2)..(482): NCBI GI NO: 4138722 NR Description: hexose transporter [Vitis vinifera]
  misc_feature (1)..(522): NCBI GI NO: 15220330 NR Description: glucose transporter; protein id: At1g11260
  misc_feature (1)..(482): NCBI GI NO: 347855 NR Description: glucose transporter
  misc_feature (87)..(482): NCBI GI NO: 26249364 NR Description: Galactose-proton symporter
MAIGGFVEAPAGADYGGRVTSFVVLSCIVAGSGGILFGYDLGISGGVTSMESFLRKFFPDVYHQMKGDKDVSNYCRFDSELLTVFTSSLYIAGLVATLFASSVTRRFGRRTSILIGGTVFVIGSVFGGAAVNVYMLLLNRILLGVGLGFTNQSIPLYLSEMAPPQYRGAINNGFELCISIGILIANLINYGVEKIAGGWGWRISLSLAAVPAAFLTVGAIYLPETPSFIIQRRGGSNNVDEARLLLQRLRGTTRVQKELDDLVSATRTTTTGRPFRTILRRKYRPQLVIALLVPFFNQVTGINVINFYAPVMFRTIGLKESASLMSAVVTRVCATAANVVAMVVVDRFGRRKLFLVGGVQMILSQAMVGAVLAAKFQEHGGMEKEYAYLVLVIMCVFVAGFAWSWGPLTYLVPTEICPLEIRSAGQSVVIAVIFFVTFLIGQTFLAMLCHLKFGTFFLFGGWVCVMTLFVYFFLPETKQLPMAADGTGLEDPLVLEKDCRRRCSRGATERGSSRNHSSVVHVHHNIVIINNTHGMGLPCIDR

SEQ ID NO: 25222 - protein, 493 aa, Zea mays subsp. mays
  peptide (1)..(493): Ceres Seq. ID no. 12352216
  misc_feature (1)..(433): Pfam Name: and other Pfam Description: Sugar
  misc_feature (1)..(433): NCBI GI NO: 37536854 NR Description: putative monosaccharide transporter
  misc_feature (1)..(433): NCBI GI NO: 1708191 NR Description: Hexose carrier protein HEX6
  misc_feature (1)..(433): NCBI GI NO: 5803244 NR Description: Similar to hexose carrier protein HEX6 &RCCHCP_1
  misc_feature (1)..(437): NCBI GI NO: 3915039 NR Description: Sugar carrier protein C
  misc_feature (1)..(433): NCBI GI NO: 4138724 NR Description: hexose transporter [Vitis vinifera]
  misc_feature (1)..(437): NCBI GI NO: 15231001 NR Description: putative monosaccharide transport protein, STP4
  misc_feature (1)..(433): NCBI GI NO: 4138722 NR Description: hexose transporter [Vitis vinifera]
  misc_feature (1)..(473): NCBI GI NO: 15220330 NR Description: glucose transporter; protein id: At1g11260
  misc_feature (1)..(433): NCBI GI NO: 347855 NR Description: glucose transporter
  misc_feature (38)..(433): NCBI GI NO: 26249364 NR Description: Galactose-proton symporter
MESFLRKFFPDVYHQMKGDKDVSNYCRFDSELLTVFTSSLYIAGLVATLFASSVTRRFGRRTSILIGGTVFVIGSVFGGAAVNVYMLLLNRILLGVGLGFTNQSIPLYLSEMAPPQYRGAINNGFELCISIGILIANLINYGVEKIAGGWGWRISLSLAAVPAAFLTVGAIYLPETPSFIIQRRGGSNNVDEARLLLQRLRGTTRVQKELDDLVSATRTTTTGRPFRTILRRKYRPQLVIALLVPFFNQVTGINVINFYAPVMFRTIGLKESASLMSAVVTRVCATAANVVAMVVVDRFGRRKLFLVGGVQMILSQAMVGAVLAAKFQEHGGMEKEYAYLVLVIMCVFVAGFAWSWGPLTYLVPTEICPLEIRSAGQSVVIAVIFFVTFLIGQTFLAMLCHLKFGTFFLFGGWVCVMTLFVYFFLPETKQLPMAADGTGLEDPLVLEKDCRRRCSRGATERGSSRNHSSVVHVHHNIVIINNTHGMGLPCIDR

SEQ ID NO: 25223 - protein, 478 aa, Zea mays subsp. mays
  peptide (1)..(478): Ceres Seq. ID no. 12352217
  misc_feature (1)..(418): Pfam Name: and other Pfam Description: Sugar
  misc_feature (1)..(418): NCBI GI NO: 37536854 NR Description: putative monosaccharide transporter
  misc_feature (1)..(418): NCBI GI NO: 1708191 NR Description: Hexose carrier protein HEX6
  misc_feature (1)..(418): NCBI GI NO: 5803244 NR Description: Similar to hexose carrier protein HEX6 &RCCHCP_1
  misc_feature (1)..(422): NCBI GI NO: 3915039 NR Description: Sugar carrier protein C
  misc_feature (1)..(418): NCBI GI NO: 4138724 NR Description: hexose transporter [Vitis vinifera]
  misc_feature (1)..(422): NCBI GI NO: 15231001 NR Description: putative monosaccharide transport protein, STP4
  misc_feature (1)..(418): NCBI GI NO: 4138722 NR Description: hexose transporter [Vitis vinifera]
  misc_feature (1)..(458): NCBI GI NO: 15220330 NR Description: glucose transporter; protein id: At1g11260
  misc_feature (1)..(418): NCBI GI NO: 347855 NR Description: glucose transporter
  misc_feature (23)..(418): NCBI GI NO: 26249364 NR Description: Galactose-proton symporter
MKGDKDVSNYCRFDSELLTVFTSSLYIAGLVATLFASSVTRRFGRRTSILIGGTVFVIGSVFGGAAVNVYMLLLNRILLGVGLGFTNQSIPLYLSEMAPPQYRGAINNGFELCISIGILIANLINYGVEKIAGGWGWRISLSLAAVPAAFLTVGAIYLPETPSFIIQRRGGSNNVDEARLLLQRLRGTTRVQKELDDLVSATRTTTTGRPFRTILRRKYRPQLVIALLVPFFNQVTGINVINFYAPVMFRTIGLKESASLMSAVVTRVCATAANVVAMVVVDRFGRRKLFLVGGVQMILSQAMVGAVLAAKFQEHGGMEKEYAYLVLVIMCVFVAGFAWSWGPLTYLVPTEICPLEIRSAGQSVVIAVIFFVTFLIGQTFLAMLCHLKFGTFFLFGGWVCVMTLFVYFFLPETKQLPMAADGTGLEDPLVLEKDCRRRCSRGATERGSSRNHSSVVHVHHNIVIINNTHGMGLPCIDR

SEQ ID NO: 25224 - DNA, 1938 bp, Zea mays subsp. mays
  misc_feature (1)..(1938): Ceres Seq. ID no. 12373312
tcgcagaagccgcagccacgccccacgcccccacaccaagccgtatcgtcttctccctcttgtccggttcgggtggtccgcggtcggggtgagtgagtgagcagctttgcttctccatctccccattcccttccctccccagcccccccggcccggcggcggtacgtgaccctgacgccgcagcgctagctagctcgccggaacggcaggtggcggcgcgcgacctgagagcacagcagcaccggaccggctcaggcaggcgaccggcagaaaagatggcgggagcagcagctgtggagacggcggcggcggcggcggcggcggcggcagcggccaacggaaaagcgtgctgccacgccgccaaggggcccgggtacgccacgccgctggaggccatggagaagggccccagggagaagctcgtctacgtcacctgcgtctacaacggcactggaattaacaagccggattaccttgcgacggtggatttggatcccagctctcctacatactcccaggtgatccacaggctcccggtcacccacatcggcgacgagctgcatcactctggctggaactcctgcagctcctgccacggtgacccatcggccaagcgccgcttcctgatcctgccttccttgctgtcaggccgtgtgtatgtcgtcgacacagcgacagacccaagggcgccatccttgcataaggtggttgagtctgaggacattgctgagaatactgggcttgggttccctcacacgtctcattgccttgcgtctggcgacattatgatttcttgccttggggacaaggaggggaatgcagctggcaatggcttcctgctgttggattcagagtttaatgtcaaaggacgttgggaaaagccaggtcacagtcccttggttggatatgacttctggtaccagcctcgccacaagacgatgatcagttcctcatggggagcccctgcagcctttaggacaggtttcgatcttcaacatgtccaggatggcctgtatggaaggcacctgcatgtgtacgactggcctggcggtgagctcaagcagacacttgatctaggtgacactggactccttccccttgaggtgaggtttttacatgatccatcaaaggacactggctatgttggctgtgctttaacaagcaacatggtgagatttttcaagaccgcggatggatcgtggagccatgaggttgctatctctgtgaaaccactgaaggtccgcaactggattctgccggaaatgccaggattgataactgattttgtcatctctcttgatgaccgttatctctactttgtaaactggcttcatggcgatattaggcagtacaacattgaggatcccgcaaagcctttcttggctggacaagtatgggttggtggtcttcttcagaagggcagtgatgtcgtctatgttactgatgatggtcaggaacagcagtataatgtgcctcaagtcaagggtcatcgacttagaggtgggccacagatgattcagctgagcttggatggcaagaggatatacgtgacaaactcacttttcagccgatgggatgagcagtttttcggtgatgatcttgtcaagaagggctcccacatgttgcagatcgatgtcgacaccgagaaaggaggcctggctgtcaaccccaacttcttcgtcgattttggcaccgagcctgatggtcctgccctggcccacgagatgagatatcctggtggggactgcacctctgatatatggatctgaggtcaaggattcggcgtaattaacaggctgctggagaatccctgttgttgtatgcactgtaattaacatggtatccgtgcggtgttccgtcttgtactgcgactgttgccagtggaataaggcatggtttcatgagaactctagattaataaaagaagtcctgattctg

SEQ ID NO: 25225 - protein, 497 aa, Zea mays subsp. mays
  peptide (1)..(497): Ceres Seq. ID no. 12373313
  misc_feature (29)..(497): Pfam Name: SBP56 Pfam Description: 56kDa selenium binding protein
  misc_feature (17)..(497): NCBI GI NO: 34906970 NR Description: putative selenium binding protein
  misc_feature (41)..(497): NCBI GI NO: 13560275 NR Description: putative selenium binding protein [Oryza sativa]
  misc_feature (13)..(497): NCBI GI NO: 15485720 NR Description: selenium binding protein [Medicago sativa]
  misc_feature (6)..(497): NCBI GI NO: 15236385 NR Description: selenium-binding protein like
  misc_feature (19)..(497): NCBI GI NO: 15485716 NR Description: selenium binding protein [Lotus japonicus]
  misc_feature (10)..(497): NCBI GI NO: 15236386 NR Description: selenium-binding protein like
  misc_feature (16)..(497): NCBI GI NO: 13605825 NR Description: AT4g14040/dl3061c [Arabidopsis thaliana]
  misc_feature (10)..(497): NCBI GI NO: 22530900 NR Description: selenium-binding protein-like protein
  misc_feature (8)..(497): NCBI GI NO: 7488184 NR Description: probable selenium-binding protein - Arabidopsisthaliana
  misc_feature (31)..(497): NCBI GI NO: 15485722 NR Description: selenium binding protein [Glycine max]
MAGAAAVETAAAAAAAAAAANGKACCHAAKGPGYATPLEAMEKGPREKLVYVTCVYNGTGINKPDYLATVDLDPSSPTYSQVIHRLPVTHIGDELHHSGWNSCSSCHGDPSAKRRFLILPSLLSGRVYVVDTATDPRAPSLHKVVESEDIAENTGLGFPHTSHCLASGDIMISCLGDKEGNAAGNGFLLLDSEFNVKGRWEKPGHSPLVGYDFWYQPRHKTMISSSWGAPAAFRTGFDLQHVQDGLYGRHLHVYDWPGGELKQTLDLGDTGLLPLEVRFLHDPSKDTGYVGCALTSNMVRFFKTADGSWSHEVAISVKPLKVRNWILPEMPGLITDFVISLDDRYLYFVNWLHGDIRQYNIEDPAKPFLAGQVWVGGLLQKGSDVVYVTDDGQEQQYNVPQVKGHRLRGGPQMIQLSLDGKRIYVTNSLFSRWDEQFFGDDLVKKGSHMLQIDVDTEKGGLAVNPNFFVDFGTEPDGPALAHEMRYPGGDCTSDIWI

SEQ ID NO: 25226 - protein, 457 aa, Zea mays subsp. mays
  peptide (1)..(457): Ceres Seq. ID no. 12373314
  misc_feature (1)..(457): Pfam Name: SBP56 Pfam Description: 56kDa selenium binding protein
  misc_feature (1)..(457): NCBI GI NO: 34906970 NR Description: putative selenium binding protein
  misc_feature (1)..(457): NCBI GI NO: 13560275 NR Description: putative selenium binding protein [Oryza sativa]
  misc_feature (1)..(457): NCBI GI NO: 15485720 NR Description: selenium binding protein [Medicago sativa]
  misc_feature (1)..(457): NCBI GI NO: 15236385 NR Description: selenium-binding protein like
  misc_feature (1)..(457): NCBI GI NO: 15485716 NR Description: selenium binding protein [Lotus japonicus]
  misc_feature (1)..(457): NCBI GI NO: 15236386 NR Description: selenium-binding protein like
  misc_feature (1)..(457): NCBI GI NO: 13605825 NR Description: AT4g14040/dl3061c [Arabidopsis thaliana]
  misc_feature (1)..(457): NCBI GI NO: 22530900 NR Description: selenium-binding protein-like protein
  misc_feature (1)..(457): NCBI GI NO: 7488184 NR Description: probable selenium-binding protein - Arabidopsisthaliana
  misc_feature (1)..(457): NCBI GI NO: 15485722 NR Description: selenium binding protein [Glycine max]
MEKGPREKLVYVTCVYNGTGINKPDYLATVDLDPSSPTYSQVIHRLPVTHIGDELHHSGWNSCSSCHGDPSAKRRFLILPSLLSGRVYVVDTATDPRAPSLHKVVESEDIAENTGLGFPHTSHCLASGDIMISCLGDKEGNAAGNGFLLLDSEFNVKGRWEKPGHSPLVGYDFWYQPRHKTMISSSWGAPAAFRTGFDLQHVQDGLYGRHLHVYDWPGGELKQTLDLGDTGLLPLEVRFLHDPSKDTGYVGCALTSNMVRFFKTADGSWSHEVAISVKPLKVRNWILPEMPGLITDFVISLDDRYLYFVNWLHGDIRQYNIEDPAKPFLAGQVWVGGLLQKGSDVVYVTDDGQEQQYNVPQVKGHRLRGGPQMIQLSLDGKRIYVTNSLFSRWDEQFFGDDLVKKGSHMLQIDVDTEKGGLAVNPNFFVDFGTEPDGPALAHEMRYPGGDCTSDIWI

SEQ ID NO: 25227 - protein, 327 aa, Zea mays subsp. mays
  peptide (1)..(327): Ceres Seq. ID no. 12373315
  misc_feature (1)..(327): Pfam Name: SBP56 Pfam Description: 56kDa selenium binding protein
  misc_feature (1)..(327): NCBI GI NO: 34906970 NR Description: putative selenium binding protein
  misc_feature (1)..(327): NCBI GI NO: 13560275 NR Description: putative selenium binding protein [Oryza sativa]
  misc_feature (1)..(327): NCBI GI NO: 15485720 NR Description: selenium binding protein [Medicago sativa]
  misc_feature (1)..(327): NCBI GI NO: 15236385 NR Description: selenium-binding protein like
  misc_feature (1)..(327): NCBI GI NO: 15485716 NR Description: selenium binding protein [Lotus japonicus]
  misc_feature (1)..(327): NCBI GI NO: 15236386 NR Description: selenium-binding protein like
  misc_feature (1)..(327): NCBI GI NO: 13605825 NR Description: AT4g14040/dl3061c [Arabidopsis thaliana]
  misc_feature (1)..(327): NCBI GI NO: 22530900 NR Description: selenium-binding protein-like protein
  misc_feature (1)..(327): NCBI GI NO: 7488184 NR Description: probable selenium-binding protein - Arabidopsisthaliana
  misc_feature (1)..(327): NCBI GI NO: 15485722 NR Description: selenium binding protein [Glycine max]
MISCLGDKEGNAAGNGFLLLDSEFNVKGRWEKPGHSPLVGYDFWYQPRHKTMISSSWGAPAAFRTGFDLQHVQDGLYGRHLHVYDWPGGELKQTLDLGDTGLLPLEVRFLHDPSKDTGYVGCALTSNMVRFFKTADGSWSHEVAISVKPLKVRNWILPEMPGLITDFVISLDDRYLYFVNWLHGDIRQYNIEDPAKPFLAGQVWVGGLLQKGSDVVYVTDDGQEQQYNVPQVKGHRLRGGPQMIQLSLDGKRIYVTNSLFSRWDEQFFGDDLVKKGSHMLQIDVDTEKGGLAVNPNFFVDFGTEPDGPALAHEMRYPGGDCTSDIWI

SEQ ID NO: 25228 - DNA, 1163 bp, Zea mays subsp. mays
  misc_feature (1)..(1163): Ceres Seq. ID no. 12352218
actctcccgactcaggatttatacccacccccgtcggtcgatcccctccctccctcccgccgccgccgccgccgcccgtagccaagaccaagatcccgtctcgcccggcgtcgcacctgacctaaccctgagccctgtgatatgccggttcaggtcggaggcagcaaggtggcggacccgaggccggccagggtggtggacctatcgcccgtaggcgacaggtcccgcgcctcctccaagaagaaccgccgccgccacaagaaggccgacgccgcctcttccatctcgcccatgcagaggctcttcgacaccagcagggaggtcttcgccaactcctacccgggcttcgtcccgccgccggacgccgtcgcccgcctctcgggcctcctcaatgagctgaagcctcgtgacgtcagggttgccccaagcatgtccgtcttcaagcatgccgatcctacaagcccccctccagttacctatttgcacttctacggttcctccgagttttcgtttggtatcttctgtttaccgaaatcggcaattattcccctccacaaccatcctgggatgacagtgtttagcaagatactgtttggttccatgcacctcaagtcctatgattgggctaaaagtctgccggcgggtagcaacgataatgcacttgagaactctgatggagcaggagctcgtctggccaaggtgaacacagatgccgtttttgacgcttcatctgagaccgtagttctgtaccctgaaaatggagggaacttgcactgctttacggcgctgaccccttgtgccgtgctggatgtgatgggccctccctacaaccgtgctcaaggaagggattgcgcgtattacagcgaatcgccctactcgtgtgctggagatgcacaatattcttggctcaaagaggttcacagcacatttgagatggaaggcataaagatggagcccaacttcatcgtctaataattaagcaggcatggcatggcatgtcatcgtaatgctgctagtttcatgtagataatctctagctgcgggggtgtagtacaactggaagacggccagatgctcttttgacattcgtttgccttaatttcatatgcctccctttatgtatgttaacaattcgaatcttgggtcatggtcactttttttcc

SEQ ID NO: 25229 - protein, 276 aa, Zea mays subsp. mays
  peptide (1)..(276): Ceres Seq. ID no. 12352219
  misc_feature (26)..(273): NCBI GI NO: 34912166 NR Description: P0712E02.27
  misc_feature (26)..(258): NCBI GI NO: 10176982 NR Description: contains similarity to unknownprotein~emb|CAB89322
  misc_feature (26)..(258): NCBI GI NO: 15242505 NR Description: putative protein; protein id: At5g39890
  misc_feature (38)..(244): NCBI GI NO: 15242218 NR Description: putative protein; protein id: At5g15120.1
  misc_feature (42)..(275): NCBI GI NO: 34906308 NR Description: unnamed protein product
  misc_feature (51)..(250): NCBI GI NO: 29244630 NR Description: hypothetical protein
  misc_feature (49)..(246): NCBI GI NO: 18394617 NR Description: expressed protein; protein id: At1g18490
  misc_feature (52)..(243): NCBI GI NO: 18406030 NR Description: expressed protein; protein id: At2g42670
  misc_feature (49)..(246): NCBI GI NO: 21618020 NR Description: unknown [Arabidopsis thaliana]
  misc_feature (52)..(243): NCBI GI NO: 25370572 NR Description: hypothetical protein At2g42670
MPVQVGGSKVADPRPARVVDLSPVGDRSRASSKKNRRRHKKADAASSISPMQRLFDTSREVFANSYPGFVPPPDAVARLSGLLNELKPRDVRVAPSMSVFKHADPTSPPPVTYLHFYGSSEFSFGIFCLPKSAIIPLHNHPGMTVFSKILFGSMHLKSYDWAKSLPAGSNDNALENSDGAGARLAKVNTDAVFDASSETVVLYPENGGNLHCFTALTPCAVLDVMGPPYNRAQGRDCAYYSESPYSCAGDAQYSWLKEVHSTFEMEGIKMEPNFIV

SEQ ID NO: 25230 - protein, 226 aa, Zea mays subsp. mays
  peptide (1)..(226): Ceres Seq. ID no. 12352220
  misc_feature (1)..(223): NCBI GI NO: 34912166 NR Description: P0712E02.27
  misc_feature (1)..(208): NCBI GI NO: 10176982 NR Description: contains similarity to unknownprotein~emb|CAB89322
  misc_feature (1)..(208): NCBI GI NO: 15242505 NR Description: putative protein; protein id: At5g39890
  misc_feature (1)..(194): NCBI GI NO: 15242218 NR Description: putative protein; protein id: At5g15120.1
  misc_feature (1)..(225): NCBI GI NO: 34906308 NR Description: unnamed protein product
  misc_feature (1)..(200): NCBI GI NO: 29244630 NR Description: hypothetical protein
  misc_feature (1)..(196): NCBI GI NO: 18394617 NR Description: expressed protein; protein id: At1g18490
  misc_feature (2)..(193): NCBI GI NO: 18406030 NR Description: expressed protein; protein id: At2g42670
  misc_feature (1)..(196): NCBI GI NO: 21618020 NR Description: unknown [Arabidopsis thaliana]
  misc_feature (2)..(193): NCBI GI NO: 25370572 NR Description: hypothetical protein At2g42670
MQRLFDTSREVFANSYPGFVPPPDAVARLSGLLNELKPRDVRVAPSMSVFKHADPTSPPPVTYLHFYGSSEFSFGIFCLPKSAIIPLHNHPGMTVFSKILFGSMHLKSYDWAKSLPAGSNDNALENSDGAGARLAKVNTDAVFDASSETVVLYPENGGNLHCFTALTPCAVLDVMGPPYNRAQGRDCAYYSESPYSCAGDAQYSWLKEVHSTFEMEGIKMEPNFIV

SEQ ID NO: 25231 - protein, 180 aa, Zea mays subsp. mays
  peptide (1)..(180): Ceres Seq. ID no. 12352221
  misc_feature (1)..(177): NCBI GI NO: 34912166 NR Description: P0712E02.27
  misc_feature (1)..(162): NCBI GI NO: 10176982 NR Description: contains similarity to unknownprotein~emb|CAB89322
  misc_feature (1)..(162): NCBI GI NO: 15242505 NR Description: putative protein; protein id: At5g39890
  misc_feature (1)..(148): NCBI GI NO: 15242218 NR Description: putative protein; protein id: At5g15120.1
  misc_feature (1)..(179): NCBI GI NO: 34906308 NR Description: unnamed protein product
  misc_feature (1)..(154): NCBI GI NO: 29244630 NR Description: hypothetical protein
  misc_feature (1)..(150): NCBI GI NO: 18394617 NR Description: expressed protein; protein id: At1g18490
  misc_feature (1)..(147): NCBI GI NO: 18406030 NR Description: expressed protein; protein id: At2g42670
  misc_feature (1)..(150): NCBI GI NO: 21618020 NR Description: unknown [Arabidopsis thaliana]
  misc_feature (1)..(147): NCBI GI NO: 25370572 NR Description: hypothetical protein At2g42670
MSVFKHADPTSPPPVTYLHFYGSSEFSFGIFCLPKSAIIPLHNHPGMTVFSKILFGSMHLKSYDWAKSLPAGSNDNALENSDGAGARLAKVNTDAVFDASSETVVLYPENGGNLHCFTALTPCAVLDVMGPPYNRAQGRDCAYYSESPYSCAGDAQYSWLKEVHSTFEMEGIKMEPNFIV

SEQ ID NO: 25232 - DNA, 901 bp, Zea mays subsp. mays
  misc_feature (1)..(901): Ceres Seq. ID no. 12351498
ttccacttcacagcctctccgcctccgctcctcgcgccgccgccgcgtctcctcctgtacaggtaaggagaggaagagggcgaaatggtgaagcacaacaacgtcatccccaacgggcacttcaagaagcactggcagaactatgtcaagacatggttcaaccagcccgcccgcaagcagaggcgccgcatcgctcgtcaaaagaaggctgtgaagatattcccccgcccgactgctggtcctctacgccccattgttcaatgccagactttaaagtacaacatgaagtcaagggctgggagaggctttacccttgaggagctgaaggctgctggcatcccaaagaagcttgctccaaccattggtatttctgttgatcaccgccgcaagaacaaatcccttgagggactgcaggccaatgtccagaggcttaagacatacaaggccaagctggttatcttcccaaggcgtgcacacaaggttaaggctggtgactctactccagaggagcttgccaccgctacccaggtccagggtgactacatgccatttactcgtggtgagaaacgttcagttgaggttgtgaaggtcacagatgagatgaagtcatttgctgcctatggcaagctccgccttgagcggatgaacaagaaacatcttggtgcccgccagaagaaggcagctgaggcagagaaggaagataagaagtgaagcggttgaagatagtaccctgttttgttctattcagtcattagtgaatgctactacttaaagtgcttgttctatgttttttttgcggtaatggaaatagagcccagacaaacattttggtgtcctactgtttgatgccttgtacttgtttgcgaactcagctatctaatgggttattggattcttgctc

SEQ ID NO: 25233 - protein, 208 aa, Zea mays subsp. mays
  peptide (1)..(208): Ceres Seq. ID no. 12351499
  misc_feature (6)..(185): Pfam Name: Pfam Description:  Ribosomal protein L13e
  misc_feature (1)..(208): NCBI GI NO: 34897952 NR Description: ESTs AU077873
  misc_feature (1)..(208): NCBI GI NO: 18873677 NR Description: putative cold-induced protein
  misc_feature (2)..(208): NCBI GI NO: 15229064 NR Description: 60S ribosomal protein L13, BBC1 protein
  misc_feature (2)..(208): NCBI GI NO: 21537149 NR Description: 60S ribosomal protein L13, BBC1 protein
  misc_feature (2)..(208): NCBI GI NO: 730450 NR Description: 60S RIBOSOMAL PROTEIN L13-2
  misc_feature (1)..(208): NCBI GI NO: 12580867 NR Description: 60S ribosomal protein L13E [Picea abies]
  misc_feature (2)..(208): NCBI GI NO: 7441103 NR Description: ribosomal protein L13.B, cytosolic - rape
  misc_feature (2)..(208): NCBI GI NO: 730449 NR Description: 60S RIBOSOMAL PROTEIN L13-1
  misc_feature (2)..(208): NCBI GI NO: 7441102 NR Description: ribosomal protein L13.A, cytosolic - rape
  misc_feature (2)..(208): NCBI GI NO: 15237847 NR Description: 60S ribosomal protein L13; protein id: At5g23900
MVKHNNVIPNGHFKKHWQNYVKTWFNQPARKQRRRIARQKKAVKIFPRPTAGPLRPIVQCQTLKYNMKSRAGRGFTLEELKAAGIPKKLAPTIGISVDHRRKNKSLEGLQANVQRLKTYKAKLVIFPRRAHKVKAGDSTPEELATATQVQGDYMPFTRGEKRSVEVVKVTDEMKSFAAYGKLRLERMNKKHLGARQKKAAEAEKEDKK

SEQ ID NO: 25234 - protein, 142 aa, Zea mays subsp. mays
  peptide (1)..(142): Ceres Seq. ID no. 12351500
  misc_feature (1)..(119): Pfam Name: Pfam Description:  Ribosomal protein L13e
  misc_feature (1)..(142): NCBI GI NO: 34897952 NR Description: ESTs AU077873
  misc_feature (1)..(142): NCBI GI NO: 18873677 NR Description: putative cold-induced protein
  misc_feature (1)..(142): NCBI GI NO: 15229064 NR Description: 60S ribosomal protein L13, BBC1 protein
  misc_feature (1)..(142): NCBI GI NO: 21537149 NR Description: 60S ribosomal protein L13, BBC1 protein
  misc_feature (1)..(142): NCBI GI NO: 730450 NR Description: 60S RIBOSOMAL PROTEIN L13-2
  misc_feature (1)..(142): NCBI GI NO: 12580867 NR Description: 60S ribosomal protein L13E [Picea abies]
  misc_feature (1)..(142): NCBI GI NO: 7441103 NR Description: ribosomal protein L13.B, cytosolic - rape
  misc_feature (1)..(142): NCBI GI NO: 730449 NR Description: 60S RIBOSOMAL PROTEIN L13-1
  misc_feature (1)..(142): NCBI GI NO: 7441102 NR Description: ribosomal protein L13.A, cytosolic - rape
  misc_feature (1)..(142): NCBI GI NO: 15237847 NR Description: 60S ribosomal protein L13; protein id: At5g23900
MKSRAGRGFTLEELKAAGIPKKLAPTIGISVDHRRKNKSLEGLQANVQRLKTYKAKLVIFPRRAHKVKAGDSTPEELATATQVQGDYMPFTRGEKRSVEVVKVTDEMKSFAAYGKLRLERMNKKHLGARQKKAAEAEKEDKK

SEQ ID NO: 25235 - protein, 104 aa, Zea mays subsp. mays
  peptide (1)..(104): Ceres Seq. ID no. 12351501
PLHSLSASAPRAAAASPPVQVRRGRGRNGEAQQRHPQRALQEALAELCQDMVQPARPQAEAPHRSSKEGCEDIPPPDCWSSTPHCSMPDFKVQHEVKGWERLYP

SEQ ID NO: 25236 - DNA, 1524 bp, Zea mays subsp. mays
  misc_feature (1)..(1524): Ceres Seq. ID no. 12352222
aggatacacctatctgcttctgctagctttctttacagagacgacaggatagctagagccgagggagagatcagggtcgacgatagatgggggtgcatggggctgttgccaaacgaccctgcagcaggcagcatctcctcctcctcgtcgtcgctattctcataggtagctacttcgccgccgccgccgccgccgctgcggacgagcagaaaagcaggaatagaggagctggtcgtcgcagccgcaggaggcgggccgcggcggcagtgacgtcgccgcctgcgcccctcatggtgcccatcaccatcctcgagtccgccgtcgacttgggagccgtgtgcatggacggaacaccgcctgcttaccacctgcacccgggctccggagcagggaacaacagctggatcgtcaacctggaggtgaacgggttttacttccgcgggcagcgcgtctgggacgccaccgtccggcacctcctctccatcgggatggccgctgcggaccaggtgttgctcgctggctgctccgccggcgggctggcggtcatactgcactgcgaccagttccaggccttcttccctcggtccaacaacgccgccgccgccggcggtaccaccaccactactaccgtcaagtgcctcgccgacgccggcctcttcctcgacgccatcgacgtctccggcgggcgcagccttcggtcctactactccgacatcgtggccatgcagggggtgggtcccaacctgccgccggcgtgcactgcccgtttggacaccgcctcgtgcttcttccctcagaacgtgatcgatggcgtaaacacccccatcttcctgctcaacgcagcgtacgacgcctggcagatacaggagagcctggcacccagcggagctgaccccagcggagcctggcgagcctgcaagtccaaccactctgcctgcgacgcgacccagatgaaattcctgcaaggtttcagggaccagatggtagcgtccgtgttgggcgggcgcttcgccggctccaggagcaacaacgggctcttcatcaactcctgcttcgcgcactgccagtccgagctgccggccacctggagctggagccacgcggcaggtgcctcccccgccatccaaagcagggggattgccaagtcagtgggcgactggtacttcggtcgagctcaagtcaaggcgatcgactgcccctacccctgcgacggaacatgccgcaacatcatatgatcacagacagacaggctcatgttgttgtaccctgtggctttgtgccgcacacgtcggccgtgtccgctgcagcttgcataactctcgtgggccactaaaagccgacggaattaattgattctcgtcggtggtcaacagaaattaattaaaccttgtccacaaagtcccatcggttctcaagaaccgacgagaattactaattttcgtcgatatattgcttattctcaggtgtgagaaatgttcccgtcattattcatcaagaatggcactcgacatgtgtgttttgccg

SEQ ID NO: 25237 - protein, 382 aa, Zea mays subsp. mays
  peptide (1)..(382): Ceres Seq. ID no. 12352223
  misc_feature (47)..(115): Pfam Name: Pfam Description:  Pectinacetylesterase
  misc_feature (117)..(382): NCBI GI NO: 34894654 NR Description: P0028G04.28
  misc_feature (16)..(115): NCBI GI NO: 34894654 NR Description: P0028G04.28
  misc_feature (111)..(382): NCBI GI NO: 15226462 NR Description: pectinacetylesterase, putative
  misc_feature (61)..(115): NCBI GI NO: 15226462 NR Description: pectinacetylesterase, putative
  misc_feature (111)..(382): NCBI GI NO: 28392968 NR Description: putative pectinacetylesterase
  misc_feature (18)..(115): NCBI GI NO: 28392968 NR Description: putative pectinacetylesterase
  misc_feature (117)..(382): NCBI GI NO: 18397406 NR Description: pectinacetylesterase, putative
  misc_feature (67)..(115): NCBI GI NO: 18397406 NR Description: pectinacetylesterase, putative
  misc_feature (117)..(382): NCBI GI NO: 25347293 NR Description: probable pectinacetylesterase precursor T8L23.6
  misc_feature (117)..(382): NCBI GI NO: 30696158 NR Description: pectinacetylesterase, putative
MGVHGAVAKRPCSRQHLLLLVVAILIGSYFAAAAAAAADEQKSRNRGAGRRSRRRRAAAAVTSPPAPLMVPITILESAVDLGAVCMDGTPPAYHLHPGSGAGNNSWIVNLEVNGFYFRGQRVWDATVRHLLSIGMAAADQVLLAGCSAGGLAVILHCDQFQAFFPRSNNAAAAGGTTTTTTVKCLADAGLFLDAIDVSGGRSLRSYYSDIVAMQGVGPNLPPACTARLDTASCFFPQNVIDGVNTPIFLLNAAYDAWQIQESLAPSGADPSGAWRACKSNHSACDATQMKFLQGFRDQMVASVLGGRFAGSRSNNGLFINSCFAHCQSELPATWSWSHAAGASPAIQSRGIAKSVGDWYFGRAQVKAIDCPYPCDGTCRNII

SEQ ID NO: 25238 - protein, 314 aa, Zea mays subsp. mays
  peptide (1)..(314): Ceres Seq. ID no. 12352224
  misc_feature (49)..(300): Pfam Name: Pfam Description:  Pectinacetylesterase
  misc_feature (49)..(314): NCBI GI NO: 34894654 NR Description: P0028G04.28
  misc_feature (1)..(47): NCBI GI NO: 34894654 NR Description: P0028G04.28
  misc_feature (43)..(314): NCBI GI NO: 15226462 NR Description: pectinacetylesterase, putative
  misc_feature (1)..(47): NCBI GI NO: 15226462 NR Description: pectinacetylesterase, putative
  misc_feature (43)..(314): NCBI GI NO: 28392968 NR Description: putative pectinacetylesterase
  misc_feature (1)..(47): NCBI GI NO: 28392968 NR Description: putative pectinacetylesterase
  misc_feature (49)..(314): NCBI GI NO: 18397406 NR Description: pectinacetylesterase, putative
  misc_feature (1)..(47): NCBI GI NO: 18397406 NR Description: pectinacetylesterase, putative
  misc_feature (49)..(314): NCBI GI NO: 25347293 NR Description: probable pectinacetylesterase precursor T8L23.6
  misc_feature (49)..(314): NCBI GI NO: 30696158 NR Description: pectinacetylesterase, putative
MVPITILESAVDLGAVCMDGTPPAYHLHPGSGAGNNSWIVNLEVNGFYFRGQRVWDATVRHLLSIGMAAADQVLLAGCSAGGLAVILHCDQFQAFFPRSNNAAAAGGTTTTTTVKCLADAGLFLDAIDVSGGRSLRSYYSDIVAMQGVGPNLPPACTARLDTASCFFPQNVIDGVNTPIFLLNAAYDAWQIQESLAPSGADPSGAWRACKSNHSACDATQMKFLQGFRDQMVASVLGGRFAGSRSNNGLFINSCFAHCQSELPATWSWSHAAGASPAIQSRGIAKSVGDWYFGRAQVKAIDCPYPCDGTCRNII

SEQ ID NO: 25239 - protein, 297 aa, Zea mays subsp. mays
  peptide (1)..(297): Ceres Seq. ID no. 12352225
  misc_feature (32)..(283): Pfam Name: Pfam Description:  Pectinacetylesterase
  misc_feature (32)..(297): NCBI GI NO: 34894654 NR Description: P0028G04.28
  misc_feature (1)..(30): NCBI GI NO: 34894654 NR Description: P0028G04.28
  misc_feature (26)..(297): NCBI GI NO: 15226462 NR Description: pectinacetylesterase, putative
  misc_feature (1)..(30): NCBI GI NO: 15226462 NR Description: pectinacetylesterase, putative
  misc_feature (26)..(297): NCBI GI NO: 28392968 NR Description: putative pectinacetylesterase
  misc_feature (1)..(30): NCBI GI NO: 28392968 NR Description: putative pectinacetylesterase
  misc_feature (32)..(297): NCBI GI NO: 18397406 NR Description: pectinacetylesterase, putative
  misc_feature (1)..(30): NCBI GI NO: 18397406 NR Description: pectinacetylesterase, putative
  misc_feature (32)..(297): NCBI GI NO: 25347293 NR Description: probable pectinacetylesterase precursor T8L23.6
  misc_feature (32)..(297): NCBI GI NO: 30696158 NR Description: pectinacetylesterase, putative
MDGTPPAYHLHPGSGAGNNSWIVNLEVNGFYFRGQRVWDATVRHLLSIGMAAADQVLLAGCSAGGLAVILHCDQFQAFFPRSNNAAAAGGTTTTTTVKCLADAGLFLDAIDVSGGRSLRSYYSDIVAMQGVGPNLPPACTARLDTASCFFPQNVIDGVNTPIFLLNAAYDAWQIQESLAPSGADPSGAWRACKSNHSACDATQMKFLQGFRDQMVASVLGGRFAGSRSNNGLFINSCFAHCQSELPATWSWSHAAGASPAIQSRGIAKSVGDWYFGRAQVKAIDCPYPCDGTCRNII

SEQ ID NO: 25240 - DNA, 1736 bp, Zea mays subsp. mays
  misc_feature (1)..(1736): Ceres Seq. ID no. 12390518
aatgacaagctagaagattaccaggcattccccctcccccaaaatgattgcaacgacatcgcactgagtccaagtatcagagtaggatgatgtattcccctccgcgcaccgatcccgacagagaggaagagcagtgcttctcaatcggaagcatgcaagagggggttcagctctacagttctactggagatgctcaactaaatagaaatatgaacacaggcaagtgtttagaggatggcaaaaggaagggttctggagaggacagttcatcactacgttctctaggtgaaaccagtgcattgcagcgagaagtcagcatggagtgtgctgatgagaaggcgggtgatgctagaggccaagagagaggactacgtgcatgtccgggcaaagcgcggccaagccaccaacagccacaggccttgcagaaagatttcgaagggaaaagataaatgaaaggatgaagcttcttcaagaccttgtcccaggttgcaacaagattacaggcaaggccatgatgcttgatgagatcataaactatgtgcaatctctgcagcgacagattgagttcctttcgatgaagctctcagcgatcggccctgggctcaactgtgacctcgacctacaagatatcctctgcacacaagatgctagctctgcttttccaggatacaacctgcaaacgagcaatgtgcatattaatctgtacagagcatctgaagaaggtttctcacacaggaacaggatcatccctagtccagcaaatgttcacgtgacaagaaacgcccagctatctgcatttcctcagagaggagttatctggaacgaggagctttgcagcatcgcttcagatagaaatgctggtagcctgattcaatgaaagtggagtgacattgtggcaactgacaagccggcagtttaatggtgatcaactctgaaagtcttgacaagttgggttgctactgaggtgccttttcaagttgcagtggtagcacgacttctcttgggatgagctagttaacttttggtatttgagaggaattctggtgtgtccacccatcctgtacagttattagaataactaatcaaaggagtactgtgaaattcttgcgatctggtggagaaaatagtggacaattttcgtctggaatttctgacacaactgagttagtgctttggtggggtgtggctccacctaattatttaaaaaaaaaaaaaaaaaacggcacgagaagctttttttttttttttttcgaatatgcatatttttacatgttttttattcgcttttgtttatgttgaatcagaaactggatggtagaaagaaaataagcctctccagctgtcccatgagccatctatgtttctgggctctcttacagatttatattatgtgatgaactagagttcatatatcatatatgaggataagaacagtacagttgttgtactccaacaccatgaaaccaacagttgaccaactttatttattcctataagtatttgtagcagcagtgcgcatacgacatcccggccaccaactagcagctcaatcaaggagtgtattcggatgtggatcagccgcctagtacaacttgtagttcaggtccaatgcaagcgactagtagtatcaagtctcatcaacacaataacgacagaatgaatcgggcactagcctagaaagcattcataaactccgagcctgtacaccatctacagcctaaagactgacttgactc

SEQ ID NO: 25241 - protein, 166 aa, Zea mays subsp. mays
  peptide (1)..(166): Ceres Seq. ID no. 12390519
  misc_feature (15)..(59): Pfam Name: Pfam Description:  Helix-loop-helix DNA-binding domain
  misc_feature (15)..(143): NCBI GI NO: 27311243 NR Description: Hypothetical protein
  misc_feature (15)..(108): NCBI GI NO: 28273388 NR Description: putative Helix-loop-helix DNA-binding domaincontaining protein
  misc_feature (15)..(93): NCBI GI NO: 7487656 NR Description: hypothetical protein T4L20
  misc_feature (15)..(93): NCBI GI NO: 20127066 NR Description: putative bHLH transcription factor
  misc_feature (15)..(93): NCBI GI NO: 22329164 NR Description: bHLH protein; protein id: At4g34530
  misc_feature (15)..(93): NCBI GI NO: 21539493 NR Description: unknown protein [Arabidopsis thaliana]
  misc_feature (15)..(121): NCBI GI NO: 15222679 NR Description: bHLH protein; protein id: At1g26260.1
  misc_feature (15)..(96): NCBI GI NO: 5923912 NR Description: bHLH transcription factor GBOF-1
  misc_feature (15)..(154): NCBI GI NO: 18423212 NR Description: Expressed protein; protein id: At5g50915
  misc_feature (15)..(102): NCBI GI NO: 30688981 NR Description: bHLH protein family [Arabidopsis thaliana]
MSGQSAAKPPTATGLAERFRREKINERMKLLQDLVPGCNKITGKAMMLDEIINYVQSLQRQIEFLSMKLSAIGPGLNCDLDLQDILCTQDASSAFPGYNLQTSNVHINLYRASEEGFSHRNRIIPSPANVHVTRNAQLSAFPQRGVIWNEELCSIASDRNAGSLIQ

SEQ ID NO: 25242 - protein, 139 aa, Zea mays subsp. mays
  peptide (1)..(139): Ceres Seq. ID no. 12390520
  misc_feature (1)..(116): NCBI GI NO: 27311243 NR Description: Hypothetical protein
  misc_feature (1)..(81): NCBI GI NO: 28273388 NR Description: putative Helix-loop-helix DNA-binding domaincontaining protein
  misc_feature (1)..(66): NCBI GI NO: 7487656 NR Description: hypothetical protein T4L20
  misc_feature (1)..(66): NCBI GI NO: 20127066 NR Description: putative bHLH transcription factor
  misc_feature (1)..(66): NCBI GI NO: 22329164 NR Description: bHLH protein; protein id: At4g34530
  misc_feature (1)..(66): NCBI GI NO: 21539493 NR Description: unknown protein [Arabidopsis thaliana]
  misc_feature (1)..(94): NCBI GI NO: 15222679 NR Description: bHLH protein; protein id: At1g26260.1
  misc_feature (1)..(69): NCBI GI NO: 5923912 NR Description: bHLH transcription factor GBOF-1
  misc_feature (1)..(127): NCBI GI NO: 18423212 NR Description: Expressed protein; protein id: At5g50915
  misc_feature (1)..(75): NCBI GI NO: 30688981 NR Description: bHLH protein family [Arabidopsis thaliana]
MKLLQDLVPGCNKITGKAMMLDEIINYVQSLQRQIEFLSMKLSAIGPGLNCDLDLQDILCTQDASSAFPGYNLQTSNVHINLYRASEEGFSHRNRIIPSPANVHVTRNAQLSAFPQRGVIWNEELCSIASDRNAGSLIQ

SEQ ID NO: 25243 - protein, 121 aa, Zea mays subsp. mays
  peptide (1)..(121): Ceres Seq. ID no. 12390521
  misc_feature (1)..(98): NCBI GI NO: 27311243 NR Description: Hypothetical protein
  misc_feature (1)..(63): NCBI GI NO: 28273388 NR Description: putative Helix-loop-helix DNA-binding domaincontaining protein
  misc_feature (1)..(48): NCBI GI NO: 7487656 NR Description: hypothetical protein T4L20
  misc_feature (1)..(48): NCBI GI NO: 20127066 NR Description: putative bHLH transcription factor
  misc_feature (1)..(48): NCBI GI NO: 22329164 NR Description: bHLH protein; protein id: At4g34530
  misc_feature (1)..(48): NCBI GI NO: 21539493 NR Description: unknown protein [Arabidopsis thaliana]
  misc_feature (1)..(76): NCBI GI NO: 15222679 NR Description: bHLH protein; protein id: At1g26260.1
  misc_feature (1)..(51): NCBI GI NO: 5923912 NR Description: bHLH transcription factor GBOF-1
  misc_feature (1)..(109): NCBI GI NO: 18423212 NR Description: Expressed protein; protein id: At5g50915
  misc_feature (1)..(57): NCBI GI NO: 30688981 NR Description: bHLH protein family [Arabidopsis thaliana]
MMLDEIINYVQSLQRQIEFLSMKLSAIGPGLNCDLDLQDILCTQDASSAFPGYNLQTSNVHINLYRASEEGFSHRNRIIPSPANVHVTRNAQLSAFPQRGVIWNEELCSIASDRNAGSLIQ

SEQ ID NO: 25244 - DNA, 1466 bp, Zea mays subsp. mays
  misc_feature (1)..(1466): Ceres Seq. ID no. 12410153
aacaaaaaaaaaaccctagaactccaaaaccttcagccccacgctatggccctcgcactgcgcctccgtcgggtcctcgcggcggcctccaccgcggcacccctgctccgcccgtccacctcggtcgcccggccttgcccgctcgttcccctcgcctccccggtcgcgccgctcccgctgccgccgtggcgattcctgcccggcggcggcgccgggttcaggtccacggcggcggcggctgcgcggggcgggaccgactatgggacggacgacagcaagatctcccccgacgagatcctcttcgagggctgcgactacaaccactggctcatcaccatggacttcccggaccccaagccgtcgcgcgaagagatgatcgagacatacctccagactctcgccaaggtcgtcgggagttatgaggaggccaagaagaggatgtatgcttttagtacgacgacttatgttggttttcaggctgtaatgaccgaggaaatgtcagaaaaatttcgcggtttgcctggagtagttttcattttgcctgattcatatctatatccagaaacaaaggagtacggaggagacaaatatgacaatggtgtcatcactccaagaccaccacctgttcattatagcagaccatcaagaactgacaggaaccgtaactaccgaggaaactaccaggatggccctccacagcaaggaaattaccagaacaaccgtcctccaccagaaggtggttaccagaacaacccgccgcagcaaggaaactaccagacataccgctcgcagcaagatggaagaggctatgccccacagcagaattatgcacaaggtggtcaggatggtagaggtttggaaggaatgattacacagaccgttcaggctacaatggaccacctgattttcgaagtcaaactcagtaccaagggcatgtaaatccagctgggcaaggtcaaggttacaacaacccccaagagcgtagcaacttctcgcaagggcagggaggaggttttaggcctggtggtccttcagcacctgggtcttatggccaaccatcagcacctggatcttatggtcaacctaatacacttggtaactatgggcaggtacctccatcagtgaatcctggtggtaacagagttcctggtgtgaatcctagttatggtggggatggcagacagggggctggaccagcatatggtggagataactggcaaagaggttctggtcagtatcctagcccaggtgaaggacaaggaaactggcaggtatgagagcatttgatatacacatttcacttttaaaatgccgttactgtttgaattgaaatacagcagtttaaagttaaaccgggacatcctttgtttgaccagttctagattgaattcgtaaactgtgtgccgagtttcagatgtacgactacagtttttctccctgttaaatgttttttagatttatgagct

SEQ ID NO: 25245 - protein, 312 aa, Zea mays subsp. mays
  peptide (1)..(312): Ceres Seq. ID no. 12410154
  misc_feature (186)..(288): Pfam Name: Pfam Description:  High molecular weight glutenin subunit
  misc_feature (27)..(245): NCBI GI NO: 38636775 NR Description: putative DAG protein
  misc_feature (90)..(279): NCBI GI NO: 15235263 NR Description: DAG-like protein; protein id: At4g20020.1
  misc_feature (36)..(245): NCBI GI NO: 6014904 NR Description: DAG PROTEIN, CHLOROPLAST PRECURSOR
  misc_feature (61)..(232): NCBI GI NO: 21593052 NR Description: DAG protein, putative [Arabidopsis thaliana]
  misc_feature (61)..(232): NCBI GI NO: 15220382 NR Description: DAG protein, putative; protein id: At1g11430
  misc_feature (21)..(288): NCBI GI NO: 15241580 NR Description: unknown protein; protein id: At5g44780.1
  misc_feature (96)..(221): NCBI GI NO: 27754695 NR Description: putative DAG protein [Arabidopsis thaliana]
  misc_feature (96)..(221): NCBI GI NO: 15230785 NR Description: DAG protein, putative; protein id: At3g06790.1
  misc_feature (28)..(241): NCBI GI NO: 15226934 NR Description: unknown protein; protein id: At2g35240
  misc_feature (15)..(241): NCBI GI NO: 34897972 NR Description: putative plastid protein
NKKKTLELQNLQPHAMALALRLRRVLAAASTAAPLLRPSTSVARPCPLVPLASPVAPLPLPPWRFLPGGGAGFRSTAAAAARGGTDYGTDDSKISPDEILFEGCDYNHWLITMDFPDPKPSREEMIETYLQTLAKVVGSYEEAKKRMYAFSTTTYVGFQAVMTEEMSEKFRGLPGVVFILPDSYLYPETKEYGGDKYDNGVITPRPPPVHYSRPSRTDRNRNYRGNYQDGPPQQGNYQNNRPPPEGGYQNNPPQQGNYQTYRSQQDGRGYAPQQNYAQGGQDGRGLEGMITQTVQATMDHLIFEVKLSTKGM

SEQ ID NO: 25246 - protein, 297 aa, Zea mays subsp. mays
  peptide (1)..(297): Ceres Seq. ID no. 12410155
  misc_feature (171)..(273): Pfam Name: Pfam Description:  High molecular weight glutenin subunit
  misc_feature (12)..(230): NCBI GI NO: 38636775 NR Description: putative DAG protein
  misc_feature (75)..(264): NCBI GI NO: 15235263 NR Description: DAG-like protein; protein id: At4g20020.1
  misc_feature (21)..(230): NCBI GI NO: 6014904 NR Description: DAG PROTEIN, CHLOROPLAST PRECURSOR
  misc_feature (46)..(217): NCBI GI NO: 21593052 NR Description: DAG protein, putative [Arabidopsis thaliana]
  misc_feature (46)..(217): NCBI GI NO: 15220382 NR Description: DAG protein, putative; protein id: At1g11430
  misc_feature (6)..(273): NCBI GI NO: 15241580 NR Description: unknown protein; protein id: At5g44780.1
  misc_feature (81)..(206): NCBI GI NO: 27754695 NR Description: putative DAG protein [Arabidopsis thaliana]
  misc_feature (81)..(206): NCBI GI NO: 15230785 NR Description: DAG protein, putative; protein id: At3g06790.1
  misc_feature (13)..(226): NCBI GI NO: 15226934 NR Description: unknown protein; protein id: At2g35240
  misc_feature (1)..(226): NCBI GI NO: 34897972 NR Description: putative plastid protein
MALALRLRRVLAAASTAAPLLRPSTSVARPCPLVPLASPVAPLPLPPWRFLPGGGAGFRSTAAAAARGGTDYGTDDSKISPDEILFEGCDYNHWLITMDFPDPKPSREEMIETYLQTLAKVVGSYEEAKKRMYAFSTTTYVGFQAVMTEEMSEKFRGLPGVVFILPDSYLYPETKEYGGDKYDNGVITPRPPPVHYSRPSRTDRNRNYRGNYQDGPPQQGNYQNNRPPPEGGYQNNPPQQGNYQTYRSQQDGRGYAPQQNYAQGGQDGRGLEGMITQTVQATMDHLIFEVKLSTKGM

SEQ ID NO: 25247 - protein, 200 aa, Zea mays subsp. mays
  peptide (1)..(200): Ceres Seq. ID no. 12410156
  misc_feature (74)..(176): Pfam Name: Pfam Description:  High molecular weight glutenin subunit
  misc_feature (1)..(133): NCBI GI NO: 38636775 NR Description: putative DAG protein
  misc_feature (1)..(167): NCBI GI NO: 15235263 NR Description: DAG-like protein; protein id: At4g20020.1
  misc_feature (1)..(133): NCBI GI NO: 6014904 NR Description: DAG PROTEIN, CHLOROPLAST PRECURSOR
  misc_feature (1)..(120): NCBI GI NO: 21593052 NR Description: DAG protein, putative [Arabidopsis thaliana]
  misc_feature (1)..(120): NCBI GI NO: 15220382 NR Description: DAG protein, putative; protein id: At1g11430
  misc_feature (1)..(176): NCBI GI NO: 15241580 NR Description: unknown protein; protein id: At5g44780.1
  misc_feature (1)..(109): NCBI GI NO: 27754695 NR Description: putative DAG protein [Arabidopsis thaliana]
  misc_feature (1)..(109): NCBI GI NO: 15230785 NR Description: DAG protein, putative; protein id: At3g06790.1
  misc_feature (1)..(129): NCBI GI NO: 15226934 NR Description: unknown protein; protein id: At2g35240
  misc_feature (1)..(129): NCBI GI NO: 34897972 NR Description: putative plastid protein
MDFPDPKPSREEMIETYLQTLAKVVGSYEEAKKRMYAFSTTTYVGFQAVMTEEMSEKFRGLPGVVFILPDSYLYPETKEYGGDKYDNGVITPRPPPVHYSRPSRTDRNRNYRGNYQDGPPQQGNYQNNRPPPEGGYQNNPPQQGNYQTYRSQQDGRGYAPQQNYAQGGQDGRGLEGMITQTVQATMDHLIFEVKLSTKGM

SEQ ID NO: 25248 - DNA, 1105 bp, Zea mays subsp. mays
  misc_feature (1)..(1105): Ceres Seq. ID no. 12410149
agttccacttccaccaccgcggccgccgcgccctataaatggccgccatcggcagctgcactccggtaccaatccccgattccttacacgctaagccacgcaacgcaacgcaactagccatgacgatgaagtccagcagcggcggcggccatgtcatcggggtcccggtcacctccaaggcgcacgggatagaggaggtgtccagggatccgtccttcggcaagggcgccggcgatcacctcgccgtctcgttgacgcaccccagcccttacgcgtctttcggctacaagcacacaggcagcaaaggccaggtgacccactgggtgagcaagctgagcagaagggcgcagggcttcagagagcatgtgaccttgggggccgaagctgtcggagacggtgaaggggaagctgagcctgggcgcgcggatcctgcaggccggcggggtggagcgcgtgttccgccaggccttctccgccgccgacaagggcgagcggctgctcaaggcgctgcagtgctacatctacaccacgggcgggcccatcgccggcatgctcttcgtctccaccaggaaggtcgccttccgcagcgaccgccccatcaccgtcacctcccccggcggcggcggcgacacggcgcgggtcacctacaaggtggccatcccgctgcggaggatccgcagggtgcggcccagcgagaacgtccacaggcccgaggagaagtacatccacgtctccaccgtcgacggcttcgagttctggttcatgggcttcgtcagctaccagaggtcgtgcaagtacatgcagcaggccgtctcggagatgcgatgaccggtgtctgtatcgctgccccctgtcggaacgatgtgaagtgactaggatgttatgggtctcgcttcgccatcttttgtcgccaagcagccgtagctaaaaagattgccctgtctttaattttggatcggtgcaattgtgttccttccgcgtacgaatttggaccagcatctctgttgttcccaaagtggttgctctcgatctactagtacacatggaccgaaaaaattaaccatttgtgcatctttgttgaatgcaacagttctatgtgtttctg

SEQ ID NO: 25249 - protein, 277 aa, Zea mays subsp. mays
  peptide (1)..(277): Ceres Seq. ID no. 12410150
  misc_feature (31)..(127): NCBI GI NO: 38344445 NR Description: OSJNBa0038O10.17
MAAIGSCTPVPIPDSLHAKPRNATQLAMTMKSSSGGGHVIGVPVTSKAHGIEEVSRDPSFGKGAGDHLAVSLTHPSPYASFGYKHTGSKGQVTHWVSKLSRRAQGFREHVTLGAEAVGDGEGEAEPGRADPAGRRGGARVPPGLLRRRQGRAAAQGAAVLHLHHGRAHRRHALRLHQEGRLPQRPPHHRHLPRRRRRHGAGHLQGGHPAAEDPQGAAQRERPQARGEVHPRLHRRRLRVLVHGLRQLPEVVQVHAAGRLGDAMTGVCIAAPCRNDVK

SEQ ID NO: 25250 - protein, 250 aa, Zea mays subsp. mays
  peptide (1)..(250): Ceres Seq. ID no. 12410151
  misc_feature (4)..(100): NCBI GI NO: 38344445 NR Description: OSJNBa0038O10.17
MTMKSSSGGGHVIGVPVTSKAHGIEEVSRDPSFGKGAGDHLAVSLTHPSPYASFGYKHTGSKGQVTHWVSKLSRRAQGFREHVTLGAEAVGDGEGEAEPGRADPAGRRGGARVPPGLLRRRQGRAAAQGAAVLHLHHGRAHRRHALRLHQEGRLPQRPPHHRHLPRRRRRHGAGHLQGGHPAAEDPQGAAQRERPQARGEVHPRLHRRRLRVLVHGLRQLPEVVQVHAAGRLGDAMTGVCIAAPCRNDVK

SEQ ID NO: 25251 - protein, 248 aa, Zea mays subsp. mays
  peptide (1)..(248): Ceres Seq. ID no. 12410152
  misc_feature (2)..(98): NCBI GI NO: 38344445 NR Description: OSJNBa0038O10.17
MKSSSGGGHVIGVPVTSKAHGIEEVSRDPSFGKGAGDHLAVSLTHPSPYASFGYKHTGSKGQVTHWVSKLSRRAQGFREHVTLGAEAVGDGEGEAEPGRADPAGRRGGARVPPGLLRRRQGRAAAQGAAVLHLHHGRAHRRHALRLHQEGRLPQRPPHHRHLPRRRRRHGAGHLQGGHPAAEDPQGAAQRERPQARGEVHPRLHRRRLRVLVHGLRQLPEVVQVHAAGRLGDAMTGVCIAAPCRNDVK

SEQ ID NO: 25252 - DNA, 1448 bp, Zea mays subsp. mays
  misc_feature (1)..(1448): Ceres Seq. ID no. 12343332
aacgagtctaaaccactgaaaaaaaggctcctgtatctcccatagtcccatcttcttgcagccgaagcaaagtgagggcggcgagatgaacggcggcggggaggacgggaagcagcagccgcacctggtactggcgcacaagctgttcctcctgtcgcactccgacgtcgacgacctcgccaaggtcgacctacgcgctgacgtgttcgcggcagtcaaatccgatgacatggcagctctgtacgagtcgttggcggcggacggcgtactggagacggacgcggcgctgctggccgagatgcgcgccaggatcgacgaggagatccggaagctcgacgagaagattgctgatgcagaggagaacttgggtgagagtgaagtgcgtgaggcccatctcgccaaatccttatatttcataagggttggggagaaggagaaagcactggagcagcttaaagttactgaaggaaaaactgtagctgttgggcaaaagatggaccttgttttctacacactacaaataggattgttctatatggactttgatctcatctcgaagtccattgacaaagcgaaaaacttgtttgaggaaggtggtgattgggaaaggaagaacagattgaaagtatatgaagggttgtactgcatggcaactagaaacttcaagaaagctgctagtttattcttggattcaatttcaactttcacgacatatgagctattcacatatgatacattcatcttctacacagtcctcacgagtgttatatctctggaccgtgtatctctgaaacaaaaggttgtagatgcacctgagatcttagccgtaattggcaaagtacctcacctctcagagtttctcaattccctctacaattgccagtacaagtcattttttattgcattctctggcttgactgaaccaatcaagttagagcgttacttgcagcctcattttcgctactacatgcgtgaagtgcgcactgttgtctactcacagtttctggaatcgtacaagagtgtgacaatggaagccatggctgctgcatttggcgttacagtcgactttatagaccaggaactgtcacgcttcattgccgctgggaagctccactgcaagatagacaaagttgctggcgtcttggaaacgaaccgacctgatgctaggaacgccttctaccaggcaaccatcaagcaaggagactttttgctgaaccgcatccagaagctgtcacgagttatcgacctgtaggggagagcccttcatgcaggagcttgccttggttcctggagtgtacgggcggtgcttgactttcaatgggtctcagttgaagaagcttttagggatatttgtgttctgagaaattgtgttctgcactttttagcctaactacatgaagccccaaaaaaaattcatggcgttgcttgtagacgtctcttcattgatg

SEQ ID NO: 25253 - protein, 388 aa, Zea mays subsp. mays
  peptide (1)..(388): Ceres Seq. ID no. 12343333
  misc_feature (253)..(357): Pfam Name: Pfam Description:  PCI domain
  misc_feature (1)..(388): NCBI GI NO: 20978545 NR Description: 26S proteasome non-ATPase regulatory subunit 6
  misc_feature (1)..(388): NCBI GI NO: 18416433 NR Description: 26S proteasome regulatory subunit
  misc_feature (1)..(274): NCBI GI NO: 7484780 NR Description: 26S proteasome regulatory particle chain RPN7 homolog F6I7
  misc_feature (157)..(388): NCBI GI NO: 2982297 NR Description: KIAA0107-like protein [Picea mariana]
  misc_feature (6)..(388): NCBI GI NO: 21313464 NR Description: RIKEN cDNA 2400006A19 [Mus musculus]
  misc_feature (6)..(388): NCBI GI NO: 20978552 NR Description: 26S proteasome non-ATPase regulatory subunit 6
  misc_feature (6)..(388): NCBI GI NO: 29436940 NR Description: Unknown (protein for MGC:56471) [Danio rerio]
  misc_feature (6)..(388): NCBI GI NO: 7661914 NR Description: KIAA0107 gene product [Homo sapiens]
  misc_feature (6)..(388): NCBI GI NO: 38454206 NR Description: Unknown (protein for MGC:72968)
  misc_feature (6)..(388): NCBI GI NO: 39795842 NR Description: Unknown (protein for MGC:76241)
MNGGGEDGKQQPHLVLAHKLFLLSHSDVDDLAKVDLRADVFAAVKSDDMAALYESLAADGVLETDAALLAEMRARIDEEIRKLDEKIADAEENLGESEVREAHLAKSLYFIRVGEKEKALEQLKVTEGKTVAVGQKMDLVFYTLQIGLFYMDFDLISKSIDKAKNLFEEGGDWERKNRLKVYEGLYCMATRNFKKAASLFLDSISTFTTYELFTYDTFIFYTVLTSVISLDRVSLKQKVVDAPEILAVIGKVPHLSEFLNSLYNCQYKSFFIAFSGLTEPIKLERYLQPHFRYYMREVRTVVYSQFLESYKSVTMEAMAAAFGVTVDFIDQELSRFIAAGKLHCKIDKVAGVLETNRPDARNAFYQATIKQGDFLLNRIQKLSRVIDL

SEQ ID NO: 25254 - protein, 340 aa, Zea mays subsp. mays
  peptide (1)..(340): Ceres Seq. ID no. 12343334
  misc_feature (205)..(309): Pfam Name: Pfam Description:  PCI domain
  misc_feature (1)..(340): NCBI GI NO: 20978545 NR Description: 26S proteasome non-ATPase regulatory subunit 6
  misc_feature (1)..(340): NCBI GI NO: 18416433 NR Description: 26S proteasome regulatory subunit
  misc_feature (1)..(226): NCBI GI NO: 7484780 NR Description: 26S proteasome regulatory particle chain RPN7 homolog F6I7
  misc_feature (109)..(340): NCBI GI NO: 2982297 NR Description: KIAA0107-like protein [Picea mariana]
  misc_feature (1)..(340): NCBI GI NO: 21313464 NR Description: RIKEN cDNA 2400006A19 [Mus musculus]
  misc_feature (1)..(340): NCBI GI NO: 20978552 NR Description: 26S proteasome non-ATPase regulatory subunit 6
  misc_feature (1)..(340): NCBI GI NO: 29436940 NR Description: Unknown (protein for MGC:56471) [Danio rerio]
  misc_feature (1)..(340): NCBI GI NO: 7661914 NR Description: KIAA0107 gene product [Homo sapiens]
  misc_feature (1)..(340): NCBI GI NO: 38454206 NR Description: Unknown (protein for MGC:72968)
  misc_feature (1)..(340): NCBI GI NO: 39795842 NR Description: Unknown (protein for MGC:76241)
MAALYESLAADGVLETDAALLAEMRARIDEEIRKLDEKIADAEENLGESEVREAHLAKSLYFIRVGEKEKALEQLKVTEGKTVAVGQKMDLVFYTLQIGLFYMDFDLISKSIDKAKNLFEEGGDWERKNRLKVYEGLYCMATRNFKKAASLFLDSISTFTTYELFTYDTFIFYTVLTSVISLDRVSLKQKVVDAPEILAVIGKVPHLSEFLNSLYNCQYKSFFIAFSGLTEPIKLERYLQPHFRYYMREVRTVVYSQFLESYKSVTMEAMAAAFGVTVDFIDQELSRFIAAGKLHCKIDKVAGVLETNRPDARNAFYQATIKQGDFLLNRIQKLSRVIDL

SEQ ID NO: 25255 - protein, 317 aa, Zea mays subsp. mays
  peptide (1)..(317): Ceres Seq. ID no. 12343335
  misc_feature (182)..(286): Pfam Name: Pfam Description:  PCI domain
  misc_feature (1)..(317): NCBI GI NO: 20978545 NR Description: 26S proteasome non-ATPase regulatory subunit 6
  misc_feature (1)..(317): NCBI GI NO: 18416433 NR Description: 26S proteasome regulatory subunit
  misc_feature (1)..(203): NCBI GI NO: 7484780 NR Description: 26S proteasome regulatory particle chain RPN7 homolog F6I7
  misc_feature (86)..(317): NCBI GI NO: 2982297 NR Description: KIAA0107-like protein [Picea mariana]
  misc_feature (1)..(317): NCBI GI NO: 21313464 NR Description: RIKEN cDNA 2400006A19 [Mus musculus]
  misc_feature (1)..(317): NCBI GI NO: 20978552 NR Description: 26S proteasome non-ATPase regulatory subunit 6
  misc_feature (1)..(317): NCBI GI NO: 29436940 NR Description: Unknown (protein for MGC:56471) [Danio rerio]
  misc_feature (1)..(317): NCBI GI NO: 7661914 NR Description: KIAA0107 gene product [Homo sapiens]
  misc_feature (1)..(317): NCBI GI NO: 38454206 NR Description: Unknown (protein for MGC:72968)
  misc_feature (1)..(317): NCBI GI NO: 39795842 NR Description: Unknown (protein for MGC:76241)
MRARIDEEIRKLDEKIADAEENLGESEVREAHLAKSLYFIRVGEKEKALEQLKVTEGKTVAVGQKMDLVFYTLQIGLFYMDFDLISKSIDKAKNLFEEGGDWERKNRLKVYEGLYCMATRNFKKAASLFLDSISTFTTYELFTYDTFIFYTVLTSVISLDRVSLKQKVVDAPEILAVIGKVPHLSEFLNSLYNCQYKSFFIAFSGLTEPIKLERYLQPHFRYYMREVRTVVYSQFLESYKSVTMEAMAAAFGVTVDFIDQELSRFIAAGKLHCKIDKVAGVLETNRPDARNAFYQATIKQGDFLLNRIQKLSRVIDL

SEQ ID NO: 25256 - DNA, 1535 bp, Zea mays subsp. mays
  misc_feature (1)..(1535): Ceres Seq. ID no. 12410145
gcacggcacacatcatcctagcaaacgtccttatccggctacaactttcgcgacgtctgcgacatcagaaaactgagctcgccccctcttgccttccctcctccgccggaccgctgctgtccgcctccaaccctccagttcgacgcaggcggcgacggcggcgcgccgagatgaaggtctccgtgaagacgctcaagggatctagcttccagatcgaagtggagcccaccgacaaggttgctgctgtgaaaaaggtcatagagaatatgcaagagcaggcttcctatccagctgaccaacaagtccttatacatcaaggaaaggtgctcagcgatgacaccacattagaggaaaatcaagtgactgagaataatttccttgttataatgctcagacagaacaagggatcatcaagtgcagcaccggctaagacaactgcgaatcaggcacctcctactcagacagtgcctgttgttccacctcaaacgtcagcagccccagctgcaccagcacctattgtacctgtcagtgcactggctgcaactgctacagcctcagcagctcctgctgttgctgtatccaccgaggcagatagttatggtcaggctgcctcaaacctagttgctggcagcaacttggaaggaacaattcaatccattcttgaaatgggtggcgggatatgggacagagacactgtactacgtgccctgcgggttgcgtataacaacccagagcgcgctgttgagtacttatattctgggattcctgaacaaatggatgttcctacatcacctccgagtatccagccagtcaatcctgtccaggctgcacaagcagctcaaactgcagctccatctggaccaaatgctaaccctctagacctctttccccaatctcttccgaatgcttccgccaatgctggcacaggaaaccttgatgttttgcgcaataacgtacaattccaaaacctgcttggtttggtgcaggctaatcctcagattttgcagccattgcttcaagaattgggtaaacaaaatccccaggttatgcagctaatccaggaaaaccaagcagagttcatgcggatgatcaatgaaccacttgagggagacgaagagaatgaaatgatgctggaccagatggcggatgcagctgagaccattgcagtgactccagaggagaacgaagctatacttcgtcttgaagggatgggctttgaccgggcactggtcctggaagtgttcttcgcgtgcaacaagaatgagcagctgaccgccaactacctcttggatcacatgcacgagttcgacaacgatgacgggctcggagggccaccgctatgagggcgctctcgatccctacatcatgcgaacgaaggctgtagggcagtagtaggaaaacgttttgggattcgtcccgtctgttcgctcactctacatattcgtttggctttgctgtttagtacagaatttctagatttacggacttactacttgatatcctgatatagaggtcacggccaagcttactttttc

SEQ ID NO: 25257 - protein, 446 aa, Zea mays subsp. mays
  peptide (1)..(446): Ceres Seq. ID no. 12410146
  misc_feature (57)..(134): Pfam Name: Pfam Description:  Ubiquitin family
  misc_feature (57)..(445): NCBI GI NO: 7446462 NR Description: RAD23 protein homolog - rice
  misc_feature (57)..(437): NCBI GI NO: 15240922 NR Description: DNA repair protein RAD23 homolog
  misc_feature (57)..(437): NCBI GI NO: 14335004 NR Description: unknown protein [Arabidopsis thaliana]
  misc_feature (57)..(436): NCBI GI NO: 5640111 NR Description: RAD23 protein [Lycopersicon esculentum]
  misc_feature (57)..(436): NCBI GI NO: 7446459 NR Description: RAD23 protein, isoform I - carrot
  misc_feature (136)..(438): NCBI GI NO: 38175472 NR Description: putative osRAD23
  misc_feature (57)..(437): NCBI GI NO: 15221013 NR Description: hypothetical protein; protein id: At1g16190.1
  misc_feature (57)..(437): NCBI GI NO: 30699439 NR Description: DNA repair protein RAD23 -related
  misc_feature (57)..(437): NCBI GI NO: 30409718 NR Description: RAD23-like protein [Arabidopsis thaliana]
  misc_feature (57)..(437): NCBI GI NO: 30409722 NR Description: RAD23-like protein [Arabidopsis thaliana]
TAHIILANVLIRLQLSRRLRHQKTELAPSCLPSSAGPLLSASNPPVRRRRRRRRAEMKVSVKTLKGSSFQIEVEPTDKVAAVKKVIENMQEQASYPADQQVLIHQGKVLSDDTTLEENQVTENNFLVIMLRQNKGSSSAAPAKTTANQAPPTQTVPVVPPQTSAAPAAPAPIVPVSALAATATASAAPAVAVSTEADSYGQAASNLVAGSNLEGTIQSILEMGGGIWDRDTVLRALRVAYNNPERAVEYLYSGIPEQMDVPTSPPSIQPVNPVQAAQAAQTAAPSGPNANPLDLFPQSLPNASANAGTGNLDVLRNNVQFQNLLGLVQANPQILQPLLQELGKQNPQVMQLIQENQAEFMRMINEPLEGDEENEMMLDQMADAAETIAVTPEENEAILRLEGMGFDRALVLEVFFACNKNEQLTANYLLDHMHEFDNDDGLGGPPL

SEQ ID NO: 25258 - protein, 390 aa, Zea mays subsp. mays
  peptide (1)..(390): Ceres Seq. ID no. 12410147
  misc_feature (1)..(78): Pfam Name: Pfam Description:  Ubiquitin family
  misc_feature (1)..(389): NCBI GI NO: 7446462 NR Description: RAD23 protein homolog - rice
  misc_feature (1)..(381): NCBI GI NO: 15240922 NR Description: DNA repair protein RAD23 homolog
  misc_feature (1)..(381): NCBI GI NO: 14335004 NR Description: unknown protein [Arabidopsis thaliana]
  misc_feature (1)..(380): NCBI GI NO: 5640111 NR Description: RAD23 protein [Lycopersicon esculentum]
  misc_feature (1)..(380): NCBI GI NO: 7446459 NR Description: RAD23 protein, isoform I - carrot
  misc_feature (80)..(382): NCBI GI NO: 38175472 NR Description: putative osRAD23
  misc_feature (1)..(381): NCBI GI NO: 15221013 NR Description: hypothetical protein; protein id: At1g16190.1
  misc_feature (1)..(381): NCBI GI NO: 30699439 NR Description: DNA repair protein RAD23 -related
  misc_feature (1)..(381): NCBI GI NO: 30409718 NR Description: RAD23-like protein [Arabidopsis thaliana]
  misc_feature (1)..(381): NCBI GI NO: 30409722 NR Description: RAD23-like protein [Arabidopsis thaliana]
MKVSVKTLKGSSFQIEVEPTDKVAAVKKVIENMQEQASYPADQQVLIHQGKVLSDDTTLEENQVTENNFLVIMLRQNKGSSSAAPAKTTANQAPPTQTVPVVPPQTSAAPAAPAPIVPVSALAATATASAAPAVAVSTEADSYGQAASNLVAGSNLEGTIQSILEMGGGIWDRDTVLRALRVAYNNPERAVEYLYSGIPEQMDVPTSPPSIQPVNPVQAAQAAQTAAPSGPNANPLDLFPQSLPNASANAGTGNLDVLRNNVQFQNLLGLVQANPQILQPLLQELGKQNPQVMQLIQENQAEFMRMINEPLEGDEENEMMLDQMADAAETIAVTPEENEAILRLEGMGFDRALVLEVFFACNKNEQLTANYLLDHMHEFDNDDGLGGPPL

SEQ ID NO: 25259 - protein, 358 aa, Zea mays subsp. mays
  peptide (1)..(358): Ceres Seq. ID no. 12410148
  misc_feature (123)..(165): Pfam Name: Pfam Description:  UBA/TS-N domain
  misc_feature (1)..(357): NCBI GI NO: 7446462 NR Description: RAD23 protein homolog - rice
  misc_feature (1)..(349): NCBI GI NO: 15240922 NR Description: DNA repair protein RAD23 homolog
  misc_feature (1)..(349): NCBI GI NO: 14335004 NR Description: unknown protein [Arabidopsis thaliana]
  misc_feature (1)..(348): NCBI GI NO: 5640111 NR Description: RAD23 protein [Lycopersicon esculentum]
  misc_feature (1)..(348): NCBI GI NO: 7446459 NR Description: RAD23 protein, isoform I - carrot
  misc_feature (48)..(350): NCBI GI NO: 38175472 NR Description: putative osRAD23
  misc_feature (1)..(349): NCBI GI NO: 15221013 NR Description: hypothetical protein; protein id: At1g16190.1
  misc_feature (1)..(349): NCBI GI NO: 30699439 NR Description: DNA repair protein RAD23 -related
  misc_feature (1)..(349): NCBI GI NO: 30409718 NR Description: RAD23-like protein [Arabidopsis thaliana]
  misc_feature (1)..(349): NCBI GI NO: 30409722 NR Description: RAD23-like protein [Arabidopsis thaliana]
MQEQASYPADQQVLIHQGKVLSDDTTLEENQVTENNFLVIMLRQNKGSSSAAPAKTTANQAPPTQTVPVVPPQTSAAPAAPAPIVPVSALAATATASAAPAVAVSTEADSYGQAASNLVAGSNLEGTIQSILEMGGGIWDRDTVLRALRVAYNNPERAVEYLYSGIPEQMDVPTSPPSIQPVNPVQAAQAAQTAAPSGPNANPLDLFPQSLPNASANAGTGNLDVLRNNVQFQNLLGLVQANPQILQPLLQELGKQNPQVMQLIQENQAEFMRMINEPLEGDEENEMMLDQMADAAETIAVTPEENEAILRLEGMGFDRALVLEVFFACNKNEQLTANYLLDHMHEFDNDDGLGGPPL

SEQ ID NO: 25260 - DNA, 1486 bp, Zea mays subsp. mays
  misc_feature (1)..(1486): Ceres Seq. ID no. 12406450
  misc_feature (1207)..(1207): n is a, c, t, g, unknown, or other
actagctccactccaccacacacaccgcgcagctagctgtcaccggagcaagaaggaagaaaaaccagcggcaccgatcgatcgacgacacgcgcgcgatcgaggtgaggagcgaaagaaaaggtggccttttcgaagccgccggacggagtgtagcgctagctagctccccaggccggagaggaggatggtgggacgaggagcggcgacggccctcgtgtgggcggcggtggtggcggtcgcgacggtggtgtcgcgggcgcagcagctgcaggtggggttctacgacacgctgtgcccggcggcggagatcatcgtgcaggaggaggtgagcaaggcggcgtccggcaaccccggcgtcgccgcgggcctcctgcgcctccacttccacgactgcttcgtcagggggtgcgacgcgtcggtgctgctggactcgtcggcgggcaaccaggcggagaaggacgcggcgcccaacgccagcctgcgcgggttcgaggtcatcgacagcgccaagacgcggctggagcaggcctgcttcggcgtcgtctcctgcgccgacgtcctcgccttcgccgcccgcgacgccctcgcgctggtcgggggcgacgcgtaccaggtgccggcggggcggagggacggcaacgtctcctcggcgcaggaggcgggcgcgaacctgccgccgccgacggcgagcgcgagccagctgacgcaggcgttcggcgccaaggggctgagccaggccgagatggtggcgctgtcgggggcgcacacggtgggcgcggcgcgctgcagctccttcgcgccccgcctctactcgtacgggcccagcggcgcggggcaggacccgtccatggaccccgcgtacctggcggcgctggcgcagcagtgcccgccgcaggggaccggcgccgccgacccgcccctccccatggaccccgtcacgcccaccgccttcgacaccaactactacgccaacctggtcgccaggcgcggcctgctcgcctccgaccaggcgctgctcgccgacccggccaccgccgcgcaggtgctcgcctacaccaacagccccgccaccttccagaccgacttcgtcgccgccatgatcaagatgggtgccatacaggtgctcaaccggcacagccggcaccgtccggaccaactgcagggtggctagctagctagctcatccatgagaatgtacctgtanactcatgtgcttaaaatcatacgacgaaactgtacgtacggcgtagagtggtgtggcggggtccaatgattcagattgtacgtacgtgtccatcgatccaactgtagttgtgtacgcagtacagtacgtgctagctacggatcagttgcttatatatagcttgtgcgtttttttacactttcttttgtccttttggtttataatttttattaagatatacaaatatttctcttcagattcggatcgaatacaaatattaaaaatggttcgttctttttc

SEQ ID NO: 25261 - protein, 328 aa, Zea mays subsp. mays
  peptide (1)..(328): Ceres Seq. ID no. 12406451
  misc_feature (44)..(293): Pfam Name: Pfam Description:  Peroxidase
  misc_feature (21)..(314): NCBI GI NO: 34902230 NR Description: Putative peroxidase
  misc_feature (5)..(318): NCBI GI NO: 37536450 NR Description: putative peroxidase
  misc_feature (9)..(314): NCBI GI NO: 34902232 NR Description: Putative peroxidase
  misc_feature (28)..(314): NCBI GI NO: 34902236 NR Description: Putative peroxidase
  misc_feature (11)..(314): NCBI GI NO: 4760700 NR Description: peroxidase 1 [Scutellaria baicalensis]
  misc_feature (10)..(314): NCBI GI NO: 7453849 NR Description: peroxidase prx12 precursor [Spinacia oleracea]
  misc_feature (13)..(314): NCBI GI NO: 4760702 NR Description: peroxidase 2 [Scutellaria baicalensis]
  misc_feature (10)..(313): NCBI GI NO: 34894766 NR Description: putative peroxidase
  misc_feature (1)..(314): NCBI GI NO: 34894758 NR Description: putative peroxidase
  misc_feature (28)..(313): NCBI GI NO: 12056448 NR Description: peroxidase [Zea mays]
MVGRGAATALVWAAVVAVATVVSRAQQLQVGFYDTLCPAAEIIVQEEVSKAASGNPGVAAGLLRLHFHDCFVRGCDASVLLDSSAGNQAEKDAAPNASLRGFEVIDSAKTRLEQACFGVVSCADVLAFAARDALALVGGDAYQVPAGRRDGNVSSAQEAGANLPPPTASASQLTQAFGAKGLSQAEMVALSGAHTVGAARCSSFAPRLYSYGPSGAGQDPSMDPAYLAALAQQCPPQGTGAADPPLPMDPVTPTAFDTNYYANLVARRGLLASDQALLADPATAAQVLAYTNSPATFQTDFVAAMIKMGAIQVLNRHSRHRPDQLQGG

SEQ ID NO: 25262 - DNA, 1381 bp, Zea mays subsp. mays
  misc_feature (1)..(1381): Ceres Seq. ID no. 12364411
gcacgagaccattacctagaacatcctaatcgaaaaatcatccgtttctgtcagttccttttctaaaagaaaaaaatacagtcgcatctcgcctccagcagggtgagttcgcctcggcagggtgtggcataccatggagagctcgtcgccgtcagtgccgttcccgctgctgcaggcgccggtcgagagcacctaccgcgcctgcaccatcccctaccgtttcccctccgacaacccgcgcaaggccacccctgtcgagatccaatggattgacctctttctcaactctgtcccgtccttcaaacagcgggcggagaacgaccccaccgtacccgatgcgcccgcgaaagcggagaagttcgcgcagaggtacacgtcaatgcttgaagagttgaagaagaatccggagagccatggaggaccaccagattgcatacttctttgtaggcttcgtgagctagtactcagagagctgggatttagggatatcttcaagaaggtcaaggatgaggagaatgccaaggctatgtcactttttgagggagttattaagcggaatgacgaaattgaggatgacggcaaaagaattgagaacttggtccgtggaattttagctggaaacatttttgatctaggatctgcacagcttgcagaagtttttgctaaagatggcatgtcatttttggcaagttgccagaatcttgtatctcgaccatgggttattgatgaccttgatgcttttaagagtaaatggaccaagaaatcatgggaaaaggcagttatttttgttgataactctggtgctgatattatcttgggtatattaccatttgcgagggagttgctccgacgtggcacaaaggtgatacttgctgctaatgatatgccttcgatcaacgatgtcacgtatccagagcttgttgagattataaacaagctcaaggatgcagatggaaaactatcaagtgtggacgcatctggcctccttgttgccaactctggcaacgatctgcctgtaattgatttgtctagtgtatcaccagagcttgcctttatggcaaatgatgctgacctggtggtgctcgaaggcatgggaagggcaattgaaactaacctatatgcgcagatgaaatgtgactcgatcaagattggaatggttaagcatcctgaggtcgcccaatttttaggaggaagactttatgattgcgtcttcaagttcaatgaggcctgaactacgagatacatttgataacacaataccggccgcactagtggtggcttagttctccccaagatcagcttgttaggtgttgcactgaacataattttgttagtatcagcaataatttcaatcaaaataagctacgtatatgtggtggtt

SEQ ID NO: 25263 - protein, 365 aa, Zea mays subsp. mays
  peptide (1)..(365): Ceres Seq. ID no. 12364412
  misc_feature (37)..(362): Pfam Name: Pfam Description:  Protein of unknown function DUF89
  misc_feature (1)..(364): NCBI GI NO: 21554145 NR Description: unknown [Arabidopsis thaliana]
  misc_feature (1)..(364): NCBI GI NO: 18418688 NR Description: putative protein; protein id: At4g35360
  misc_feature (1)..(364): NCBI GI NO: 21554574 NR Description: unknown [Arabidopsis thaliana]
  misc_feature (1)..(364): NCBI GI NO: 18398388 NR Description: expressed protein; protein id: At2g17340
  misc_feature (8)..(180): NCBI GI NO: 15227811 NR Description: unknown protein; protein id: At2g17320.1
  misc_feature (264)..(364): NCBI GI NO: 15227811 NR Description: unknown protein; protein id: At2g17320.1
  misc_feature (164)..(223): NCBI GI NO: 15227811 NR Description: unknown protein; protein id: At2g17320.1
  misc_feature (1)..(167): NCBI GI NO: 25370535 NR Description: hypothetical protein At2g17340
  misc_feature (243)..(364): NCBI GI NO: 25370535 NR Description: hypothetical protein At2g17340
  misc_feature (8)..(171): NCBI GI NO: 7486028 NR Description: hypothetical protein F23E12
MESSSPSVPFPLLQAPVESTYRACTIPYRFPSDNPRKATPVEIQWIDLFLNSVPSFKQRAENDPTVPDAPAKAEKFAQRYTSMLEELKKNPESHGGPPDCILLCRLRELVLRELGFRDIFKKVKDEENAKAMSLFEGVIKRNDEIEDDGKRIENLVRGILAGNIFDLGSAQLAEVFAKDGMSFLASCQNLVSRPWVIDDLDAFKSKWTKKSWEKAVIFVDNSGADIILGILPFARELLRRGTKVILAANDMPSINDVTYPELVEIINKLKDADGKLSSVDASGLLVANSGNDLPVIDLSSVSPELAFMANDADLVVLEGMGRAIETNLYAQMKCDSIKIGMVKHPEVAQFLGGRLYDCVFKFNEA

SEQ ID NO: 25264 - protein, 283 aa, Zea mays subsp. mays
  peptide (1)..(283): Ceres Seq. ID no. 12364413
  misc_feature (1)..(280): Pfam Name: Pfam Description:  Protein of unknown function DUF89
  misc_feature (1)..(282): NCBI GI NO: 21554145 NR Description: unknown [Arabidopsis thaliana]
  misc_feature (1)..(282): NCBI GI NO: 18418688 NR Description: putative protein; protein id: At4g35360
  misc_feature (1)..(282): NCBI GI NO: 21554574 NR Description: unknown [Arabidopsis thaliana]
  misc_feature (1)..(282): NCBI GI NO: 18398388 NR Description: expressed protein; protein id: At2g17340
  misc_feature (1)..(98): NCBI GI NO: 15227811 NR Description: unknown protein; protein id: At2g17320.1
  misc_feature (182)..(282): NCBI GI NO: 15227811 NR Description: unknown protein; protein id: At2g17320.1
  misc_feature (82)..(141): NCBI GI NO: 15227811 NR Description: unknown protein; protein id: At2g17320.1
  misc_feature (1)..(85): NCBI GI NO: 25370535 NR Description: hypothetical protein At2g17340
  misc_feature (161)..(282): NCBI GI NO: 25370535 NR Description: hypothetical protein At2g17340
  misc_feature (1)..(89): NCBI GI NO: 7486028 NR Description: hypothetical protein F23E12
MLEELKKNPESHGGPPDCILLCRLRELVLRELGFRDIFKKVKDEENAKAMSLFEGVIKRNDEIEDDGKRIENLVRGILAGNIFDLGSAQLAEVFAKDGMSFLASCQNLVSRPWVIDDLDAFKSKWTKKSWEKAVIFVDNSGADIILGILPFARELLRRGTKVILAANDMPSINDVTYPELVEIINKLKDADGKLSSVDASGLLVANSGNDLPVIDLSSVSPELAFMANDADLVVLEGMGRAIETNLYAQMKCDSIKIGMVKHPEVAQFLGGRLYDCVFKFNEA

SEQ ID NO: 25265 - protein, 234 aa, Zea mays subsp. mays
  peptide (1)..(234): Ceres Seq. ID no. 12364414
  misc_feature (1)..(231): Pfam Name: Pfam Description:  Protein of unknown function DUF89
  misc_feature (1)..(233): NCBI GI NO: 21554145 NR Description: unknown [Arabidopsis thaliana]
  misc_feature (1)..(233): NCBI GI NO: 18418688 NR Description: putative protein; protein id: At4g35360
  misc_feature (1)..(233): NCBI GI NO: 21554574 NR Description: unknown [Arabidopsis thaliana]
  misc_feature (1)..(233): NCBI GI NO: 18398388 NR Description: expressed protein; protein id: At2g17340
  misc_feature (1)..(49): NCBI GI NO: 15227811 NR Description: unknown protein; protein id: At2g17320.1
  misc_feature (133)..(233): NCBI GI NO: 15227811 NR Description: unknown protein; protein id: At2g17320.1
  misc_feature (33)..(92): NCBI GI NO: 15227811 NR Description: unknown protein; protein id: At2g17320.1
  misc_feature (1)..(36): NCBI GI NO: 25370535 NR Description: hypothetical protein At2g17340
  misc_feature (112)..(233): NCBI GI NO: 25370535 NR Description: hypothetical protein At2g17340
  misc_feature (1)..(40): NCBI GI NO: 7486028 NR Description: hypothetical protein F23E12
MSLFEGVIKRNDEIEDDGKRIENLVRGILAGNIFDLGSAQLAEVFAKDGMSFLASCQNLVSRPWVIDDLDAFKSKWTKKSWEKAVIFVDNSGADIILGILPFARELLRRGTKVILAANDMPSINDVTYPELVEIINKLKDADGKLSSVDASGLLVANSGNDLPVIDLSSVSPELAFMANDADLVVLEGMGRAIETNLYAQMKCDSIKIGMVKHPEVAQFLGGRLYDCVFKFNEA

SEQ ID NO: 25266 - DNA, 1389 bp, Zea mays subsp. mays
  misc_feature (1)..(1389): Ceres Seq. ID no. 13498794
gcattgagcgcgattcattcccctcgtgggctcccagttcagtaaaccctacgccctgcggcacacacccatctcgccgcgccgccgcgtaaaccccacccgagcccatctcgccctcgcgcctccccgccctcgcgcaggcgcaacaatggcggccgcctcgaggggcctgctcgcgcgcctccgtgtcctctcactctccggcggcgggagcccgtggctccgcttccccgccttcccggctcttctccgcggaggccttcgtctcccattccgatgacgacgacgctgggggcgagggaggaggcgggggccggatcatcgaggcacggtccggggtgatgggccccacctcgcggcgcaccggcgtcatcggcgtcaagtgcgggatgtcggcgatgtgggacaagtggggcgccaaggtgcccatcaccgtcctctgggtcgacgacaacgttgttacccaggtcaagaccgccgagaaggagggtttcttcgccctacagcttggagcaggtcaaaagaaggaaaaacacctaacaaagcctgaagttggccactttagagcacagggagtgcctctgaaaagaaagctaagggaatttcctgtcactgaggatgcgcttcttcctgttggcacaagcatcacagttcgtcactttgttcctggacaatttgttgatgtcactggaatcacgaaggggaaaggttttgcaggtgtaatgaaaagatatggttttggtgggatgcctgcatcacatggaacatctttggcgcatcgcagtggtggctctactggtcaaagagatgctcctggaagggttttcaaaaacagaaaaatgcctggacgcatgggtggtgtgcaacgcacagtgaagaatgtatgggtctatcaaatagacccagccaggaacttactgtatctgaagggccaggttcctggtcctcaaggtagctttattttcgttaaggattctatatataagaaacctgacacggctttgctcccatttcctacatacttcacgcgtgaaggtgagcctgaagacttggagcccctgattgctgatcttggtgatgttgacccattcatggcagccgattaagacaatgcacaaagttggttaattcctttttgtgttctaagcactccttgagctcgtccattccacgagattgtcaaactctcgatggatgtgagcagttcctgaatcacaagctttatccggttactggccagcctgatcaatgttgttccatgtacattacctggcaagtataccagtgctctaatggtttttagatgattgttttgattgaccgaatataacctttttctcaataagttgtacgcggagccacaagtagtatataaaatcagaatatttc

SEQ ID NO: 25267 - protein, 254 aa, Zea mays subsp. mays
  peptide (1)..(254): Ceres Seq. ID no. 13498795
  misc_feature (14)..(210): Pfam Name: Pfam Description:  Ribosomal protein L3
  misc_feature (1)..(254): NCBI GI NO: 34902796 NR Description: unnamed protein product
  misc_feature (1)..(254): NCBI GI NO: 18401521 NR Description: ribosomal protein L3p family
  misc_feature (1)..(236): NCBI GI NO: 23108389 NR Description: hypothetical protein
  misc_feature (1)..(233): NCBI GI NO: 16125497 NR Description: ribosomal protein L3 [Caulobacter crescentus CB15]
  misc_feature (7)..(225): NCBI GI NO: 23014088 NR Description: hypothetical protein
  misc_feature (122)..(254): NCBI GI NO: 21450877 NR Description: putative ribosomal protein L3
  misc_feature (7)..(223): NCBI GI NO: 22956505 NR Description: hypothetical protein [Rhodobacter sphaeroides]
  misc_feature (7)..(228): NCBI GI NO: 22965161 NR Description: hypothetical protein [Rhodopseudomonas palustris]
  misc_feature (7)..(235): NCBI GI NO: 27380511 NR Description: 50S ribosomal protein L3
  misc_feature (2)..(223): NCBI GI NO: 17987040 NR Description: LSU ribosomal protein L3P [Brucella melitensis]
MGPTSRRTGVIGVKCGMSAMWDKWGAKVPITVLWVDDNVVTQVKTAEKEGFFALQLGAGQKKEKHLTKPEVGHFRAQGVPLKRKLREFPVTEDALLPVGTSITVRHFVPGQFVDVTGITKGKGFAGVMKRYGFGGMPASHGTSLAHRSGGSTGQRDAPGRVFKNRKMPGRMGGVQRTVKNVWVYQIDPARNLLYLKGQVPGPQGSFIFVKDSIYKKPDTALLPFPTYFTREGEPEDLEPLIADLGDVDPFMAAD

SEQ ID NO: 25268 - protein, 238 aa, Zea mays subsp. mays
  peptide (1)..(238): Ceres Seq. ID no. 13498796
  misc_feature (1)..(194): Pfam Name: Pfam Description:  Ribosomal protein L3
  misc_feature (1)..(238): NCBI GI NO: 34902796 NR Description: unnamed protein product
  misc_feature (1)..(238): NCBI GI NO: 18401521 NR Description: ribosomal protein L3p family
  misc_feature (1)..(220): NCBI GI NO: 23108389 NR Description: hypothetical protein
  misc_feature (1)..(217): NCBI GI NO: 16125497 NR Description: ribosomal protein L3 [Caulobacter crescentus CB15]
  misc_feature (1)..(209): NCBI GI NO: 23014088 NR Description: hypothetical protein
  misc_feature (106)..(238): NCBI GI NO: 21450877 NR Description: putative ribosomal protein L3
  misc_feature (1)..(207): NCBI GI NO: 22956505 NR Description: hypothetical protein [Rhodobacter sphaeroides]
  misc_feature (1)..(212): NCBI GI NO: 22965161 NR Description: hypothetical protein [Rhodopseudomonas palustris]
  misc_feature (1)..(219): NCBI GI NO: 27380511 NR Description: 50S ribosomal protein L3
  misc_feature (1)..(207): NCBI GI NO: 17987040 NR Description: LSU ribosomal protein L3P [Brucella melitensis]
MSAMWDKWGAKVPITVLWVDDNVVTQVKTAEKEGFFALQLGAGQKKEKHLTKPEVGHFRAQGVPLKRKLREFPVTEDALLPVGTSITVRHFVPGQFVDVTGITKGKGFAGVMKRYGFGGMPASHGTSLAHRSGGSTGQRDAPGRVFKNRKMPGRMGGVQRTVKNVWVYQIDPARNLLYLKGQVPGPQGSFIFVKDSIYKKPDTALLPFPTYFTREGEPEDLEPLIADLGDVDPFMAAD

SEQ ID NO: 25269 - protein, 235 aa, Zea mays subsp. mays
  peptide (1)..(235): Ceres Seq. ID no. 13498797
  misc_feature (1)..(191): Pfam Name: Pfam Description:  Ribosomal protein L3
  misc_feature (1)..(235): NCBI GI NO: 34902796 NR Description: unnamed protein product
  misc_feature (1)..(235): NCBI GI NO: 18401521 NR Description: ribosomal protein L3p family
  misc_feature (1)..(217): NCBI GI NO: 23108389 NR Description: hypothetical protein
  misc_feature (1)..(214): NCBI GI NO: 16125497 NR Description: ribosomal protein L3 [Caulobacter crescentus CB15]
  misc_feature (1)..(206): NCBI GI NO: 23014088 NR Description: hypothetical protein
  misc_feature (103)..(235): NCBI GI NO: 21450877 NR Description: putative ribosomal protein L3
  misc_feature (1)..(204): NCBI GI NO: 22956505 NR Description: hypothetical protein [Rhodobacter sphaeroides]
  misc_feature (1)..(209): NCBI GI NO: 22965161 NR Description: hypothetical protein [Rhodopseudomonas palustris]
  misc_feature (1)..(216): NCBI GI NO: 27380511 NR Description: 50S ribosomal protein L3
  misc_feature (1)..(204): NCBI GI NO: 17987040 NR Description: LSU ribosomal protein L3P [Brucella melitensis]
MWDKWGAKVPITVLWVDDNVVTQVKTAEKEGFFALQLGAGQKKEKHLTKPEVGHFRAQGVPLKRKLREFPVTEDALLPVGTSITVRHFVPGQFVDVTGITKGKGFAGVMKRYGFGGMPASHGTSLAHRSGGSTGQRDAPGRVFKNRKMPGRMGGVQRTVKNVWVYQIDPARNLLYLKGQVPGPQGSFIFVKDSIYKKPDTALLPFPTYFTREGEPEDLEPLIADLGDVDPFMAAD

SEQ ID NO: 25270 - DNA, 1255 bp, Zea mays subsp. mays
  misc_feature (1)..(1255): Ceres Seq. ID no. 12347891
cttcccttcctccttccttcccaggagccaggaactccattgcattatttccaccccaagaacacagcacagagtcggatccgaatccacaggagaggcataagcacaactcactccccactccccactcatcagtccctccacccatcagctagccatgggcaaggactgcggcaaacacggcgacgacgacctccggcgctcgtgcaggcgcctgctagccatcctcgtggtcctcgcgctgaccgttggcgtcgtcgcgctgatcgtctacctggtgctccgccccacgcacccgcgcttctacctgcaggacgcgtcgctccggcagctggacctctccaacgccaccaccagcaccagcaccagcaccctgctctccaccgcgatccaggtgacgctggcgtcgcgcaacccgaacgagcgcgtcggggtctactacgaccgcctcgacgtgtacgcgtcgtacaagtaccagcagctcacggtggcggcgtcgctgccgcccgcgtaccagggccacggggacgtcggcgtctggtcgccggtgctggccggtcccaacgtgcccctcgcgccctacctcgccgacgcgctccgccaggactgccaggcggggtacctcgtcctccaggtcaagctcgacggccgcgtccgctggaaggtcggcagctgcgtctccagccactaccacctcttcgtcacctgcccggccttcctcgtcaccgccggcggcaacggcgcgcccggggccgccgggttcaggttccagaccaccacctactgccacgtcgaggtctaggtctaggtctagccggccccttgcctgtctgtgctgctgtgttgtccgtactccgtatacaaacagaggccgccgcctgcgaaggaaacagagatacaaaggcctgccttgcgccatatatcatgggatggctgcctgtctccctcactctctctctctctctctcagctgcactgcctgcattgctggtgtgttactgctgcagttatgcggacgtaaaggatggtaaaaatttcctactttttttcttcttcttttaagtaagattctcctttaacgtacgatcaattacagttggaggggtagcagtaacagtaatttctatgtccagccatttcggtgagactactttcaacacagagaaaaccgattgtacctttgcgcgtctctcttaattaagtcttatgactgatttggtaatcagagaattgaatagaaatgaaatttctctcc

SEQ ID NO: 25271 - protein, 353 aa, Zea mays subsp. mays
  peptide (1)..(353): Ceres Seq. ID no. 12347892
LPFLLPSQEPGTPLHYFHPKNTAQSRIRIHRRGISTTHSPLPTHQSLHPSASHGQGLRQTRRRRPPALVQAPASHPRGPRADRWRRRADRLPGAPPHAPALLPAGRVAPAAGPLQRHHQHQHQHPALHRDPGDAGVAQPERARRGLLRPPRRVRVVQVPAAHGGGVAAARVPGPRGRRRLVAGAGRSQRAPRALPRRRAPPGLPGGVPRPPGQARRPRPLEGRQLRLQPLPPLRHLPGLPRHRRRQRRARGRRVQVPDHHLLPRRGLGLGLAGPLPVCAAVLSVLRIQTEAAACEGNRDTKACLAPYIMGWLPVSLTLSLSLSAALPALLVCYCCSYADVKDGKNFLLFFFFF

SEQ ID NO: 25272 - protein, 214 aa, Zea mays subsp. mays
  peptide (1)..(214): Ceres Seq. ID no. 12347893
  misc_feature (1)..(194): NCBI GI NO: 38344036 NR Description: OJ991214_12.17
  misc_feature (3)..(214): NCBI GI NO: 38637038 NR Description: harpin-induced protein 1 family (HIN1)-like
  misc_feature (3)..(214): NCBI GI NO: 15229906 NR Description: hairpin-induced protein, putative
  misc_feature (3)..(214): NCBI GI NO: 15240001 NR Description: hairpin-induced protein, putative
  misc_feature (3)..(214): NCBI GI NO: 32488715 NR Description: OSJNBa0088H09.16
  misc_feature (3)..(214): NCBI GI NO: 18399308 NR Description: VAMP protein SEC22; protein id: At3g11660
  misc_feature (3)..(214): NCBI GI NO: 28392929 NR Description: putative VAMP protein SEC22 [Arabidopsis thaliana]
  misc_feature (2)..(214): NCBI GI NO: 22326984 NR Description: similar to hairpin-induced protein, putative
  misc_feature (1)..(198): NCBI GI NO: 15231227 NR Description: hairpin-induced protein, putative
  misc_feature (3)..(214): NCBI GI NO: 15227538 NR Description: hairpin-induced protein, putative
MGKDCGKHGDDDLRRSCRRLLAILVVLALTVGVVALIVYLVLRPTHPRFYLQDASLRQLDLSNATTSTSTSTLLSTAIQVTLASRNPNERVGVYYDRLDVYASYKYQQLTVAASLPPAYQGHGDVGVWSPVLAGPNVPLAPYLADALRQDCQAGYLVLQVKLDGRVRWKVGSCVSSHYHLFVTCPAFLVTAGGNGAPGAAGFRFQTTTYCHVEV

SEQ ID NO: 25273 - DNA, 779 bp, Zea mays subsp. mays
  misc_feature (1)..(779): Ceres Seq. ID no. 13492985
ccacctcaattattgcccacccatccccgctccctcctctcctctcctcccgtcccacccatctcctcgcaccagcgccggggaaatggcggccgcgctgtggacgctgctgctggtggtggccctgtcggcggcgctggcgctggcctcgaaccgccccgtggcggcggcggcgaccgcggcggcggaggcggcgaacgaggtgctccgcgcgcaccagctgccggggggcctgctgccggcggggatcacggcgttccggcacgacgccgccacgggagcgttcgaggcccggctggacgcgccctgcacggcgcgcttcgaggtcggcctccgctacaacgccaccgtctccggggtcatcagccccggccagatcgccgacatctccggcgtcgccgcgcaggacctcttcatgtggttccccgtccacgacatcaaggtcgacatcccctcctccggcgtcatctacttcaacgtcggcgtcgtcaagaagcacctcccgctcgccgtcttcgacgcgccgccggcctgcacgcccgacccgctcctgcaggtcatttctcatcctagcctcactctctcgatggcacgagctctaattcatcgatcttgggaccagtgacctccttgacatcattcaatcctcaatgatcttgaatgttggcacaacctttatacccagtttctttactgaaagctgcaagtagcatgcgcaggagcttttcagcatgtcatattccacggagcagagagtcgtgaatacacaagagatacgg

SEQ ID NO: 25274 - protein, 207 aa, Zea mays subsp. mays
  peptide (1)..(207): Ceres Seq. ID no. 13492986
  misc_feature (57)..(183): Pfam Name: Pfam Description:  Protein of unknown function, DUF538
  misc_feature (57)..(184): NCBI GI NO: 34906900 NR Description: P0470A12.30
  misc_feature (36)..(180): NCBI GI NO: 6041854 NR Description: unknown protein [Arabidopsis thaliana]
  misc_feature (36)..(180): NCBI GI NO: 18397959 NR Description: expressed protein [Arabidopsis thaliana]
  misc_feature (33)..(180): NCBI GI NO: 34898576 NR Description: P0534A03.14
  misc_feature (36)..(178): NCBI GI NO: 6041844 NR Description: unknown protein [Arabidopsis thaliana]
  misc_feature (36)..(178): NCBI GI NO: 22330911 NR Description: expressed protein [Arabidopsis thaliana]
  misc_feature (36)..(178): NCBI GI NO: 21592465 NR Description: unknown [Arabidopsis thaliana]
  misc_feature (67)..(179): NCBI GI NO: 9759120 NR Description: gb|AAF02163
  misc_feature (67)..(179): NCBI GI NO: 18417957 NR Description: expressed protein [Arabidopsis thaliana]
  misc_feature (67)..(179): NCBI GI NO: 21536941 NR Description: unknown [Arabidopsis thaliana]
HLNYCPPIPAPSSPLLPSHPSPRTSAGEMAAALWTLLLVVALSAALALASNRPVAAAATAAAEAANEVLRAHQLPGGLLPAGITAFRHDAATGAFEARLDAPCTARFEVGLRYNATVSGVISPGQIADISGVAAQDLFMWFPVHDIKVDIPSSGVIYFNVGVVKKHLPLAVFDAPPACTPDPLLQVISHPSLTLSMARALIHRSWDQ

SEQ ID NO: 25275 - protein, 199 aa, Zea mays subsp. mays
  peptide (1)..(199): Ceres Seq. ID no. 13492987
  misc_feature (62)..(189): Pfam Name: Pfam Description:  Cupin
  misc_feature (45)..(169): NCBI GI NO: 29250446 NR Description: GLP_39_87477_88058 [Giardia lamblia ATCC 50803]
  misc_feature (43)..(185): NCBI GI NO: 5821151 NR Description: RNA binding protein [Homo sapiens]
  misc_feature (43)..(185): NCBI GI NO: 6634015 NR Description: KIAA0324 protein [Homo sapiens]
  misc_feature (43)..(185): NCBI GI NO: 7512967 NR Description: hypothetical protein KIAA0324 - human (fragment)
  misc_feature (43)..(185): NCBI GI NO: 19923466 NR Description: splicing coactivator subunit SRm300
  misc_feature (43)..(186): NCBI GI NO: 28972153 NR Description: mKIAA0324 protein [Mus musculus]
  misc_feature (43)..(185): NCBI GI NO: 28972153 NR Description: mKIAA0324 protein [Mus musculus]
  misc_feature (43)..(186): NCBI GI NO: 30424862 NR Description: RIKEN cDNA 5033413A03 [Mus musculus]
  misc_feature (43)..(185): NCBI GI NO: 30424862 NR Description: RIKEN cDNA 5033413A03 [Mus musculus]
  misc_feature (44)..(186): NCBI GI NO: 7949115 NR Description: Ser/Arg-related nuclear matrix protein
TSIIAHPSPLPPLLSSRPTHLLAPAPGKWRPRCGRCCWWWPCRRRWRWPRTAPWRRRRPRRRRRRTRCSARTSCRGACCRRGSRRSGTTPPRERSRPGWTRPARRASRSASATTPPSPGSSAPARSPTSPASPRRTSSCGSPSTTSRSTSPPPASSTSTSASSRSTSRSPSSTRRRPARPTRSCRSFLILASLSRWHEL

SEQ ID NO: 25276 - protein, 190 aa, Zea mays subsp. mays
  peptide (1)..(190): Ceres Seq. ID no. 13492988
  misc_feature (28)..(160): Pfam Name: Pfam Description:  bZIP Maf transcription factor
  misc_feature (27)..(100): NCBI GI NO: 38048369 NR Description: similar to Drosophila melanogaster lcs
PPQLLPTHPRSLLSSPPVPPISSHQRRGNGGRAVDAAAGGGPVGGAGAGLEPPRGGGGDRGGGGGERGAPRAPAAGGPAAGGDHGVPARRRHGSVRGPAGRALHGALRGRPPLQRHRLRGHQPRPDRRHLRRRRAGPLHVVPRPRHQGRHPLLRRHLLQRRRRQEAPPARRLRRAAGLHARPAPAGHFSS

SEQ ID NO: 25277 - protein, 179 aa, Zea mays subsp. mays
  peptide (1)..(179): Ceres Seq. ID no. 13492989
  misc_feature (29)..(155): Pfam Name: Pfam Description:  Protein of unknown function, DUF538
  misc_feature (29)..(156): NCBI GI NO: 34906900 NR Description: P0470A12.30
  misc_feature (8)..(152): NCBI GI NO: 6041854 NR Description: unknown protein [Arabidopsis thaliana]
  misc_feature (8)..(152): NCBI GI NO: 18397959 NR Description: expressed protein [Arabidopsis thaliana]
  misc_feature (5)..(152): NCBI GI NO: 34898576 NR Description: P0534A03.14
  misc_feature (8)..(150): NCBI GI NO: 6041844 NR Description: unknown protein [Arabidopsis thaliana]
  misc_feature (8)..(150): NCBI GI NO: 22330911 NR Description: expressed protein [Arabidopsis thaliana]
  misc_feature (8)..(150): NCBI GI NO: 21592465 NR Description: unknown [Arabidopsis thaliana]
  misc_feature (39)..(151): NCBI GI NO: 9759120 NR Description: gb|AAF02163
  misc_feature (39)..(151): NCBI GI NO: 18417957 NR Description: expressed protein [Arabidopsis thaliana]
  misc_feature (39)..(151): NCBI GI NO: 21536941 NR Description: unknown [Arabidopsis thaliana]
MAAALWTLLLVVALSAALALASNRPVAAAATAAAEAANEVLRAHQLPGGLLPAGITAFRHDAATGAFEARLDAPCTARFEVGLRYNATVSGVISPGQIADISGVAAQDLFMWFPVHDIKVDIPSSGVIYFNVGVVKKHLPLAVFDAPPACTPDPLLQVISHPSLTLSMARALIHRSWDQ

SEQ ID NO: 25278 - DNA, 2009 bp, Zea mays subsp. mays
  misc_feature (1)..(2009): Ceres Seq. ID no. 12372657
gcacgagaccattacctagaacatcctaatcaaaactgttcacggccctcgccaaatccccaaaatccaagcgcgtcgccgacggcattgcgtcgccattgcctccaaatccgtgtgcgactcgcgtgatcccagatcccgctcgccgtattccccgcagtgacctctgacaagagcattttccgcgcggaaaatgccgccgtttcggccggctcttggaagggcgcttcttctgtaggaccgcggcgcgaggctgcgatggcgttcgccgccagcgagggaaatctttccccggcgctgcccctggccactctgatcggccgcgagctccgcggcgacggtaccgagcgcccgcacgtgcgctacggccactctggcttcgccaagcgcggcgaggactacttcctcgtcaagcccgactgcctccgcgtccccggagacccttcctcctctttctccgtcttcgctgtattcgacggccacaatggcgtgtcggcggcggtgttcagcaaggagaaactgctggagcacgtgatgagcgcggtgcccgagggcatcagtcgcgaggactggctacaggcgctgccgcgcgcgctcgtcgcaggattcgtcaagacagacattgacttccagcgcaagggtgagacgtcaggaacgacggcgacacttgttgtggttgatgggttcacggtcactgtcgcgtcggtgggagattctaggtgcattctggatacacagggaggcgaggtctcattgctgactgtggatcaccggctagaggagaatgcagaggagcgtgagcgcgtcacagcgagtggaggagaggtcagccggcttaatctctgtggtggacaggaggtgggtcctctccgatgctggccaggtggattgtgcctttcaaggtcaattggggatactgatgtcggcgagttcatcgtaccgattccacatgtcaagcaagtgaagctcccaaatactggtggaagactaataattgcatcagatggaatatgggacgctctgtcctcagagagtgctgctcaggcatgccggggattgcgtgcagaactggctgcaaaacttgttgttaagcaagctctgaagacaagtgggctgaaagatgacaccacatgtgtggttgtcgacatcatcccatctgatcattgttcaacaccaccagcattgtctccaaagaaaaatcagaacaagttgaagcatcttatttttggtaaaaggtctcatagttctgttggaaagctcagcaaatctgcttcattgggttcagtggaagaaatattcgaggagggatctgcaatgttggaagaaaggttgggaagtaattttccaccaaaagcaaatctgcctccatttcgctgtgcaatctgccaagtggaccaagagccattcgaaggtttaatgacggacaatgtaggtggctgctgctcaaccccatcaacaccatggggtggtccttatctttgctcaggctgtaggaaaaagaacgacgcgatggaaggtaaacgatcgaatcgttcaacgacgtgcaggtgaaggttctgataggaatcactgggactgggtcctgtgatcctgtcgtgcaagcttgcaaagtagtctccgatttcggttttctgctccttgtaaaaagagaagaataaaccgtctgtcgtttgattgaagtattgttcggtgaaaactaactgaactccagcctgatctgaaaaaaccggggtactaataacaagcctgatttctattgacatcccctatcaaactttcgtttgctctgagaggatagctgacagaactttgaggctgtagttttgtgaacccttagcatgtagagggaaatgagtagcttaacaatgttttatagaacgatggtgtggcttctcattgttgctttagaatgcattttgtgtttgtggagcaaaaaaaaaaaaaaaaaagcttcgggtggacccggtcaacttcaagctcctaagccactgcctgctggtgagcccatc

SEQ ID NO: 25279 - protein, 430 aa, Zea mays subsp. mays
  peptide (1)..(430): Ceres Seq. ID no. 12372658
  misc_feature (1)..(430): NCBI GI NO: 34394411 NR Description: protein phosphatase 2C-like
  misc_feature (1)..(357): NCBI GI NO: 34898168 NR Description: protein phosphatase 2C-like
  misc_feature (14)..(427): NCBI GI NO: 15217454 NR Description: putative protein phosphatase 2C
  misc_feature (14)..(422): NCBI GI NO: 15221404 NR Description: putative protein phosphatase; protein id:At1g68410
  misc_feature (14)..(354): NCBI GI NO: 16930415 NR Description: At1g09160/T12M4_13 [Arabidopsis thaliana]
  misc_feature (31)..(422): NCBI GI NO: 34914644 NR Description: OSJNBa0054L14.21
  misc_feature (14)..(424): NCBI GI NO: 18401703 NR Description: expressed protein; protein id: At1g47380.1
  misc_feature (14)..(424): NCBI GI NO: 15292869 NR Description: unknown protein [Arabidopsis thaliana]
  misc_feature (14)..(422): NCBI GI NO: 14029015 NR Description: Unknown protein [Oryza sativa]
  misc_feature (1)..(430): NCBI GI NO: 38344839 NR Description: OSJNBa0064H22.20
MAFAASEGNLSPALPLATLIGRELRGDGTERPHVRYGHSGFAKRGEDYFLVKPDCLRVPGDPSSSFSVFAVFDGHNGVSAAVFSKEKLLEHVMSAVPEGISREDWLQALPRALVAGFVKTDIDFQRKGETSGTTATLVVVDGFTVTVASVGDSRCILDTQGGEVSLLTVDHRLEENAEERERVTASGGEVSRLNLCGGQEVGPLRCWPGGLCLSRSIGDTDVGEFIVPIPHVKQVKLPNTGGRLIIASDGIWDALSSESAAQACRGLRAELAAKLVVKQALKTSGLKDDTTCVVVDIIPSDHCSTPPALSPKKNQNKLKHLIFGKRSHSSVGKLSKSASLGSVEEIFEEGSAMLEERLGSNFPPKANLPPFRCAICQVDQEPFEGLMTDNVGGCCSTPSTPWGGPYLCSGCRKKNDAMEGKRSNRSTTCR

SEQ ID NO: 25280 - protein, 338 aa, Zea mays subsp. mays
  peptide (1)..(338): Ceres Seq. ID no. 12372659
  misc_feature (1)..(338): NCBI GI NO: 34394411 NR Description: protein phosphatase 2C-like
  misc_feature (1)..(265): NCBI GI NO: 34898168 NR Description: protein phosphatase 2C-like
  misc_feature (1)..(335): NCBI GI NO: 15217454 NR Description: putative protein phosphatase 2C
  misc_feature (1)..(330): NCBI GI NO: 15221404 NR Description: putative protein phosphatase; protein id:At1g68410
  misc_feature (1)..(262): NCBI GI NO: 16930415 NR Description: At1g09160/T12M4_13 [Arabidopsis thaliana]
  misc_feature (1)..(330): NCBI GI NO: 34914644 NR Description: OSJNBa0054L14.21
  misc_feature (1)..(332): NCBI GI NO: 18401703 NR Description: expressed protein; protein id: At1g47380.1
  misc_feature (1)..(332): NCBI GI NO: 15292869 NR Description: unknown protein [Arabidopsis thaliana]
  misc_feature (1)..(330): NCBI GI NO: 14029015 NR Description: Unknown protein [Oryza sativa]
  misc_feature (1)..(338): NCBI GI NO: 38344839 NR Description: OSJNBa0064H22.20
MSAVPEGISREDWLQALPRALVAGFVKTDIDFQRKGETSGTTATLVVVDGFTVTVASVGDSRCILDTQGGEVSLLTVDHRLEENAEERERVTASGGEVSRLNLCGGQEVGPLRCWPGGLCLSRSIGDTDVGEFIVPIPHVKQVKLPNTGGRLIIASDGIWDALSSESAAQACRGLRAELAAKLVVKQALKTSGLKDDTTCVVVDIIPSDHCSTPPALSPKKNQNKLKHLIFGKRSHSSVGKLSKSASLGSVEEIFEEGSAMLEERLGSNFPPKANLPPFRCAICQVDQEPFEGLMTDNVGGCCSTPSTPWGGPYLCSGCRKKNDAMEGKRSNRSTTCR

SEQ ID NO: 25281 - DNA, 1135 bp, Zea mays subsp. mays
  misc_feature (1)..(1135): Ceres Seq. ID no. 12410133
gaagaatagccttgtctagcaagaagaagatagagggatgatgtgattatacgcaaaatactaaaacctagggtggtagtacaagcagtagttatgagcaggcctcttctctttctttcctgttccgttctttttctttttccctgcggaattccccttcttccctagtgcctcgattcgatatttcgattggattggattaccaagggacagagggagggaatcccacacacacctctggccctcgcgaggccaagggaagggaagcactcagcacccagcagcagaaggaccgccgtaaatggcgctgccggtggcgaagctggggaccctggcgctgcggacgctgtccaagcccatcgccagccgcctcaagagccaggccgctgtccaccccaagttccgcaacttcatcatcgccatcgcccaggcaaaccaccagatcaccacaaagatacagaggcgcatttatgagcatgccacagatgtggcgatcaggcctttggatgagcagaaagctgttcaagctgctacagatctcatcggggaagcctttatcttctcggtcgctgttgctgctctaatttttgaggttcagagaaacgcaaggtccgaggctaggaaggaggaagctcgtagacaggaacttgaggaattgaaacgaagggaagagagtatagctaaagaattggaagatcttaaattgaagcttagtgaaattgagcagcttgctaaagggcgaggcctgacaggaatcttgaacttgaaacgggtccatggcacagaggtcggcaaggcagcagcacctctgcgtgagtaagcaatccggctttggcgcaggaaagtatgattccttgtcgcccccattatttggtaagacttgtgttgtcgtgctcaacctattctttggtgctcatattggatccacatttgtagtggttgatccatggacaccctgagacagtggtaataatacagcgtaacaaagaaatcaaattaaagcgcaatatgtatgtgctacttggtggcggtgaccacaaaatcagatgttaagatggattagggcttgtttggttgtatacttaaggtgtaaaaaatgccacgtttcagattaaagctggttgtttggactgtc

SEQ ID NO: 25282 - protein, 172 aa, Zea mays subsp. mays
  peptide (1)..(172): Ceres Seq. ID no. 12410134
  misc_feature (1)..(169): NCBI GI NO: 34904528 NR Description: B1066G12.9
  misc_feature (1)..(165): NCBI GI NO: 18396819 NR Description: expressed protein; protein id: At1g28510
  misc_feature (1)..(145): NCBI GI NO: 15230967 NR Description: putative protein; protein id: At3g58150.1
  misc_feature (7)..(118): NCBI GI NO: 19112998 NR Description: hypothetical coiled-coil protein
  misc_feature (2)..(144): NCBI GI NO: 39849948 NR Description: Unknown (protein for MGC:75494) [Homo sapiens]
  misc_feature (2)..(144): NCBI GI NO: 21758920 NR Description: unnamed protein product [Homo sapiens]
  misc_feature (2)..(144): NCBI GI NO: 27676608 NR Description: similar to OPA3 protein; Optic atrophy 3
  misc_feature (4)..(136): NCBI GI NO: 24649440 NR Description: CG13601-PA [Drosophila melanogaster]
  misc_feature (2)..(137): NCBI GI NO: 13376717 NR Description: OPA3 protein; Optic atrophy 3
  misc_feature (3)..(133): NCBI GI NO: 23482917 NR Description: Arabidopsis thaliana At1g28510/F3M18_5
MALPVAKLGTLALRTLSKPIASRLKSQAAVHPKFRNFIIAIAQANHQITTKIQRRIYEHATDVAIRPLDEQKAVQAATDLIGEAFIFSVAVAALIFEVQRNARSEARKEEARRQELEELKRREESIAKELEDLKLKLSEIEQLAKGRGLTGILNLKRVHGTEVGKAAAPLRE

SEQ ID NO: 25283 - DNA, 1885 bp, Zea mays subsp. mays
  misc_feature (1)..(1885): Ceres Seq. ID no. 12365283
attccctactcaaacgcagccgccgagcgcctctcgcctctcgccctacaggaggcaccctacagaacccaaccaaaaagcgccggcggcaaacagaacccaacccaaagcgccggcggcaagcgaagagaaagcgccggcactaatccgacgatggacgcgtcggccggcggcggcggcaactccctgccgaccactggcgcggacgggtcgaagcgccgcgtcttctacttctacgacgcggaggtgggcaactactactacgggcagggccacccgatgaagccgcaccgcatccgcatgacccacgcgctgctcggccgctacggcctcctcgaccagatgcaagtgttccgccctcaccctgcccgcgaccgcgacctctgccgcttccacgccgacgattacgtctccttcctccggtccgtcacccccgaaacgcagcaggaccagatccgcgcgctcaagcgcttcaacgtcggcgaggactgccccgtcttcgacggtctctacagtttctgtcagacgtacgcggggggctctgttggcggcgccgtcaagctcaaccatggccatgatatcgccatcaactgggccggcggactccaccacgccaagaagtgcgaggcctccgggttttgctatgttaatgacattgtcctcgccatcctcgagctcctcaagtaccaccagcgcgttctgtacgtggacattgatatccaccacggggacggcgtggaggaggctttttataccacagaccgggtgatgacagtctcattccacaagtttggagattatttccctgggacaggggacattcgtgatgttgggcactcaaagggtaaatattactccctgaatgttcccctggacgatggtattgatgatgagagctaccagtcgttgttcaagccaataatgggcaaggtgatggaggtcttcaaccctggtgcagtcgtgctccagtgtggtgcggattcattgtcgggtgacaggttgggctgtttcaacctctctattaagggtcacgcagaatgtgtaagatttatgaggtccttcaacgtcccgctgttgctgcttggtggtggtgggtataccataagaaacgttgcacggtgttggtgctacgagacaggagttgcccttggtcatgagctcactgacaagatgccacctaatgagtactatgagtattttggtccagattacactctacatgtcgctccaagtaacatggagaataaaaacacacggcatcaattggatgacataaaatcaaaacttctagataatctttcaaaactccgacatgctcctagtgttcagtttcaagagcgatctcctgaggctgagttacctgagcaagatgaagacaaagagaatcctgatgaaagacatgatgctgattctgatgtggagatgaatgatgccaaacctttgcaggactctggaaggatgtcaatagtgtagctgcagaacattctagaggcactggacctgtggctgatggagttggttcctcgaaacaaacctttccgaatgccactagtcgaatggccatagatgaaccaaacgctcttgagagttgagcaagagggttcaaacaaattgcaggaccaaccatcgatgcacctcaagtagctaatgtcatctgtagcctgtcgattcttttgcgcaaattcattaactgtaggcaagccatgcgtggactgaagcagggagcagaagtaagtgctcgaccaagaagttgtgcatctgaaatctatattttttgcgcgtcatatttgtattaccgacagttgcaaacgatggtttaatcatgaaaaatttgtctttccacccttggcttctgcagtggaaggggttgatatcgtagtatgcg

SEQ ID NO: 25284 - protein, 490 aa, Zea mays subsp. mays
  peptide (1)..(490): Ceres Seq. ID no. 12365284
  misc_feature (52)..(490): NCBI GI NO: 14550104 NR Description: histone deacetylase HDA101 [Zea mays]
  misc_feature (52)..(490): NCBI GI NO: 3023947 NR Description: Probable histone deacetylase (RPD3 homolog)
  misc_feature (52)..(489): NCBI GI NO: 12698880 NR Description: histone deacetylase HD1 [Oryza sativa]
  misc_feature (59)..(481): NCBI GI NO: 15233694 NR Description: Histone deacetylase; protein id: At4g38130
  misc_feature (59)..(481): NCBI GI NO: 2318131 NR Description: histone deacetylase [Arabidopsis thaliana]
  misc_feature (59)..(477): NCBI GI NO: 9022439 NR Description: histone deacetylase
  misc_feature (70)..(484): NCBI GI NO: 6680193 NR Description: histone deacetylase 1 [Mus musculus]
  misc_feature (70)..(484): NCBI GI NO: 2347180 NR Description: putative histone deacetylase [Mus musculus]
  misc_feature (70)..(484): NCBI GI NO: 13128860 NR Description: histone deacetylase 1
  misc_feature (70)..(484): NCBI GI NO: 30583783 NR Description: Homo sapiens histone deacetylase 1
IPYSNAAAERLSPLALQEAPYRTQPKSAGGKQNPTQSAGGKRRESAGTNPTMDASAGGGGNSLPTTGADGSKRRVFYFYDAEVGNYYYGQGHPMKPHRIRMTHALLGRYGLLDQMQVFRPHPARDRDLCRFHADDYVSFLRSVTPETQQDQIRALKRFNVGEDCPVFDGLYSFCQTYAGGSVGGAVKLNHGHDIAINWAGGLHHAKKCEASGFCYVNDIVLAILELLKYHQRVLYVDIDIHHGDGVEEAFYTTDRVMTVSFHKFGDYFPGTGDIRDVGHSKGKYYSLNVPLDDGIDDESYQSLFKPIMGKVMEVFNPGAVVLQCGADSLSGDRLGCFNLSIKGHAECVRFMRSFNVPLLLLGGGGYTIRNVARCWCYETGVALGHELTDKMPPNEYYEYFGPDYTLHVAPSNMENKNTRHQLDDIKSKLLDNLSKLRHAPSVQFQERSPEAELPEQDEDKENPDERHDADSDVEMNDAKPLQDSGRMSIV

SEQ ID NO: 25285 - protein, 439 aa, Zea mays subsp. mays
  peptide (1)..(439): Ceres Seq. ID no. 12365285
  misc_feature (1)..(439): NCBI GI NO: 14550104 NR Description: histone deacetylase HDA101 [Zea mays]
  misc_feature (1)..(439): NCBI GI NO: 3023947 NR Description: Probable histone deacetylase (RPD3 homolog)
  misc_feature (1)..(438): NCBI GI NO: 12698880 NR Description: histone deacetylase HD1 [Oryza sativa]
  misc_feature (8)..(430): NCBI GI NO: 15233694 NR Description: Histone deacetylase; protein id: At4g38130
  misc_feature (8)..(430): NCBI GI NO: 2318131 NR Description: histone deacetylase [Arabidopsis thaliana]
  misc_feature (8)..(426): NCBI GI NO: 9022439 NR Description: histone deacetylase
  misc_feature (19)..(433): NCBI GI NO: 6680193 NR Description: histone deacetylase 1 [Mus musculus]
  misc_feature (19)..(433): NCBI GI NO: 2347180 NR Description: putative histone deacetylase [Mus musculus]
  misc_feature (19)..(433): NCBI GI NO: 13128860 NR Description: histone deacetylase 1
  misc_feature (19)..(433): NCBI GI NO: 30583783 NR Description: Homo sapiens histone deacetylase 1
MDASAGGGGNSLPTTGADGSKRRVFYFYDAEVGNYYYGQGHPMKPHRIRMTHALLGRYGLLDQMQVFRPHPARDRDLCRFHADDYVSFLRSVTPETQQDQIRALKRFNVGEDCPVFDGLYSFCQTYAGGSVGGAVKLNHGHDIAINWAGGLHHAKKCEASGFCYVNDIVLAILELLKYHQRVLYVDIDIHHGDGVEEAFYTTDRVMTVSFHKFGDYFPGTGDIRDVGHSKGKYYSLNVPLDDGIDDESYQSLFKPIMGKVMEVFNPGAVVLQCGADSLSGDRLGCFNLSIKGHAECVRFMRSFNVPLLLLGGGGYTIRNVARCWCYETGVALGHELTDKMPPNEYYEYFGPDYTLHVAPSNMENKNTRHQLDDIKSKLLDNLSKLRHAPSVQFQERSPEAELPEQDEDKENPDERHDADSDVEMNDAKPLQDSGRMSIV

SEQ ID NO: 25286 - protein, 397 aa, Zea mays subsp. mays
  peptide (1)..(397): Ceres Seq. ID no. 12365286
  misc_feature (1)..(397): NCBI GI NO: 14550104 NR Description: histone deacetylase HDA101 [Zea mays]
  misc_feature (1)..(397): NCBI GI NO: 3023947 NR Description: Probable histone deacetylase (RPD3 homolog)
  misc_feature (1)..(396): NCBI GI NO: 12698880 NR Description: histone deacetylase HD1 [Oryza sativa]
  misc_feature (1)..(388): NCBI GI NO: 15233694 NR Description: Histone deacetylase; protein id: At4g38130
  misc_feature (1)..(388): NCBI GI NO: 2318131 NR Description: histone deacetylase [Arabidopsis thaliana]
  misc_feature (1)..(384): NCBI GI NO: 9022439 NR Description: histone deacetylase
  misc_feature (1)..(391): NCBI GI NO: 6680193 NR Description: histone deacetylase 1 [Mus musculus]
  misc_feature (1)..(391): NCBI GI NO: 2347180 NR Description: putative histone deacetylase [Mus musculus]
  misc_feature (1)..(391): NCBI GI NO: 13128860 NR Description: histone deacetylase 1
  misc_feature (1)..(391): NCBI GI NO: 30583783 NR Description: Homo sapiens histone deacetylase 1
MKPHRIRMTHALLGRYGLLDQMQVFRPHPARDRDLCRFHADDYVSFLRSVTPETQQDQIRALKRFNVGEDCPVFDGLYSFCQTYAGGSVGGAVKLNHGHDIAINWAGGLHHAKKCEASGFCYVNDIVLAILELLKYHQRVLYVDIDIHHGDGVEEAFYTTDRVMTVSFHKFGDYFPGTGDIRDVGHSKGKYYSLNVPLDDGIDDESYQSLFKPIMGKVMEVFNPGAVVLQCGADSLSGDRLGCFNLSIKGHAECVRFMRSFNVPLLLLGGGGYTIRNVARCWCYETGVALGHELTDKMPPNEYYEYFGPDYTLHVAPSNMENKNTRHQLDDIKSKLLDNLSKLRHAPSVQFQERSPEAELPEQDEDKENPDERHDADSDVEMNDAKPLQDSGRMSIV

SEQ ID NO: 25287 - DNA, 1428 bp, Zea mays subsp. mays
  misc_feature (1)..(1428): Ceres Seq. ID no. 15180566
atcctaccaggcaccactcgcatcgtgtgctcagtcagatccccgtcccgcatttcctaaggccaggttagttggcattgaagacgatgactgcttctgcagctgctggtgtgcagatggtggctgcacgcccttgcatttcggcctcgccaggaattcttaccgcacgggtagcagtttctaggactgattgcatgctcagtaccactgctacattccccaaaatcagctgctcctggcctctaaggtttaagcgcaatgatgttgttgtaagagcaatatcggaagagtgtggcccgcaggggcttcccattgatctcagaggtaaaagggcattcattgctggagttgctgatgataatggctatggatgggcaattgcgaaggcacttgctgcggctggtgctgaaattcttgtgggtacatgggtgccggcacttaacatatttgagacaagtctgaggcgtggaaagtttgatgaatcacggaagctgccagatggatctcttatggatattgttaaagtctatccacttgatgctgtctacgattcccctgatgatgttcctgaagatgtcaaatcgaacaaaagatatgcaggggcatcaaactggacagtaaaggaagttgttgaatcagtgaggaatgattttggcagcattgacatactagtgcattctcttgctaatggcccagaggtaacgaagcctttgttggaaacctcaagaagaggctatcttgcggcaatttctgcatccagttactcctatgtttcattgcttcagcacttccttcctataatgaatcccggtggtgctagcatctctctaacatacattgcatctgaaagggcgattcctgggtatggtggtgggatgagttctgctaaagcagctcttgagagtgatacacgggtgcttgcattcgaagctgggcgaaaaggcaaaatcagagttaacaccatatcagcaggccctcttgggagccgagctgctaaggcaattggatttattgagaagatgatagagtactcatatgttaatgcaccattgcagaaggagctgttggctgatgaggtggggaacacagctgcattcctggtttcttcattggcttctgccatcaccggctcgactgtttatgttgacaatgggctcaatacaatggggcttgcaattgacagccctaccataacgtcatagatgtggttgtggtagatagacgacctttcctgctgcattgcggtatcatccttgaataaagatcatagttagttattagtatgagaggtaagggcaggaaagggggaaaattatgaactggtcttttgcgctttctttgctggagaggaacattagagcgatttccagaatgatgggatgctattatgtgatttcatatgattcagaagcagtacaataactccct

SEQ ID NO: 25288 - protein, 371 aa, Zea mays subsp. mays
  peptide (1)..(371): Ceres Seq. ID no. 15180567
  misc_feature (1)..(371): NCBI GI NO: 38637198 NR Description: putative enoyl-ACP reductase
  misc_feature (1)..(371): NCBI GI NO: 7489537 NR Description: probable enoyl-
  misc_feature (1)..(367): NCBI GI NO: 14422255 NR Description: enoyl-
  misc_feature (1)..(367): NCBI GI NO: 461461 NR Description: Enoyl-
  misc_feature (1)..(367): NCBI GI NO: 14422261 NR Description: enoyl-
  misc_feature (1)..(367): NCBI GI NO: 99805 NR Description: enoyl-
  misc_feature (1)..(367): NCBI GI NO: 14422257 NR Description: enoyl-
  misc_feature (4)..(367): NCBI GI NO: 14422259 NR Description: enoyl-
  misc_feature (1)..(367): NCBI GI NO: 7489119 NR Description: enoyl-
  misc_feature (1)..(367): NCBI GI NO: 7488486 NR Description: probable enoyl-
MTASAAAGVQMVAARPCISASPGILTARVAVSRTDCMLSTTATFPKISCSWPLRFKRNDVVVRAISEECGPQGLPIDLRGKRAFIAGVADDNGYGWAIAKALAAAGAEILVGTWVPALNIFETSLRRGKFDESRKLPDGSLMDIVKVYPLDAVYDSPDDVPEDVKSNKRYAGASNWTVKEVVESVRNDFGSIDILVHSLANGPEVTKPLLETSRRGYLAAISASSYSYVSLLQHFLPIMNPGGASISLTYIASERAIPGYGGGMSSAKAALESDTRVLAFEAGRKGKIRVNTISAGPLGSRAAKAIGFIEKMIEYSYVNAPLQKELLADEVGNTAAFLVSSLASAITGSTVYVDNGLNTMGLAIDSPTITS

SEQ ID NO: 25289 - protein, 361 aa, Zea mays subsp. mays
  peptide (1)..(361): Ceres Seq. ID no. 15180568
  misc_feature (1)..(361): NCBI GI NO: 38637198 NR Description: putative enoyl-ACP reductase
  misc_feature (1)..(361): NCBI GI NO: 7489537 NR Description: probable enoyl-
  misc_feature (1)..(357): NCBI GI NO: 14422255 NR Description: enoyl-
  misc_feature (1)..(357): NCBI GI NO: 461461 NR Description: Enoyl-
  misc_feature (1)..(357): NCBI GI NO: 14422261 NR Description: enoyl-
  misc_feature (1)..(357): NCBI GI NO: 99805 NR Description: enoyl-
  misc_feature (1)..(357): NCBI GI NO: 14422257 NR Description: enoyl-
  misc_feature (1)..(357): NCBI GI NO: 14422259 NR Description: enoyl-
  misc_feature (1)..(357): NCBI GI NO: 7489119 NR Description: enoyl-
  misc_feature (1)..(357): NCBI GI NO: 7488486 NR Description: probable enoyl-
MVAARPCISASPGILTARVAVSRTDCMLSTTATFPKISCSWPLRFKRNDVVVRAISEECGPQGLPIDLRGKRAFIAGVADDNGYGWAIAKALAAAGAEILVGTWVPALNIFETSLRRGKFDESRKLPDGSLMDIVKVYPLDAVYDSPDDVPEDVKSNKRYAGASNWTVKEVVESVRNDFGSIDILVHSLANGPEVTKPLLETSRRGYLAAISASSYSYVSLLQHFLPIMNPGGASISLTYIASERAIPGYGGGMSSAKAALESDTRVLAFEAGRKGKIRVNTISAGPLGSRAAKAIGFIEKMIEYSYVNAPLQKELLADEVGNTAAFLVSSLASAITGSTVYVDNGLNTMGLAIDSPTITS

SEQ ID NO: 25290 - protein, 335 aa, Zea mays subsp. mays
  peptide (1)..(335): Ceres Seq. ID no. 15180569
  misc_feature (1)..(335): NCBI GI NO: 38637198 NR Description: putative enoyl-ACP reductase
  misc_feature (1)..(335): NCBI GI NO: 7489537 NR Description: probable enoyl-
  misc_feature (1)..(331): NCBI GI NO: 14422255 NR Description: enoyl-
  misc_feature (1)..(331): NCBI GI NO: 461461 NR Description: Enoyl-
  misc_feature (1)..(331): NCBI GI NO: 14422261 NR Description: enoyl-
  misc_feature (1)..(331): NCBI GI NO: 99805 NR Description: enoyl-
  misc_feature (1)..(331): NCBI GI NO: 14422257 NR Description: enoyl-
  misc_feature (1)..(331): NCBI GI NO: 14422259 NR Description: enoyl-
  misc_feature (1)..(331): NCBI GI NO: 7489119 NR Description: enoyl-
  misc_feature (1)..(331): NCBI GI NO: 7488486 NR Description: probable enoyl-
MLSTTATFPKISCSWPLRFKRNDVVVRAISEECGPQGLPIDLRGKRAFIAGVADDNGYGWAIAKALAAAGAEILVGTWVPALNIFETSLRRGKFDESRKLPDGSLMDIVKVYPLDAVYDSPDDVPEDVKSNKRYAGASNWTVKEVVESVRNDFGSIDILVHSLANGPEVTKPLLETSRRGYLAAISASSYSYVSLLQHFLPIMNPGGASISLTYIASERAIPGYGGGMSSAKAALESDTRVLAFEAGRKGKIRVNTISAGPLGSRAAKAIGFIEKMIEYSYVNAPLQKELLADEVGNTAAFLVSSLASAITGSTVYVDNGLNTMGLAIDSPTITS

SEQ ID NO: 25291 - DNA, 1233 bp, Zea mays subsp. mays
  misc_feature (1)..(1233): Ceres Seq. ID no. 12410129
atgtataacgcgacccccctccccagtccccccagcggcaaggcggcaaccgttctcccgcgtcccgcactcccgccccttttccttttgctccttccttcctcgggaagcctagggcttaggctttaagcgccgcgatgtacggcggcggcggcggcggcgggcactacgacggaggcagcggtggcgccgggaacgctaacgcgctcttcggcggcgggggcttcatgccctcacagtccacggtggtcccggagaacagcggcctctctaagggtcggagcgcgcagacgctgctcccgctcaccgtgaaacagaccatggacgcggcgcaaaccagcggtgacaggtctaatttcgccatcaacggcgttgaggtgtctacgattaggcttgttggacgcatgctaggtaaggttgagcgtgtcacagatgttgtattcactcttgatgatggtactggcaagatagatgtgaatcgctgggaaaatgaggcttccgatgctaaggagatggctgatgctaataacgagaactatgtcatagtcattggcggtttgaaaggttttcaaggaaagcgccatgtagttgcctatgctgtgcggcgtgtgacaaacttcaatgaaataacctgtcactttctgcactgcattcaggtgcatatggagctcacagggttaaagatctattcttcagctgcaacatatggaggagtagcccatgccccatcacagccaaatccggttgatggaaactacatatccaacttggtcttgagtgtttttcatgacccatctgtcatggaccaggagcatggactgcacatcaaagatgtcatagatcgtctcaaactaccagatgatgtagtcagtgcggccatccaaggtcatgttgatgtgggcaacatttacaacacaattgatgacttccactacaaatctgtccggaatggatgaccacgttgcaagtccagcgttcaggctccgtgtaggtatggagccgtttcaaggaagaagaaatgtaaaccctcttcaggatcgcctatattttgcagataggcttcatggtcaacagcttagcatatcggtttaggtgtgtattgctctcatatgtaatgatacataagatgtgagtagactaggtctacctgcaggacatcagtccgttcctacggaaatttgttatgaacgttttacattctaagacctatataaccgtgaagcacgcaaatcg

SEQ ID NO: 25292 - protein, 272 aa, Zea mays subsp. mays
  peptide (1)..(272): Ceres Seq. ID no. 12410130
  misc_feature (84)..(158): Pfam Name: Pfam Description:  OB-fold nucleic acid binding domain
  misc_feature (30)..(198): NCBI GI NO: 9801268 NR Description: replication protein A2 [Oryza sativa]
  misc_feature (212)..(271): NCBI GI NO: 9801268 NR Description: replication protein A2 [Oryza sativa]
  misc_feature (30)..(198): NCBI GI NO: 13516746 NR Description: replication protein A 30kDa
  misc_feature (212)..(271): NCBI GI NO: 13516746 NR Description: replication protein A 30kDa
  misc_feature (22)..(269): NCBI GI NO: 25347925 NR Description: probable replication protein A1
  misc_feature (16)..(254): NCBI GI NO: 6728969 NR Description: putative replication factor A
  misc_feature (16)..(254): NCBI GI NO: 18396383 NR Description: putative replication factor A
  misc_feature (22)..(253): NCBI GI NO: 18400560 NR Description: putative replication protein A1
  misc_feature (6)..(263): NCBI GI NO: 21627816 NR Description: possible replication factor-a protein
  misc_feature (16)..(176): NCBI GI NO: 40747525 NR Description: hypothetical protein AN0582.2
MYGGGGGGGHYDGGSGGAGNANALFGGGGFMPSQSTVVPENSGLSKGRSAQTLLPLTVKQTMDAAQTSGDRSNFAINGVEVSTIRLVGRMLGKVERVTDVVFTLDDGTGKIDVNRWENEASDAKEMADANNENYVIVIGGLKGFQGKRHVVAYAVRRVTNFNEITCHFLHCIQVHMELTGLKIYSSAATYGGVAHAPSQPNPVDGNYISNLVLSVFHDPSVMDQEHGLHIKDVIDRLKLPDDVVSAAIQGHVDVGNIYNTIDDFHYKSVRNG

SEQ ID NO: 25293 - protein, 242 aa, Zea mays subsp. mays
  peptide (1)..(242): Ceres Seq. ID no. 12410131
  misc_feature (54)..(128): Pfam Name: Pfam Description:  OB-fold nucleic acid binding domain
  misc_feature (1)..(168): NCBI GI NO: 9801268 NR Description: replication protein A2 [Oryza sativa]
  misc_feature (182)..(241): NCBI GI NO: 9801268 NR Description: replication protein A2 [Oryza sativa]
  misc_feature (1)..(168): NCBI GI NO: 13516746 NR Description: replication protein A 30kDa
  misc_feature (182)..(241): NCBI GI NO: 13516746 NR Description: replication protein A 30kDa
  misc_feature (1)..(239): NCBI GI NO: 25347925 NR Description: probable replication protein A1
  misc_feature (1)..(224): NCBI GI NO: 6728969 NR Description: putative replication factor A
  misc_feature (1)..(224): NCBI GI NO: 18396383 NR Description: putative replication factor A
  misc_feature (1)..(223): NCBI GI NO: 18400560 NR Description: putative replication protein A1
  misc_feature (1)..(233): NCBI GI NO: 21627816 NR Description: possible replication factor-a protein
  misc_feature (1)..(146): NCBI GI NO: 40747525 NR Description: hypothetical protein AN0582.2
MPSQSTVVPENSGLSKGRSAQTLLPLTVKQTMDAAQTSGDRSNFAINGVEVSTIRLVGRMLGKVERVTDVVFTLDDGTGKIDVNRWENEASDAKEMADANNENYVIVIGGLKGFQGKRHVVAYAVRRVTNFNEITCHFLHCIQVHMELTGLKIYSSAATYGGVAHAPSQPNPVDGNYISNLVLSVFHDPSVMDQEHGLHIKDVIDRLKLPDDVVSAAIQGHVDVGNIYNTIDDFHYKSVRNG

SEQ ID NO: 25294 - protein, 211 aa, Zea mays subsp. mays
  peptide (1)..(211): Ceres Seq. ID no. 12410132
  misc_feature (23)..(97): Pfam Name: Pfam Description:  OB-fold nucleic acid binding domain
  misc_feature (1)..(137): NCBI GI NO: 9801268 NR Description: replication protein A2 [Oryza sativa]
  misc_feature (151)..(210): NCBI GI NO: 9801268 NR Description: replication protein A2 [Oryza sativa]
  misc_feature (1)..(137): NCBI GI NO: 13516746 NR Description: replication protein A 30kDa
  misc_feature (151)..(210): NCBI GI NO: 13516746 NR Description: replication protein A 30kDa
  misc_feature (1)..(208): NCBI GI NO: 25347925 NR Description: probable replication protein A1
  misc_feature (1)..(193): NCBI GI NO: 6728969 NR Description: putative replication factor A
  misc_feature (1)..(193): NCBI GI NO: 18396383 NR Description: putative replication factor A
  misc_feature (1)..(192): NCBI GI NO: 18400560 NR Description: putative replication protein A1
  misc_feature (1)..(202): NCBI GI NO: 21627816 NR Description: possible replication factor-a protein
  misc_feature (1)..(115): NCBI GI NO: 40747525 NR Description: hypothetical protein AN0582.2
MDAAQTSGDRSNFAINGVEVSTIRLVGRMLGKVERVTDVVFTLDDGTGKIDVNRWENEASDAKEMADANNENYVIVIGGLKGFQGKRHVVAYAVRRVTNFNEITCHFLHCIQVHMELTGLKIYSSAATYGGVAHAPSQPNPVDGNYISNLVLSVFHDPSVMDQEHGLHIKDVIDRLKLPDDVVSAAIQGHVDVGNIYNTIDDFHYKSVRNG

SEQ ID NO: 25295 - DNA, 1375 bp, Zea mays subsp. mays
  misc_feature (1)..(1375): Ceres Seq. ID no. 12352226
gatctggccacccgagcacggccaaaaaggcgctcgcccagcgcttcaccagatagagcaacacagctcagctcagctcagcctcggaccagcagccggcgtgcggagctgcggtgcggcgtcgtgcgtgcgccagaacaggatgctgcccgccgggtgcggcctcctctcgtgcctccgcctcgacaagcagggcgacgcgggccgaaccgacccccgcgtcgcggacgagcccgccgcgtcgctcggcaagggcagcgggtcgtcggccaggcggttcgcgtgggccgagatcgagtccgtcacggcgggcttctcctcccgcgtcatcggccagggcggcttcagcaccgtctacctggcctgcctctcctcctcccgcctcggcgccgtcaaggtgcagcgcagcagcgagcgcctccaccgcgccttccgccaggagctccacgtgctcctctcgctccgccacccgcacatcgtccgcctgctcggctactgcgacgaacgagaggaaggcgtgttggtctttgagtacgcaccgaacggcgacctccacgagaggctccacggcagcggcaaggcgccgctcccgtgggcgcgccgcatggcggtggcgttccaggtggccatggcgctggagcacctccacgagagccgcgacccggcggtgatccacggcgacgtgaaggcctccaacgtgctgctggacgccagcctcgacgccaagctctgcgacctgggcttcgcgcacgtgggcttctcggccgcgctccagccgccggaggccagcggggccagggccagggcgtcgtcggcgccgcgcgccgtcgtcatgggctccccgggctacgtggacccgcacttcctccgctccggcgtcgccacccaagaagggcgacgtgtacagcttcggcgtgctgctgctcgagctcctcacggggagggaggccatatgcgccgacacggggcgccggctcgccgccgcggtgggtcctacgctcggcgaaggaagagtagcggaggcagtggaccggaggctcggagacgagtacgacacgcacgaggcggccaccgtggcggcgcttgcgctgcggtgcatcggcgacggccccgggacgcggccctccatggtggaggtggttcgcgagctccaggagaagacgaccgcgctgatctcggccgctggatgcaaacctgccggcaagatgggttcctgagctgtattgtcggccgaagaagaccgtaaataccattagctttgtttagagagagtagaaggtgaaggtaatgtttttttatttattttacttatataagtttcttgatgtagtggattagtagtagttgaatcggattacatagaaaaatttccgtg

SEQ ID NO: 25296 - protein, 414 aa, Zea mays subsp. mays
  peptide (1)..(414): Ceres Seq. ID no. 12352227
  misc_feature (109)..(297): Pfam Name: Pfam Description:  Protein kinase domain
  misc_feature (52)..(297): NCBI GI NO: 38344983 NR Description: OSJNBa0011L07.13
  misc_feature (83)..(297): NCBI GI NO: 37536060 NR Description: putative receptor protein kinase
  misc_feature (74)..(297): NCBI GI NO: 27476081 NR Description: Hypothetical protein
  misc_feature (202)..(297): NCBI GI NO: 29367339 NR Description: putative receptor protein kinase
  misc_feature (56)..(297): NCBI GI NO: 30692836 NR Description: protein kinase family [Arabidopsis thaliana]
  misc_feature (56)..(297): NCBI GI NO: 25403176 NR Description: probable protein kinase
  misc_feature (56)..(297): NCBI GI NO: 15235071 NR Description: putative protein kinase; protein id: At4g10390
  misc_feature (69)..(297): NCBI GI NO: 18402188 NR Description: unknown protein; protein id: At3g19300.1
  misc_feature (88)..(291): NCBI GI NO: 15227007 NR Description: putative receptor-like protein kinase
  misc_feature (91)..(297): NCBI GI NO: 15227018 NR Description: putative receptor-like protein kinase
IWPPEHGQKGARPALHQIEQHSSAQLSLGPAAGVRSCGAASCVRQNRMLPAGCGLLSCLRLDKQGDAGRTDPRVADEPAASLGKGSGSSARRFAWAEIESVTAGFSSRVIGQGGFSTVYLACLSSSRLGAVKVQRSSERLHRAFRQELHVLLSLRHPHIVRLLGYCDEREEGVLVFEYAPNGDLHERLHGSGKAPLPWARRMAVAFQVAMALEHLHESRDPAVIHGDVKASNVLLDASLDAKLCDLGFAHVGFSAALQPPEASGARARASSAPRAVVMGSPGYVDPHFLRSGVATQEGRRVQLRRAAARAPHGEGGHMRRHGAPARRRGGSYARRRKSSGGSGPEARRRVRHARGGHRGGACAAVHRRRPRDAALHGGGGSRAPGEDDRADLGRWMQTCRQDGFLSCIVGRRRP

SEQ ID NO: 25297 - protein, 367 aa, Zea mays subsp. mays
  peptide (1)..(367): Ceres Seq. ID no. 12352228
  misc_feature (62)..(250): Pfam Name: Pfam Description:  Protein kinase domain
  misc_feature (5)..(250): NCBI GI NO: 38344983 NR Description: OSJNBa0011L07.13
  misc_feature (36)..(250): NCBI GI NO: 37536060 NR Description: putative receptor protein kinase
  misc_feature (27)..(250): NCBI GI NO: 27476081 NR Description: Hypothetical protein
  misc_feature (155)..(250): NCBI GI NO: 29367339 NR Description: putative receptor protein kinase
  misc_feature (9)..(250): NCBI GI NO: 30692836 NR Description: protein kinase family [Arabidopsis thaliana]
  misc_feature (9)..(250): NCBI GI NO: 25403176 NR Description: probable protein kinase
  misc_feature (9)..(250): NCBI GI NO: 15235071 NR Description: putative protein kinase; protein id: At4g10390
  misc_feature (22)..(250): NCBI GI NO: 18402188 NR Description: unknown protein; protein id: At3g19300.1
  misc_feature (41)..(244): NCBI GI NO: 15227007 NR Description: putative receptor-like protein kinase
  misc_feature (44)..(250): NCBI GI NO: 15227018 NR Description: putative receptor-like protein kinase
MLPAGCGLLSCLRLDKQGDAGRTDPRVADEPAASLGKGSGSSARRFAWAEIESVTAGFSSRVIGQGGFSTVYLACLSSSRLGAVKVQRSSERLHRAFRQELHVLLSLRHPHIVRLLGYCDEREEGVLVFEYAPNGDLHERLHGSGKAPLPWARRMAVAFQVAMALEHLHESRDPAVIHGDVKASNVLLDASLDAKLCDLGFAHVGFSAALQPPEASGARARASSAPRAVVMGSPGYVDPHFLRSGVATQEGRRVQLRRAAARAPHGEGGHMRRHGAPARRRGGSYARRRKSSGGSGPEARRRVRHARGGHRGGACAAVHRRRPRDAALHGGGGSRAPGEDDRADLGRWMQTCRQDGFLSCIVGRRRP

SEQ ID NO: 25298 - protein, 213 aa, Zea mays subsp. mays
  peptide (1)..(213): Ceres Seq. ID no. 12352229
  misc_feature (1)..(96): Pfam Name: Pfam Description:  Protein kinase domain
  misc_feature (1)..(96): NCBI GI NO: 38344983 NR Description: OSJNBa0011L07.13
  misc_feature (1)..(96): NCBI GI NO: 37536060 NR Description: putative receptor protein kinase
  misc_feature (1)..(96): NCBI GI NO: 27476081 NR Description: Hypothetical protein
  misc_feature (1)..(96): NCBI GI NO: 29367339 NR Description: putative receptor protein kinase
  misc_feature (1)..(96): NCBI GI NO: 30692836 NR Description: protein kinase family [Arabidopsis thaliana]
  misc_feature (1)..(96): NCBI GI NO: 25403176 NR Description: probable protein kinase
  misc_feature (1)..(96): NCBI GI NO: 15235071 NR Description: putative protein kinase; protein id: At4g10390
  misc_feature (1)..(96): NCBI GI NO: 18402188 NR Description: unknown protein; protein id: At3g19300.1
  misc_feature (1)..(90): NCBI GI NO: 15227007 NR Description: putative receptor-like protein kinase
  misc_feature (1)..(96): NCBI GI NO: 15227018 NR Description: putative receptor-like protein kinase
MAVAFQVAMALEHLHESRDPAVIHGDVKASNVLLDASLDAKLCDLGFAHVGFSAALQPPEASGARARASSAPRAVVMGSPGYVDPHFLRSGVATQEGRRVQLRRAAARAPHGEGGHMRRHGAPARRRGGSYARRRKSSGGSGPEARRRVRHARGGHRGGACAAVHRRRPRDAALHGGGGSRAPGEDDRADLGRWMQTCRQDGFLSCIVGRRRP

SEQ ID NO: 25299 - DNA, 1282 bp, Zea mays subsp. mays
  misc_feature (1)..(1282): Ceres Seq. ID no. 12374443
tacctaccccctgcgcttgcacaaaatccttcttgatccgcacaggaaggtggaaggtcccggcagaagaacttggcgggcgaaaggcgaaaccgacgtgctcccgggcgggcggcgacagcggcatggagcgagagcggcaggcagtggcgaggaacaggaaggtggtgctgcgcgggtacatcgaccgcgcgcccagggaggaagacatggagctcgtcgacggcggcgccgtggagctgcgcgtccccgagggcggcggcggccccgcggtgctggtgaagaacctctacctatcctgcgacccttacatgcgcggcaggatgcgggacttccgcaactcctacatcccgcccttcaaacctggatcacctattgaagggtttggcgtggggagggtggtcgactccactcatccaggattcagtgccggtgacgttgtttccgggatgactggatgggaggactacagtctgatcaccaatcctgaacagctcaggaagatccagcaaagcgacataccactctcctatcatctgggccttcttggcatgcctggctttacagcttatgttggattctatgagatctgttcaccaaagaaaggggagtttgtttttgtttctgcggcatcgggagcagttgggcaaattgttggtcaacttgcgaagctccatggttgctatgttgttggaagcgctgggacagatcagaaggttgagctcttaaaggaaaaattcggatttgatgcgactttcaattataaggaagagcctgacttgactgctgccctgaaaaggcacttccctgaaggcatagacatctacttcgagaacgtaggcgggccgatgctcgatgctgtactactcaacatgcgagtacatggccgcattgcggtgtgtggcatggtttcccagcacggggtgactgcccctgccgggatccacaacctgttctccttgataagcaagaggatagcgatgaaggggttcatccagagcgattacgtgcacctgttcccgcagttcgtcgatgacatcaccaggcattacagagacgggaagatcgtgtatgtggaagacatgagcgttgggctggagagtgggccggcttccttcgtcggtctgttcagcggtaaaaatgttggcaagcaggtcgtctgtgtgtcgcgggattgaaaggcctggattttgttccctactggccagtacccttaaataaaatcaggaaaacattattttcaactccgagaaggaccccactagccagtaccacggtcgtg

SEQ ID NO: 25300 - protein, 391 aa, Zea mays subsp. mays
  peptide (1)..(391): Ceres Seq. ID no. 12374444
  misc_feature (138)..(388): Pfam Name: Pfam Description:  Zinc-binding dehydrogenase
  misc_feature (42)..(391): NCBI GI NO: 34907532 NR Description: putative allyl alcohol dehydrogenase
  misc_feature (48)..(391): NCBI GI NO: 15218717 NR Description: allyl alcohol dehydrogenase, putative
  misc_feature (125)..(391): NCBI GI NO: 25404554 NR Description: hypothetical protein F5I14.9
  misc_feature (48)..(122): NCBI GI NO: 25404554 NR Description: hypothetical protein F5I14.9
  misc_feature (52)..(391): NCBI GI NO: 6692816 NR Description: allyl alcohol dehydrogenase [Nicotiana tabacum]
  misc_feature (50)..(391): NCBI GI NO: 38345384 NR Description: OSJNBa0067K08.13
  misc_feature (42)..(391): NCBI GI NO: 15228456 NR Description: putative NADP-dependent oxidoreductase
  misc_feature (42)..(391): NCBI GI NO: 21593645 NR Description: allyl alcohol dehydrogenase, putative
  misc_feature (42)..(391): NCBI GI NO: 15222685 NR Description: allyl alcohol dehydrogenase, putative
  misc_feature (50)..(391): NCBI GI NO: 15237888 NR Description: quinone oxidoreductase -like protein
PTPCACTKSFLIRTGRWKVPAEELGGRKAKPTCSRAGGDSGMERERQAVARNRKVVLRGYIDRAPREEDMELVDGGAVELRVPEGGGGPAVLVKNLYLSCDPYMRGRMRDFRNSYIPPFKPGSPIEGFGVGRVVDSTHPGFSAGDVVSGMTGWEDYSLITNPEQLRKIQQSDIPLSYHLGLLGMPGFTAYVGFYEICSPKKGEFVFVSAASGAVGQIVGQLAKLHGCYVVGSAGTDQKVELLKEKFGFDATFNYKEEPDLTAALKRHFPEGIDIYFENVGGPMLDAVLLNMRVHGRIAVCGMVSQHGVTAPAGIHNLFSLISKRIAMKGFIQSDYVHLFPQFVDDITRHYRDGKIVYVEDMSVGLESGPASFVGLFSGKNVGKQVVCVSRD

SEQ ID NO: 25301 - protein, 350 aa, Zea mays subsp. mays
  peptide (1)..(350): Ceres Seq. ID no. 12374445
  misc_feature (97)..(347): Pfam Name: Pfam Description:  Zinc-binding dehydrogenase
  misc_feature (1)..(350): NCBI GI NO: 34907532 NR Description: putative allyl alcohol dehydrogenase
  misc_feature (7)..(350): NCBI GI NO: 15218717 NR Description: allyl alcohol dehydrogenase, putative
  misc_feature (84)..(350): NCBI GI NO: 25404554 NR Description: hypothetical protein F5I14.9
  misc_feature (7)..(81): NCBI GI NO: 25404554 NR Description: hypothetical protein F5I14.9
  misc_feature (11)..(350): NCBI GI NO: 6692816 NR Description: allyl alcohol dehydrogenase [Nicotiana tabacum]
  misc_feature (9)..(350): NCBI GI NO: 38345384 NR Description: OSJNBa0067K08.13
  misc_feature (1)..(350): NCBI GI NO: 15228456 NR Description: putative NADP-dependent oxidoreductase
  misc_feature (1)..(350): NCBI GI NO: 21593645 NR Description: allyl alcohol dehydrogenase, putative
  misc_feature (1)..(350): NCBI GI NO: 15222685 NR Description: allyl alcohol dehydrogenase, putative
  misc_feature (9)..(350): NCBI GI NO: 15237888 NR Description: quinone oxidoreductase -like protein
MERERQAVARNRKVVLRGYIDRAPREEDMELVDGGAVELRVPEGGGGPAVLVKNLYLSCDPYMRGRMRDFRNSYIPPFKPGSPIEGFGVGRVVDSTHPGFSAGDVVSGMTGWEDYSLITNPEQLRKIQQSDIPLSYHLGLLGMPGFTAYVGFYEICSPKKGEFVFVSAASGAVGQIVGQLAKLHGCYVVGSAGTDQKVELLKEKFGFDATFNYKEEPDLTAALKRHFPEGIDIYFENVGGPMLDAVLLNMRVHGRIAVCGMVSQHGVTAPAGIHNLFSLISKRIAMKGFIQSDYVHLFPQFVDDITRHYRDGKIVYVEDMSVGLESGPASFVGLFSGKNVGKQVVCVSRD

SEQ ID NO: 25302 - protein, 322 aa, Zea mays subsp. mays
  peptide (1)..(322): Ceres Seq. ID no. 12374446
  misc_feature (69)..(319): Pfam Name: Pfam Description:  Zinc-binding dehydrogenase
  misc_feature (1)..(322): NCBI GI NO: 34907532 NR Description: putative allyl alcohol dehydrogenase
  misc_feature (1)..(322): NCBI GI NO: 15218717 NR Description: allyl alcohol dehydrogenase, putative
  misc_feature (56)..(322): NCBI GI NO: 25404554 NR Description: hypothetical protein F5I14.9
  misc_feature (1)..(53): NCBI GI NO: 25404554 NR Description: hypothetical protein F5I14.9
  misc_feature (1)..(322): NCBI GI NO: 6692816 NR Description: allyl alcohol dehydrogenase [Nicotiana tabacum]
  misc_feature (1)..(322): NCBI GI NO: 38345384 NR Description: OSJNBa0067K08.13
  misc_feature (1)..(322): NCBI GI NO: 15228456 NR Description: putative NADP-dependent oxidoreductase
  misc_feature (1)..(322): NCBI GI NO: 21593645 NR Description: allyl alcohol dehydrogenase, putative
  misc_feature (1)..(322): NCBI GI NO: 15222685 NR Description: allyl alcohol dehydrogenase, putative
  misc_feature (1)..(322): NCBI GI NO: 15237888 NR Description: quinone oxidoreductase -like protein
MELVDGGAVELRVPEGGGGPAVLVKNLYLSCDPYMRGRMRDFRNSYIPPFKPGSPIEGFGVGRVVDSTHPGFSAGDVVSGMTGWEDYSLITNPEQLRKIQQSDIPLSYHLGLLGMPGFTAYVGFYEICSPKKGEFVFVSAASGAVGQIVGQLAKLHGCYVVGSAGTDQKVELLKEKFGFDATFNYKEEPDLTAALKRHFPEGIDIYFENVGGPMLDAVLLNMRVHGRIAVCGMVSQHGVTAPAGIHNLFSLISKRIAMKGFIQSDYVHLFPQFVDDITRHYRDGKIVYVEDMSVGLESGPASFVGLFSGKNVGKQVVCVSRD

SEQ ID NO: 25303 - DNA, 1074 bp, Zea mays subsp. mays
  misc_feature (1)..(1074): Ceres Seq. ID no. 12386832
  misc_feature (599)..(599): n is a, c, t, g, unknown, or other
atattaatggagctgctttgcacgggcggcagacagccgtagacagagcagtgacggtcgtcgtacacagatcacgatgctgctcccacactcttcatcagcctctgcaactgctaccactcgtgggctagcactagcagcagcagcagcagcaccgccgcgtccgaccgctcgcccccggcgcgcgcgcctcctgcctccacgcgcgcgggccgagacgcatgcgacgggcgttggcgccgaccgcgcggccgaggcgcttctccaaagcgggctgcgccgtgagtcgctgccgcggcacgtcgcggtggtgatggacgggaactcgcggtgggcgcgcgagcgggggctgacgcccgcggacggccacaaggccggcggccgcaacctggagcgggtcgttgcgctgtcgcgcgcctggggcatccgcgcgctcaccgccttcgtctgctcccgcgagaacttgagccgccccaaggccgaggtcgactacatgatgggcttgtccgagtggctgataggcgacaacatcgacaagctctcgaggcaggggatccggctgcaggtgatcggcgacgccgcgaagatgccagcctctntgcggagcgcagcggcgcaggccgacgaggccacgaggcacaactcgcagctgcacgtgatgctggccatctgctacagcgggcgatgggacatggtccaggcgtgccgggagctggcccgggaggcgcaggcgaaccggctcagtccggacgacatcgacgagtcggtcatcgccggcaagctcgcgacgagcgccgccggcgagttctcctgtcccgacctggtcatcagaaccagcggcgagatgaggctcagcaacttcttgctgtggcagtcggcgtactcggagttgttcttcaccggcaagatgtggcctgactttggggaggctgagtacctggaagcgttgcgctccttccagggcagagaccgccgcttcggccaatcaaaattactctaacagtctaactcgatggagccacgaagtggagcgccagtatatgtgaagagttatggattgttcggttagctttc

SEQ ID NO: 25304 - protein, 307 aa, Zea mays subsp. mays
  peptide (1)..(307): Ceres Seq. ID no. 12386833
  misc_feature (79)..(302): Pfam Name: Pfam Description:  Putative undecaprenyl diphosphate synthase
  misc_feature (24)..(306): NCBI GI NO: 34908428 NR Description: putative undecaprenyl pyrophosphate synthetase
  misc_feature (60)..(305): NCBI GI NO: 15237748 NR Description: dehydrodolichyl diphosphate synthase
  misc_feature (70)..(307): NCBI GI NO: 17230924 NR Description: undecaprenyl pyrophosphate synthetase
  misc_feature (56)..(302): NCBI GI NO: 7447521 NR Description: hypothetical protein At2g23410
  misc_feature (56)..(302): NCBI GI NO: 18400264 NR Description: dehydrodolichyl diphosphate synthase
  misc_feature (63)..(305): NCBI GI NO: 23125792 NR Description: hypothetical protein [Nostoc punctiforme]
  misc_feature (67)..(303): NCBI GI NO: 17230487 NR Description: undecaprenyl pyrophosphate synthetase
  misc_feature (67)..(302): NCBI GI NO: 18424144 NR Description: dehydrodolichyl diphosphate synthase
  misc_feature (63)..(303): NCBI GI NO: 37519677 NR Description: undecaprenyl pyrophosphate synthetase
  misc_feature (63)..(303): NCBI GI NO: 23128548 NR Description: hypothetical protein [Nostoc punctiforme]
  misc_feature (175)..(175): Xaa is any aa, unknown or other
MLLPHSSSASATATTRGLALAAAAAAPPRPTARPRRARLLPPRARAETHATGVGADRAAEALLQSGLRRESLPRHVAVVMDGNSRWARERGLTPADGHKAGGRNLERVVALSRAWGIRALTAFVCSRENLSRPKAEVDYMMGLSEWLIGDNIDKLSRQGIRLQVIGDAAKMPASXRSAAAQADEATRHNSQLHVMLAICYSGRWDMVQACRELAREAQANRLSPDDIDESVIAGKLATSAAGEFSCPDLVIRTSGEMRLSNFLLWQSAYSELFFTGKMWPDFGEAEYLEALRSFQGRDRRFGQSKLL

SEQ ID NO: 25305 - protein, 228 aa, Zea mays subsp. mays
  peptide (1)..(228): Ceres Seq. ID no. 12386834
  misc_feature (1)..(223): Pfam Name: Pfam Description:  Putative undecaprenyl diphosphate synthase
  misc_feature (1)..(227): NCBI GI NO: 34908428 NR Description: putative undecaprenyl pyrophosphate synthetase
  misc_feature (1)..(226): NCBI GI NO: 15237748 NR Description: dehydrodolichyl diphosphate synthase
  misc_feature (1)..(228): NCBI GI NO: 17230924 NR Description: undecaprenyl pyrophosphate synthetase
  misc_feature (1)..(223): NCBI GI NO: 7447521 NR Description: hypothetical protein At2g23410
  misc_feature (1)..(223): NCBI GI NO: 18400264 NR Description: dehydrodolichyl diphosphate synthase
  misc_feature (1)..(226): NCBI GI NO: 23125792 NR Description: hypothetical protein [Nostoc punctiforme]
  misc_feature (1)..(224): NCBI GI NO: 17230487 NR Description: undecaprenyl pyrophosphate synthetase
  misc_feature (1)..(223): NCBI GI NO: 18424144 NR Description: dehydrodolichyl diphosphate synthase
  misc_feature (1)..(224): NCBI GI NO: 37519677 NR Description: undecaprenyl pyrophosphate synthetase
  misc_feature (1)..(224): NCBI GI NO: 23128548 NR Description: hypothetical protein [Nostoc punctiforme]
  misc_feature (96)..(96): Xaa is any aa, unknown or other
MDGNSRWARERGLTPADGHKAGGRNLERVVALSRAWGIRALTAFVCSRENLSRPKAEVDYMMGLSEWLIGDNIDKLSRQGIRLQVIGDAAKMPASXRSAAAQADEATRHNSQLHVMLAICYSGRWDMVQACRELAREAQANRLSPDDIDESVIAGKLATSAAGEFSCPDLVIRTSGEMRLSNFLLWQSAYSELFFTGKMWPDFGEAEYLEALRSFQGRDRRFGQSKLL

SEQ ID NO: 25306 - protein, 168 aa, Zea mays subsp. mays
  peptide (1)..(168): Ceres Seq. ID no. 12386835
  misc_feature (1)..(163): Pfam Name: Pfam Description:  Putative undecaprenyl diphosphate synthase
  misc_feature (1)..(167): NCBI GI NO: 34908428 NR Description: putative undecaprenyl pyrophosphate synthetase
  misc_feature (1)..(166): NCBI GI NO: 15237748 NR Description: dehydrodolichyl diphosphate synthase
  misc_feature (1)..(168): NCBI GI NO: 17230924 NR Description: undecaprenyl pyrophosphate synthetase
  misc_feature (1)..(163): NCBI GI NO: 7447521 NR Description: hypothetical protein At2g23410
  misc_feature (1)..(163): NCBI GI NO: 18400264 NR Description: dehydrodolichyl diphosphate synthase
  misc_feature (1)..(166): NCBI GI NO: 23125792 NR Description: hypothetical protein [Nostoc punctiforme]
  misc_feature (1)..(164): NCBI GI NO: 17230487 NR Description: undecaprenyl pyrophosphate synthetase
  misc_feature (1)..(163): NCBI GI NO: 18424144 NR Description: dehydrodolichyl diphosphate synthase
  misc_feature (1)..(164): NCBI GI NO: 37519677 NR Description: undecaprenyl pyrophosphate synthetase
  misc_feature (1)..(164): NCBI GI NO: 23128548 NR Description: hypothetical protein [Nostoc punctiforme]
  misc_feature (36)..(36): Xaa is any aa, unknown or other
MMGLSEWLIGDNIDKLSRQGIRLQVIGDAAKMPASXRSAAAQADEATRHNSQLHVMLAICYSGRWDMVQACRELAREAQANRLSPDDIDESVIAGKLATSAAGEFSCPDLVIRTSGEMRLSNFLLWQSAYSELFFTGKMWPDFGEAEYLEALRSFQGRDRRFGQSKLL

SEQ ID NO: 25307 - DNA, 488 bp, Zea mays subsp. mays
  misc_feature (1)..(488): Ceres Seq. ID no. 12345933
gagacctagaaccctcttccccctcgatggccgtagggagcggcggcggctcgcggcgcgcgcgtccgaacgtgctagtgacggggacgccggggacggggaagacgacaacgtgctcgctccttgccgacgccgcaggcctccgccacgtcaacatcggcgacctcgtccgcgagaagagcctccacgacggctgggacgccgacctcgagtgccatgtcatcaacgaggacctggtgtgcgacgagcttgaggacatgatggaagaaggtggcatactagtagattaccacggatgtgatttctttccagaacgttggtttgacctcgtagtttatttttgcttaatcttttgtttggtcagttgtttgttagggctgttgatttgtatagattcagactacatctcttctggcttgtggatttcgatagacttgttgtacattgacatatgctggtctcaaatgaggatgataggttcttggtcc

SEQ ID NO: 25308 - protein, 162 aa, Zea mays subsp. mays
  peptide (1)..(162): Ceres Seq. ID no. 12345934
  misc_feature (14)..(111): NCBI GI NO: 34395293 NR Description: putative adrenal gland protein AD-004
  misc_feature (14)..(78): NCBI GI NO: 34902744 NR Description: hypothetical protein~similar to Arabidopsisthaliana chromosome 5
  misc_feature (79)..(111): NCBI GI NO: 34902744 NR Description: hypothetical protein~similar to Arabidopsisthaliana chromosome 5
  misc_feature (9)..(111): NCBI GI NO: 10177726 NR Description: gene_id:K9B18
  misc_feature (9)..(111): NCBI GI NO: 15239296 NR Description: putative protein; protein id: At5g60340.1
  misc_feature (22)..(110): NCBI GI NO: 7706212 NR Description: adrenal gland protein AD-004
  misc_feature (22)..(110): NCBI GI NO: 33303797 NR Description: TAF9 RNA polymerase II, TATA box binding protein
  misc_feature (22)..(110): NCBI GI NO: 28076975 NR Description: RIKEN cDNA 4921516M08 [Mus musculus]
  misc_feature (22)..(110): NCBI GI NO: 34853506 NR Description: similar to RIKEN cDNA 4921516M08
  misc_feature (22)..(110): NCBI GI NO: 6457370 NR Description: unknown protein [Oryctolagus sp.]
DLEPSSPSMAVGSGGGSRRARPNVLVTGTPGTGKTTTCSLLADAAGLRHVNIGDLVREKSLHDGWDADLECHVINEDLVCDELEDMMEEGGILVDYHGCDFFPERWFDLVVYFCLIFCLVSCLLGLLICIDSDYISSGLWISIDLLYIDICWSQMRMIGSWS

SEQ ID NO: 25309 - protein, 154 aa, Zea mays subsp. mays
  peptide (1)..(154): Ceres Seq. ID no. 12345935
  misc_feature (6)..(103): NCBI GI NO: 34395293 NR Description: putative adrenal gland protein AD-004
  misc_feature (6)..(70): NCBI GI NO: 34902744 NR Description: hypothetical protein~similar to Arabidopsisthaliana chromosome 5
  misc_feature (71)..(103): NCBI GI NO: 34902744 NR Description: hypothetical protein~similar to Arabidopsisthaliana chromosome 5
  misc_feature (1)..(103): NCBI GI NO: 10177726 NR Description: gene_id:K9B18
  misc_feature (1)..(103): NCBI GI NO: 15239296 NR Description: putative protein; protein id: At5g60340.1
  misc_feature (14)..(102): NCBI GI NO: 7706212 NR Description: adrenal gland protein AD-004
  misc_feature (14)..(102): NCBI GI NO: 33303797 NR Description: TAF9 RNA polymerase II, TATA box binding protein
  misc_feature (14)..(102): NCBI GI NO: 28076975 NR Description: RIKEN cDNA 4921516M08 [Mus musculus]
  misc_feature (14)..(102): NCBI GI NO: 34853506 NR Description: similar to RIKEN cDNA 4921516M08
  misc_feature (14)..(102): NCBI GI NO: 6457370 NR Description: unknown protein [Oryctolagus sp.]
MAVGSGGGSRRARPNVLVTGTPGTGKTTTCSLLADAAGLRHVNIGDLVREKSLHDGWDADLECHVINEDLVCDELEDMMEEGGILVDYHGCDFFPERWFDLVVYFCLIFCLVSCLLGLLICIDSDYISSGLWISIDLLYIDICWSQMRMIGSWS

SEQ ID NO: 25310 - protein, 83 aa, Zea mays subsp. mays
  peptide (1)..(83): Ceres Seq. ID no. 12345936
RPRTLFPLDGRRERRRLAARASERASDGDAGDGEDDNVLAPCRRRRPPPRQHRRPRPREEPPRRLGRRPRVPCHQRGPGVRRA

SEQ ID NO: 25311 - DNA, 1345 bp, Zea mays subsp. mays
  misc_feature (1)..(1345): Ceres Seq. ID no. 13502498
ataccgcaaccagctattgagctactgcctctgaccaagtcccaagctgcgctgcgcctgctatgtcgtcgtcctcgcccgtatcggcggtctcatcagccactgcgccgcacgtcgtggacgactgcctcggcatcgtgcagcttcttagcgatggcaccgtgacgcgctccgcggactactccgacatccctctcctgggcgaggtgccgtccaacctgcccgtccagtggaaggacgtcgtctacgaccccgcgcacgcgctccgcctccgcatgtacaggcccaccgacaccgacggcggcaggacgaccaacaacaagctgccggtgctagtctacttccacggcggcggcttctgcatctgcagcttcgagatgccccacttccacgccggcgggctccgcctcgccgccgagctcccggcgctcgtgctctccgccgactaccgcctggggcccgagcaccgcctccccgcggcgcaccgcgacgccgaggccgtcctgtcctggctccgcgcccaggccgaggccgacccgtggcttgtcgagtcggctgacatgggcagggtgttcgtctgcggcgactcggccggcggcaacatcgcgcaccacatcgccgtccagtacggcacgggccacctcgccctcggccccgtcgtccggcttggcggctacatcatgctgtggccctacttcgccgccgaggagaggacggcgtccgagacggccggtcttgacgtcgaccaccagttcgttagcacggcgctgttggatcagatgtggcgcctggcgctgccggtcggcgcgaccagggaccacccagcagcgaacccgttcggaccggacagcgtcccgctggaggacgtcgccttccagccgctgctcgtcgtggacccagaccaggacgtgctgcacgaccgcacacaggactatgccgctaggttgacggccatggggaaactggtcgagctcgtcgtgttcagaggccagggccacgggttcttcgtcttcgacccgtgtggtgaagctttccgaccagctgatccacgtcattcggcgcttcgtactgttgcataagcatccatgtaatcttgttgatcttagtactaccatgtagttgcattagtgagtcatgtactcatgtgttcgtcagtcggacaagtttgtttcgtagaatcgcggacgagctggagagtgcacagcccgtgcagtgaccgcgtctagggatgtgtttccgccacggtgtgcatgtcatgcacgtcgcacgttcgtccttagaagtcggatcgtgcagctgtattccgtggcggggaaacgtggaactaccccagtgtatttggttc

SEQ ID NO: 25312 - protein, 338 aa, Zea mays subsp. mays
  peptide (1)..(338): Ceres Seq. ID no. 13502499
  misc_feature (73)..(133): Pfam Name: Pfam Description:  Carboxylesterase
  misc_feature (1)..(323): NCBI GI NO: 34899930 NR Description: OJ1714_H10.49
  misc_feature (11)..(323): NCBI GI NO: 27819508 NR Description: putative esterase
  misc_feature (12)..(322): NCBI GI NO: 34895938 NR Description: P0030H07.40
  misc_feature (1)..(319): NCBI GI NO: 34895916 NR Description: P0030H07.24
  misc_feature (16)..(323): NCBI GI NO: 34899928 NR Description: OJ1714_H10.48
  misc_feature (16)..(323): NCBI GI NO: 15240090 NR Description: expressed protein [Arabidopsis thaliana]
  misc_feature (18)..(332): NCBI GI NO: 5487873 NR Description: PrMC3 [Pinus radiata]
  misc_feature (15)..(319): NCBI GI NO: 34393904 NR Description: putative cell death associated protein
  misc_feature (7)..(319): NCBI GI NO: 34393975 NR Description: putative PrMC3
  misc_feature (69)..(316): NCBI GI NO: 6092014 NR Description: hsr203J homolog [Pisum sativum]
MSSSSPVSAVSSATAPHVVDDCLGIVQLLSDGTVTRSADYSDIPLLGEVPSNLPVQWKDVVYDPAHALRLRMYRPTDTDGGRTTNNKLPVLVYFHGGGFCICSFEMPHFHAGGLRLAAELPALVLSADYRLGPEHRLPAAHRDAEAVLSWLRAQAEADPWLVESADMGRVFVCGDSAGGNIAHHIAVQYGTGHLALGPVVRLGGYIMLWPYFAAEERTASETAGLDVDHQFVSTALLDQMWRLALPVGATRDHPAANPFGPDSVPLEDVAFQPLLVVDPDQDVLHDRTQDYAARLTAMGKLVELVVFRGQGHGFFVFDPCGEAFRPADPRHSALRTVA

SEQ ID NO: 25313 - protein, 267 aa, Zea mays subsp. mays
  peptide (1)..(267): Ceres Seq. ID no. 13502500
  misc_feature (2)..(62): Pfam Name: Pfam Description:  Carboxylesterase
  misc_feature (1)..(252): NCBI GI NO: 34899930 NR Description: OJ1714_H10.49
  misc_feature (1)..(252): NCBI GI NO: 27819508 NR Description: putative esterase
  misc_feature (1)..(251): NCBI GI NO: 34895938 NR Description: P0030H07.40
  misc_feature (1)..(248): NCBI GI NO: 34895916 NR Description: P0030H07.24
  misc_feature (1)..(252): NCBI GI NO: 34899928 NR Description: OJ1714_H10.48
  misc_feature (1)..(252): NCBI GI NO: 15240090 NR Description: expressed protein [Arabidopsis thaliana]
  misc_feature (1)..(261): NCBI GI NO: 5487873 NR Description: PrMC3 [Pinus radiata]
  misc_feature (1)..(248): NCBI GI NO: 34393904 NR Description: putative cell death associated protein
  misc_feature (1)..(248): NCBI GI NO: 34393975 NR Description: putative PrMC3
  misc_feature (1)..(245): NCBI GI NO: 6092014 NR Description: hsr203J homolog [Pisum sativum]
MYRPTDTDGGRTTNNKLPVLVYFHGGGFCICSFEMPHFHAGGLRLAAELPALVLSADYRLGPEHRLPAAHRDAEAVLSWLRAQAEADPWLVESADMGRVFVCGDSAGGNIAHHIAVQYGTGHLALGPVVRLGGYIMLWPYFAAEERTASETAGLDVDHQFVSTALLDQMWRLALPVGATRDHPAANPFGPDSVPLEDVAFQPLLVVDPDQDVLHDRTQDYAARLTAMGKLVELVVFRGQGHGFFVFDPCGEAFRPADPRHSALRTVA

SEQ ID NO: 25314 - protein, 233 aa, Zea mays subsp. mays
  peptide (1)..(233): Ceres Seq. ID no. 13502501
  misc_feature (1)..(218): NCBI GI NO: 34899930 NR Description: OJ1714_H10.49
  misc_feature (1)..(218): NCBI GI NO: 27819508 NR Description: putative esterase
  misc_feature (1)..(217): NCBI GI NO: 34895938 NR Description: P0030H07.40
  misc_feature (1)..(214): NCBI GI NO: 34895916 NR Description: P0030H07.24
  misc_feature (1)..(218): NCBI GI NO: 34899928 NR Description: OJ1714_H10.48
  misc_feature (1)..(218): NCBI GI NO: 15240090 NR Description: expressed protein [Arabidopsis thaliana]
  misc_feature (1)..(227): NCBI GI NO: 5487873 NR Description: PrMC3 [Pinus radiata]
  misc_feature (1)..(214): NCBI GI NO: 34393904 NR Description: putative cell death associated protein
  misc_feature (1)..(214): NCBI GI NO: 34393975 NR Description: putative PrMC3
  misc_feature (1)..(211): NCBI GI NO: 6092014 NR Description: hsr203J homolog [Pisum sativum]
MPHFHAGGLRLAAELPALVLSADYRLGPEHRLPAAHRDAEAVLSWLRAQAEADPWLVESADMGRVFVCGDSAGGNIAHHIAVQYGTGHLALGPVVRLGGYIMLWPYFAAEERTASETAGLDVDHQFVSTALLDQMWRLALPVGATRDHPAANPFGPDSVPLEDVAFQPLLVVDPDQDVLHDRTQDYAARLTAMGKLVELVVFRGQGHGFFVFDPCGEAFRPADPRHSALRTVA

SEQ ID NO: 25315 - DNA, 1250 bp, Zea mays subsp. mays
  misc_feature (1)..(1250): Ceres Seq. ID no. 12414165
tccactccactccagccaggcgccagcactcacccacccatggcgtccgaagccgcgccgcgggtcgtcgtggacgagtgccggggcgtgctgtccgtgtacagcgacggcacggtggtgcggcgcgcgcagccggggttcgcgacgccggtgcgggacgacggcacggtcgactggaaggacgtgacgttcgacgaggccccgcgggctggcgctccgcctctacctcccccgggaccgcggggccgcggccgggcggcgcctgccggtcttcttctactaccacggcggcggcttctgcatcgggtcccgcgcctggcccaactgccagaactactgcctgcgcctggcctccgacctgggcgcgctcgtggtggcgccggactaccgcctcgcgcccgagcaccgcctccccgccgccatcgacgacggcgcggcggcggtcctgtggctggcgaggcagggcggcggggacccctgggtcgccgaggccgccgacctcggccgcgtcttcgtgtcgggcgactcggccggcggcaccatcgcgcaccacctcgccgtgcgcttcggtggctcgcccgcggacctggcccccgtcgccgtgcggggatacgtccagctcatgccattcttcggcggcgtggcgcgcacgcggtcggaggccgagtgccccgccgacgctttcctcgaccggcccctcaacgaccgctactggcgcctgtcgctgccggagggcgccacgcccgaccaccccgtggccaacccgttcggccccggcgcgccgccgctggacgccgtcgagttcgcgcccaccctggtcgtcgtcggcggccgcgacctcctccacgaccgcgccgtcgactacgccgccaggctcagggccgccgggaagcccgtcgtggtcagggacttccacggccagcagcacggcttcttcaccatcgacccctggtccgacgcctccgccgagctcatgcgcgtcatcaagcgcttcgtcgacgccgacggccgcttcgacttcgactgacacgtcggtgtcgaactctagtattaaatccgagggagcgagcagaatggtctgcgtcgagccgtcgagtagttcccgggttgaaatcaatgtggtttggtgattgtgatatttttcttgctcgtttgtttttattatggacggttctcctgttaaaaagtagtagcccggtgtgtttagtaggaatcttgtatctagattcgctcgaggaacattctagatg

SEQ ID NO: 25316 - protein, 416 aa, Zea mays subsp. mays
  peptide (1)..(416): Ceres Seq. ID no. 12414166
  misc_feature (54)..(309): Pfam Name: Pfam Description:  HlyD family secretion protein
  misc_feature (18)..(85): NCBI GI NO: 34899936 NR Description: putative cell death associated protein
  misc_feature (14)..(65): NCBI GI NO: 34899924 NR Description: OJ1714_H10.46
  misc_feature (20)..(88): NCBI GI NO: 34899928 NR Description: OJ1714_H10.48
STPLQPGASTHPPMASEAAPRVVVDECRGVLSVYSDGTVVRRAQPGFATPVRDDGTVDWKDVTFDEAPRAGAPPLPPPGPRGRGRAAPAGLLLLPRRRLLHRVPRLAQLPELLPAPGLRPGRARGGAGLPPRARAPPPRRHRRRRGGGPVAGEAGRRGPLGRRGRRPRPRLRVGRLGRRHHRAPPRRALRWLARGPGPRRRAGIRPAHAILRRRGAHAVGGRVPRRRFPRPAPQRPLLAPVAAGGRHARPPRGQPVRPRRAAAGRRRVRAHPGRRRRPRPPPRPRRRLRRQAQGRREARRGQGLPRPAARLLHHRPLVRRLRRAHARHQALRRRRRPLRLRLTRRCRTLVLNPRERAEWSASSRRVVPGLKSMWFGDCDIFLARLFLLWTVLLLKSSSPVCLVGILYLDSLEEHSR

SEQ ID NO: 25317 - protein, 403 aa, Zea mays subsp. mays
  peptide (1)..(403): Ceres Seq. ID no. 12414167
  misc_feature (41)..(296): Pfam Name: Pfam Description:  HlyD family secretion protein
  misc_feature (5)..(72): NCBI GI NO: 34899936 NR Description: putative cell death associated protein
  misc_feature (1)..(52): NCBI GI NO: 34899924 NR Description: OJ1714_H10.46
  misc_feature (7)..(75): NCBI GI NO: 34899928 NR Description: OJ1714_H10.48
MASEAAPRVVVDECRGVLSVYSDGTVVRRAQPGFATPVRDDGTVDWKDVTFDEAPRAGAPPLPPPGPRGRGRAAPAGLLLLPRRRLLHRVPRLAQLPELLPAPGLRPGRARGGAGLPPRARAPPPRRHRRRRGGGPVAGEAGRRGPLGRRGRRPRPRLRVGRLGRRHHRAPPRRALRWLARGPGPRRRAGIRPAHAILRRRGAHAVGGRVPRRRFPRPAPQRPLLAPVAAGGRHARPPRGQPVRPRRAAAGRRRVRAHPGRRRRPRPPPRPRRRLRRQAQGRREARRGQGLPRPAARLLHHRPLVRRLRRAHARHQALRRRRRPLRLRLTRRCRTLVLNPRERAEWSASSRRVVPGLKSMWFGDCDIFLARLFLLWTVLLLKSSSPVCLVGILYLDSLEEHSR

SEQ ID NO: 25318 - protein, 375 aa, Zea mays subsp. mays
  peptide (1)..(375): Ceres Seq. ID no. 12414168
  misc_feature (72)..(344): Pfam Name: Pfam Description:  Equine herpesvirus glycoprotein gp2
  misc_feature (72)..(367): NCBI GI NO: 13592175 NR Description: ppg3 [Leishmania major]
  misc_feature (72)..(367): NCBI GI NO: 13592175 NR Description: ppg3 [Leishmania major]
  misc_feature (67)..(367): NCBI GI NO: 13592175 NR Description: ppg3 [Leishmania major]
  misc_feature (67)..(367): NCBI GI NO: 13592175 NR Description: ppg3 [Leishmania major]
  misc_feature (72)..(366): NCBI GI NO: 13592175 NR Description: ppg3 [Leishmania major]
  misc_feature (72)..(367): NCBI GI NO: 13592175 NR Description: ppg3 [Leishmania major]
  misc_feature (72)..(355): NCBI GI NO: 13592175 NR Description: ppg3 [Leishmania major]
  misc_feature (72)..(366): NCBI GI NO: 13592175 NR Description: ppg3 [Leishmania major]
  misc_feature (67)..(367): NCBI GI NO: 13592175 NR Description: ppg3 [Leishmania major]
  misc_feature (72)..(367): NCBI GI NO: 13592175 NR Description: ppg3 [Leishmania major]
HSTPARRQHSPTHGVRSRAAGRRGRVPGRAVRVQRRHGGAARAAGVRDAGAGRRHGRLEGRDVRRGPAGWRSASTSPGTAGPRPGGACRSSSTTTAAASASGPAPGPTARTTACAWPPTWARSWWRRTTASRPSTASPPPSTTARRRSCGWRGRAAGTPGSPRPPTSAASSCRATRPAAPSRTTSPCASVARPRTWPPSPCGDTSSSCHSSAAWRARGRRPSAPPTLSSTGPSTTATGACRCRRAPRPTTPWPTRSAPARRRWTPSSSRPPWSSSAAATSSTTAPSTTPPGSGPPGSPSWSGTSTASSTASSPSTPGPTPPPSSCASSSASSTPTAASTSTDTSVSNSSIKSEGASRMVCVEPSSSSRVEINVVW

SEQ ID NO: 25319 - DNA, 1457 bp, Zea mays subsp. mays
  misc_feature (1)..(1457): Ceres Seq. ID no. 12406983
acctcccttgacccgtcgtcccatgctaaaagcccagggttaggagctagaggtaatctctctcccgtctctccccagtgggcgtgggggcgccgcatggaagccatggacgtcaagtacaagcccgtcatgttccccaacggcgccggcctcaagaagccgaagccggcggcggccgtggcgctggccggggagccgctgtaccgggagtgcctcaagaaccacgccgcgagcctgggcgggcacgccgtcgacggttgcggcgagttcatgccctcgccgggggccaaccccgccgacccgacgtcgctcaagtgcgcggcgtgcgggtgccaccgcaacttccaccgccggacgctggagggttcccctccgccgcccgcgcccgcgccgctggcgcttcccgcctccgccgagcgtgatgcacggccagccgcaccgcgcccgggaggagacgcccgaggaccgccacccgggggtcgtcgacgccgacgactccgattccgactcggaaggctcggagtacgacgaggagcggtcggtgtccccgccgccgccgccgcaccacctgctgccggcgccggtggcgcagcagcccccgccaccgtcctacttcccgacggcgccgcacatggtgctctcgctaggttccggcgtgcccgggcccgcggtggcggtatccccggcgcagaggctggccccgacccagctgacgccgtccagcgcgccgccccacgccgggggcgcgatgcccatgcccaggaagcggttccgcaccaagttcaccgccgagcagaagcagcggatgcaggagctgtcggagcggctcgggtggcggctgcagaagcgcgacgaggccatcgtcgacgagtggtgccgcgacatcggcgtcggcaagggcgtcttcaaggtctggatgcacaacaacaagcacaacttcctgggcgggcacagcgcccgccgcagcgcctcctcgcccgcccccgcccccgccgccgcgtcgctccaaaccccagccgccggcgccggcgctgctgcagcaccgtcattccacccgtccaggatcacccctccccctcccgtcctcacctcgtccccgacggccgccaccggcttcaacatcaacggcgccgcctcgtcggcgcccaccgtcgccaccgactacaccacggacaacgccaacggagcttcgtcgccgcactccgcttgaactagagaagggagaagagaggaggggggaagggaagggagagcggagagagagaaacatttagcttaatttcagtgatcactcgttttttttttctttagacttcttgccatctactaagaaattaaccccaagaaaaagcatgccgctgtgcgccatgcctagaaatccaagcttcttcctcccctgtactagtactgtatgctcttgggatccgatgatgatgctgatgctgatttaggattag

SEQ ID NO: 25320 - protein, 404 aa, Zea mays subsp. mays
  peptide (1)..(404): Ceres Seq. ID no. 12406984
  misc_feature (68)..(122): Pfam Name: Pfam Description:  ZF-HD protein dimerisation region
  misc_feature (39)..(149): NCBI GI NO: 13277220 NR Description: ZF-HD homeobox protein [Flaveria bidentis]
  misc_feature (57)..(158): NCBI GI NO: 15222382 NR Description: hypothetical protein; protein id: At1g69600.1
  misc_feature (68)..(118): NCBI GI NO: 13277218 NR Description: ZF-HD homeobox protein [Flaveria bidentis]
  misc_feature (54)..(118): NCBI GI NO: 13277216 NR Description: ZF-HD homeobox protein [Flaveria trinervia]
  misc_feature (90)..(158): NCBI GI NO: 13277222 NR Description: ZF-HD homeobox protein [Flaveria bidentis]
  misc_feature (52)..(122): NCBI GI NO: 18410804 NR Description: expressed protein; protein id: At1g75240
  misc_feature (68)..(122): NCBI GI NO: 13374061 NR Description: ZF-HD homeobox protein [Flaveria bidentis]
  misc_feature (64)..(122): NCBI GI NO: 18398714 NR Description: expressed protein; protein id: At2g18350
  misc_feature (41)..(152): NCBI GI NO: 15230335 NR Description: putative protein; protein id: At3g50890
  misc_feature (41)..(152): NCBI GI NO: 21554149 NR Description: unknown [Arabidopsis thaliana]
TSLDPSSHAKSPGLGARGNLSPVSPQWAWGRRMEAMDVKYKPVMFPNGAGLKKPKPAAAVALAGEPLYRECLKNHAASLGGHAVDGCGEFMPSPGANPADPTSLKCAACGCHRNFHRRTLEGSPPPPAPAPLALPASAERDARPAAPRPGGDARGPPPGGRRRRRLRFRLGRLGVRRGAVGVPAAAAAPPAAGAGGAAAPATVLLPDGAAHGALARFRRARARGGGIPGAEAGPDPADAVQRAAPRRGRDAHAQEAVPHQVHRRAEAADAGAVGAARVAAAEARRGHRRRVVPRHRRRQGRLQGLDAQQQAQLPGRAQRPPQRLLARPRPRRRVAPNPSRRRRRCCSTVIPPVQDHPSPSRPHLVPDGRHRLQHQRRRLVGAHRRHRLHHGQRQRSFVAALRLN

SEQ ID NO: 25321 - protein, 372 aa, Zea mays subsp. mays
  peptide (1)..(372): Ceres Seq. ID no. 12406985
  misc_feature (36)..(90): Pfam Name: Pfam Description:  ZF-HD protein dimerisation region
  misc_feature (7)..(117): NCBI GI NO: 13277220 NR Description: ZF-HD homeobox protein [Flaveria bidentis]
  misc_feature (25)..(126): NCBI GI NO: 15222382 NR Description: hypothetical protein; protein id: At1g69600.1
  misc_feature (36)..(86): NCBI GI NO: 13277218 NR Description: ZF-HD homeobox protein [Flaveria bidentis]
  misc_feature (22)..(86): NCBI GI NO: 13277216 NR Description: ZF-HD homeobox protein [Flaveria trinervia]
  misc_feature (58)..(126): NCBI GI NO: 13277222 NR Description: ZF-HD homeobox protein [Flaveria bidentis]
  misc_feature (20)..(90): NCBI GI NO: 18410804 NR Description: expressed protein; protein id: At1g75240
  misc_feature (36)..(90): NCBI GI NO: 13374061 NR Description: ZF-HD homeobox protein [Flaveria bidentis]
  misc_feature (32)..(90): NCBI GI NO: 18398714 NR Description: expressed protein; protein id: At2g18350
  misc_feature (9)..(120): NCBI GI NO: 15230335 NR Description: putative protein; protein id: At3g50890
  misc_feature (9)..(120): NCBI GI NO: 21554149 NR Description: unknown [Arabidopsis thaliana]
MEAMDVKYKPVMFPNGAGLKKPKPAAAVALAGEPLYRECLKNHAASLGGHAVDGCGEFMPSPGANPADPTSLKCAACGCHRNFHRRTLEGSPPPPAPAPLALPASAERDARPAAPRPGGDARGPPPGGRRRRRLRFRLGRLGVRRGAVGVPAAAAAPPAAGAGGAAAPATVLLPDGAAHGALARFRRARARGGGIPGAEAGPDPADAVQRAAPRRGRDAHAQEAVPHQVHRRAEAADAGAVGAARVAAAEARRGHRRRVVPRHRRRQGRLQGLDAQQQAQLPGRAQRPPQRLLARPRPRRRVAPNPSRRRRRCCSTVIPPVQDHPSPSRPHLVPDGRHRLQHQRRRLVGAHRRHRLHHGQRQRSFVAALRLN

SEQ ID NO: 25322 - protein, 369 aa, Zea mays subsp. mays
  peptide (1)..(369): Ceres Seq. ID no. 12406986
  misc_feature (33)..(87): Pfam Name: Pfam Description:  ZF-HD protein dimerisation region
  misc_feature (4)..(114): NCBI GI NO: 13277220 NR Description: ZF-HD homeobox protein [Flaveria bidentis]
  misc_feature (22)..(123): NCBI GI NO: 15222382 NR Description: hypothetical protein; protein id: At1g69600.1
  misc_feature (33)..(83): NCBI GI NO: 13277218 NR Description: ZF-HD homeobox protein [Flaveria bidentis]
  misc_feature (19)..(83): NCBI GI NO: 13277216 NR Description: ZF-HD homeobox protein [Flaveria trinervia]
  misc_feature (55)..(123): NCBI GI NO: 13277222 NR Description: ZF-HD homeobox protein [Flaveria bidentis]
  misc_feature (17)..(87): NCBI GI NO: 18410804 NR Description: expressed protein; protein id: At1g75240
  misc_feature (33)..(87): NCBI GI NO: 13374061 NR Description: ZF-HD homeobox protein [Flaveria bidentis]
  misc_feature (29)..(87): NCBI GI NO: 18398714 NR Description: expressed protein; protein id: At2g18350
  misc_feature (6)..(117): NCBI GI NO: 15230335 NR Description: putative protein; protein id: At3g50890
  misc_feature (6)..(117): NCBI GI NO: 21554149 NR Description: unknown [Arabidopsis thaliana]
MDVKYKPVMFPNGAGLKKPKPAAAVALAGEPLYRECLKNHAASLGGHAVDGCGEFMPSPGANPADPTSLKCAACGCHRNFHRRTLEGSPPPPAPAPLALPASAERDARPAAPRPGGDARGPPPGGRRRRRLRFRLGRLGVRRGAVGVPAAAAAPPAAGAGGAAAPATVLLPDGAAHGALARFRRARARGGGIPGAEAGPDPADAVQRAAPRRGRDAHAQEAVPHQVHRRAEAADAGAVGAARVAAAEARRGHRRRVVPRHRRRQGRLQGLDAQQQAQLPGRAQRPPQRLLARPRPRRRVAPNPSRRRRRCCSTVIPPVQDHPSPSRPHLVPDGRHRLQHQRRRLVGAHRRHRLHHGQRQRSFVAALRLN

SEQ ID NO: 25323 - DNA, 1493 bp, Zea mays subsp. mays
  misc_feature (1)..(1493): Ceres Seq. ID no. 12469735
ataaaatgatttcttttatagagtgtacagctggcagtcgccgagccgtcctaactcagcgagagggtttcgaattggcgccaagccgccaaccattccccccaatcccgcctgccagccctagggtttctgctacgccatggcgggaaccgccgccgccgctcccatggacatcgatgcagccgcgccgcctcccccgccgcctggtgcggcggccaagggcaaggcgctgctctccgctggcggcagggcagcgccctgggtcgagaagtaccggccccagtccctcgccgacgtcgccgcccaccgcgatatcgtcgacacaattgacaggcttacaaacgagaatagacttccacacttgttgctatatgggccacctggcactgggaaaacatcgacgattctggctgttgcgaggaagctatatgggtctcagtatagcaacatgatcctggagctcaatgcgtcagatgaacgtggcattgatgttgtcaggcagcagatccaggattttgctggggcacgcagcctctcttttggagcaaggccttctgttaagctggttctcttggatgaagcagacgcaatgacaaaggatgcacaatttgcattgagaagagttatcgagaagtatacaaggagcacaaggtttgcactcatatgcaaccatgtcaacaaaattatccctgcgctacaatcaaggtgcaccaggtttagatttgctccactagatggcagtcatgttagagagcgtcttcaacatataataaaatctgaggggctcagtgtagatgacggtggcttgacagccctagtgcggttaagcaatggtgatatgaggaaggctttgaatatattgcagtcaacgcacatggcatcccaacaaatcacagaagaagctgtctatctttgcacaggaaaccccatgccaaaagatattgagcagatagctttttggctattaaatgaaccattttcaaccagcttcaaatatatatctgacatgaagatgagaaaagggctggccttggttgatatcatacgggaggttactatgtttgtgttcaaaatacaaatgccatctgatgttcgtgtaaagctaatcaataacttggctgatattgagtacagactaagctttgcatgcaacgataaactgcagctgggcgcactgatctcaactttcacggacactcgcacggctatggttgctgctgccagctaattccagtaatgtgaaggatgtttctgctgctccctctggaatctgaagatgaagcgcagctacattatggggtcaacatcttgcctgtagttagcaagctgaaaggtttggtgagggttgtcttagatcatctgtatgtctgctggacgtgatgtggtaactgcctggaacttgggagtactcgtatgactgaacgctgccaggcgttctcatgttatgcgtgtaagattctatccagtagtataaaccctagtgccgttctttg

SEQ ID NO: 25324 - protein, 362 aa, Zea mays subsp. mays
  peptide (1)..(362): Ceres Seq. ID no. 12469736
  misc_feature (74)..(208): Pfam Name: AAA Pfam Description: ATPase family associated with various cellular activities
  misc_feature (1)..(361): NCBI GI NO: 10798790 NR Description: replication factor C 36kDa subunit
  misc_feature (4)..(361): NCBI GI NO: 15223967 NR Description: putative replication factor C
  misc_feature (14)..(361): NCBI GI NO: 20841441 NR Description: replication factor C (activator 1) 5
  misc_feature (37)..(361): NCBI GI NO: 6677723 NR Description: replication factor C (activator 1) 5, 36
  misc_feature (27)..(361): NCBI GI NO: 27882432 NR Description: Similar to replication factor C (activator 1) 5(36
  misc_feature (47)..(361): NCBI GI NO: 23271821 NR Description: Similar to replication factor C (activator 1) 5,36
  misc_feature (10)..(340): NCBI GI NO: 34872605 NR Description: similar to replication factor C 5 isoform 1
  misc_feature (27)..(349): NCBI GI NO: 13431787 NR Description: Activator 1 40 kDa subunit
  misc_feature (40)..(350): NCBI GI NO: 19921076 NR Description: CG5313-PA [Drosophila melanogaster]
  misc_feature (27)..(347): NCBI GI NO: 30913228 NR Description: Activator 1 subunit 3
MAGTAAAAPMDIDAAAPPPPPPGAAAKGKALLSAGGRAAPWVEKYRPQSLADVAAHRDIVDTIDRLTNENRLPHLLLYGPPGTGKTSTILAVARKLYGSQYSNMILELNASDERGIDVVRQQIQDFAGARSLSFGARPSVKLVLLDEADAMTKDAQFALRRVIEKYTRSTRFALICNHVNKIIPALQSRCTRFRFAPLDGSHVRERLQHIIKSEGLSVDDGGLTALVRLSNGDMRKALNILQSTHMASQQITEEAVYLCTGNPMPKDIEQIAFWLLNEPFSTSFKYISDMKMRKGLALVDIIREVTMFVFKIQMPSDVRVKLINNLADIEYRLSFACNDKLQLGALISTFTDTRTAMVAAAS

SEQ ID NO: 25325 - protein, 353 aa, Zea mays subsp. mays
  peptide (1)..(353): Ceres Seq. ID no. 12469737
  misc_feature (65)..(199): Pfam Name: AAA Pfam Description: ATPase family associated with various cellular activities
  misc_feature (1)..(352): NCBI GI NO: 10798790 NR Description: replication factor C 36kDa subunit
  misc_feature (1)..(352): NCBI GI NO: 15223967 NR Description: putative replication factor C
  misc_feature (5)..(352): NCBI GI NO: 20841441 NR Description: replication factor C (activator 1) 5
  misc_feature (28)..(352): NCBI GI NO: 6677723 NR Description: replication factor C (activator 1) 5, 36
  misc_feature (18)..(352): NCBI GI NO: 27882432 NR Description: Similar to replication factor C (activator 1) 5(36
  misc_feature (38)..(352): NCBI GI NO: 23271821 NR Description: Similar to replication factor C (activator 1) 5,36
  misc_feature (1)..(331): NCBI GI NO: 34872605 NR Description: similar to replication factor C 5 isoform 1
  misc_feature (18)..(340): NCBI GI NO: 13431787 NR Description: Activator 1 40 kDa subunit
  misc_feature (31)..(341): NCBI GI NO: 19921076 NR Description: CG5313-PA [Drosophila melanogaster]
  misc_feature (18)..(338): NCBI GI NO: 30913228 NR Description: Activator 1 subunit 3
MDIDAAAPPPPPPGAAAKGKALLSAGGRAAPWVEKYRPQSLADVAAHRDIVDTIDRLTNENRLPHLLLYGPPGTGKTSTILAVARKLYGSQYSNMILELNASDERGIDVVRQQIQDFAGARSLSFGARPSVKLVLLDEADAMTKDAQFALRRVIEKYTRSTRFALICNHVNKIIPALQSRCTRFRFAPLDGSHVRERLQHIIKSEGLSVDDGGLTALVRLSNGDMRKALNILQSTHMASQQITEEAVYLCTGNPMPKDIEQIAFWLLNEPFSTSFKYISDMKMRKGLALVDIIREVTMFVFKIQMPSDVRVKLINNLADIEYRLSFACNDKLQLGALISTFTDTRTAMVAAAS

SEQ ID NO: 25326 - protein, 259 aa, Zea mays subsp. mays
  peptide (1)..(259): Ceres Seq. ID no. 12469738
  misc_feature (1)..(105): Pfam Name: AAA Pfam Description: ATPase family associated with various cellular activities
  misc_feature (1)..(258): NCBI GI NO: 10798790 NR Description: replication factor C 36kDa subunit
  misc_feature (1)..(258): NCBI GI NO: 15223967 NR Description: putative replication factor C
  misc_feature (1)..(258): NCBI GI NO: 20841441 NR Description: replication factor C (activator 1) 5
  misc_feature (1)..(258): NCBI GI NO: 6677723 NR Description: replication factor C (activator 1) 5, 36
  misc_feature (1)..(258): NCBI GI NO: 27882432 NR Description: Similar to replication factor C (activator 1) 5(36
  misc_feature (1)..(258): NCBI GI NO: 23271821 NR Description: Similar to replication factor C (activator 1) 5,36
  misc_feature (1)..(237): NCBI GI NO: 34872605 NR Description: similar to replication factor C 5 isoform 1
  misc_feature (1)..(246): NCBI GI NO: 13431787 NR Description: Activator 1 40 kDa subunit
  misc_feature (1)..(247): NCBI GI NO: 19921076 NR Description: CG5313-PA [Drosophila melanogaster]
  misc_feature (1)..(244): NCBI GI NO: 30913228 NR Description: Activator 1 subunit 3
MILELNASDERGIDVVRQQIQDFAGARSLSFGARPSVKLVLLDEADAMTKDAQFALRRVIEKYTRSTRFALICNHVNKIIPALQSRCTRFRFAPLDGSHVRERLQHIIKSEGLSVDDGGLTALVRLSNGDMRKALNILQSTHMASQQITEEAVYLCTGNPMPKDIEQIAFWLLNEPFSTSFKYISDMKMRKGLALVDIIREVTMFVFKIQMPSDVRVKLINNLADIEYRLSFACNDKLQLGALISTFTDTRTAMVAAAS

SEQ ID NO: 25327 - DNA, 1218 bp, Zea mays subsp. mays
  misc_feature (1)..(1218): Ceres Seq. ID no. 12387244
attccccaatctagggttgctgagctccccaccactgccggccatgcccgacgcggatgttgacaccgtgattcgcgaagccgccgcggccgcggccccagccggcgacgacgacagcgagggtgacaccgaggaggaggaggaggagggggacgaggtcgacgaggacgaggacgacgacgaggagttacccgccgaggcgccggcgccggacgaggagcaacctgctccagcgcccatctcgaccttgccggggaatccaaaccagctgacgctggtcttccagggcgaggtttacgttttcgaatccgtcacccccgagaaggttcaagctgtgctgctacttttaggacgtggtgaactaccacctggtttagctggcatggttttacccaatcaaaatgaaaacaagggctatgacgatatacttcagaggacagacattccagcaaaaagggttgcttcactaattaggttccgtgagaaaaggaaggaaagaaattttgataagaaaatacgttatgctgttcgcaaagaagtggcactcaggatgcagcgtcggaaggggcaatttgctggaagagccagtctggagggagaatctccagctcctggatgtgatcctggttctcagggctcaggcctagattttgcatctcgagaatcaatgtgccagaactgtggtactagtgaaaaaatgaccccagcaatgcgtcgtggtccagcgggtccaaggactttgtgcaatgcttgtggattgatgtgggcaaacaagggtaccctgagaagttgccccagggcaaaagttgaatctcctgcggttgcaactgagcagggaacaagtgacaacaaagccctggcaacactgaataataacaatgttgctgcaagcaatggcgaagccacaagtgcagcagagaaaggagtgccaaaggcgccgtgacagtatatagacattattgtcagagacaaagatttcggattctttgcctatagctagacaagacaccccgttagaaatatttggtaatgataatgattgtcatcaagtgtacattcattcttgcttgacagtgttagacgtgtaattaatataagctgtccgattgtgtaaacagtaaacccatatggcatctgttgtgttacaacttacactttctaactttcttcattctcataacatcatgatcaaagattcgatgctacccattgattgtc

SEQ ID NO: 25328 - protein, 313 aa, Zea mays subsp. mays
  peptide (1)..(313): Ceres Seq. ID no. 12387245
  misc_feature (157)..(196): Pfam Name: Pfam Description:  CCT motif
  misc_feature (19)..(312): NCBI GI NO: 13174240 NR Description: putative zinc finger protein [Oryza sativa]
  misc_feature (38)..(284): NCBI GI NO: 30686115 NR Description: GATA zinc finger protein [Arabidopsis thaliana]
  misc_feature (38)..(304): NCBI GI NO: 21537322 NR Description: flowering protein CONSTANS, putative
  misc_feature (38)..(284): NCBI GI NO: 18402914 NR Description: GATA zinc finger protein; protein id: At3g21175
  misc_feature (38)..(284): NCBI GI NO: 18403600 NR Description: flowering protein CONSTANS, putative
  misc_feature (38)..(284): NCBI GI NO: 15028099 NR Description: putative flowering protein CONSTANS
  misc_feature (26)..(303): NCBI GI NO: 11358938 NR Description: zinc-finger protein - Arabidopsis thaliana
  misc_feature (26)..(303): NCBI GI NO: 15233844 NR Description: Zinc finger protein, Zim; protein id: At4g24470
  misc_feature (38)..(226): NCBI GI NO: 25405485 NR Description: hypothetical protein F19C24.17
  misc_feature (184)..(284): NCBI GI NO: 26451385 NR Description: unknown protein [Arabidopsis thaliana]
FPNLGLLSSPPLPAMPDADVDTVIREAAAAAAPAGDDDSEGDTEEEEEEGDEVDEDEDDDEELPAEAPAPDEEQPAPAPISTLPGNPNQLTLVFQGEVYVFESVTPEKVQAVLLLLGRGELPPGLAGMVLPNQNENKGYDDILQRTDIPAKRVASLIRFREKRKERNFDKKIRYAVRKEVALRMQRRKGQFAGRASLEGESPAPGCDPGSQGSGLDFASRESMCQNCGTSEKMTPAMRRGPAGPRTLCNACGLMWANKGTLRSCPRAKVESPAVATEQGTSDNKALATLNNNNVAASNGEATSAAEKGVPKAP

SEQ ID NO: 25329 - protein, 299 aa, Zea mays subsp. mays
  peptide (1)..(299): Ceres Seq. ID no. 12387246
  misc_feature (143)..(182): Pfam Name: Pfam Description:  CCT motif
  misc_feature (5)..(298): NCBI GI NO: 13174240 NR Description: putative zinc finger protein [Oryza sativa]
  misc_feature (24)..(270): NCBI GI NO: 30686115 NR Description: GATA zinc finger protein [Arabidopsis thaliana]
  misc_feature (24)..(290): NCBI GI NO: 21537322 NR Description: flowering protein CONSTANS, putative
  misc_feature (24)..(270): NCBI GI NO: 18402914 NR Description: GATA zinc finger protein; protein id: At3g21175
  misc_feature (24)..(270): NCBI GI NO: 18403600 NR Description: flowering protein CONSTANS, putative
  misc_feature (24)..(270): NCBI GI NO: 15028099 NR Description: putative flowering protein CONSTANS
  misc_feature (12)..(289): NCBI GI NO: 11358938 NR Description: zinc-finger protein - Arabidopsis thaliana
  misc_feature (12)..(289): NCBI GI NO: 15233844 NR Description: Zinc finger protein, Zim; protein id: At4g24470
  misc_feature (24)..(212): NCBI GI NO: 25405485 NR Description: hypothetical protein F19C24.17
  misc_feature (170)..(270): NCBI GI NO: 26451385 NR Description: unknown protein [Arabidopsis thaliana]
MPDADVDTVIREAAAAAAPAGDDDSEGDTEEEEEEGDEVDEDEDDDEELPAEAPAPDEEQPAPAPISTLPGNPNQLTLVFQGEVYVFESVTPEKVQAVLLLLGRGELPPGLAGMVLPNQNENKGYDDILQRTDIPAKRVASLIRFREKRKERNFDKKIRYAVRKEVALRMQRRKGQFAGRASLEGESPAPGCDPGSQGSGLDFASRESMCQNCGTSEKMTPAMRRGPAGPRTLCNACGLMWANKGTLRSCPRAKVESPAVATEQGTSDNKALATLNNNNVAASNGEATSAAEKGVPKAP

SEQ ID NO: 25330 - protein, 186 aa, Zea mays subsp. mays
  peptide (1)..(186): Ceres Seq. ID no. 12387247
  misc_feature (30)..(69): Pfam Name: Pfam Description:  CCT motif
  misc_feature (1)..(185): NCBI GI NO: 13174240 NR Description: putative zinc finger protein [Oryza sativa]
  misc_feature (1)..(157): NCBI GI NO: 30686115 NR Description: GATA zinc finger protein [Arabidopsis thaliana]
  misc_feature (1)..(177): NCBI GI NO: 21537322 NR Description: flowering protein CONSTANS, putative
  misc_feature (1)..(157): NCBI GI NO: 18402914 NR Description: GATA zinc finger protein; protein id: At3g21175
  misc_feature (1)..(157): NCBI GI NO: 18403600 NR Description: flowering protein CONSTANS, putative
  misc_feature (1)..(157): NCBI GI NO: 15028099 NR Description: putative flowering protein CONSTANS
  misc_feature (1)..(176): NCBI GI NO: 11358938 NR Description: zinc-finger protein - Arabidopsis thaliana
  misc_feature (1)..(176): NCBI GI NO: 15233844 NR Description: Zinc finger protein, Zim; protein id: At4g24470
  misc_feature (1)..(99): NCBI GI NO: 25405485 NR Description: hypothetical protein F19C24.17
  misc_feature (57)..(157): NCBI GI NO: 26451385 NR Description: unknown protein [Arabidopsis thaliana]
MVLPNQNENKGYDDILQRTDIPAKRVASLIRFREKRKERNFDKKIRYAVRKEVALRMQRRKGQFAGRASLEGESPAPGCDPGSQGSGLDFASRESMCQNCGTSEKMTPAMRRGPAGPRTLCNACGLMWANKGTLRSCPRAKVESPAVATEQGTSDNKALATLNNNNVAASNGEATSAAEKGVPKAP

SEQ ID NO: 25331 - DNA, 1415 bp, Zea mays subsp. mays
  misc_feature (1)..(1415): Ceres Seq. ID no. 12352230
atcgaatcggatcggaggggaagcaggagcccgcagggggcggctagcgctggtgcgtgcttcctccattatattatcattgcgcctcgtcctccccaatcctcattgcccatcacattccatcgaccagtctcaattcaaggagctgaggacgacctgtccgtccggagctgatcgagaaacggaggggcggttccagtttcagtccagctagctagctagctagaagatcccattcgctgacagatgggttcctacatccaaggagatgatgaggtccctgtgtacgagtcgggcgccgaggtgcttgcgaaggtgcaagagaaatgggcggcggcggcggcatcgcggcctcctccctacccggccatgtactcgagcgtgttcggcggcatcatcctggacccggccatgatggttctccccatcgacgaccacatggtccaccggggccacggcgtgttcgacacggccatgatcctggacggcgccctgtacgagctggacgcgcacctggaccgcttcctccggtcggccgcggcggcgcgcgtggacacggccccgttcccgcgcgaggcgctgcggcgcatcctgatccagatgaccgccgcctcgggctgccgcatgggctccatccgctactggctcagctccgggcccggcgacttcctgctgtcatccaggggctgcccgtcgccggcgttctacggcgtggtgatcgcgtcggagtacgagcagtgcggggtggacggcaccggggtgcgcgcggtcacggccacggtgcccatgaagccgccgcagttcgcgaccgtgaagaacgtgaactacctgcccaacgtgctgtccatcatggacgccgaggaccgcggcgccttcgcgtccgtgtgggtggacgaccaagggtacgtggccgagggccccatggtgaacgtggcgttcgtgacgcccgagcgggagctcgtgctcccggccttcgacaagatcctcagcgggtgcacggccaagaggatgctcgcgctggcgcctcgcctcgtggacgccggcctgctcgcgggcgtcagcaccagggacatcacggccgaggacgccaagcgcagcgccgagatggcgttcgtcggcagcggcctccccgtgctgcccgtcgtcgagtgggacggcaaacccatcggagacgggaaggttgggaagctgatgccggcgctgtctgatctgctgtgggaggacatgaagtccggtcccgacaggatccccgttccatacaagcagtagcctgaagcgaaggcgaagccatgacatctctctctctgtgtgtgtgtgtgtttgcagtcgaatggtgattgccttgcctgaataaaaataaacctctctctgtatatctgagcgaatcgttttggaaatacgagcagattccattc

SEQ ID NO: 25332 - protein, 340 aa, Zea mays subsp. mays
  peptide (1)..(340): Ceres Seq. ID no. 12352231
  misc_feature (48)..(324): Pfam Name: Pfam Description:  Aminotransferase class IV
  misc_feature (42)..(339): NCBI GI NO: 34904468 NR Description: putative branched-chain amino acid aminotransferaseprotein
  misc_feature (41)..(338): NCBI GI NO: 22327924 NR Description: branched-chain amino acid aminotransferase-like
  misc_feature (42)..(338): NCBI GI NO: 9758354 NR Description: branched-chain amino acid aminotransferase-like
  misc_feature (26)..(327): NCBI GI NO: 23474241 NR Description: hypothetical protein
  misc_feature (59)..(322): NCBI GI NO: 20095063 NR Description: Branched-chain amino acid aminotransferase
  misc_feature (44)..(322): NCBI GI NO: 33599322 NR Description: probable aminotransferase
  misc_feature (44)..(322): NCBI GI NO: 33591942 NR Description: probable aminotransferase [Bordetella pertussis]
  misc_feature (44)..(322): NCBI GI NO: 33595042 NR Description: probable aminotransferase
  misc_feature (49)..(329): NCBI GI NO: 15669197 NR Description: branched-chain amino acid aminotransferase (ilvE)
  misc_feature (61)..(338): NCBI GI NO: 20804076 NR Description: PUTATIVE BRANCHED-CHAIN AMINO ACID AMINOTRANSFERASEPROTEIN
MGSYIQGDDEVPVYESGAEVLAKVQEKWAAAAASRPPPYPAMYSSVFGGIILDPAMMVLPIDDHMVHRGHGVFDTAMILDGALYELDAHLDRFLRSAAAARVDTAPFPREALRRILIQMTAASGCRMGSIRYWLSSGPGDFLLSSRGCPSPAFYGVVIASEYEQCGVDGTGVRAVTATVPMKPPQFATVKNVNYLPNVLSIMDAEDRGAFASVWVDDQGYVAEGPMVNVAFVTPERELVLPAFDKILSGCTAKRMLALAPRLVDAGLLAGVSTRDITAEDAKRSAEMAFVGSGLPVLPVVEWDGKPIGDGKVGKLMPALSDLLWEDMKSGPDRIPVPYKQ

SEQ ID NO: 25333 - protein, 299 aa, Zea mays subsp. mays
  peptide (1)..(299): Ceres Seq. ID no. 12352232
  misc_feature (7)..(283): Pfam Name: Pfam Description:  Aminotransferase class IV
  misc_feature (1)..(298): NCBI GI NO: 34904468 NR Description: putative branched-chain amino acid aminotransferaseprotein
  misc_feature (1)..(297): NCBI GI NO: 22327924 NR Description: branched-chain amino acid aminotransferase-like
  misc_feature (1)..(297): NCBI GI NO: 9758354 NR Description: branched-chain amino acid aminotransferase-like
  misc_feature (1)..(286): NCBI GI NO: 23474241 NR Description: hypothetical protein
  misc_feature (18)..(281): NCBI GI NO: 20095063 NR Description: Branched-chain amino acid aminotransferase
  misc_feature (3)..(281): NCBI GI NO: 33599322 NR Description: probable aminotransferase
  misc_feature (3)..(281): NCBI GI NO: 33591942 NR Description: probable aminotransferase [Bordetella pertussis]
  misc_feature (3)..(281): NCBI GI NO: 33595042 NR Description: probable aminotransferase
  misc_feature (8)..(288): NCBI GI NO: 15669197 NR Description: branched-chain amino acid aminotransferase (ilvE)
  misc_feature (20)..(297): NCBI GI NO: 20804076 NR Description: PUTATIVE BRANCHED-CHAIN AMINO ACID AMINOTRANSFERASEPROTEIN
MYSSVFGGIILDPAMMVLPIDDHMVHRGHGVFDTAMILDGALYELDAHLDRFLRSAAAARVDTAPFPREALRRILIQMTAASGCRMGSIRYWLSSGPGDFLLSSRGCPSPAFYGVVIASEYEQCGVDGTGVRAVTATVPMKPPQFATVKNVNYLPNVLSIMDAEDRGAFASVWVDDQGYVAEGPMVNVAFVTPERELVLPAFDKILSGCTAKRMLALAPRLVDAGLLAGVSTRDITAEDAKRSAEMAFVGSGLPVLPVVEWDGKPIGDGKVGKLMPALSDLLWEDMKSGPDRIPVPYKQ

SEQ ID NO: 25334 - protein, 293 aa, Zea mays subsp. mays
  peptide (1)..(293): Ceres Seq. ID no. 12352233
  misc_feature (12)..(275): NCBI GI NO: 23102225 NR Description: hypothetical protein [Azotobacter vinelandii]
MGGGGGIAASSLPGHVLERVRRHHPGPGHDGSPHRRPHGPPGPRRVRHGHDPGRRPVRAGRAPGPLPPVGRGGARGHGPVPARGAAAHPDPDDRRLGLPHGLHPLLAQLRARRLPAVIQGLPVAGVLRRGDRVGVRAVRGGRHRGARGHGHGAHEAAAVRDREERELPAQRAVHHGRRGPRRLRVRVGGRPRVRGRGPHGERGVRDARAGARAPGLRQDPQRVHGQEDARAGASPRGRRPARGRQHQGHHGRGRQAQRRDGVRRQRPPRAARRRVGRQTHRRREGWEADAGAV

SEQ ID NO: 25335 - DNA, 1838 bp, Zea mays subsp. mays
  misc_feature (1)..(1838): Ceres Seq. ID no. 12405709
gctgttcccctccctcctttttttcgtcgtctcgcacgctctctttctctctctctctctctcttgcccatccccccacctcggctgggctcagctcagctcctaaaccggcacctacctctctgcctgctgccccggcccctgatcctgatttccccaatcgagagtccgagacccgagaggaggcacaggcacctgcgctagctgcagctgcaaatcgtcttccccagatccggcgccgcctagttcgctcctgctcgcgacagcgcccagagccgtccgcgtgcgcccgcagagatcgtttcggggacagccgagcagagcagagctgactctgccgcttgttgcccgttcttggctgctgttgctggcgagagcgcgcaggaggagcggttgatttttgattctctctgtccctccctcccttgcttcgcttcgctcgcgcggggtgcgtgcacgtaccatgagaagatgatgcgcgccaggcccaaaggtacattcgccgacgcgatgagggagagctcccctcctcctcctccccctccccctccggctccggcttcggcagcggtgaaagaggacgagtgggaggtgcggcccggcgggatgctggtgcagaagcggagccccgacgccgacgcccccgccggggcgcccgtccctaccatccgcgtcaaggtcaagttcaacggcgtgtaccacgagatctacatcaactcccaggcctccttcggtgagctgaagaagatgctgtcggcgcggaccgggctgcaccccgaggaccagaagctggtgtacaaggacaaggagcgggactccaaggcgttcctggacatggccggcgtcaaggaccgctccaagttggtgctgctcgaggaccccgccgcgcaggccaagcgcctcctcgagcagcgccgcaccgacaaggcggagcgcgccgccaagtccatctctcgcatcggcctcgacgtcgacaagctcgccaccaaggtgtcggcgctggaggccatcgtcagcaagggcggcaaggtggtggacgctgacgtggtcgccctcaccgaggcgctcatgaacgagctggtcaagctggactccatcgccgccgacggcgaagtcaaggtgcagcgacgaatgcaggagaagcgggtgcagaagtacgtggagacgctggacgctatccgcgccaagaacgcggcggcgcccaaggccaaggccaaggccaacgacgacatgaatgggcacgccaaggcccgcgcgccgcaactcccgccgcgcccgccgcccgtgtcgcagaggcggaacttccagcagccctccccggcgccagcgccgcccacgcagggctgggagtcgttcgacctgctgtcgtcggtgccgtccacgtcctcggccaccgtgaccaccaccatggcggccgcgaccaccaccacctcgccggccggcgtctccccgatcccgcggttcgactgggagctcttctgaagccctccctcctcgcggcgcgtcggcgtgccggttggtcgatcagacggtacctacctcccttgtccatggatcttccctgctctcatcagtagtgccattgtttcttctgtggattctttccatttcttttcgcctcattctctcttcttttcttccatttcctttcgaatttgtatatctactatatgtctacaaaaagaacagagagaccgacgcggtgcggtgagtgtgttcactgggtcaaaagtccgtcagttgacaactcctcctcgtgaggatccatccatgcatgttgttgttcagtcacagcaaataagtggtggtcttattatgatggcgatgaagaagtttcc

SEQ ID NO: 25336 - protein, 336 aa, Zea mays subsp. mays
  peptide (1)..(336): Ceres Seq. ID no. 12405710
  misc_feature (64)..(137): Pfam Name: Pfam Description:  Ubiquitin family
  misc_feature (1)..(336): NCBI GI NO: 25553557 NR Description: OSJNBa0038F22.4
  misc_feature (20)..(336): NCBI GI NO: 34898024 NR Description: ESTs AU082174
  misc_feature (40)..(336): NCBI GI NO: 15242267 NR Description: putative protein; protein id: At5g52060.1
  misc_feature (27)..(336): NCBI GI NO: 21537107 NR Description: unknown [Arabidopsis thaliana]
  misc_feature (27)..(336): NCBI GI NO: 15240726 NR Description: putative protein; protein id: At5g07220
  misc_feature (36)..(306): NCBI GI NO: 30697630 NR Description: BAG domain containing protein
  misc_feature (36)..(336): NCBI GI NO: 21553443 NR Description: unknown [Arabidopsis thaliana]
  misc_feature (36)..(336): NCBI GI NO: 30697627 NR Description: BAG domain containing protein
  misc_feature (36)..(306): NCBI GI NO: 10176928 NR Description: contains similarity to unknownprotein~emb|CAB87278
  misc_feature (99)..(240): NCBI GI NO: 10334497 NR Description: hypothetical protein [Cicer arietinum]
MMRARPKGTFADAMRESSPPPPPPPPPAPASAAVKEDEWEVRPGGMLVQKRSPDADAPAGAPVPTIRVKVKFNGVYHEIYINSQASFGELKKMLSARTGLHPEDQKLVYKDKERDSKAFLDMAGVKDRSKLVLLEDPAAQAKRLLEQRRTDKAERAAKSISRIGLDVDKLATKVSALEAIVSKGGKVVDADVVALTEALMNELVKLDSIAADGEVKVQRRMQEKRVQKYVETLDAIRAKNAAAPKAKAKANDDMNGHAKARAPQLPPRPPPVSQRRNFQQPSPAPAPPTQGWESFDLLSSVPSTSSATVTTTMAAATTTTSPAGVSPIPRFDWELF

SEQ ID NO: 25337 - protein, 335 aa, Zea mays subsp. mays
  peptide (1)..(335): Ceres Seq. ID no. 12405711
  misc_feature (63)..(136): Pfam Name: Pfam Description:  Ubiquitin family
  misc_feature (1)..(335): NCBI GI NO: 25553557 NR Description: OSJNBa0038F22.4
  misc_feature (19)..(335): NCBI GI NO: 34898024 NR Description: ESTs AU082174
  misc_feature (39)..(335): NCBI GI NO: 15242267 NR Description: putative protein; protein id: At5g52060.1
  misc_feature (26)..(335): NCBI GI NO: 21537107 NR Description: unknown [Arabidopsis thaliana]
  misc_feature (26)..(335): NCBI GI NO: 15240726 NR Description: putative protein; protein id: At5g07220
  misc_feature (35)..(305): NCBI GI NO: 30697630 NR Description: BAG domain containing protein
  misc_feature (35)..(335): NCBI GI NO: 21553443 NR Description: unknown [Arabidopsis thaliana]
  misc_feature (35)..(335): NCBI GI NO: 30697627 NR Description: BAG domain containing protein
  misc_feature (35)..(305): NCBI GI NO: 10176928 NR Description: contains similarity to unknownprotein~emb|CAB87278
  misc_feature (98)..(239): NCBI GI NO: 10334497 NR Description: hypothetical protein [Cicer arietinum]
MRARPKGTFADAMRESSPPPPPPPPPAPASAAVKEDEWEVRPGGMLVQKRSPDADAPAGAPVPTIRVKVKFNGVYHEIYINSQASFGELKKMLSARTGLHPEDQKLVYKDKERDSKAFLDMAGVKDRSKLVLLEDPAAQAKRLLEQRRTDKAERAAKSISRIGLDVDKLATKVSALEAIVSKGGKVVDADVVALTEALMNELVKLDSIAADGEVKVQRRMQEKRVQKYVETLDAIRAKNAAAPKAKAKANDDMNGHAKARAPQLPPRPPPVSQRRNFQQPSPAPAPPTQGWESFDLLSSVPSTSSATVTTTMAAATTTTSPAGVSPIPRFDWELF

SEQ ID NO: 25338 - protein, 323 aa, Zea mays subsp. mays
  peptide (1)..(323): Ceres Seq. ID no. 12405712
  misc_feature (51)..(124): Pfam Name: Pfam Description:  Ubiquitin family
  misc_feature (1)..(323): NCBI GI NO: 25553557 NR Description: OSJNBa0038F22.4
  misc_feature (7)..(323): NCBI GI NO: 34898024 NR Description: ESTs AU082174
  misc_feature (27)..(323): NCBI GI NO: 15242267 NR Description: putative protein; protein id: At5g52060.1
  misc_feature (14)..(323): NCBI GI NO: 21537107 NR Description: unknown [Arabidopsis thaliana]
  misc_feature (14)..(323): NCBI GI NO: 15240726 NR Description: putative protein; protein id: At5g07220
  misc_feature (23)..(293): NCBI GI NO: 30697630 NR Description: BAG domain containing protein
  misc_feature (23)..(323): NCBI GI NO: 21553443 NR Description: unknown [Arabidopsis thaliana]
  misc_feature (23)..(323): NCBI GI NO: 30697627 NR Description: BAG domain containing protein
  misc_feature (23)..(293): NCBI GI NO: 10176928 NR Description: contains similarity to unknownprotein~emb|CAB87278
  misc_feature (86)..(227): NCBI GI NO: 10334497 NR Description: hypothetical protein [Cicer arietinum]
MRESSPPPPPPPPPAPASAAVKEDEWEVRPGGMLVQKRSPDADAPAGAPVPTIRVKVKFNGVYHEIYINSQASFGELKKMLSARTGLHPEDQKLVYKDKERDSKAFLDMAGVKDRSKLVLLEDPAAQAKRLLEQRRTDKAERAAKSISRIGLDVDKLATKVSALEAIVSKGGKVVDADVVALTEALMNELVKLDSIAADGEVKVQRRMQEKRVQKYVETLDAIRAKNAAAPKAKAKANDDMNGHAKARAPQLPPRPPPVSQRRNFQQPSPAPAPPTQGWESFDLLSSVPSTSSATVTTTMAAATTTTSPAGVSPIPRFDWELF

SEQ ID NO: 25339 - DNA, 1124 bp, Zea mays subsp. mays
  misc_feature (1)..(1124): Ceres Seq. ID no. 12352234
aatgccggcactgccggtcccaccgccggcgccaccgctcccgcggcggtatcctcgactcccagaaccgtcctgctctttgtgctctcgaaagcgccggatctaaccttcaccacctccggggcctcctccgccaccgccgcctgccaggcggcctccactcctttggctgctacgcctcgccacaggcatcctcgatggtcgccaaccttgtggagggcgtgtcgtaccccttcttctactcgctcgccgacatgggtaccctccccgaccaccccacaagaacatcgctcgcctcctcaaggccaagcgcttccgcaagcccgatatctccgagaccatccaggagctgctcggcggcgaggtggggagggggcaaccatccggtgggttggtggtggacgtgggtgccaatgttggcatggcatcattcgtggccggctggccgccgtgacggagtttcgggtgctggcattcgagcccgtgttcgagaatctgcagcggagatgcgacggggtgtacctcaaccgggtgcaggaccgcattgtggtgtatcacgctgcgtcgctgcagcttctgatcgagttgggactattacgatgcacaaggtgattggtcgactggacaacagtgctatatctgcagatggtacaaagttagcattcaagtctaatgcagaaattgctgttgaagtttccacaattcctttggatgaagttgttccagatactgagagagttcttatgatctaagttgatgttcaaggctgggaataccacgtactgggaggtgcatcaaatttgctttcaaggattaaaggtgaagctccctatccctaccttatatatgaagaagatgaacacctactgcaggctggcaacagcagtgcacaggacataaggacatttctcactagtgttggttataaccactgtaaaaggcatggaaatggtgctcactgtaaaaggaatagacaaatttgtttctgattgatgctcttatgctcctaagctaggtttgtatatgaactctgaagaatcagctgagttctggcagttttgcccctttgttacttagcaatgccagatgtttatacatgtcatgtgcccaatagttgtattgct

SEQ ID NO: 25340 - protein, 249 aa, Zea mays subsp. mays
  peptide (1)..(249): Ceres Seq. ID no. 12352235
  misc_feature (189)..(249): NCBI GI NO: 34896590 NR Description: hypothetical protein [Oryza sativa]
  misc_feature (46)..(92): NCBI GI NO: 34896590 NR Description: hypothetical protein [Oryza sativa]
  misc_feature (189)..(249): NCBI GI NO: 21593723 NR Description: unknown [Arabidopsis thaliana]
  misc_feature (49)..(92): NCBI GI NO: 21593723 NR Description: unknown [Arabidopsis thaliana]
  misc_feature (189)..(249): NCBI GI NO: 18401209 NR Description: expressed protein; protein id: At2g26680
  misc_feature (49)..(92): NCBI GI NO: 18401209 NR Description: expressed protein; protein id: At2g26680
CRHCRSHRRRHRSRGGILDSQNRPALCALESAGSNLHHLRGLLRHRRLPGGLHSFGCYASPQASSMVANLVEGVSYPFFYSLADMGTLPDHPTRTSLASSRPSASASPISPRPSRSCSAARWGGGNHPVGWWWTWVPMLAWHHSWPAGRRDGVSGAGIRARVRESAAEMRRGVPQPGAGPHCGVSRCVAAASDRVGTITMHKVIGRLDNSAISADGTKLAFKSNAEIAVEVSTIPLDEVVPDTERVLMI

SEQ ID NO: 25341 - protein, 203 aa, Zea mays subsp. mays
  peptide (1)..(203): Ceres Seq. ID no. 12352236
  misc_feature (149)..(189): NCBI GI NO: 34896590 NR Description: hypothetical protein [Oryza sativa]
  misc_feature (149)..(189): NCBI GI NO: 21593723 NR Description: unknown [Arabidopsis thaliana]
  misc_feature (149)..(189): NCBI GI NO: 18401209 NR Description: expressed protein; protein id: At2g26680
NAGTAGPTAGATAPAAVSSTPRTVLLFVLSKAPDLTFTTSGASSATAACQAASTPLAATPRHRHPRWSPTLWRACRTPSSTRSPTWVPSPTTPQEHRSPPQGQALPQARYLRDHPGAARRRGGEGATIRWVGGGRGCQCWHGIIRGRLAAVTEFRVLAFEPVFENLQRRCDGVYLNRVQDRIVVYHAASLQLLIELGLLRCTR

SEQ ID NO: 25342 - protein, 184 aa, Zea mays subsp. mays
  peptide (1)..(184): Ceres Seq. ID no. 12352237
  misc_feature (124)..(184): NCBI GI NO: 34896590 NR Description: hypothetical protein [Oryza sativa]
  misc_feature (1)..(27): NCBI GI NO: 34896590 NR Description: hypothetical protein [Oryza sativa]
  misc_feature (124)..(184): NCBI GI NO: 21593723 NR Description: unknown [Arabidopsis thaliana]
  misc_feature (1)..(27): NCBI GI NO: 21593723 NR Description: unknown [Arabidopsis thaliana]
  misc_feature (124)..(184): NCBI GI NO: 18401209 NR Description: expressed protein; protein id: At2g26680
  misc_feature (1)..(27): NCBI GI NO: 18401209 NR Description: expressed protein; protein id: At2g26680
MVANLVEGVSYPFFYSLADMGTLPDHPTRTSLASSRPSASASPISPRPSRSCSAARWGGGNHPVGWWWTWVPMLAWHHSWPAGRRDGVSGAGIRARVRESAAEMRRGVPQPGAGPHCGVSRCVAAASDRVGTITMHKVIGRLDNSAISADGTKLAFKSNAEIAVEVSTIPLDEVVPDTERVLMI

SEQ ID NO: 25343 - DNA, 1987 bp, Zea mays subsp. mays
  misc_feature (1)..(1987): Ceres Seq. ID no. 12358799
ctcgagtcgagcgaaccgaagccgaacatacccacccatcgtctcgtcgtctcgtcgcgcgtgggcgtggctctctctccccccacctcctcttttaagacgacgccatcgccagccggccctccctcgccgtccggcgccgtcctccttcgtccttccctctcatcacagtttccacctcgcgaggggctcgcgcgcgcgcccatcccggccgatcgactcacgaattcgcgcgcgatcatattcgtgcaagggcatccccgcacggccggaagcacggaatcacttccccgccccccaattcccgggctcctcggcgccgatccctcgccggtgttcgctttccggcggtttccgcggcgtgtcgcgggcaggcgcaggcggctcggctcggttgtttcctcctcgtgccatcatccatggaggcgaagcagcgcccgcggcacggcggggagaggaggccgccgccggcgacggacggcggcgaggagtacgacccgtggacggcgtggctctacaagccgcgcaccatctcggtgctcctcgtcggcgcctgccttctcatctgggcaagtggagcacttgatcctgaaggtactgccgctcacagtagcgtgacatcaatcaagaggggtgtctgggctatgattgcagtcttccttgcctactgcacgcttcaggcaccttcaacgatacttattaggccccatcctgctgtctggcgcctggtacatggactggctgtcgtttacctcgttgctcttacctttcttcttttccagaaccgtgacgatgctcgccagttcatgaaacaccttcacccagatcttggagttgaattgccggagagatcttatggagcagattgccgcttgtatgttccagaaaaccctaaaaacaagttcataaatatttatgagacattgtttgatgaatttgttgttgcccatatccttgggtggtggggcaaagctgtaatgatacgaaatcaacttctactttgggtcttgtcgattggctttgagctaatggagctaacgttcagacatatgctgccaaactttaatgagtgctggtgggatagcattatcttggacatattgatctgcaattggtttggtatttgggcaggaatgcacacagtccgtcactttgatggcaaaacttatgaatgggttggattgagccgccaacgaagtatcatgggtaaggtgaaaagatcgttgagccagttcactcctgctcaatgggacaaggatcagtggcatcctttcatggggccactgcggttcatccaagtgctgttcctctgcgttgtcttcatgaccgtggagcttaacacattcttccttaagttttgcctttggatccctccaaggaaccccttggtcgtgtacagattgatcctctggtggctgatcgccatcccaaccatccgcgagtacaactcctacctgcaagacaggaaaccggtgaagaaggttggagccttctgttggctctctctagctatatgcatagtggagctgcttatctgcatgaagtttgggcatgggctgtttcatgacccgatgcctacctggctgatcatcttttggagctcggtcgggactgcactcgtgattttcttgctttcgtggtcatggaggagtcaccaaaggttcaggagaaagcagctctgattgtttcagtttgctacttttctttttcgaattttatataggcgttgtacatatttgatatggtttgtgatgtaacttacgttttaggggtggccatttttctgctgcccctggcaggaacttggtttgtcacgatagatcatgcattgttgacaacatgagattgattaataaattgaaataaccgcgacatcataaccagttgtaattaattattaaagcaaggtcactgcatattttggttccaaactaattctgggccaacaatgcacagttctgtaatacgaatgaccaatcattatctt

SEQ ID NO: 25344 - protein, 420 aa, Zea mays subsp. mays
  peptide (1)..(420): Ceres Seq. ID no. 12358800
  misc_feature (96)..(379): Pfam Name: Pfam Description:  Phosphatidyl serine synthase
  misc_feature (4)..(379): NCBI GI NO: 25518032 NR Description: F9L1.4 protein - Arabidopsis thaliana
  misc_feature (209)..(323): NCBI GI NO: 34911216 NR Description: putative phosphatidylserine synthase
  misc_feature (50)..(138): NCBI GI NO: 34911216 NR Description: putative phosphatidylserine synthase
  misc_feature (211)..(419): NCBI GI NO: 22329573 NR Description: putative phosphatidylserine synthase
  misc_feature (1)..(410): NCBI GI NO: 13540555 NR Description: phosphatidylserine synthase 2 [Homo sapiens]
  misc_feature (17)..(51): NCBI GI NO: 34911216 NR Description: putative phosphatidylserine synthase
  misc_feature (1)..(410): NCBI GI NO: 2190007 NR Description: phosphatidylserine synthase II
  misc_feature (1)..(410): NCBI GI NO: 4063700 NR Description: phosphatidylserine synthase-2 [Mus musculus]
  misc_feature (1)..(410): NCBI GI NO: 31560497 NR Description: phosphatidylserine synthase 2 [Mus musculus]
  misc_feature (72)..(410): NCBI GI NO: 14290490 NR Description: Similar to phosphatidylserine synthase 2
MEAKQRPRHGGERRPPPATDGGEEYDPWTAWLYKPRTISVLLVGACLLIWASGALDPEGTAAHSSVTSIKRGVWAMIAVFLAYCTLQAPSTILIRPHPAVWRLVHGLAVVYLVALTFLLFQNRDDARQFMKHLHPDLGVELPERSYGADCRLYVPENPKNKFINIYETLFDEFVVAHILGWWGKAVMIRNQLLLWVLSIGFELMELTFRHMLPNFNECWWDSIILDILICNWFGIWAGMHTVRHFDGKTYEWVGLSRQRSIMGKVKRSLSQFTPAQWDKDQWHPFMGPLRFIQVLFLCVVFMTVELNTFFLKFCLWIPPRNPLVVYRLILWWLIAIPTIREYNSYLQDRKPVKKVGAFCWLSLAICIVELLICMKFGHGLFHDPMPTWLIIFWSSVGTALVIFLLSWSWRSHQRFRRKQL

SEQ ID NO: 25345 - protein, 345 aa, Zea mays subsp. mays
  peptide (1)..(345): Ceres Seq. ID no. 12358801
  misc_feature (21)..(304): Pfam Name: Pfam Description:  Phosphatidyl serine synthase
  misc_feature (1)..(304): NCBI GI NO: 25518032 NR Description: F9L1.4 protein - Arabidopsis thaliana
  misc_feature (134)..(248): NCBI GI NO: 34911216 NR Description: putative phosphatidylserine synthase
  misc_feature (1)..(63): NCBI GI NO: 34911216 NR Description: putative phosphatidylserine synthase
  misc_feature (136)..(344): NCBI GI NO: 22329573 NR Description: putative phosphatidylserine synthase
  misc_feature (1)..(335): NCBI GI NO: 13540555 NR Description: phosphatidylserine synthase 2 [Homo sapiens]
  misc_feature (1)..(335): NCBI GI NO: 2190007 NR Description: phosphatidylserine synthase II
  misc_feature (1)..(335): NCBI GI NO: 4063700 NR Description: phosphatidylserine synthase-2 [Mus musculus]
  misc_feature (1)..(335): NCBI GI NO: 31560497 NR Description: phosphatidylserine synthase 2 [Mus musculus]
  misc_feature (1)..(335): NCBI GI NO: 14290490 NR Description: Similar to phosphatidylserine synthase 2
  misc_feature (1)..(339): NCBI GI NO: 8388685 NR Description: phosphatidylserine synthase [Leishmania major]
MIAVFLAYCTLQAPSTILIRPHPAVWRLVHGLAVVYLVALTFLLFQNRDDARQFMKHLHPDLGVELPERSYGADCRLYVPENPKNKFINIYETLFDEFVVAHILGWWGKAVMIRNQLLLWVLSIGFELMELTFRHMLPNFNECWWDSIILDILICNWFGIWAGMHTVRHFDGKTYEWVGLSRQRSIMGKVKRSLSQFTPAQWDKDQWHPFMGPLRFIQVLFLCVVFMTVELNTFFLKFCLWIPPRNPLVVYRLILWWLIAIPTIREYNSYLQDRKPVKKVGAFCWLSLAICIVELLICMKFGHGLFHDPMPTWLIIFWSSVGTALVIFLLSWSWRSHQRFRRKQL

SEQ ID NO: 25346 - protein, 291 aa, Zea mays subsp. mays
  peptide (1)..(291): Ceres Seq. ID no. 12358802
  misc_feature (1)..(250): Pfam Name: Pfam Description:  Phosphatidyl serine synthase
  misc_feature (1)..(250): NCBI GI NO: 25518032 NR Description: F9L1.4 protein - Arabidopsis thaliana
  misc_feature (80)..(194): NCBI GI NO: 34911216 NR Description: putative phosphatidylserine synthase
  misc_feature (82)..(290): NCBI GI NO: 22329573 NR Description: putative phosphatidylserine synthase
  misc_feature (1)..(281): NCBI GI NO: 13540555 NR Description: phosphatidylserine synthase 2 [Homo sapiens]
  misc_feature (1)..(281): NCBI GI NO: 2190007 NR Description: phosphatidylserine synthase II
  misc_feature (1)..(281): NCBI GI NO: 4063700 NR Description: phosphatidylserine synthase-2 [Mus musculus]
  misc_feature (1)..(281): NCBI GI NO: 31560497 NR Description: phosphatidylserine synthase 2 [Mus musculus]
  misc_feature (1)..(281): NCBI GI NO: 14290490 NR Description: Similar to phosphatidylserine synthase 2
  misc_feature (1)..(285): NCBI GI NO: 8388685 NR Description: phosphatidylserine synthase [Leishmania major]
  misc_feature (1)..(278): NCBI GI NO: 27881972 NR Description: Unknown (protein for MGC:55906) [Danio rerio]
MKHLHPDLGVELPERSYGADCRLYVPENPKNKFINIYETLFDEFVVAHILGWWGKAVMIRNQLLLWVLSIGFELMELTFRHMLPNFNECWWDSIILDILICNWFGIWAGMHTVRHFDGKTYEWVGLSRQRSIMGKVKRSLSQFTPAQWDKDQWHPFMGPLRFIQVLFLCVVFMTVELNTFFLKFCLWIPPRNPLVVYRLILWWLIAIPTIREYNSYLQDRKPVKKVGAFCWLSLAICIVELLICMKFGHGLFHDPMPTWLIIFWSSVGTALVIFLLSWSWRSHQRFRRKQL

SEQ ID NO: 25347 - DNA, 1637 bp, Zea mays subsp. mays
  misc_feature (1)..(1637): Ceres Seq. ID no. 12407796
tcgctcgcgtctcccttatccattcccaaataatccccacctcccgctgctgctccgccgcccgccatggcttccctcacctcggcgtccacttcactcctcttcccgcaggcctcctcatccatgagccgcatccgtctctccacccccctgggcttctccgcgcagcctgcgcggctgcggagccagggggcggcagtgggcgcgcggcggcgcgggcgcctgctggtggtgcgcgcagcgaggggcaagttcgagcgcaccaaaccacacgtcaacataggcaccatcggccatgtcgaccacggaaagaccactctcaccgccgcgctcaccatggtgctcgcctccgtcggcggcagcgcgcctaagaagtacgacgagatcgacgccgcccccgaggagcgcgcccgcggtatcaccatcaacaccgccaccgtcgagtacgagaccgagacccgccactacgcacacgtcgactgccccggccacgccgactatgtcaagaatatgatcaccggcgctgcgcagatggacggtgccatcctcgtcgtatccggtgccgacgggcccatgccgcagaccaaagagcacatcctcctcgccaagcaagtcggtgttcccaagatcgttgtcttcctcaacaaaaaggacatggtcgacgacgaggagctgctcgagctcgtcgagctcgaggtccgcgagctgctcagcaactacgagtacgacggcgacgacgtaccaatcgtcgctggctccgccctcaaggcgctcgaggctctcatggtcaaccctgccctgaagcgcggcgacgatgagtgggtcgactacatcttctcgttggttgataaagtggattcctatattccagtcccgcagaggcagactgacctcccgttcttgctcgctgttgaagatgtcttctccatcaccggtcgtggtacagttgccactggccgtatagagcgtggcaccgtcaagattggtgacacagtcgatatcgtcggaatccgggacacccggaactgcacggtcactggtgttgagatgttccagaagaccatggatgatgccatggccggagacaatgttgggctgctgctccgtggtatgcagaaggatgacattgaaagaggcatggtgctggcaaagcctggctctatcacaccgcacaccaagtttgaggctgttgtgtatgtgcttaagaaggaagagggtggccgacactcacctttcttccctggttaccgcccacagttctacatgcggacaactgatgtgacagggagtgtgactacgattatgaatgacaaggatgaggaggcgaagatgtgcatgcctggtgaccgtatcaaaatgattgttcagctcatccagcctgttgcttgtgagcagggtatgaggtttgctatccgtgagggtggtaagaccgttggtgccggtgtcatcaacaaaatcattgagtaaactggatataacatatccaccatgagaattttccttgtttactcaaagcgacatgctccgtagttgttattatgtggtgagttttaggggttgctcatgtgcaattgtagtatgacacttttttttgtcaagtgaatttgcataatttatgacattcacgacaaagattc

SEQ ID NO: 25348 - protein, 466 aa, Zea mays subsp. mays
  peptide (1)..(466): Ceres Seq. ID no. 12407797
  misc_feature (67)..(271): Pfam Name: Pfam Description:  Elongation factor Tu GTP binding domain
  misc_feature (1)..(466): NCBI GI NO: 17225494 NR Description: translational elongation factor Tu [Oryza sativa]
  misc_feature (1)..(466): NCBI GI NO: 6525065 NR Description: chloroplast translational elongation factor Tu
  misc_feature (3)..(466): NCBI GI NO: 12830555 NR Description: chloroplast translational elongation factor Tu
  misc_feature (1)..(466): NCBI GI NO: 2494261 NR Description: Elongation factor Tu, chloroplast precursor
  misc_feature (1)..(466): NCBI GI NO: 459241 NR Description: chloroplast elongation factor TuB(EF-TuB)
  misc_feature (1)..(466): NCBI GI NO: 1169494 NR Description: ELONGATION FACTOR TU, CHLOROPLAST PRECURSOR
  misc_feature (1)..(466): NCBI GI NO: 729409 NR Description: ELONGATION FACTOR TU, CHLOROPLAST PRECURSOR
  misc_feature (1)..(466): NCBI GI NO: 486827 NR Description: translation elongation factor EF-Tu
  misc_feature (52)..(466): NCBI GI NO: 218312 NR Description: chloroplast elongation factor TuB (EF-TuB)
  misc_feature (1)..(466): NCBI GI NO: 6015084 NR Description: ELONGATION FACTOR TU, CHLOROPLAST PRECURSOR
MASLTSASTSLLFPQASSSMSRIRLSTPLGFSAQPARLRSQGAAVGARRRGRLLVVRAARGKFERTKPHVNIGTIGHVDHGKTTLTAALTMVLASVGGSAPKKYDEIDAAPEERARGITINTATVEYETETRHYAHVDCPGHADYVKNMITGAAQMDGAILVVSGADGPMPQTKEHILLAKQVGVPKIVVFLNKKDMVDDEELLELVELEVRELLSNYEYDGDDVPIVAGSALKALEALMVNPALKRGDDEWVDYIFSLVDKVDSYIPVPQRQTDLPFLLAVEDVFSITGRGTVATGRIERGTVKIGDTVDIVGIRDTRNCTVTGVEMFQKTMDDAMAGDNVGLLLRGMQKDDIERGMVLAKPGSITPHTKFEAVVYVLKKEEGGRHSPFFPGYRPQFYMRTTDVTGSVTTIMNDKDEEAKMCMPGDRIKMIVQLIQPVACEQGMRFAIREGGKTVGAGVINKIIE

SEQ ID NO: 25349 - protein, 447 aa, Zea mays subsp. mays
  peptide (1)..(447): Ceres Seq. ID no. 12407798
  misc_feature (48)..(252): Pfam Name: Pfam Description:  Elongation factor Tu GTP binding domain
  misc_feature (1)..(447): NCBI GI NO: 17225494 NR Description: translational elongation factor Tu [Oryza sativa]
  misc_feature (1)..(447): NCBI GI NO: 6525065 NR Description: chloroplast translational elongation factor Tu
  misc_feature (1)..(447): NCBI GI NO: 12830555 NR Description: chloroplast translational elongation factor Tu
  misc_feature (1)..(447): NCBI GI NO: 2494261 NR Description: Elongation factor Tu, chloroplast precursor
  misc_feature (1)..(447): NCBI GI NO: 459241 NR Description: chloroplast elongation factor TuB(EF-TuB)
  misc_feature (1)..(447): NCBI GI NO: 1169494 NR Description: ELONGATION FACTOR TU, CHLOROPLAST PRECURSOR
  misc_feature (1)..(447): NCBI GI NO: 729409 NR Description: ELONGATION FACTOR TU, CHLOROPLAST PRECURSOR
  misc_feature (1)..(447): NCBI GI NO: 486827 NR Description: translation elongation factor EF-Tu
  misc_feature (33)..(447): NCBI GI NO: 218312 NR Description: chloroplast elongation factor TuB (EF-TuB)
  misc_feature (1)..(447): NCBI GI NO: 6015084 NR Description: ELONGATION FACTOR TU, CHLOROPLAST PRECURSOR
MSRIRLSTPLGFSAQPARLRSQGAAVGARRRGRLLVVRAARGKFERTKPHVNIGTIGHVDHGKTTLTAALTMVLASVGGSAPKKYDEIDAAPEERARGITINTATVEYETETRHYAHVDCPGHADYVKNMITGAAQMDGAILVVSGADGPMPQTKEHILLAKQVGVPKIVVFLNKKDMVDDEELLELVELEVRELLSNYEYDGDDVPIVAGSALKALEALMVNPALKRGDDEWVDYIFSLVDKVDSYIPVPQRQTDLPFLLAVEDVFSITGRGTVATGRIERGTVKIGDTVDIVGIRDTRNCTVTGVEMFQKTMDDAMAGDNVGLLLRGMQKDDIERGMVLAKPGSITPHTKFEAVVYVLKKEEGGRHSPFFPGYRPQFYMRTTDVTGSVTTIMNDKDEEAKMCMPGDRIKMIVQLIQPVACEQGMRFAIREGGKTVGAGVINKIIE

SEQ ID NO: 25350 - protein, 376 aa, Zea mays subsp. mays
  peptide (1)..(376): Ceres Seq. ID no. 12407799
  misc_feature (1)..(181): Pfam Name: Pfam Description:  Elongation factor Tu GTP binding domain
  misc_feature (1)..(376): NCBI GI NO: 17225494 NR Description: translational elongation factor Tu [Oryza sativa]
  misc_feature (1)..(376): NCBI GI NO: 6525065 NR Description: chloroplast translational elongation factor Tu
  misc_feature (1)..(376): NCBI GI NO: 12830555 NR Description: chloroplast translational elongation factor Tu
  misc_feature (1)..(376): NCBI GI NO: 2494261 NR Description: Elongation factor Tu, chloroplast precursor
  misc_feature (1)..(376): NCBI GI NO: 459241 NR Description: chloroplast elongation factor TuB(EF-TuB)
  misc_feature (1)..(376): NCBI GI NO: 1169494 NR Description: ELONGATION FACTOR TU, CHLOROPLAST PRECURSOR
  misc_feature (1)..(376): NCBI GI NO: 729409 NR Description: ELONGATION FACTOR TU, CHLOROPLAST PRECURSOR
  misc_feature (1)..(376): NCBI GI NO: 486827 NR Description: translation elongation factor EF-Tu
  misc_feature (1)..(376): NCBI GI NO: 218312 NR Description: chloroplast elongation factor TuB (EF-TuB)
  misc_feature (1)..(376): NCBI GI NO: 6015084 NR Description: ELONGATION FACTOR TU, CHLOROPLAST PRECURSOR
MVLASVGGSAPKKYDEIDAAPEERARGITINTATVEYETETRHYAHVDCPGHADYVKNMITGAAQMDGAILVVSGADGPMPQTKEHILLAKQVGVPKIVVFLNKKDMVDDEELLELVELEVRELLSNYEYDGDDVPIVAGSALKALEALMVNPALKRGDDEWVDYIFSLVDKVDSYIPVPQRQTDLPFLLAVEDVFSITGRGTVATGRIERGTVKIGDTVDIVGIRDTRNCTVTGVEMFQKTMDDAMAGDNVGLLLRGMQKDDIERGMVLAKPGSITPHTKFEAVVYVLKKEEGGRHSPFFPGYRPQFYMRTTDVTGSVTTIMNDKDEEAKMCMPGDRIKMIVQLIQPVACEQGMRFAIREGGKTVGAGVINKIIE

SEQ ID NO: 25351 - DNA, 839 bp, Zea mays subsp. mays
  misc_feature (1)..(839): Ceres Seq. ID no. 12368805
accacacgtacgcccacaccagataatacactacagcacagcaccgacaacacctctcaagtaacccagcaggcaccatggccgccgccgtgcccctcctcctcctcctgctactgccaacgaccctgatggccgcgtcggcggcgtccggcggcgagaagagcacgcacatcaagctgtactggcacgacgtggtgagcgggccgagcccgacggcggtgccggtggcgcaggcggcggtgaccaacacctccaagaccgccttcggcatggtggtggtgatcgacgacccgctgaccgagggccccgacctcaagtcctccaagccgctcggccgcgcgcagggcacctacgtcggcgcgggcaaggacgagctctccctgatgatgaacatgaatttcgtgttccaggccggcgagtacaacggcagcaccgtcgccatcatgggccggaacgccgtgttcgacgccgtccgcgagatggccgtcgtgggcggcaccggcgcgttcaggatggcgcgcgggtacgcgcaggcccgcacgcacaccttcgacctcaacaccggcgacgccaccgtcgagtacaacctctacatcaagcactagctagctagcccatcggctttgtgtttctgattgttggtgctcatatatgaacacgatcgaactccataattgtcttgtgagctcaatttgtgccactggcttttgcagttttggtgaaaaagaagagggtaattaaaggacgatagcttcggtcgttgtaagctgacttcgatttaacttgcacaatgattgaggacttaaagaataaagatagtaatagactttgtttatctg

SEQ ID NO: 25352 - protein, 175 aa, Zea mays subsp. mays
  peptide (1)..(175): Ceres Seq. ID no. 12368806
  misc_feature (27)..(175): Pfam Name: Pfam Description:  Dirigent-like protein
  misc_feature (7)..(175): NCBI GI NO: 15217886 NR Description: disease resistance response protein-related/dirigent protein-related
  misc_feature (15)..(175): NCBI GI NO: 15218836 NR Description: disease resistance response protein-related/dirigent protein-related
  misc_feature (27)..(175): NCBI GI NO: 15238980 NR Description: disease resistance response protein-related
  misc_feature (5)..(175): NCBI GI NO: 15238982 NR Description: disease resistance response protein-related
  misc_feature (27)..(175): NCBI GI NO: 15222673 NR Description: disease resistance response protein-related/dirigent protein-related
  misc_feature (27)..(175): NCBI GI NO: 15239779 NR Description: disease resistance response protein-related/dirigent protein-related
  misc_feature (27)..(175): NCBI GI NO: 22135914 NR Description: unknown protein [Arabidopsis thaliana]
  misc_feature (24)..(175): NCBI GI NO: 30681257 NR Description: disease resistance response protein-related/dirigent protein-related
  misc_feature (27)..(175): NCBI GI NO: 15231302 NR Description: disease resistance response protein-related/dirigent protein-related
  misc_feature (24)..(170): NCBI GI NO: 25412014 NR Description: probable disease resistance response protein
MAAAVPLLLLLLLPTTLMAASAASGGEKSTHIKLYWHDVVSGPSPTAVPVAQAAVTNTSKTAFGMVVVIDDPLTEGPDLKSSKPLGRAQGTYVGAGKDELSLMMNMNFVFQAGEYNGSTVAIMGRNAVFDAVREMAVVGGTGAFRMARGYAQARTHTFDLNTGDATVEYNLYIKH

SEQ ID NO: 25353 - protein, 158 aa, Zea mays subsp. mays
  peptide (1)..(158): Ceres Seq. ID no. 12368807
  misc_feature (10)..(158): Pfam Name: Pfam Description:  Dirigent-like protein
  misc_feature (1)..(158): NCBI GI NO: 15217886 NR Description: disease resistance response protein-related/dirigent protein-related
  misc_feature (1)..(158): NCBI GI NO: 15218836 NR Description: disease resistance response protein-related/dirigent protein-related
  misc_feature (10)..(158): NCBI GI NO: 15238980 NR Description: disease resistance response protein-related
  misc_feature (1)..(158): NCBI GI NO: 15238982 NR Description: disease resistance response protein-related
  misc_feature (10)..(158): NCBI GI NO: 15222673 NR Description: disease resistance response protein-related/dirigent protein-related
  misc_feature (10)..(158): NCBI GI NO: 15239779 NR Description: disease resistance response protein-related/dirigent protein-related
  misc_feature (10)..(158): NCBI GI NO: 22135914 NR Description: unknown protein [Arabidopsis thaliana]
  misc_feature (7)..(158): NCBI GI NO: 30681257 NR Description: disease resistance response protein-related/dirigent protein-related
  misc_feature (10)..(158): NCBI GI NO: 15231302 NR Description: disease resistance response protein-related/dirigent protein-related
  misc_feature (7)..(153): NCBI GI NO: 25412014 NR Description: probable disease resistance response protein
MAASAASGGEKSTHIKLYWHDVVSGPSPTAVPVAQAAVTNTSKTAFGMVVVIDDPLTEGPDLKSSKPLGRAQGTYVGAGKDELSLMMNMNFVFQAGEYNGSTVAIMGRNAVFDAVREMAVVGGTGAFRMARGYAQARTHTFDLNTGDATVEYNLYIKH

SEQ ID NO: 25354 - protein, 111 aa, Zea mays subsp. mays
  peptide (1)..(111): Ceres Seq. ID no. 12368808
  misc_feature (1)..(111): Pfam Name: Pfam Description:  Dirigent-like protein
  misc_feature (1)..(111): NCBI GI NO: 15217886 NR Description: disease resistance response protein-related/dirigent protein-related
  misc_feature (1)..(111): NCBI GI NO: 15218836 NR Description: disease resistance response protein-related/dirigent protein-related
  misc_feature (1)..(111): NCBI GI NO: 15238980 NR Description: disease resistance response protein-related
  misc_feature (1)..(111): NCBI GI NO: 15238982 NR Description: disease resistance response protein-related
  misc_feature (1)..(111): NCBI GI NO: 15222673 NR Description: disease resistance response protein-related/dirigent protein-related
  misc_feature (1)..(111): NCBI GI NO: 15239779 NR Description: disease resistance response protein-related/dirigent protein-related
  misc_feature (1)..(111): NCBI GI NO: 22135914 NR Description: unknown protein [Arabidopsis thaliana]
  misc_feature (1)..(111): NCBI GI NO: 30681257 NR Description: disease resistance response protein-related/dirigent protein-related
  misc_feature (1)..(111): NCBI GI NO: 15231302 NR Description: disease resistance response protein-related/dirigent protein-related
  misc_feature (1)..(106): NCBI GI NO: 25412014 NR Description: probable disease resistance response protein
MVVVIDDPLTEGPDLKSSKPLGRAQGTYVGAGKDELSLMMNMNFVFQAGEYNGSTVAIMGRNAVFDAVREMAVVGGTGAFRMARGYAQARTHTFDLNTGDATVEYNLYIKH

SEQ ID NO: 25355 - DNA, 1101 bp, Zea mays subsp. mays
  misc_feature (1)..(1101): Ceres Seq. ID no. 12376272
aagacaccgttatacgctactgtggttggcgacgcggcgaacatcatactggacccgattttgatgtttgtttgccatatgggcgtcactggtgcggctattgctcatgttgtttctcagtacatgataacgttgatactgctgtgccggctcgtccagcgagttcacgttatcccacccagcattaaatctctgaaatttgggaggtttcttggatgtggattcctgctgctcgcaagggttgtcgcggtgacgttctgcgtcacgctggcggcgtccctggccgctcgccatggacccaccgtcatggcaggcttccagatctgctgccagctctggctggcccacgtctcttctcgccgatggattggccgtggcaggacaggcggtgcttgcaagcgcgttcgccaagaacgacagtaagaaggtcgctgccgcgacatcccgtgtgttgcagctgagcattgtcctgggcatgggtctcaccgtcgtgctgggacttgctatgaggttcggggctggcattttcacaagcgacgtgcccgtgatccaagtcattcacagaggcatcccgtttgtcgccgggacgcagaccatcaattccctggccttcgtgtttgatggcatcaactttggaacgtcagactacagatactctgcttactccatggttgctgttgcgtctgtgtcgataccatgcctgctgtacctttctgcgcataacggattcatcggtatatggatcgcattgacgatctacatgagtctgaggaccatagctagcacctggaggatgggggcagcgaggggaccatggacgtttctccggaactgatgatggattggcttggaactgatgatctgcggcacactgctgacagataaggctgcgccgcgctgcgcatgcgcctctcatgtagcatcagcgaagtatagtacgtgttctgctggtgtttaaagcttcggatatcggaggtagatgtagctatgggactatcccctcctgatcgtctgacttgtggccttgcgtggagagtttacgttgctccgttgatttatgttgtatcatgccaggatgtcagtttaataccatacatcggt

SEQ ID NO: 25356 - protein, 180 aa, Zea mays subsp. mays
  peptide (1)..(180): Ceres Seq. ID no. 12376273
  misc_feature (17)..(179): NCBI GI NO: 15231918 NR Description: MATE efflux family protein, putative
  misc_feature (17)..(126): NCBI GI NO: 19386721 NR Description: P0678F11.10
  misc_feature (17)..(167): NCBI GI NO: 25405456 NR Description: hypothetical protein F11M15.20
  misc_feature (17)..(168): NCBI GI NO: 37532300 NR Description: putative membrane protein
  misc_feature (17)..(102): NCBI GI NO: 20270057 NR Description: Putative membrane protein
  misc_feature (127)..(168): NCBI GI NO: 20270057 NR Description: Putative membrane protein
  misc_feature (1)..(178): NCBI GI NO: 30687474 NR Description: MATE efflux protein family [Arabidopsis thaliana]
  misc_feature (1)..(168): NCBI GI NO: 7487160 NR Description: hypothetical protein At2g38330
  misc_feature (8)..(175): NCBI GI NO: 29830828 NR Description: putative DNA-damage-inducible protein F
  misc_feature (8)..(175): NCBI GI NO: 21222317 NR Description: putative membrane protein
MDPPSWQASRSAASSGWPTSLLADGLAVAGQAVLASAFAKNDSKKVAAATSRVLQLSIVLGMGLTVVLGLAMRFGAGIFTSDVPVIQVIHRGIPFVAGTQTINSLAFVFDGINFGTSDYRYSAYSMVAVASVSIPCLLYLSAHNGFIGIWIALTIYMSLRTIASTWRMGAARGPWTFLRN

SEQ ID NO: 25357 - protein, 140 aa, Zea mays subsp. mays
  peptide (1)..(140): Ceres Seq. ID no. 12376274
  misc_feature (1)..(115): NCBI GI NO: 19386721 NR Description: P0678F11.10
  misc_feature (1)..(114): NCBI GI NO: 15231918 NR Description: MATE efflux family protein, putative
  misc_feature (2)..(115): NCBI GI NO: 25405456 NR Description: hypothetical protein F11M15.20
  misc_feature (1)..(115): NCBI GI NO: 37532300 NR Description: putative membrane protein
  misc_feature (1)..(115): NCBI GI NO: 20270057 NR Description: Putative membrane protein
  misc_feature (2)..(115): NCBI GI NO: 30687474 NR Description: MATE efflux protein family [Arabidopsis thaliana]
  misc_feature (2)..(115): NCBI GI NO: 7487160 NR Description: hypothetical protein At2g38330
  misc_feature (2)..(115): NCBI GI NO: 18403476 NR Description: expressed protein; protein id: At1g51340
  misc_feature (1)..(113): NCBI GI NO: 29830828 NR Description: putative DNA-damage-inducible protein F
  misc_feature (1)..(113): NCBI GI NO: 21222317 NR Description: putative membrane protein
KTPLYATVVGDAANIILDPILMFVCHMGVTGAAIAHVVSQYMITLILLCRLVQRVHVIPPSIKSLKFGRFLGCGFLLLARVVAVTFCVTLAASLAARHGPTVMAGFQICCQLWLAHVSSRRWIGRGRTGGACKRVRQERQ

SEQ ID NO: 25358 - protein, 119 aa, Zea mays subsp. mays
  peptide (1)..(119): Ceres Seq. ID no. 12376275
  misc_feature (1)..(94): NCBI GI NO: 19386721 NR Description: P0678F11.10
  misc_feature (1)..(93): NCBI GI NO: 15231918 NR Description: MATE efflux family protein, putative
  misc_feature (1)..(94): NCBI GI NO: 25405456 NR Description: hypothetical protein F11M15.20
  misc_feature (1)..(94): NCBI GI NO: 37532300 NR Description: putative membrane protein
  misc_feature (1)..(94): NCBI GI NO: 20270057 NR Description: Putative membrane protein
  misc_feature (1)..(94): NCBI GI NO: 30687474 NR Description: MATE efflux protein family [Arabidopsis thaliana]
  misc_feature (1)..(94): NCBI GI NO: 7487160 NR Description: hypothetical protein At2g38330
  misc_feature (1)..(94): NCBI GI NO: 18403476 NR Description: expressed protein; protein id: At1g51340
  misc_feature (1)..(92): NCBI GI NO: 29830828 NR Description: putative DNA-damage-inducible protein F
  misc_feature (1)..(92): NCBI GI NO: 21222317 NR Description: putative membrane protein
MFVCHMGVTGAAIAHVVSQYMITLILLCRLVQRVHVIPPSIKSLKFGRFLGCGFLLLARVVAVTFCVTLAASLAARHGPTVMAGFQICCQLWLAHVSSRRWIGRGRTGGACKRVRQERQ

SEQ ID NO: 25359 - DNA, 1079 bp, Zea mays subsp. mays
  misc_feature (1)..(1079): Ceres Seq. ID no. 12402285
agctctcacccatccacgtcttctcattcctcgacaatggagatccaggcacgacagctactggtgtctgtttttggcattctgatagcgataggtttcgccaatgccgcgctgggagagacagcaccgccggttgttgtcggcttggccaagtgctcggactgcgccaggaggaacatgaacgccgaggcagctttcagaggtcttcaggtggccatcaagtgcaagaacagcaagggggcctacgagagcgcagccgtgggacaggtgaacaagtccggggccttcagcgtcccgctggccgccgacgccgtcggcgaggacggggagctcaagtcggaatgcttcgcgcagctcatccacagcgcgtcgagtgcgccgtgccccgggcaggagccctccaggatcgtcgccgcgccacccggccacacggcccacaccaacggcaacgggaagacgttcctcgcgctcggcggcagggtctaccaaccgtcgcccgaatgcgcctcggcgttcctctgccaccctttcttccacagcatgcaccaccatcacgtaggagtccacacgcctgtggttatcccgcacctgcccgttcacggccactccgtgccgcctgtcaccaagccgccgccggtagacgttcctgagcacaaaccggcgccggtgcccgtgccggaccacaagcctccgtcgacgccgccggtagacgctcctgagcacaaaccggcgccggtgcccgagccggagcacaagcctccgtcgacgccggcgaacgctgcaccgtcgacgcccacggagccgtcagcgccggttaattcgccgccgaagccagcccccatctaccacccaccggcaaggcacgacgctgccactggcccgtagctcttcaagaggctgctcccgttcttcaagaagttgcccttctttcctccttctgcgatggagagtcagcactagaatgtttggacagtgtttcttggcttttgcaggttatgcagtttcctcggaataatttgtgacgttgattagttcagcatgaacgttgggtcagtttaagagtgtgtgttctacttccg

SEQ ID NO: 25360 - protein, 294 aa, Zea mays subsp. mays
  peptide (1)..(294): Ceres Seq. ID no. 12402286
  misc_feature (141)..(280): Pfam Name: Pfam Description:  Amelogenin
  misc_feature (18)..(253): NCBI GI NO: 37531058 NR Description: putative proline-rich protein
  misc_feature (18)..(288): NCBI GI NO: 6689616 NR Description: proline-rich protein [Zea mays]
  misc_feature (26)..(286): NCBI GI NO: 37531064 NR Description: putative proline-rich protein
  misc_feature (13)..(211): NCBI GI NO: 37531080 NR Description: putative proline-rich protein
  misc_feature (13)..(201): NCBI GI NO: 37531082 NR Description: putative proline-rich protein
  misc_feature (20)..(259): NCBI GI NO: 37531088 NR Description: putative proline-rich protein
  misc_feature (13)..(201): NCBI GI NO: 37531074 NR Description: putative proline-rich protein
  misc_feature (17)..(201): NCBI GI NO: 37531070 NR Description: putative proline-rich protein
  misc_feature (17)..(201): NCBI GI NO: 37531076 NR Description: putative proline-rich protein
  misc_feature (20)..(142): NCBI GI NO: 37531090 NR Description: putative proline-rich protein
SSHPSTSSHSSTMEIQARQLLVSVFGILIAIGFANAALGETAPPVVVGLAKCSDCARRNMNAEAAFRGLQVAIKCKNSKGAYESAAVGQVNKSGAFSVPLAADAVGEDGELKSECFAQLIHSASSAPCPGQEPSRIVAAPPGHTAHTNGNGKTFLALGGRVYQPSPECASAFLCHPFFHSMHHHHVGVHTPVVIPHLPVHGHSVPPVTKPPPVDVPEHKPAPVPVPDHKPPSTPPVDAPEHKPAPVPEPEHKPPSTPANAAPSTPTEPSAPVNSPPKPAPIYHPPARHDAATGP

SEQ ID NO: 25361 - protein, 282 aa, Zea mays subsp. mays
  peptide (1)..(282): Ceres Seq. ID no. 12402287
  misc_feature (129)..(268): Pfam Name: Pfam Description:  Amelogenin
  misc_feature (6)..(241): NCBI GI NO: 37531058 NR Description: putative proline-rich protein
  misc_feature (6)..(276): NCBI GI NO: 6689616 NR Description: proline-rich protein [Zea mays]
  misc_feature (14)..(274): NCBI GI NO: 37531064 NR Description: putative proline-rich protein
  misc_feature (1)..(199): NCBI GI NO: 37531080 NR Description: putative proline-rich protein
  misc_feature (1)..(189): NCBI GI NO: 37531082 NR Description: putative proline-rich protein
  misc_feature (8)..(247): NCBI GI NO: 37531088 NR Description: putative proline-rich protein
  misc_feature (1)..(189): NCBI GI NO: 37531074 NR Description: putative proline-rich protein
  misc_feature (5)..(189): NCBI GI NO: 37531070 NR Description: putative proline-rich protein
  misc_feature (5)..(189): NCBI GI NO: 37531076 NR Description: putative proline-rich protein
  misc_feature (8)..(130): NCBI GI NO: 37531090 NR Description: putative proline-rich protein
MEIQARQLLVSVFGILIAIGFANAALGETAPPVVVGLAKCSDCARRNMNAEAAFRGLQVAIKCKNSKGAYESAAVGQVNKSGAFSVPLAADAVGEDGELKSECFAQLIHSASSAPCPGQEPSRIVAAPPGHTAHTNGNGKTFLALGGRVYQPSPECASAFLCHPFFHSMHHHHVGVHTPVVIPHLPVHGHSVPPVTKPPPVDVPEHKPAPVPVPDHKPPSTPPVDAPEHKPAPVPEPEHKPPSTPANAAPSTPTEPSAPVNSPPKPAPIYHPPARHDAATGP

SEQ ID NO: 25362 - protein, 235 aa, Zea mays subsp. mays
  peptide (1)..(235): Ceres Seq. ID no. 12402288
  misc_feature (82)..(221): Pfam Name: Pfam Description:  Amelogenin
  misc_feature (1)..(194): NCBI GI NO: 37531058 NR Description: putative proline-rich protein
  misc_feature (1)..(229): NCBI GI NO: 6689616 NR Description: proline-rich protein [Zea mays]
  misc_feature (1)..(227): NCBI GI NO: 37531064 NR Description: putative proline-rich protein
  misc_feature (1)..(152): NCBI GI NO: 37531080 NR Description: putative proline-rich protein
  misc_feature (1)..(142): NCBI GI NO: 37531082 NR Description: putative proline-rich protein
  misc_feature (1)..(200): NCBI GI NO: 37531088 NR Description: putative proline-rich protein
  misc_feature (1)..(142): NCBI GI NO: 37531074 NR Description: putative proline-rich protein
  misc_feature (1)..(142): NCBI GI NO: 37531070 NR Description: putative proline-rich protein
  misc_feature (1)..(142): NCBI GI NO: 37531076 NR Description: putative proline-rich protein
  misc_feature (1)..(83): NCBI GI NO: 37531090 NR Description: putative proline-rich protein
MNAEAAFRGLQVAIKCKNSKGAYESAAVGQVNKSGAFSVPLAADAVGEDGELKSECFAQLIHSASSAPCPGQEPSRIVAAPPGHTAHTNGNGKTFLALGGRVYQPSPECASAFLCHPFFHSMHHHHVGVHTPVVIPHLPVHGHSVPPVTKPPPVDVPEHKPAPVPVPDHKPPSTPPVDAPEHKPAPVPEPEHKPPSTPANAAPSTPTEPSAPVNSPPKPAPIYHPPARHDAATGP

SEQ ID NO: 25363 - DNA, 1297 bp, Zea mays subsp. mays
  misc_feature (1)..(1297): Ceres Seq. ID no. 12401906
gcacgagaccattacctagaacatcctaatcgaaaaactcgcatcgcagcgcactcgcgccacagtcggcatcacagaccagatccctgcgggtgcggcggccatggccgagaacttccagctgcagggccggcacggcaagtcccgcgtccgcgtctcccgcgtctggcgccgcccggccgcggcggggggcgacgtcatcgttgagtggaacgtcgccgtcagtatcgtctccgactgcctcccctcctacacctccagcgacaactccgccatcgtcgccacagattccatcaagaacaccgtgtatgtcaaggcgaaagagtgcacggaagtggttgtccatggaggaattcgccgtgattcttggaaggcatttcacctcgctgtaccctcaggttacagaggccacggtgactatcgtggagcgcccatgggagcgtgtgactgtcgacggaaagcctcattcgcatgggttcaaagttggtgttgagaagcacagcacagaggtcattgtaaaaaaatctggaagcctgcttataaattctggaattcaaggatactcgctgctaaagacaactcagtctgggtttgaagggttcgtgacggatcgctataggcttcttcctgatacaagggaaaggatagtagcaacagaagtaactgcttggtggaggtatccctttgaacatgtttcgcagctcccatcgaagccattctgcttcacgcagagataccaggacgtaaagaaagtccttgcagagacgttctttggtcctccggatgttggtgtgtatagtccatccgtacaaaatacgctatacctcatggccaaggaagtccttacaaggttcccagatatatcgtcagtccagcttagaatgccgaaccttcactttctgcctgtcaacttggggaccaaagaagctccgctggtgaagtttgctgatgatgtgtacctgccgacggacgaaccacacgggaccattgaagcaaccttgagccgtcccatgtcaaagctgtaaaaaaatttgtagtcgtcaggctgatattagactcctgcttcgtctccccagcattcccaggctaaaatggacagtaagctgtaagggaaagataaactatcataaatcgtagcccctatgctttacgtggtggtggtaataagtgcacaaacttgtattggatgttgtcagctgtagcctgtaggcgtccagcttgtgacgtttcgccactgtaatcgtgtacattgctcgtcttgtgtggaaaccagttaatatctttggaagctttgctc

SEQ ID NO: 25364 - protein, 238 aa, Zea mays subsp. mays
  peptide (1)..(238): Ceres Seq. ID no. 12401907
  misc_feature (77)..(229): Pfam Name: Pfam Description:  Uricase
  misc_feature (3)..(238): NCBI GI NO: 34908558 NR Description: putative uricase
  misc_feature (2)..(238): NCBI GI NO: 6175091 NR Description: Uricase II
  misc_feature (2)..(238): NCBI GI NO: 170031 NR Description: nodulin 35
  misc_feature (2)..(238): NCBI GI NO: 11414898 NR Description: uricase [Lotus japonicus]
  misc_feature (2)..(238): NCBI GI NO: 170033 NR Description: uricase II subunit
  misc_feature (2)..(238): NCBI GI NO: 81803 NR Description: urate oxidase (EC 1.7.3.3) - soybean
  misc_feature (2)..(238): NCBI GI NO: 1498170 NR Description: uricase [Glycine max]
  misc_feature (2)..(238): NCBI GI NO: 549169 NR Description: Uricase II isozyme 1
  misc_feature (2)..(238): NCBI GI NO: 6136152 NR Description: Uricase II isozyme 2
  misc_feature (2)..(238): NCBI GI NO: 1498172 NR Description: uricase (Nod-35) [Glycine max]
MSRRKSARKWLSMEEFAVILGRHFTSLYPQVTEATVTIVERPWERVTVDGKPHSHGFKVGVEKHSTEVIVKKSGSLLINSGIQGYSLLKTTQSGFEGFVTDRYRLLPDTRERIVATEVTAWWRYPFEHVSQLPSKPFCFTQRYQDVKKVLAETFFGPPDVGVYSPSVQNTLYLMAKEVLTRFPDISSVQLRMPNLHFLPVNLGTKEAPLVKFADDVYLPTDEPHGTIEATLSRPMSKL

SEQ ID NO: 25365 - protein, 226 aa, Zea mays subsp. mays
  peptide (1)..(226): Ceres Seq. ID no. 12401908
  misc_feature (65)..(217): Pfam Name: Pfam Description:  Uricase
  misc_feature (1)..(226): NCBI GI NO: 34908558 NR Description: putative uricase
  misc_feature (1)..(226): NCBI GI NO: 6175091 NR Description: Uricase II
  misc_feature (1)..(226): NCBI GI NO: 170031 NR Description: nodulin 35
  misc_feature (1)..(226): NCBI GI NO: 11414898 NR Description: uricase [Lotus japonicus]
  misc_feature (1)..(226): NCBI GI NO: 170033 NR Description: uricase II subunit
  misc_feature (1)..(226): NCBI GI NO: 81803 NR Description: urate oxidase (EC 1.7.3.3) - soybean
  misc_feature (1)..(226): NCBI GI NO: 1498170 NR Description: uricase [Glycine max]
  misc_feature (1)..(226): NCBI GI NO: 549169 NR Description: Uricase II isozyme 1
  misc_feature (1)..(226): NCBI GI NO: 6136152 NR Description: Uricase II isozyme 2
  misc_feature (1)..(226): NCBI GI NO: 1498172 NR Description: uricase (Nod-35) [Glycine max]
MEEFAVILGRHFTSLYPQVTEATVTIVERPWERVTVDGKPHSHGFKVGVEKHSTEVIVKKSGSLLINSGIQGYSLLKTTQSGFEGFVTDRYRLLPDTRERIVATEVTAWWRYPFEHVSQLPSKPFCFTQRYQDVKKVLAETFFGPPDVGVYSPSVQNTLYLMAKEVLTRFPDISSVQLRMPNLHFLPVNLGTKEAPLVKFADDVYLPTDEPHGTIEATLSRPMSKL

SEQ ID NO: 25366 - protein, 129 aa, Zea mays subsp. mays
  peptide (1)..(129): Ceres Seq. ID no. 12401909
  misc_feature (1)..(79): NCBI GI NO: 34908558 NR Description: putative uricase
  misc_feature (1)..(79): NCBI GI NO: 6175091 NR Description: Uricase II
  misc_feature (1)..(79): NCBI GI NO: 170031 NR Description: nodulin 35
  misc_feature (1)..(79): NCBI GI NO: 11414898 NR Description: uricase [Lotus japonicus]
  misc_feature (1)..(79): NCBI GI NO: 170033 NR Description: uricase II subunit
  misc_feature (1)..(79): NCBI GI NO: 81803 NR Description: urate oxidase (EC 1.7.3.3) - soybean
  misc_feature (1)..(79): NCBI GI NO: 1498170 NR Description: uricase [Glycine max]
  misc_feature (1)..(79): NCBI GI NO: 549169 NR Description: Uricase II isozyme 1
  misc_feature (1)..(79): NCBI GI NO: 6136152 NR Description: Uricase II isozyme 2
  misc_feature (1)..(79): NCBI GI NO: 1498172 NR Description: uricase (Nod-35) [Glycine max]
MAENFQLQGRHGKSRVRVSRVWRRPAAAGGDVIVEWNVAVSIVSDCLPSYTSSDNSAIVATDSIKNTVYVKAKECTEVVVHGGIRRDSWKAFHLAVPSGYRGHGDYRGAPMGACDCRRKASFAWVQSWC

SEQ ID NO: 25367 - DNA, 943 bp, Zea mays subsp. mays
  misc_feature (1)..(943): Ceres Seq. ID no. 13498278
gtgactgtgatctatactataaggtgaacaagatctctttgtctactgtagttgcagcaccagcagcagcagcagaagagcagcgcctgagctccagcaataatggccgagaagggcgtgaaggtgttggggatgtgggcgagccccatggtgatcagggtggagtgggcgctgcggctgaagggcgtcgagtacgagtacgtcgacgaggacctcgccaacaagagcgccgacctgctccgccacaacccggtgaccaagaaggtgcccgtgctcgtccacgacggcaagccggtcgcggagtccaccatcatcgtggagtacatcgacgaggtctggaagggcggctaccccatcatgccgggcgacccctacgagcgcgcccaggcgaggttctgggccaggttcgcggaagacaagtgcaacgctgctctgtacccgatcttcaccgcgaccggcgaggcgcagcgcaaggcggtgcacgaggcccagcagtgcctcaagaccctggagacggccttggaggggaagaagttcttcggcggcgacgccgtgggctacctcgacatcgtcgtcgggtggttcgcgcactggctccccgtcatcgaggaggtgaccggcgccagcgtcgtcacccacgaggagctgccgctgatgaaggcctggttcggtcggttcctcgcccttgacgtggtgaaggcggccctgcccgacagggacaggctcctcgccgccaacaaggcccgccgtgagcagctcctctccgcgtagatatggctagtaattctggagcagctagtttcaccgccgacgctcatatattgctgaataaggactggttgcacttttgcacgttgtgcagtgcagcccgaggtttggatgacctctgcccctctgttccatttcagaatggtagtcccataataatgcatatacatcatgc

SEQ ID NO: 25368 - protein, 228 aa, Zea mays subsp. mays
  peptide (1)..(228): Ceres Seq. ID no. 13498279
  misc_feature (15)..(228): NCBI GI NO: 23008548 NR Description: hypothetical protein
DCDLYYKVNKISLSTVVAAPAAAAEEQRLSSSNNGREGREGVGDVGEPHGDQGGVGAAAEGRRVRVRRRGPRQQERRPAPPQPGDQEGARARPRRQAGRGVHHHRGVHRRGLEGRLPHHAGRPLRARPGEVLGQVRGRQVQRCSVPDLHRDRRGAAQGGARGPAVPQDPGDGLGGEEVLRRRRRGLPRHRRRVVRALAPRHRGGDRRQRRHPRGAAADEGLVRSVPRP

SEQ ID NO: 25369 - protein, 222 aa, Zea mays subsp. mays
  peptide (1)..(222): Ceres Seq. ID no. 13498280
  misc_feature (86)..(196): Pfam Name: Pfam Description:  Glutathione S-transferase, C-terminal domain
  misc_feature (1)..(222): NCBI GI NO: 11385523 NR Description: glutathione S-transferase GST 36 [Zea mays]
  misc_feature (9)..(222): NCBI GI NO: 11385497 NR Description: glutathione S-transferase GST 23 [Zea mays]
  misc_feature (2)..(222): NCBI GI NO: 15430731 NR Description: putative glutathione S-transferase OsGSTU17
  misc_feature (1)..(222): NCBI GI NO: 10567808 NR Description: putative glutathione S-transferase T3
  misc_feature (6)..(221): NCBI GI NO: 11385443 NR Description: glutathione S-transferase GST 14 [Glycine max]
  misc_feature (1)..(211): NCBI GI NO: 4996842 NR Description: Dcarg-1 [Daucus carota]
  misc_feature (1)..(221): NCBI GI NO: 11385449 NR Description: glutathione S-transferase GST 17 [Glycine max]
  misc_feature (1)..(222): NCBI GI NO: 23978432 NR Description: glutathione S-transferase [Cucurbita maxima]
  misc_feature (1)..(222): NCBI GI NO: 11385509 NR Description: glutathione S-transferase GST 29 [Zea mays]
  misc_feature (3)..(214): NCBI GI NO: 11385441 NR Description: glutathione S-transferase GST 13 [Glycine max]
MAEKGVKVLGMWASPMVIRVEWALRLKGVEYEYVDEDLANKSADLLRHNPVTKKVPVLVHDGKPVAESTIIVEYIDEVWKGGYPIMPGDPYERAQARFWARFAEDKCNAALYPIFTATGEAQRKAVHEAQQCLKTLETALEGKKFFGGDAVGYLDIVVGWFAHWLPVIEEVTGASVVTHEELPLMKAWFGRFLALDVVKAALPDRDRLLAANKARREQLLSA

SEQ ID NO: 25370 - protein, 212 aa, Zea mays subsp. mays
  peptide (1)..(212): Ceres Seq. ID no. 13498281
  misc_feature (76)..(186): Pfam Name: Pfam Description:  Glutathione S-transferase, C-terminal domain
  misc_feature (1)..(212): NCBI GI NO: 11385523 NR Description: glutathione S-transferase GST 36 [Zea mays]
  misc_feature (1)..(212): NCBI GI NO: 11385497 NR Description: glutathione S-transferase GST 23 [Zea mays]
  misc_feature (1)..(212): NCBI GI NO: 15430731 NR Description: putative glutathione S-transferase OsGSTU17
  misc_feature (1)..(212): NCBI GI NO: 10567808 NR Description: putative glutathione S-transferase T3
  misc_feature (1)..(211): NCBI GI NO: 11385443 NR Description: glutathione S-transferase GST 14 [Glycine max]
  misc_feature (1)..(201): NCBI GI NO: 4996842 NR Description: Dcarg-1 [Daucus carota]
  misc_feature (1)..(211): NCBI GI NO: 11385449 NR Description: glutathione S-transferase GST 17 [Glycine max]
  misc_feature (1)..(212): NCBI GI NO: 23978432 NR Description: glutathione S-transferase [Cucurbita maxima]
  misc_feature (1)..(212): NCBI GI NO: 11385509 NR Description: glutathione S-transferase GST 29 [Zea mays]
  misc_feature (1)..(204): NCBI GI NO: 11385441 NR Description: glutathione S-transferase GST 13 [Glycine max]
MWASPMVIRVEWALRLKGVEYEYVDEDLANKSADLLRHNPVTKKVPVLVHDGKPVAESTIIVEYIDEVWKGGYPIMPGDPYERAQARFWARFAEDKCNAALYPIFTATGEAQRKAVHEAQQCLKTLETALEGKKFFGGDAVGYLDIVVGWFAHWLPVIEEVTGASVVTHEELPLMKAWFGRFLALDVVKAALPDRDRLLAANKARREQLLSA

SEQ ID NO: 25371 - DNA, 642 bp, Zea mays subsp. mays
  misc_feature (1)..(642): Ceres Seq. ID no. 12403812
aacacctcatcagcctatcaccagcgacctaaaaagcacagcacctagtagctgaacagcaccatatacaatccgaatctctgaatattcagttgagccaaaaaggcaggaagaaggaggaaccatgatcagttccaagaggcttgttcagatggcgaagaagtggcaggcaacggctgccatggctaggaggcggctcacggcgacgctggcgaaagaggccgacggttcgtgcggcacgtcgatgccggtggccgtcaggggccactgcgtcgtgtactcctccgacgggacgaggttcgaggtcccgctggcgtacctcggcacggcggtgttcggcgagctcctgagcatgtcgcgggaggagttcggatttaccggcgacgatggcggcaggatcacgctgccctgcgatgccgcggtgatggagtacgcgatgtgtttgctcaggcgagacgcctccgaagaggttgtgagggcgttcttgagctccatggtcagaccctgccaccacagcgtcggtggctcggtgccaccgatgggactcgggcgccaaccagccatctgtgtatagctagctatatgattagctccatgatgtacaatattattaggtgtgtatgtatgtagccggatggaatc

SEQ ID NO: 25372 - protein, 149 aa, Zea mays subsp. mays
  peptide (1)..(149): Ceres Seq. ID no. 12403813
  misc_feature (1)..(109): Pfam Name: Pfam Description:  Auxin responsive protein
  misc_feature (1)..(128): NCBI GI NO: 20149052 NR Description: auxin-induced SAUR-like protein [Capsicum annuum]
  misc_feature (1)..(124): NCBI GI NO: 21592571 NR Description: auxin-induced protein, putative
  misc_feature (1)..(124): NCBI GI NO: 18397101 NR Description: auxin-induced protein, putative
  misc_feature (1)..(124): NCBI GI NO: 21553494 NR Description: auxin-induced protein, putative
  misc_feature (1)..(124): NCBI GI NO: 26452075 NR Description: putative auxin-induced protein
  misc_feature (1)..(124): NCBI GI NO: 18397103 NR Description: auxin-induced protein, putative
  misc_feature (1)..(124): NCBI GI NO: 15218924 NR Description: auxin-induced protein, putative
  misc_feature (1)..(124): NCBI GI NO: 21593671 NR Description: auxin-induced protein, putative
  misc_feature (1)..(124): NCBI GI NO: 38603942 NR Description: At1g29420 [Arabidopsis thaliana]
  misc_feature (10)..(124): NCBI GI NO: 25403067 NR Description: probable auxin-induced protein, 48806-48408
MISSKRLVQMAKKWQATAAMARRRLTATLAKEADGSCGTSMPVAVRGHCVVYSSDGTRFEVPLAYLGTAVFGELLSMSREEFGFTGDDGGRITLPCDAAVMEYAMCLLRRDASEEVVRAFLSSMVRPCHHSVGGSVPPMGLGRQPAICV

SEQ ID NO: 25373 - protein, 140 aa, Zea mays subsp. mays
  peptide (1)..(140): Ceres Seq. ID no. 12403814
  misc_feature (1)..(100): Pfam Name: Pfam Description:  Auxin responsive protein
  misc_feature (1)..(119): NCBI GI NO: 20149052 NR Description: auxin-induced SAUR-like protein [Capsicum annuum]
  misc_feature (1)..(115): NCBI GI NO: 21592571 NR Description: auxin-induced protein, putative
  misc_feature (1)..(115): NCBI GI NO: 18397101 NR Description: auxin-induced protein, putative
  misc_feature (1)..(115): NCBI GI NO: 21553494 NR Description: auxin-induced protein, putative
  misc_feature (1)..(115): NCBI GI NO: 26452075 NR Description: putative auxin-induced protein
  misc_feature (1)..(115): NCBI GI NO: 18397103 NR Description: auxin-induced protein, putative
  misc_feature (1)..(115): NCBI GI NO: 15218924 NR Description: auxin-induced protein, putative
  misc_feature (1)..(115): NCBI GI NO: 21593671 NR Description: auxin-induced protein, putative
  misc_feature (1)..(115): NCBI GI NO: 38603942 NR Description: At1g29420 [Arabidopsis thaliana]
  misc_feature (1)..(115): NCBI GI NO: 25403067 NR Description: probable auxin-induced protein, 48806-48408
MAKKWQATAAMARRRLTATLAKEADGSCGTSMPVAVRGHCVVYSSDGTRFEVPLAYLGTAVFGELLSMSREEFGFTGDDGGRITLPCDAAVMEYAMCLLRRDASEEVVRAFLSSMVRPCHHSVGGSVPPMGLGRQPAICV

SEQ ID NO: 25374 - protein, 130 aa, Zea mays subsp. mays
  peptide (1)..(130): Ceres Seq. ID no. 12403815
  misc_feature (1)..(90): Pfam Name: Pfam Description:  Auxin responsive protein
  misc_feature (1)..(109): NCBI GI NO: 20149052 NR Description: auxin-induced SAUR-like protein [Capsicum annuum]
  misc_feature (1)..(105): NCBI GI NO: 21592571 NR Description: auxin-induced protein, putative
  misc_feature (1)..(105): NCBI GI NO: 18397101 NR Description: auxin-induced protein, putative
  misc_feature (1)..(105): NCBI GI NO: 21553494 NR Description: auxin-induced protein, putative
  misc_feature (1)..(105): NCBI GI NO: 26452075 NR Description: putative auxin-induced protein
  misc_feature (1)..(105): NCBI GI NO: 18397103 NR Description: auxin-induced protein, putative
  misc_feature (1)..(105): NCBI GI NO: 15218924 NR Description: auxin-induced protein, putative
  misc_feature (1)..(105): NCBI GI NO: 21593671 NR Description: auxin-induced protein, putative
  misc_feature (1)..(105): NCBI GI NO: 38603942 NR Description: At1g29420 [Arabidopsis thaliana]
  misc_feature (1)..(105): NCBI GI NO: 25403067 NR Description: probable auxin-induced protein, 48806-48408
MARRRLTATLAKEADGSCGTSMPVAVRGHCVVYSSDGTRFEVPLAYLGTAVFGELLSMSREEFGFTGDDGGRITLPCDAAVMEYAMCLLRRDASEEVVRAFLSSMVRPCHHSVGGSVPPMGLGRQPAICV

SEQ ID NO: 25375 - DNA, 1057 bp, Zea mays subsp. mays
  misc_feature (1)..(1057): Ceres Seq. ID no. 12401795
atatatgcgttataacagcagagcagaggtcaacaagacgagacaagagaatgcctgtgagcaggatcgccgtgggtgctccgggcgagctgtcccaccccgacaccgccaaggccgccgtcgccgagttcatctccacgctcatcttcgtcttcgccggctcaggatcggggatggccttcagtaagctcacggacggtggcgccgccactcctgccggcctcatcgccgcgtctctggcgcacgccctcgccctcttcgtggccgtctccgtgggtgccaacatctccggcggccacgtgaaccctgccgtgaccttcggcgcctttgtgggcggcaacatcagcctcctcaaggccctggtctactgggtggcccagctcctgggctccgtcgtcgcctgcctcctcctcaagatcgccacgggcggcgcggcccttggcgccttctcgctgtcggcgggcgtcggcgccatgaacgccgtggtgctggagatggtcatgaccttcggcctcgtgtacacggtgtacgccacggccgtggaccccaagaagggcgacctcggcgtcatcgcgcccatcgccatcggcttcatcgtcggcgccaacatcctggcggggggcgccttcgacggcgcctccatgaaccccgccgtctccttcggcccggccgtcgtcaccggcgtctgggagaaccactgggtgtactgggtcggcccactcgcgggcgcggccatcgcggcgctcgtctacgacatcatcttcatcgggcagcgcccacaccagcagctgccaaccacggcagcagactactgatgaccatcatcatcatgcactgaataattaagaccagaccactcaatatatatacatatgaagaataacatgccaaatctcatctcctagagctagcaacttgattctccatatatttcttaaatacaaactaaactcgattgagtatagcttggtatgaaaccacatgtgtgtgatgttattttgtccttgtggtaatttgtacatctctatctctaccatattaaagcatcaatttcgac

SEQ ID NO: 25376 - protein, 270 aa, Zea mays subsp. mays
  peptide (1)..(270): Ceres Seq. ID no. 12401796
  misc_feature (29)..(250): Pfam Name: Pfam Description:  Major intrinsic protein
  misc_feature (17)..(270): NCBI GI NO: 13447819 NR Description: tonoplast membrane integral protein ZmTIP1-2
  misc_feature (17)..(270): NCBI GI NO: 34906078 NR Description: putative tonoplast membrane integral protein
  misc_feature (17)..(270): NCBI GI NO: 8699604 NR Description: putative aquaporin TIP3
  misc_feature (17)..(266): NCBI GI NO: 541951 NR Description: SPCP2 protein - soybean
  misc_feature (17)..(265): NCBI GI NO: 15234189 NR Description: putative water channel protein
  misc_feature (17)..(270): NCBI GI NO: 21284370 NR Description: tonoplast intrinsic protein bobTIP26-1
  misc_feature (17)..(270): NCBI GI NO: 475048 NR Description: tonoplast intrinsic protein gamma (gamma-TIP)
  misc_feature (17)..(270): NCBI GI NO: 21593151 NR Description: putative aquaporin
  misc_feature (17)..(270): NCBI GI NO: 15228041 NR Description: putative aquaporin
  misc_feature (17)..(270): NCBI GI NO: 1514977 NR Description: VM23 [Raphanus sativus]
ICVITAEQRSTRRDKRMPVSRIAVGAPGELSHPDTAKAAVAEFISTLIFVFAGSGSGMAFSKLTDGGAATPAGLIAASLAHALALFVAVSVGANISGGHVNPAVTFGAFVGGNISLLKALVYWVAQLLGSVVACLLLKIATGGAALGAFSLSAGVGAMNAVVLEMVMTFGLVYTVYATAVDPKKGDLGVIAPIAIGFIVGANILAGGAFDGASMNPAVSFGPAVVTGVWENHWVYWVGPLAGAAIAALVYDIIFIGQRPHQQLPTTAADY

SEQ ID NO: 25377 - protein, 254 aa, Zea mays subsp. mays
  peptide (1)..(254): Ceres Seq. ID no. 12401797
  misc_feature (13)..(234): Pfam Name: Pfam Description:  Major intrinsic protein
  misc_feature (1)..(254): NCBI GI NO: 13447819 NR Description: tonoplast membrane integral protein ZmTIP1-2
  misc_feature (1)..(254): NCBI GI NO: 34906078 NR Description: putative tonoplast membrane integral protein
  misc_feature (1)..(254): NCBI GI NO: 8699604 NR Description: putative aquaporin TIP3
  misc_feature (1)..(250): NCBI GI NO: 541951 NR Description: SPCP2 protein - soybean
  misc_feature (1)..(249): NCBI GI NO: 15234189 NR Description: putative water channel protein
  misc_feature (1)..(254): NCBI GI NO: 21284370 NR Description: tonoplast intrinsic protein bobTIP26-1
  misc_feature (1)..(254): NCBI GI NO: 475048 NR Description: tonoplast intrinsic protein gamma (gamma-TIP)
  misc_feature (1)..(254): NCBI GI NO: 21593151 NR Description: putative aquaporin
  misc_feature (1)..(254): NCBI GI NO: 15228041 NR Description: putative aquaporin
  misc_feature (1)..(254): NCBI GI NO: 1514977 NR Description: VM23 [Raphanus sativus]
MPVSRIAVGAPGELSHPDTAKAAVAEFISTLIFVFAGSGSGMAFSKLTDGGAATPAGLIAASLAHALALFVAVSVGANISGGHVNPAVTFGAFVGGNISLLKALVYWVAQLLGSVVACLLLKIATGGAALGAFSLSAGVGAMNAVVLEMVMTFGLVYTVYATAVDPKKGDLGVIAPIAIGFIVGANILAGGAFDGASMNPAVSFGPAVVTGVWENHWVYWVGPLAGAAIAALVYDIIFIGQRPHQQLPTTAADY

SEQ ID NO: 25378 - protein, 213 aa, Zea mays subsp. mays
  peptide (1)..(213): Ceres Seq. ID no. 12401798
  misc_feature (1)..(193): Pfam Name: Pfam Description:  Major intrinsic protein
  misc_feature (1)..(213): NCBI GI NO: 13447819 NR Description: tonoplast membrane integral protein ZmTIP1-2
  misc_feature (1)..(213): NCBI GI NO: 34906078 NR Description: putative tonoplast membrane integral protein
  misc_feature (1)..(213): NCBI GI NO: 8699604 NR Description: putative aquaporin TIP3
  misc_feature (1)..(209): NCBI GI NO: 541951 NR Description: SPCP2 protein - soybean
  misc_feature (1)..(208): NCBI GI NO: 15234189 NR Description: putative water channel protein
  misc_feature (1)..(213): NCBI GI NO: 21284370 NR Description: tonoplast intrinsic protein bobTIP26-1
  misc_feature (1)..(213): NCBI GI NO: 475048 NR Description: tonoplast intrinsic protein gamma (gamma-TIP)
  misc_feature (1)..(213): NCBI GI NO: 21593151 NR Description: putative aquaporin
  misc_feature (1)..(213): NCBI GI NO: 15228041 NR Description: putative aquaporin
  misc_feature (1)..(213): NCBI GI NO: 1514977 NR Description: VM23 [Raphanus sativus]
MAFSKLTDGGAATPAGLIAASLAHALALFVAVSVGANISGGHVNPAVTFGAFVGGNISLLKALVYWVAQLLGSVVACLLLKIATGGAALGAFSLSAGVGAMNAVVLEMVMTFGLVYTVYATAVDPKKGDLGVIAPIAIGFIVGANILAGGAFDGASMNPAVSFGPAVVTGVWENHWVYWVGPLAGAAIAALVYDIIFIGQRPHQQLPTTAADY

SEQ ID NO: 25379 - DNA, 1041 bp, Zea mays subsp. mays
  misc_feature (1)..(1041): Ceres Seq. ID no. 12402831
  misc_feature (428)..(428): n is a, c, t, g, unknown, or other
aattcctatcgatacttccacacggcacaactatcggcggcggcaacgagccaggaccctgttgtgatgctaccgtcgccgccggtgctactacgcccttgcgctgcccgggcctccccgcttccgccccctagacctagagctgcaaatcctaacaccgagtcggcgacgacgacaaccgtcgccacttcagcggacagagcggccaccatgggcgcggcagcgtggtggcggcgcgccctggggcagcggttcaacccagccggtgtggccgcggtggcggccgtcgcggcgtccaagccgcgcctggcgctgccgcacgtgtcggtgcaagacatcaggtgtctcgactgggctgagctccgccgcgccgggttccgcggcgtcgttttcgacaaggacaacacgctcacggccccctacgcgcncgcgctctggccgccgctcgctgcagcattcgaccagtgccgcgcgacgttcccgcccggtgcgctcgccatctacagcaactccgcagggttgacggagtatgatccggacggggtggatgcgagggcgatcgaagcggtcatcgagggggttcatgtgatcaggcatgatataaagaaaccaggtggactagctactgaaatagagagttactttggttgttcagcctcaaatcttgtgttggttggtgaccgttacttcactgatgtggtttatggaaacaagaatggctttcttacagtactgacagagcctttaaacatcactgatgaatcatacattgtcaaaagggttaggaaactggaggcgtacatcatcagttattggtacaagaaagggcacaaaccaatagagcatcctttgctcccagatgcaagaagaatagtgaagtttgactcatatgacgactcagtttcaaccagaatataatgtaatgatgtatcttgcacctgctcatcagagagtgagatctactgtttgtagcttagggtgtgtttgtttccttctaaattatataaactggattatggtggaatggtaagaccgtaagag

SEQ ID NO: 25380 - protein, 305 aa, Zea mays subsp. mays
  peptide (1)..(305): Ceres Seq. ID no. 12402832
  misc_feature (48)..(189): NCBI GI NO: 34908890 NR Description: P0699H05.17
  misc_feature (200)..(302): NCBI GI NO: 34908890 NR Description: P0699H05.17
  misc_feature (66)..(296): NCBI GI NO: 15231583 NR Description: putative protein; protein id: At3g58830.1
  misc_feature (66)..(296): NCBI GI NO: 28466953 NR Description: At3g58830 [Arabidopsis thaliana]
  misc_feature (99)..(240): NCBI GI NO: 11282546 NR Description: hypothetical protein 15E6.20
  misc_feature (127)..(240): NCBI GI NO: 6321892 NR Description: Hypothetical ORF; Yhr100cp
  misc_feature (105)..(276): NCBI GI NO: 15613885 NR Description: BH1322~unknown conserved protein
  misc_feature (105)..(276): NCBI GI NO: 23099444 NR Description: hypothetical protein
  misc_feature (143)..(143): Xaa is any aa, unknown or other
NSYRYFHTAQLSAAATSQDPVVMLPSPPVLLRPCAARASPLPPPRPRAANPNTESATTTTVATSADRAATMGAAAWWRRALGQRFNPAGVAAVAAVAASKPRLALPHVSVQDIRCLDWAELRRAGFRGVVFDKDNTLTAPYAXALWPPLAAAFDQCRATFPPGALAIYSNSAGLTEYDPDGVDARAIEAVIEGVHVIRHDIKKPGGLATEIESYFGCSASNLVLVGDRYFTDVVYGNKNGFLTVLTEPLNITDESYIVKRVRKLEAYIISYWYKKGHKPIEHPLLPDARRIVKFDSYDDSVSTRI

SEQ ID NO: 25381 - protein, 283 aa, Zea mays subsp. mays
  peptide (1)..(283): Ceres Seq. ID no. 12402833
  misc_feature (26)..(167): NCBI GI NO: 34908890 NR Description: P0699H05.17
  misc_feature (178)..(280): NCBI GI NO: 34908890 NR Description: P0699H05.17
  misc_feature (44)..(274): NCBI GI NO: 15231583 NR Description: putative protein; protein id: At3g58830.1
  misc_feature (44)..(274): NCBI GI NO: 28466953 NR Description: At3g58830 [Arabidopsis thaliana]
  misc_feature (77)..(218): NCBI GI NO: 11282546 NR Description: hypothetical protein 15E6.20
  misc_feature (105)..(218): NCBI GI NO: 6321892 NR Description: Hypothetical ORF; Yhr100cp
  misc_feature (83)..(254): NCBI GI NO: 15613885 NR Description: BH1322~unknown conserved protein
  misc_feature (83)..(254): NCBI GI NO: 23099444 NR Description: hypothetical protein
  misc_feature (121)..(121): Xaa is any aa, unknown or other
MLPSPPVLLRPCAARASPLPPPRPRAANPNTESATTTTVATSADRAATMGAAAWWRRALGQRFNPAGVAAVAAVAASKPRLALPHVSVQDIRCLDWAELRRAGFRGVVFDKDNTLTAPYAXALWPPLAAAFDQCRATFPPGALAIYSNSAGLTEYDPDGVDARAIEAVIEGVHVIRHDIKKPGGLATEIESYFGCSASNLVLVGDRYFTDVVYGNKNGFLTVLTEPLNITDESYIVKRVRKLEAYIISYWYKKGHKPIEHPLLPDARRIVKFDSYDDSVSTRI

SEQ ID NO: 25382 - protein, 235 aa, Zea mays subsp. mays
  peptide (1)..(235): Ceres Seq. ID no. 12402834
  misc_feature (1)..(119): NCBI GI NO: 34908890 NR Description: P0699H05.17
  misc_feature (130)..(232): NCBI GI NO: 34908890 NR Description: P0699H05.17
  misc_feature (1)..(226): NCBI GI NO: 15231583 NR Description: putative protein; protein id: At3g58830.1
  misc_feature (1)..(226): NCBI GI NO: 28466953 NR Description: At3g58830 [Arabidopsis thaliana]
  misc_feature (29)..(170): NCBI GI NO: 11282546 NR Description: hypothetical protein 15E6.20
  misc_feature (57)..(170): NCBI GI NO: 6321892 NR Description: Hypothetical ORF; Yhr100cp
  misc_feature (35)..(206): NCBI GI NO: 15613885 NR Description: BH1322~unknown conserved protein
  misc_feature (35)..(206): NCBI GI NO: 23099444 NR Description: hypothetical protein
  misc_feature (73)..(73): Xaa is any aa, unknown or other
MGAAAWWRRALGQRFNPAGVAAVAAVAASKPRLALPHVSVQDIRCLDWAELRRAGFRGVVFDKDNTLTAPYAXALWPPLAAAFDQCRATFPPGALAIYSNSAGLTEYDPDGVDARAIEAVIEGVHVIRHDIKKPGGLATEIESYFGCSASNLVLVGDRYFTDVVYGNKNGFLTVLTEPLNITDESYIVKRVRKLEAYIISYWYKKGHKPIEHPLLPDARRIVKFDSYDDSVSTRI

SEQ ID NO: 25383 - DNA, 909 bp, Zea mays subsp. mays
  misc_feature (1)..(909): Ceres Seq. ID no. 12356120
accaaagcaaaccgaagccgcactctaccgcgctcctcccgaaccacagctatgctcgcccaccgcctcctcctcctcctcgccgtcgccgcggcgagcggcaccgccttcgctaagccgacggcgtacgaagccctcgctgactacgacttcccgccggggatcctccccaagggcgtggtcgcctacacgctcgacaacgccacgggcgccttcacggccacgctcgacgcctccgcgtccggcagcgggtcctccgtctgcgagttctccatccagggctcctactcgctccgctaccagaccaagatcaccggaaagatcgcccccgaccacctcaccgacctcgagggcgtctccgtcaaggtcctcttcttctggctcaacatcgtcgaggtcacccggcgcggcgacaacctcgagttctccgtcggcatcgtctccgcggacttcgggattgaaaacttcctcgagtgccccacctgtggctgcgggttcgactgcaacaacctgctcatgctgcagaagcccggcgccgccaccgccaagctgcgcctgcggggtgccttctagaactccacttctgcagatttggtgactgctgctgtaagctgcctcgactagtagtgctgtatgtctagtagatgtgggttaataaagagggcaaacttgaaagatcccagcttttagatgtgggatggggtaaccaagttcaggactcgatgtcatgtttcaccaattgtttcagacagttctaggaacagtcagagaagcaattaagacctttcaaatattttaatttatacgtctctatggaaattgtcttatttccattgagatgtttgcccctcatgtgaattagtttgtgaagtggtgatagttgaatcccatggatatggatggttgcct

SEQ ID NO: 25384 - protein, 198 aa, Zea mays subsp. mays
  peptide (1)..(198): Ceres Seq. ID no. 12356121
  misc_feature (19)..(178): Pfam Name: Pfam Description:  Equine herpesvirus glycoprotein gp2
  misc_feature (11)..(190): NCBI GI NO: 11359723 NR Description: proteophosphoglycan, membrane-associated
  misc_feature (19)..(193): NCBI GI NO: 32699068 NR Description: hypothetical protein FLJ35107 [Homo sapiens]
  misc_feature (1)..(193): NCBI GI NO: 2429362 NR Description: proline rich protein [Santalum album]
  misc_feature (13)..(190): NCBI GI NO: 11359723 NR Description: proteophosphoglycan, membrane-associated
  misc_feature (19)..(193): NCBI GI NO: 32699068 NR Description: hypothetical protein FLJ35107 [Homo sapiens]
  misc_feature (17)..(183): NCBI GI NO: 32699068 NR Description: hypothetical protein FLJ35107 [Homo sapiens]
  misc_feature (11)..(192): NCBI GI NO: 11359723 NR Description: proteophosphoglycan, membrane-associated
  misc_feature (11)..(193): NCBI GI NO: 13592175 NR Description: ppg3 [Leishmania major]
  misc_feature (11)..(190): NCBI GI NO: 13592175 NR Description: ppg3 [Leishmania major]
  misc_feature (11)..(190): NCBI GI NO: 13592175 NR Description: ppg3 [Leishmania major]
PKQTEAALYRAPPEPQLCSPTASSSSSPSPRRAAPPSLSRRRTKPSLTTTSRRGSSPRAWSPTRSTTPRAPSRPRSTPPRPAAGPPSASSPSRAPTRSATRPRSPERSPPTTSPTSRASPSRSSSSGSTSSRSPGAATTSSSPSASSPRTSGLKTSSSAPPVAAGSTATTCSCCRSPAPPPPSCACGVPSRTPLLQIW

SEQ ID NO: 25385 - protein, 190 aa, Zea mays subsp. mays
  peptide (1)..(190): Ceres Seq. ID no. 12356122
  misc_feature (29)..(168): Pfam Name: Pfam Description:  Protein of unknown function, DUF538
  misc_feature (13)..(170): NCBI GI NO: 18411923 NR Description: coded for by A
  misc_feature (13)..(170): NCBI GI NO: 21554037 NR Description: unknown [Arabidopsis thaliana]
  misc_feature (29)..(168): NCBI GI NO: 18379014 NR Description: Expressed protein; protein id: At1g02816
  misc_feature (39)..(173): NCBI GI NO: 15235335 NR Description: putative protein; protein id: At4g02360.1
  misc_feature (23)..(168): NCBI GI NO: 18379012 NR Description: Expressed protein; protein id: At1g02813
  misc_feature (23)..(168): NCBI GI NO: 21553750 NR Description: unknown [Arabidopsis thaliana]
TKANRSRTLPRSSRTTAMLAHRLLLLLAVAAASGTAFAKPTAYEALADYDFPPGILPKGVVAYTLDNATGAFTATLDASASGSGSSVCEFSIQGSYSLRYQTKITGKIAPDHLTDLEGVSVKVLFFWLNIVEVTRRGDNLEFSVGIVSADFGIENFLECPTCGCGFDCNNLLMLQKPGAATAKLRLRGAF

SEQ ID NO: 25386 - protein, 173 aa, Zea mays subsp. mays
  peptide (1)..(173): Ceres Seq. ID no. 12356123
  misc_feature (12)..(151): Pfam Name: Pfam Description:  Protein of unknown function, DUF538
  misc_feature (1)..(153): NCBI GI NO: 18411923 NR Description: coded for by A
  misc_feature (1)..(153): NCBI GI NO: 21554037 NR Description: unknown [Arabidopsis thaliana]
  misc_feature (12)..(151): NCBI GI NO: 18379014 NR Description: Expressed protein; protein id: At1g02816
  misc_feature (22)..(156): NCBI GI NO: 15235335 NR Description: putative protein; protein id: At4g02360.1
  misc_feature (6)..(151): NCBI GI NO: 18379012 NR Description: Expressed protein; protein id: At1g02813
  misc_feature (6)..(151): NCBI GI NO: 21553750 NR Description: unknown [Arabidopsis thaliana]
MLAHRLLLLLAVAAASGTAFAKPTAYEALADYDFPPGILPKGVVAYTLDNATGAFTATLDASASGSGSSVCEFSIQGSYSLRYQTKITGKIAPDHLTDLEGVSVKVLFFWLNIVEVTRRGDNLEFSVGIVSADFGIENFLECPTCGCGFDCNNLLMLQKPGAATAKLRLRGAF

SEQ ID NO: 25387 - DNA, 998 bp, Zea mays subsp. mays
  misc_feature (1)..(998): Ceres Seq. ID no. 13494376
  misc_feature (583)..(583): n is a, c, t, g, unknown, or other
  misc_feature (540)..(540): n is a, c, t, g, unknown, or other
ataaaggggcattggcttgggatcacctctgcatcttacctgggatctgctagcttgatctctcctagtcctagcccattcgcttctcctgttcgtcgctcttaatttgcttgctcgatccctggcagtggcagctgctgcaatggcttccggtggcgcgtcgtcactggccttggccttggccgcgctgctcctcgtgagctgcgcctcggcggcggtggcgaccaagtacaccgtcggggacgcgtccggctggacgaccaccggcgactacgccacctgggccagcggcaagaagttcaaagtcggcgacagtctcgagttcaaatacgccggcggggcgcacacggtggacgaggtgagcgcggcggactacgccgcctgctcctccagcaacgcgctcagcaccgacagcgccggcgccacgaccgtgaccctcaagacggccggcaagcactacttcatctgcggcgtggcgggccattgcagcagcggcatgaagctcgtggtggacgtggccaaggcggtgaccgccccggngccggccccagccgcggccccggccccggccgcggacaccgcnccagacgcccccgacaccacgccgtcgaccccgacgtccccctcgagctccggcggccgcacgcccaagagcccagacacgacggtcctctcgccgccggacaagaagtccacctcctctggcgccaccgggctcagcgccgcagtgtgggccggcttgggccttgccgggctcgtggccgtgcacctcggcgcgttctaggccagcccgctggcctggccagggaggagacagtgccgtgtgttgttgttaggctgcacgtcatgaattggattggtgtattggttgagggacttgactgcttaccagagagagatctctttttggttcagggaacttattgacgatgctttggctgtgctgtagacatgtagttggataccttggatgttatgctatcagttttgctgttgct

SEQ ID NO: 25388 - protein, 213 aa, Zea mays subsp. mays
  peptide (1)..(213): Ceres Seq. ID no. 13494377
  misc_feature (38)..(119): Pfam Name: Pfam Description:  Plastocyanin-like domain
  misc_feature (6)..(172): NCBI GI NO: 2493318 NR Description: Blue copper protein precursor
  misc_feature (5)..(208): NCBI GI NO: 14140127 NR Description: uclacyanin 3-like protein [Oryza sativa]
  misc_feature (1)..(202): NCBI GI NO: 21554060 NR Description: phytocyanin [Arabidopsis thaliana]
  misc_feature (1)..(202): NCBI GI NO: 15224960 NR Description: uclacyanin II [Arabidopsis thaliana]
  misc_feature (1)..(202): NCBI GI NO: 25453522 NR Description: blue copper-binding protein II
  misc_feature (1)..(202): NCBI GI NO: 25453521 NR Description: blue copper-binding protein II
  misc_feature (6)..(168): NCBI GI NO: 38346158 NR Description: OSJNBa0079A21.5
  misc_feature (11)..(188): NCBI GI NO: 15232289 NR Description: uclacyanin 3 [Arabidopsis thaliana]
  misc_feature (11)..(167): NCBI GI NO: 38636761 NR Description: putative blue copper binding protein
  misc_feature (10)..(205): NCBI GI NO: 34915492 NR Description: contains ESTsD24614
  misc_feature (133)..(133): Xaa is any aa, unknown or other
  misc_feature (147)..(147): Xaa is any aa, unknown or other
MASGGASSLALALAALLLVSCASAAVATKYTVGDASGWTTTGDYATWASGKKFKVGDSLEFKYAGGAHTVDEVSAADYAACSSSNALSTDSAGATTVTLKTAGKHYFICGVAGHCSSGMKLVVDVAKAVTAPXPAPAAAPAPAADTXPDAPDTTPSTPTSPSSSGGRTPKSPDTTVLSPPDKKSTSSGATGLSAAVWAGLGLAGLVAVHLGAF

SEQ ID NO: 25389 - DNA, 1272 bp, Zea mays subsp. mays
  misc_feature (1)..(1272): Ceres Seq. ID no. 12402634
actccaatctccacagtccacaccctccgggcgccggcctccactcctccattcttgtcccggaaccatgtcgatgcttctctcgcgaaggttctcctgcgccctcgcccgcgccccgtcgctcgtacggggccggccccttcctccctgcgccgcccgcaccacccctccggctcccagctctccgccccgccgcctcatgtcgtcctcctctgccgggtggcagcactcctcgcaccgtcccccgccgccgccgccgcctcctcctcatcccggtgctgacaaggaccagctgttcagggggctggaggcggcgctgggcaccgcgttcagctccgagccgctggcgccgccaccgcagcctatgatcctcgtcatcagcgggcccagcggtgtcggcaaggacgccgtcatcaagaggctgcaggaggagagggaagggatccatttcgttgtcaccgcgacaagcagggcgatgaggccaggtgaagttgaagggaaagactattactttgtcagtaaggaggaatttctgacgatgattgagagggaggagttgctcgagtatgctcttgtttatggggagtacaaggggatccccaaacagcagattcgtgactacatggctaaaggctgtgacattgttctgagagtggacattcaaggagcagcgacgttaagacagatacttggtgaatctgcggttttcatatttttagttgctgagagtgaagaggcacttgttaaaaggctaatccaccgtaaaacagaaacatcagatatgcttcttgtcagagttgcaacagccagggaggaggtgaaacacatgaagaatttcgactatgtggttgtaaacgctcaagggaaacttgaggaggctgttaaacaagtggaatctatcattgatgctgagaagtctaaaattcacaagcggcatgtcaatatctaagctaaggatcatgtgatttatgcctagtgtcttcatctctataaaggaaaattatctgtccaagtctactgaagcgtgatgaaatgactcaggtttcagtagccagaaagttcaatggattgctgagttacaagaatatggcatgttctgtttaagaaatttccctcaccacaaccggggcagcacaatctctgggatatatacacgactctcttgttatttgtctctttttttccctttgattttttagctctgcctggaggaatctggaaggctgtaccaaactagttctgggtgaatcttaagtgatgttctatccttcg

SEQ ID NO: 25390 - protein, 315 aa, Zea mays subsp. mays
  peptide (1)..(315): Ceres Seq. ID no. 12402635
  misc_feature (156)..(260): Pfam Name: Pfam Description:  Guanylate kinase
  misc_feature (59)..(315): NCBI GI NO: 18397500 NR Description: putative guanylate kinase; protein id: At3g06200
  misc_feature (82)..(315): NCBI GI NO: 6862924 NR Description: putative guanylate kinase [Arabidopsis thaliana]
  misc_feature (32)..(315): NCBI GI NO: 22969911 NR Description: hypothetical protein [Chloroflexus aurantiacus]
  misc_feature (122)..(310): NCBI GI NO: 28210904 NR Description: guanylate kinase [Clostridium tetani E88]
  misc_feature (122)..(307): NCBI GI NO: 15615075 NR Description: guanylate kinase [Bacillus halodurans]
  misc_feature (122)..(315): NCBI GI NO: 18310730 NR Description: guanylate kinase [Clostridium perfringens]
  misc_feature (122)..(315): NCBI GI NO: 22095797 NR Description: Guanylate kinase (GMP kinase)
  misc_feature (120)..(310): NCBI GI NO: 20807954 NR Description: Guanylate kinase
  misc_feature (122)..(315): NCBI GI NO: 23098957 NR Description: guanylate kinase [Oceanobacillus iheyensis HTE831]
  misc_feature (122)..(315): NCBI GI NO: 15894995 NR Description: Guanylate kinase, YLOD B.subtilis ortholog
LQSPQSTPSGRRPPLLHSCPGTMSMLLSRRFSCALARAPSLVRGRPLPPCAARTTPPAPSSPPRRLMSSSSAGWQHSSHRPPPPPPPPPHPGADKDQLFRGLEAALGTAFSSEPLAPPPQPMILVISGPSGVGKDAVIKRLQEEREGIHFVVTATSRAMRPGEVEGKDYYFVSKEEFLTMIEREELLEYALVYGEYKGIPKQQIRDYMAKGCDIVLRVDIQGAATLRQILGESAVFIFLVAESEEALVKRLIHRKTETSDMLLVRVATAREEVKHMKNFDYVVVNAQGKLEEAVKQVESIIDAEKSKIHKRHVNI

SEQ ID NO: 25391 - protein, 293 aa, Zea mays subsp. mays
  peptide (1)..(293): Ceres Seq. ID no. 12402636
  misc_feature (134)..(238): Pfam Name: Pfam Description:  Guanylate kinase
  misc_feature (37)..(293): NCBI GI NO: 18397500 NR Description: putative guanylate kinase; protein id: At3g06200
  misc_feature (60)..(293): NCBI GI NO: 6862924 NR Description: putative guanylate kinase [Arabidopsis thaliana]
  misc_feature (10)..(293): NCBI GI NO: 22969911 NR Description: hypothetical protein [Chloroflexus aurantiacus]
  misc_feature (100)..(288): NCBI GI NO: 28210904 NR Description: guanylate kinase [Clostridium tetani E88]
  misc_feature (100)..(285): NCBI GI NO: 15615075 NR Description: guanylate kinase [Bacillus halodurans]
  misc_feature (100)..(293): NCBI GI NO: 18310730 NR Description: guanylate kinase [Clostridium perfringens]
  misc_feature (100)..(293): NCBI GI NO: 22095797 NR Description: Guanylate kinase (GMP kinase)
  misc_feature (98)..(288): NCBI GI NO: 20807954 NR Description: Guanylate kinase
  misc_feature (100)..(293): NCBI GI NO: 23098957 NR Description: guanylate kinase [Oceanobacillus iheyensis HTE831]
  misc_feature (100)..(293): NCBI GI NO: 15894995 NR Description: Guanylate kinase, YLOD B.subtilis ortholog
MSMLLSRRFSCALARAPSLVRGRPLPPCAARTTPPAPSSPPRRLMSSSSAGWQHSSHRPPPPPPPPPHPGADKDQLFRGLEAALGTAFSSEPLAPPPQPMILVISGPSGVGKDAVIKRLQEEREGIHFVVTATSRAMRPGEVEGKDYYFVSKEEFLTMIEREELLEYALVYGEYKGIPKQQIRDYMAKGCDIVLRVDIQGAATLRQILGESAVFIFLVAESEEALVKRLIHRKTETSDMLLVRVATAREEVKHMKNFDYVVVNAQGKLEEAVKQVESIIDAEKSKIHKRHVNI

SEQ ID NO: 25392 - protein, 291 aa, Zea mays subsp. mays
  peptide (1)..(291): Ceres Seq. ID no. 12402637
  misc_feature (132)..(236): Pfam Name: Pfam Description:  Guanylate kinase
  misc_feature (35)..(291): NCBI GI NO: 18397500 NR Description: putative guanylate kinase; protein id: At3g06200
  misc_feature (58)..(291): NCBI GI NO: 6862924 NR Description: putative guanylate kinase [Arabidopsis thaliana]
  misc_feature (8)..(291): NCBI GI NO: 22969911 NR Description: hypothetical protein [Chloroflexus aurantiacus]
  misc_feature (98)..(286): NCBI GI NO: 28210904 NR Description: guanylate kinase [Clostridium tetani E88]
  misc_feature (98)..(283): NCBI GI NO: 15615075 NR Description: guanylate kinase [Bacillus halodurans]
  misc_feature (98)..(291): NCBI GI NO: 18310730 NR Description: guanylate kinase [Clostridium perfringens]
  misc_feature (98)..(291): NCBI GI NO: 22095797 NR Description: Guanylate kinase (GMP kinase)
  misc_feature (96)..(286): NCBI GI NO: 20807954 NR Description: Guanylate kinase
  misc_feature (98)..(291): NCBI GI NO: 23098957 NR Description: guanylate kinase [Oceanobacillus iheyensis HTE831]
  misc_feature (98)..(291): NCBI GI NO: 15894995 NR Description: Guanylate kinase, YLOD B.subtilis ortholog
MLLSRRFSCALARAPSLVRGRPLPPCAARTTPPAPSSPPRRLMSSSSAGWQHSSHRPPPPPPPPPHPGADKDQLFRGLEAALGTAFSSEPLAPPPQPMILVISGPSGVGKDAVIKRLQEEREGIHFVVTATSRAMRPGEVEGKDYYFVSKEEFLTMIEREELLEYALVYGEYKGIPKQQIRDYMAKGCDIVLRVDIQGAATLRQILGESAVFIFLVAESEEALVKRLIHRKTETSDMLLVRVATAREEVKHMKNFDYVVVNAQGKLEEAVKQVESIIDAEKSKIHKRHVNI

SEQ ID NO: 25393 - DNA, 1168 bp, Zea mays subsp. mays
  misc_feature (1)..(1168): Ceres Seq. ID no. 12356054
agcactcagaccaccaccagcagttctgagctagctatggcgatgatgatgagagcattggcagcagcggccatcctggccacggcgtttgccgtgtcggcacgagccgagcccccgcagtgcggcgccaactccaccacggcgctctgcccctactgcctgtgctgcagcaaatggggcttctgcggcagcaccgaagcctactgcggcaacggctgccagagccagtgcgaccgctgcaacgccaccgtcgcgtccatcgtcacgcgggagctcttcgacgagctgctgctgcaccgcaacgacctcaggtgccccgcccagggcttctacacctacgactcgttcatcgccgcggcgggcgccgacgcttccgacggcttcggcaccacgggcgccgtcgacatccggaagcgcgaggtcgccgcgttcctggcggagccggcgcaccggacctcgggcggctgggacggcgcgcccaacggcacctacgcctggggcttctgctacaagccggccggcgcccagaacgtcacggaccccgtcgccttcttcgagacggccatcgcgagctggatgacggcgtcggcgcgcccgcccaagccgtcgtgccacgacgtcgtcaccgagcagtggaccccctcggacgccgacaaggccgcggggaggctgcggggcttcggcgtcatcgccaacatcatcaacggcgacgccgagtgcggccgcggccccgacgccggtggccaggaccggatcggcttctacaagcgcttctgcgacatccttggcgtcagctacggcgacaacttggactgcttcgaccagaagcccttcggcgctgcccaccgccgccgccttagctgaaactaccagcggcccgcgtcacgctgacgcgtaaaagaataatgcatgcatgggcaccgcacagggcacaaatcaataacagctctcttttaaataatctgcatgcttattcgcttgcataagcatgcacacgtagtagatcgtgcatgtgtagggcgagcatgtttactttcatcccgggcggccggggttgtgtcgtcgtgcgagttgccgtgaagatgtactatgcctcatgcatgttttctatgccatatattatataaataaatgcataaaaaaactgagctgcaacgatggcagcgcc

SEQ ID NO: 25394 - protein, 287 aa, Zea mays subsp. mays
  peptide (1)..(287): Ceres Seq. ID no. 12356055
  misc_feature (38)..(77): Pfam Name: Pfam Description:  Chitin recognition protein
  misc_feature (180)..(280): NCBI GI NO: 38371990 NR Description: chitinase; BoCHI1 [Bambusa oldhamii]
  misc_feature (84)..(171): NCBI GI NO: 38371990 NR Description: chitinase; BoCHI1 [Bambusa oldhamii]
  misc_feature (17)..(80): NCBI GI NO: 38371990 NR Description: chitinase; BoCHI1 [Bambusa oldhamii]
  misc_feature (17)..(171): NCBI GI NO: 6164588 NR Description: chitinase [Poa pratensis]
  misc_feature (179)..(280): NCBI GI NO: 6164588 NR Description: chitinase [Poa pratensis]
  misc_feature (17)..(171): NCBI GI NO: 6164585 NR Description: chitinase [Poa pratensis]
  misc_feature (185)..(287): NCBI GI NO: 6164585 NR Description: chitinase [Poa pratensis]
  misc_feature (17)..(170): NCBI GI NO: 12407647 NR Description: 31
  misc_feature (179)..(278): NCBI GI NO: 12407647 NR Description: 31
  misc_feature (17)..(170): NCBI GI NO: 481478 NR Description: chitinase (EC 3.2.1.14) - wheat
STQTTTSSSELAMAMMMRALAAAAILATAFAVSARAEPPQCGANSTTALCPYCLCCSKWGFCGSTEAYCGNGCQSQCDRCNATVASIVTRELFDELLLHRNDLRCPAQGFYTYDSFIAAAGADASDGFGTTGAVDIRKREVAAFLAEPAHRTSGGWDGAPNGTYAWGFCYKPAGAQNVTDPVAFFETAIASWMTASARPPKPSCHDVVTEQWTPSDADKAAGRLRGFGVIANIINGDAECGRGPDAGGQDRIGFYKRFCDILGVSYGDNLDCFDQKPFGAAHRRRLS

SEQ ID NO: 25395 - protein, 275 aa, Zea mays subsp. mays
  peptide (1)..(275): Ceres Seq. ID no. 12356056
  misc_feature (26)..(65): Pfam Name: Pfam Description:  Chitin recognition protein
  misc_feature (168)..(268): NCBI GI NO: 38371990 NR Description: chitinase; BoCHI1 [Bambusa oldhamii]
  misc_feature (72)..(159): NCBI GI NO: 38371990 NR Description: chitinase; BoCHI1 [Bambusa oldhamii]
  misc_feature (5)..(68): NCBI GI NO: 38371990 NR Description: chitinase; BoCHI1 [Bambusa oldhamii]
  misc_feature (5)..(159): NCBI GI NO: 6164588 NR Description: chitinase [Poa pratensis]
  misc_feature (167)..(268): NCBI GI NO: 6164588 NR Description: chitinase [Poa pratensis]
  misc_feature (5)..(159): NCBI GI NO: 6164585 NR Description: chitinase [Poa pratensis]
  misc_feature (173)..(275): NCBI GI NO: 6164585 NR Description: chitinase [Poa pratensis]
  misc_feature (5)..(158): NCBI GI NO: 12407647 NR Description: 31
  misc_feature (167)..(266): NCBI GI NO: 12407647 NR Description: 31
  misc_feature (5)..(158): NCBI GI NO: 481478 NR Description: chitinase (EC 3.2.1.14) - wheat
MAMMMRALAAAAILATAFAVSARAEPPQCGANSTTALCPYCLCCSKWGFCGSTEAYCGNGCQSQCDRCNATVASIVTRELFDELLLHRNDLRCPAQGFYTYDSFIAAAGADASDGFGTTGAVDIRKREVAAFLAEPAHRTSGGWDGAPNGTYAWGFCYKPAGAQNVTDPVAFFETAIASWMTASARPPKPSCHDVVTEQWTPSDADKAAGRLRGFGVIANIINGDAECGRGPDAGGQDRIGFYKRFCDILGVSYGDNLDCFDQKPFGAAHRRRLS

SEQ ID NO: 25396 - protein, 273 aa, Zea mays subsp. mays
  peptide (1)..(273): Ceres Seq. ID no. 12356057
  misc_feature (24)..(63): Pfam Name: Pfam Description:  Chitin recognition protein
  misc_feature (166)..(266): NCBI GI NO: 38371990 NR Description: chitinase; BoCHI1 [Bambusa oldhamii]
  misc_feature (70)..(157): NCBI GI NO: 38371990 NR Description: chitinase; BoCHI1 [Bambusa oldhamii]
  misc_feature (3)..(66): NCBI GI NO: 38371990 NR Description: chitinase; BoCHI1 [Bambusa oldhamii]
  misc_feature (3)..(157): NCBI GI NO: 6164588 NR Description: chitinase [Poa pratensis]
  misc_feature (165)..(266): NCBI GI NO: 6164588 NR Description: chitinase [Poa pratensis]
  misc_feature (3)..(157): NCBI GI NO: 6164585 NR Description: chitinase [Poa pratensis]
  misc_feature (171)..(273): NCBI GI NO: 6164585 NR Description: chitinase [Poa pratensis]
  misc_feature (3)..(156): NCBI GI NO: 12407647 NR Description: 31
  misc_feature (165)..(264): NCBI GI NO: 12407647 NR Description: 31
  misc_feature (3)..(156): NCBI GI NO: 481478 NR Description: chitinase (EC 3.2.1.14) - wheat
MMMRALAAAAILATAFAVSARAEPPQCGANSTTALCPYCLCCSKWGFCGSTEAYCGNGCQSQCDRCNATVASIVTRELFDELLLHRNDLRCPAQGFYTYDSFIAAAGADASDGFGTTGAVDIRKREVAAFLAEPAHRTSGGWDGAPNGTYAWGFCYKPAGAQNVTDPVAFFETAIASWMTASARPPKPSCHDVVTEQWTPSDADKAAGRLRGFGVIANIINGDAECGRGPDAGGQDRIGFYKRFCDILGVSYGDNLDCFDQKPFGAAHRRRLS

SEQ ID NO: 25397 - DNA, 1071 bp, Zea mays subsp. mays
  misc_feature (1)..(1071): Ceres Seq. ID no. 13624136
agtcaactaccaattttctcgctcagacatacagaattacagagtcgaagtgcgctgtggcctgtggactctcccctccccaactccggcgaagggagcagaaacgttggcgtgttggttgggtggcgtcggcatggacgaggcaacgaagaagaatgtggaggctacggtgctggagatcctccggggctccgatatggagtccgtgacggagtacaaggtccgcgccgctgccagcgaccgcctcggcatcgacctctccatacccgaccgcaagctcttcgtccgcggcgtcgttgaggaatacctactttcactctcctccaaggaggaggcgaaggcggaggaggagggcgtcactggcagggagagcaagggcaaggaacacgaagaggaggacgaagaggatgacgatgaggaggaggatgaaggtaagggtggcgggaagagagagtacgatgaccaaggtgaccttatcctgtgccgcctttcgagcaagaggagggtgactttatcggagtttaagggcaggtcgttggtgtccatccgcgagttctacgtgaaggacggcaaggagatgccctccgccaaaggtatcagtatgactttggagcagtgggaagcattttgcaatgctgtacctgcaatagaggatgccatcaaaaagcttgaagattcagactgaactggttttaagagcctcttcttatgcccgtgtcaaatgaaaaagcctgggaagcatttcgcaatgctgtatctgcaatagatgatgcatgaaaaagcttgaagattcagacagaactggtttaggagcctcttattttgcctgtatcaaataaaaaagcctatttctgacccttaacgagggccatatatgtgtcttgcaagagctaagttctgtaaaagatttctacatgtaccatgtgtaggagttaggatagagtgatagacgtactgctgcatacagttcggaatatttgctagtaacaagtaatctaccattaggtggcctggagttcacatgctatgctatggatgatcggggatgtgtcctagcaatagcaagctcag

SEQ ID NO: 25398 - protein, 227 aa, Zea mays subsp. mays
  peptide (1)..(227): Ceres Seq. ID no. 13624137
  misc_feature (130)..(220): Pfam Name: PC4 Pfam Description: Transcriptional Coactivator p15
  misc_feature (45)..(227): NCBI GI NO: 34910378 NR Description: P0684B02.23
  misc_feature (95)..(224): NCBI GI NO: 13699910 NR Description: putative transcriptional coactivator
  misc_feature (66)..(224): NCBI GI NO: 15236980 NR Description: transcriptional co-activator (KELP) -related
  misc_feature (45)..(224): NCBI GI NO: 16610191 NR Description: PBF68 protein [Nicotiana tabacum]
  misc_feature (45)..(138): NCBI GI NO: 13699910 NR Description: putative transcriptional coactivator
  misc_feature (124)..(223): NCBI GI NO: 15242365 NR Description: transcriptional co-activator (KIWI) -related
  misc_feature (45)..(137): NCBI GI NO: 15236980 NR Description: transcriptional co-activator (KELP) -related
  misc_feature (150)..(222): NCBI GI NO: 40739125 NR Description: hypothetical protein AN5806.2
  misc_feature (126)..(225): NCBI GI NO: 15242363 NR Description: transcriptional co-activator-related protein
  misc_feature (100)..(217): NCBI GI NO: 17542398 NR Description: Transcriptional Coactivator p15 (PC4) (14.4 kD)
VNYQFSRSDIQNYRVEVRCGLWTLPSPTPAKGAETLACWLGGVGMDEATKKNVEATVLEILRGSDMESVTEYKVRAAASDRLGIDLSIPDRKLFVRGVVEEYLLSLSSKEEAKAEEEGVTGRESKGKEHEEEDEEDDDEEEDEGKGGGKREYDDQGDLILCRLSSKRRVTLSEFKGRSLVSIREFYVKDGKEMPSAKGISMTLEQWEAFCNAVPAIEDAIKKLEDSD

SEQ ID NO: 25399 - protein, 183 aa, Zea mays subsp. mays
  peptide (1)..(183): Ceres Seq. ID no. 13624138
  misc_feature (86)..(176): Pfam Name: PC4 Pfam Description: Transcriptional Coactivator p15
  misc_feature (1)..(183): NCBI GI NO: 34910378 NR Description: P0684B02.23
  misc_feature (51)..(180): NCBI GI NO: 13699910 NR Description: putative transcriptional coactivator
  misc_feature (22)..(180): NCBI GI NO: 15236980 NR Description: transcriptional co-activator (KELP) -related
  misc_feature (1)..(180): NCBI GI NO: 16610191 NR Description: PBF68 protein [Nicotiana tabacum]
  misc_feature (1)..(94): NCBI GI NO: 13699910 NR Description: putative transcriptional coactivator
  misc_feature (80)..(179): NCBI GI NO: 15242365 NR Description: transcriptional co-activator (KIWI) -related
  misc_feature (1)..(93): NCBI GI NO: 15236980 NR Description: transcriptional co-activator (KELP) -related
  misc_feature (106)..(178): NCBI GI NO: 40739125 NR Description: hypothetical protein AN5806.2
  misc_feature (82)..(181): NCBI GI NO: 15242363 NR Description: transcriptional co-activator-related protein
  misc_feature (56)..(173): NCBI GI NO: 17542398 NR Description: Transcriptional Coactivator p15 (PC4) (14.4 kD)
MDEATKKNVEATVLEILRGSDMESVTEYKVRAAASDRLGIDLSIPDRKLFVRGVVEEYLLSLSSKEEAKAEEEGVTGRESKGKEHEEEDEEDDDEEEDEGKGGGKREYDDQGDLILCRLSSKRRVTLSEFKGRSLVSIREFYVKDGKEMPSAKGISMTLEQWEAFCNAVPAIEDAIKKLEDSD

SEQ ID NO: 25400 - protein, 162 aa, Zea mays subsp. mays
  peptide (1)..(162): Ceres Seq. ID no. 13624139
  misc_feature (65)..(155): Pfam Name: PC4 Pfam Description: Transcriptional Coactivator p15
  misc_feature (1)..(162): NCBI GI NO: 34910378 NR Description: P0684B02.23
  misc_feature (30)..(159): NCBI GI NO: 13699910 NR Description: putative transcriptional coactivator
  misc_feature (1)..(159): NCBI GI NO: 15236980 NR Description: transcriptional co-activator (KELP) -related
  misc_feature (1)..(159): NCBI GI NO: 16610191 NR Description: PBF68 protein [Nicotiana tabacum]
  misc_feature (1)..(73): NCBI GI NO: 13699910 NR Description: putative transcriptional coactivator
  misc_feature (59)..(158): NCBI GI NO: 15242365 NR Description: transcriptional co-activator (KIWI) -related
  misc_feature (1)..(72): NCBI GI NO: 15236980 NR Description: transcriptional co-activator (KELP) -related
  misc_feature (85)..(157): NCBI GI NO: 40739125 NR Description: hypothetical protein AN5806.2
  misc_feature (61)..(160): NCBI GI NO: 15242363 NR Description: transcriptional co-activator-related protein
  misc_feature (35)..(152): NCBI GI NO: 17542398 NR Description: Transcriptional Coactivator p15 (PC4) (14.4 kD)
MESVTEYKVRAAASDRLGIDLSIPDRKLFVRGVVEEYLLSLSSKEEAKAEEEGVTGRESKGKEHEEEDEEDDDEEEDEGKGGGKREYDDQGDLILCRLSSKRRVTLSEFKGRSLVSIREFYVKDGKEMPSAKGISMTLEQWEAFCNAVPAIEDAIKKLEDSD

SEQ ID NO: 25401 - DNA, 1125 bp, Zea mays subsp. mays
  misc_feature (1)..(1125): Ceres Seq. ID no. 12353686
actcagacgccacctgttcttccttcctctcctctctgcaacgcgtcgggaagcagctgccagccatggcaatggcgtcgtcgtcgagcgggctgaggagctgcagcgcattgggcgtgcccagcctgctggcgccgtcgacgtcgtcgtcgtcccggtccggccgcctgccgttctgcgcccacgccaccacctccggccgcgtcaccatgtccgcggagtggatgcccgggcagccccgccccgcccacctcgacggctcctcgccaggtgacttcggcttcgaccccctgggcctggccacggtgccggagaacttcgagcggttcaaggagtcggaggtgtaccactgccggtgggccatgctggccgtgccgggggtgctggtgccggaggcgctggggctgggcaactgggtgaaggcgcaggagtgggcggccgtccccggcgggcaggccacgtacctgggcgccccggtgccgtggggcacgctgccgaccatcctggcggtcgagttcgtggccatcgccttcgccgagcaccagcgcaccatggagaaggaccccgagaagaagaagtaccccggcggcgccttcgacccgctcggcttctccagggaccccgccaagctcgaggagtacaagctcaaggagatcaagaacggccgcctcgccatgctggccttcgtcggcttctgcgtccagcagtcggcgtacccgggcaccggtccgctcgagaaccttgccgcccacctcgccgacccctggcacaacaacatcggagacatcatcatccctagatcgatctccccttgacaattatattggttgattattacgactaggcactaggcactgcctgcctgcgtgcaggagcagtacaacgacgacgacggcgagtcggcgacttccctcccgcccggaaagctctcgtaatctaaaggaaaaggaaattggtaccatgttgtgcacttctagcatgcatgacagcaatcgcaagcttcttcctcagccactaacctctatgtacattttcagcgcaagatcattgtcgacagtagtatacataaaagtgtacacaatatactgaacaaacaaccaagacacaagtgaatgtaatttggcg

SEQ ID NO: 25402 - protein, 270 aa, Zea mays subsp. mays
  peptide (1)..(270): Ceres Seq. ID no. 12353687
  misc_feature (79)..(236): Pfam Name: Pfam Description:  Chlorophyll A-B binding protein
  misc_feature (27)..(270): NCBI GI NO: 3789954 NR Description: chlorophyll a/b-binding protein precursor
  misc_feature (26)..(268): NCBI GI NO: 6685157 NR Description: chlorophyll a/b binding protein precursor
  misc_feature (52)..(268): NCBI GI NO: 542128 NR Description: chlorophyll a/b-binding protein type Ib
  misc_feature (27)..(270): NCBI GI NO: 625547 NR Description: chlorophyll a/b-binding protein type I
  misc_feature (27)..(270): NCBI GI NO: 82078 NR Description: chlorophyll a/b-binding protein type I precursor
  misc_feature (24)..(265): NCBI GI NO: 13265501 NR Description: AT3g54890 [Arabidopsis thaliana]
  misc_feature (24)..(265): NCBI GI NO: 15233115 NR Description: light-harvesting chlorophyll a/b binding protein
  misc_feature (27)..(270): NCBI GI NO: 82079 NR Description: chlorophyll a/b-binding protein type I precursor
  misc_feature (27)..(270): NCBI GI NO: 115764 NR Description: Chlorophyll A-B binding protein 6A
  misc_feature (67)..(270): NCBI GI NO: 99485 NR Description: chlorophyll a/b-binding protein type 1 precursor
SDATCSSFLSSLQRVGKQLPAMAMASSSSGLRSCSALGVPSLLAPSTSSSSRSGRLPFCAHATTSGRVTMSAEWMPGQPRPAHLDGSSPGDFGFDPLGLATVPENFERFKESEVYHCRWAMLAVPGVLVPEALGLGNWVKAQEWAAVPGGQATYLGAPVPWGTLPTILAVEFVAIAFAEHQRTMEKDPEKKKYPGGAFDPLGFSRDPAKLEEYKLKEIKNGRLAMLAFVGFCVQQSAYPGTGPLENLAAHLADPWHNNIGDIIIPRSISP

SEQ ID NO: 25403 - protein, 249 aa, Zea mays subsp. mays
  peptide (1)..(249): Ceres Seq. ID no. 12353688
  misc_feature (58)..(215): Pfam Name: Pfam Description:  Chlorophyll A-B binding protein
  misc_feature (6)..(249): NCBI GI NO: 3789954 NR Description: chlorophyll a/b-binding protein precursor
  misc_feature (5)..(247): NCBI GI NO: 6685157 NR Description: chlorophyll a/b binding protein precursor
  misc_feature (31)..(247): NCBI GI NO: 542128 NR Description: chlorophyll a/b-binding protein type Ib
  misc_feature (6)..(249): NCBI GI NO: 625547 NR Description: chlorophyll a/b-binding protein type I
  misc_feature (6)..(249): NCBI GI NO: 82078 NR Description: chlorophyll a/b-binding protein type I precursor
  misc_feature (3)..(244): NCBI GI NO: 13265501 NR Description: AT3g54890 [Arabidopsis thaliana]
  misc_feature (3)..(244): NCBI GI NO: 15233115 NR Description: light-harvesting chlorophyll a/b binding protein
  misc_feature (6)..(249): NCBI GI NO: 82079 NR Description: chlorophyll a/b-binding protein type I precursor
  misc_feature (6)..(249): NCBI GI NO: 115764 NR Description: Chlorophyll A-B binding protein 6A
  misc_feature (46)..(249): NCBI GI NO: 99485 NR Description: chlorophyll a/b-binding protein type 1 precursor
MAMASSSSGLRSCSALGVPSLLAPSTSSSSRSGRLPFCAHATTSGRVTMSAEWMPGQPRPAHLDGSSPGDFGFDPLGLATVPENFERFKESEVYHCRWAMLAVPGVLVPEALGLGNWVKAQEWAAVPGGQATYLGAPVPWGTLPTILAVEFVAIAFAEHQRTMEKDPEKKKYPGGAFDPLGFSRDPAKLEEYKLKEIKNGRLAMLAFVGFCVQQSAYPGTGPLENLAAHLADPWHNNIGDIIIPRSISP

SEQ ID NO: 25404 - protein, 247 aa, Zea mays subsp. mays
  peptide (1)..(247): Ceres Seq. ID no. 12353689
  misc_feature (56)..(213): Pfam Name: Pfam Description:  Chlorophyll A-B binding protein
  misc_feature (4)..(247): NCBI GI NO: 3789954 NR Description: chlorophyll a/b-binding protein precursor
  misc_feature (3)..(245): NCBI GI NO: 6685157 NR Description: chlorophyll a/b binding protein precursor
  misc_feature (29)..(245): NCBI GI NO: 542128 NR Description: chlorophyll a/b-binding protein type Ib
  misc_feature (4)..(247): NCBI GI NO: 625547 NR Description: chlorophyll a/b-binding protein type I
  misc_feature (4)..(247): NCBI GI NO: 82078 NR Description: chlorophyll a/b-binding protein type I precursor
  misc_feature (1)..(242): NCBI GI NO: 13265501 NR Description: AT3g54890 [Arabidopsis thaliana]
  misc_feature (1)..(242): NCBI GI NO: 15233115 NR Description: light-harvesting chlorophyll a/b binding protein
  misc_feature (4)..(247): NCBI GI NO: 82079 NR Description: chlorophyll a/b-binding protein type I precursor
  misc_feature (4)..(247): NCBI GI NO: 115764 NR Description: Chlorophyll A-B binding protein 6A
  misc_feature (44)..(247): NCBI GI NO: 99485 NR Description: chlorophyll a/b-binding protein type 1 precursor
MASSSSGLRSCSALGVPSLLAPSTSSSSRSGRLPFCAHATTSGRVTMSAEWMPGQPRPAHLDGSSPGDFGFDPLGLATVPENFERFKESEVYHCRWAMLAVPGVLVPEALGLGNWVKAQEWAAVPGGQATYLGAPVPWGTLPTILAVEFVAIAFAEHQRTMEKDPEKKKYPGGAFDPLGFSRDPAKLEEYKLKEIKNGRLAMLAFVGFCVQQSAYPGTGPLENLAAHLADPWHNNIGDIIIPRSISP

SEQ ID NO: 25405 - DNA, 997 bp, Zea mays subsp. mays
  misc_feature (1)..(997): Ceres Seq. ID no. 12403223
aaaaatagaaagaaaaaggaaaaaaagaaaaaccagacagccgccctaacggccaaacctccttggacacgactcgccgcacccatcccaatccgccgccgctgccatggccgacgagattgacacgaggccggctcccgcgggctcccgcggccgtcctgcgcacgctaccgaggacgacgacagggaggagggcgagatcgccaccgacgccccctcgcccgccctccccgccgcgcacccgctcgagcactcgtggaccttctggttcgacaacccgcacggcaagaacaagatggccgcctgggggagctccatacgacccatccacaccttctccaccgtagaggacttctggggcctctacaataatatccatcaccctagcaagttgatcggcggagctgacttccattgcttcaagaacaagattgagccaaaatgggaagatcctatttgtgctaatggcggtaaatggaccatcagctgtggaagaggaaaatctgacacgctttggctgcacaccctgttggctatgatcggcgaacaattcgactatggtgatgaaatttgtggagcagtggtcagcgtgcgtagcaagcaggaaagaatagctatctggacaaaaaatgctgctaatgaagctgctcagataagcatcgggaagcagtggaaggaatttctggattacaaggactccattggattcattgttcatgacgatgcaaagaagatggacaagggactgaagaaccgttacacggtttgatcccagagagtagtagcatgtagggtggttctttccgattctgtagcaccttgcagagtgtgttgaaggttctctatttgctgaggagttgcttaagcataatctaacatgatgtcgaatgtattcctgtatgttccataggtcagtcacctaggtgttgtttttgtctcagctttgtgtatttggagccctggtttctaataactaaataactagataaggcatgtc

SEQ ID NO: 25406 - protein, 220 aa, Zea mays subsp. mays
  peptide (1)..(220): Ceres Seq. ID no. 12403224
  misc_feature (1)..(220): Pfam Name: Pfam Description:  Eukaryotic initiation factor 4E
  misc_feature (1)..(220): NCBI GI NO: 6016334 NR Description: EUKARYOTIC TRANSLATION INITIATION FACTOR 4E
  misc_feature (1)..(220): NCBI GI NO: 34905982 NR Description: eukaryotic translation initiation factor 4E
  misc_feature (1)..(220): NCBI GI NO: 30923212 NR Description: Eukaryotic translation initiation factor 4E
  misc_feature (29)..(220): NCBI GI NO: 283021 NR Description: translation iation factor eIF-4F chain p26 -wheat
  misc_feature (24)..(220): NCBI GI NO: 7862169 NR Description: eIF4E [Lycopersicon esculentum]
  misc_feature (20)..(220): NCBI GI NO: 25176242 NR Description: eucaryotic initiation factor 4E [Capsicum annuum]
  misc_feature (20)..(220): NCBI GI NO: 25176244 NR Description: eucaryotic initiation factor 4E [Capsicum annuum]
  misc_feature (20)..(220): NCBI GI NO: 25176246 NR Description: eucaryotic initiation factor 4E [Capsicum annuum]
  misc_feature (20)..(220): NCBI GI NO: 38565045 NR Description: eukaryotic translation initiation factor 4E
  misc_feature (20)..(220): NCBI GI NO: 38565051 NR Description: eukaryotic translation initiation factor 4E
MADEIDTRPAPAGSRGRPAHATEDDDREEGEIATDAPSPALPAAHPLEHSWTFWFDNPHGKNKMAAWGSSIRPIHTFSTVEDFWGLYNNIHHPSKLIGGADFHCFKNKIEPKWEDPICANGGKWTISCGRGKSDTLWLHTLLAMIGEQFDYGDEICGAVVSVRSKQERIAIWTKNAANEAAQISIGKQWKEFLDYKDSIGFIVHDDAKKMDKGLKNRYTV

SEQ ID NO: 25407 - protein, 157 aa, Zea mays subsp. mays
  peptide (1)..(157): Ceres Seq. ID no. 12403225
  misc_feature (1)..(157): Pfam Name: Pfam Description:  Eukaryotic initiation factor 4E
  misc_feature (1)..(157): NCBI GI NO: 6016334 NR Description: EUKARYOTIC TRANSLATION INITIATION FACTOR 4E
  misc_feature (1)..(157): NCBI GI NO: 34905982 NR Description: eukaryotic translation initiation factor 4E
  misc_feature (1)..(157): NCBI GI NO: 30923212 NR Description: Eukaryotic translation initiation factor 4E
  misc_feature (1)..(157): NCBI GI NO: 283021 NR Description: translation iation factor eIF-4F chain p26 -wheat
  misc_feature (1)..(157): NCBI GI NO: 7862169 NR Description: eIF4E [Lycopersicon esculentum]
  misc_feature (1)..(157): NCBI GI NO: 25176242 NR Description: eucaryotic initiation factor 4E [Capsicum annuum]
  misc_feature (1)..(157): NCBI GI NO: 25176244 NR Description: eucaryotic initiation factor 4E [Capsicum annuum]
  misc_feature (1)..(157): NCBI GI NO: 25176246 NR Description: eucaryotic initiation factor 4E [Capsicum annuum]
  misc_feature (1)..(157): NCBI GI NO: 38565045 NR Description: eukaryotic translation initiation factor 4E
  misc_feature (1)..(157): NCBI GI NO: 38565051 NR Description: eukaryotic translation initiation factor 4E
MAAWGSSIRPIHTFSTVEDFWGLYNNIHHPSKLIGGADFHCFKNKIEPKWEDPICANGGKWTISCGRGKSDTLWLHTLLAMIGEQFDYGDEICGAVVSVRSKQERIAIWTKNAANEAAQISIGKQWKEFLDYKDSIGFIVHDDAKKMDKGLKNRYTV

SEQ ID NO: 25408 - DNA, 1047 bp, Zea mays subsp. mays
  misc_feature (1)..(1047): Ceres Seq. ID no. 12633518
attaacgcccctttccttccccagcggcaatcaaagagacggggagattcagatccacacacatccgcatccctctctcctcggtttcctctcccaccaccaacccccagatcgcagcgatctccgccgccgccctctctgggattccgcgcgacaaagtcaggcgtagaggctccaggaggaggagggaggcgcagcagggcgggtgggggagatgttcctctgggactggttctacggggtgctggcctccctcggcctgtggcagaaggaggccaagatcctcttccttggcctcgacaacgccggcaagaccacgctgctccacatgctcaaggacgagcggttggtgcagcaccagccgacgcagcacccgacgtcggaggagctcagcatcggcaagatcaagttcaaggcgttcgacctcggcggccaccagatcgcgcgccgcgtgtggaaggattactacgcaaaggttgatgctgtagtatacctggtagatgcatatgataaggagcgatttgctgaatcaaagaaggagctcgatgctctcctgtctgatgattctttggccaatgttccatttctcatccttggcaacaagattgatatcccatatgctgcctctgaagaggagctacggtatcacctaggccttagcaacttcacaaccgggaagggcaaggtcaaccttggcgactccaatgtccgtccacttgaggtcttcatgtgcagtgttgttcgcaagatgggctacggtgatggtttcaagtgggtctcccagtacatcaagtagggccctcgccgaggcgcatgctcagcccggcgaatttttttgccttgttcgttccggttggttcgtgacgagaacgaacgatggtcgctaggaaagtatcatggagggtatgaagaggaaaaacagtgcttaacattgttgaacatgttgagtctttagcgtcaaaacaatttatgtcgaactctattctttcgcttttccatacaacgtttactaagtacttgcgatgcattataaaattattactcttt

SEQ ID NO: 25409 - protein, 193 aa, Zea mays subsp. mays
  peptide (1)..(193): Ceres Seq. ID no. 12633519
  misc_feature (5)..(192): Pfam Name: Pfam Description:  ADP-ribosylation factor family
  misc_feature (1)..(193): NCBI GI NO: 34894960 NR Description: putative GTP-binding protein
  misc_feature (1)..(192): NCBI GI NO: 25294172 NR Description: ras-like small monomeric GTP-binding protein
  misc_feature (1)..(193): NCBI GI NO: 15235226 NR Description: SAR1/GTP-binding secretory factor
  misc_feature (1)..(192): NCBI GI NO: 15223516 NR Description: GTP-binding protein (SAR1B); protein id:At1g56330
  misc_feature (1)..(192): NCBI GI NO: 15228793 NR Description: Sar1-like GTP binding protein
  misc_feature (1)..(193): NCBI GI NO: 3334321 NR Description: GTP-binding protein SAR1A
  misc_feature (1)..(193): NCBI GI NO: 1549222 NR Description: NtSar1 protein [Nicotiana tabacum]
  misc_feature (1)..(193): NCBI GI NO: 34902852 NR Description: unnamed protein product
  misc_feature (1)..(193): NCBI GI NO: 7438457 NR Description: GTP-binding protein - curled-leaved tobacco
  misc_feature (1)..(192): NCBI GI NO: 3334322 NR Description: GTP-binding protein SAR1B
MFLWDWFYGVLASLGLWQKEAKILFLGLDNAGKTTLLHMLKDERLVQHQPTQHPTSEELSIGKIKFKAFDLGGHQIARRVWKDYYAKVDAVVYLVDAYDKERFAESKKELDALLSDDSLANVPFLILGNKIDIPYAASEEELRYHLGLSNFTTGKGKVNLGDSNVRPLEVFMCSVVRKMGYGDGFKWVSQYIK

SEQ ID NO: 25410 - protein, 159 aa, Zea mays subsp. mays
  peptide (1)..(159): Ceres Seq. ID no. 12633520
INAPFLPQRQSKRRGDSDPHTSASLSPRFPLPPPTPRSQRSPPPPSLGFRATKSGVEAPGGGGRRSRAGGGDVPLGLVLRGAGLPRPVAEGGQDPLPWPRQRRQDHAAPHAQGRAVGAAPADAAPDVGGAQHRQDQVQGVRPRRPPDRAPRVEGLLRKG

SEQ ID NO: 25411 - protein, 155 aa, Zea mays subsp. mays
  peptide (1)..(155): Ceres Seq. ID no. 12633521
  misc_feature (1)..(154): Pfam Name: Pfam Description:  ADP-ribosylation factor family
  misc_feature (1)..(155): NCBI GI NO: 34894960 NR Description: putative GTP-binding protein
  misc_feature (1)..(154): NCBI GI NO: 25294172 NR Description: ras-like small monomeric GTP-binding protein
  misc_feature (1)..(155): NCBI GI NO: 15235226 NR Description: SAR1/GTP-binding secretory factor
  misc_feature (1)..(154): NCBI GI NO: 15223516 NR Description: GTP-binding protein (SAR1B); protein id:At1g56330
  misc_feature (1)..(154): NCBI GI NO: 15228793 NR Description: Sar1-like GTP binding protein
  misc_feature (1)..(155): NCBI GI NO: 3334321 NR Description: GTP-binding protein SAR1A
  misc_feature (1)..(155): NCBI GI NO: 1549222 NR Description: NtSar1 protein [Nicotiana tabacum]
  misc_feature (1)..(155): NCBI GI NO: 34902852 NR Description: unnamed protein product
  misc_feature (1)..(155): NCBI GI NO: 7438457 NR Description: GTP-binding protein - curled-leaved tobacco
  misc_feature (1)..(154): NCBI GI NO: 3334322 NR Description: GTP-binding protein SAR1B
MLKDERLVQHQPTQHPTSEELSIGKIKFKAFDLGGHQIARRVWKDYYAKVDAVVYLVDAYDKERFAESKKELDALLSDDSLANVPFLILGNKIDIPYAASEEELRYHLGLSNFTTGKGKVNLGDSNVRPLEVFMCSVVRKMGYGDGFKWVSQYIK

SEQ ID NO: 25412 - DNA, 811 bp, Zea mays subsp. mays
  misc_feature (1)..(811): Ceres Seq. ID no. 12402622
aacaccgtccagtccatcactgccctttgttctcctccacagtcgcagacaaagctggttcgtctcgcggagaggggaagccgggaaggtggataggcggcacccacccatcacccatggctgggttgcaaagatcggcgaccacgttcagacggtccggctcgtcgggcctggtctgggacgagcgtttcctgaccgaggccgacgccgaggcgaaggccggcgccgcggaggatgccgagcagccggagctccggcactcgaggagcgtcggcatgctgcgccgtgcgggcggcggtggagacagccgcagcaagaagggcaaggagagtaggcagaagcaggcggagtcggcgcggcgcagcaaccagcaggtgttccggaccaaggacgtggccccggacatggatcccccctcgccgagggtgtccggctgcgccttctgcgccgtcttccgcgggggctctggcggtactggccgcagggcacaggcacgccgccggtccaagcccaggaagaagtgacggcgtagcaacacgtacgtacgtgcggtacgttgttgtttgtgccatctgtaaagtccgggccatggttgttcgtgcgtgtacatgtttactatactaaatactagggtcatatatagatgagcttgctactcggtaatcggtatacgtacgccattatttagttcaggatagttcctccttttttgggtcggtcggttggtttcttgatccagatccatgcttttgaggtttgggcgacggttagatgttacttgtctactatatatgcagcagctatttatgag

SEQ ID NO: 25413 - protein, 173 aa, Zea mays subsp. mays
  peptide (1)..(173): Ceres Seq. ID no. 12402623
  misc_feature (39)..(172): NCBI GI NO: 18412687 NR Description: expressed protein; protein id: At1g80180
  misc_feature (39)..(172): NCBI GI NO: 30684356 NR Description: expressed protein [Arabidopsis thaliana]
  misc_feature (39)..(172): NCBI GI NO: 30684361 NR Description: expressed protein [Arabidopsis thaliana]
HRPVHHCPLFSSTVADKAGSSRGEGKPGRWIGGTHPSPMAGLQRSATTFRRSGSSGLVWDERFLTEADAEAKAGAAEDAEQPELRHSRSVGMLRRAGGGGDSRSKKGKESRQKQAESARRSNQQVFRTKDVAPDMDPPSPRVSGCAFCAVFRGGSGGTGRRAQARRRSKPRKK

SEQ ID NO: 25414 - protein, 135 aa, Zea mays subsp. mays
  peptide (1)..(135): Ceres Seq. ID no. 12402624
  misc_feature (1)..(134): NCBI GI NO: 18412687 NR Description: expressed protein; protein id: At1g80180
  misc_feature (1)..(134): NCBI GI NO: 30684356 NR Description: expressed protein [Arabidopsis thaliana]
  misc_feature (1)..(134): NCBI GI NO: 30684361 NR Description: expressed protein [Arabidopsis thaliana]
MAGLQRSATTFRRSGSSGLVWDERFLTEADAEAKAGAAEDAEQPELRHSRSVGMLRRAGGGGDSRSKKGKESRQKQAESARRSNQQVFRTKDVAPDMDPPSPRVSGCAFCAVFRGGSGGTGRRAQARRRSKPRKK

SEQ ID NO: 25415 - protein, 129 aa, Zea mays subsp. mays
  peptide (1)..(129): Ceres Seq. ID no. 12402625
  misc_feature (44)..(109): NCBI GI NO: 27960757 NR Description: AP2 domain protein [Hordeum vulgare]
MPSSRSSGTRGASACCAVRAAVETAAARRARRVGRSRRSRRGAATSRCSGPRTWPRTWIPPRRGCPAAPSAPSSAGALAVLAAGHRHAAGPSPGRSDGVATRTYVRYVVVCAICKVRAMVVRACTCLLY

SEQ ID NO: 25416 - DNA, 1116 bp, Zea mays subsp. mays
  misc_feature (1)..(1116): Ceres Seq. ID no. 12381029
aatacaaaccaggcttgctcgtggcggcaaaaaccaacgtgctcgatctccctccgccactccatccatctcctcgctcccagtccccgggaagctacgaagcatggcgtccgtcaccgcccgcgccccggtcgcggcccttcgcccgtcgtcggcatcgctcaagtcgtcgtcggccttccttggccactctagccgcctcggccgcaccgcgtcgcccacgaggcgcagcctcaaggcggaggccaagggcgagtggctccccggccttccctccccctcctacctcgacggcagcctggcgggtgacaatggcttcgacccgttgggcctggcggaggaccccgagaacctgcggtggttcgtgcaggcggagctggtgaacggccggtgggccatgcttggcgtggccgggatgctcatcccggaggtgctgaccaaagccgggctgatcaacgcgccgcagtggtacgacgccggcaagtcggagtacttcgcgtcgtcgtccacgctgttcgtggtcgagttcatcctgttccactacgtggagatccggcggtggcaggacatcaagaaccccggcagcgtcaaccaggaccccatcttcaagagctacagcctgccgccgcacgagtgcggctacccgggcagcgtcttcaacccgctcaacttcgcgcccacgctcgaggccaaggagaaggagctcgccaacgggaggctggcgatgctggcgttcctgggcttcctgatccagcacaacgtcaccggcaaggggcccttcgacaacctgctgcagcacctgtctgacccatggcacaacaccatcatccagaccttctccggttgagtcgaggtcgaggagggatacgatccatcgctggtgagctgatatggactggaaggcaaacattgaaaccttaaattcctttctggatcagtttgtgtgtgttaatctatctggagggtacagattcgggccgtgttgcaatgcatgcatggtctgaagggagcgagggctgaggagtgactggtatgtacattagctgaaggggaggttaagggtagagatcgtttgatcagtatcatctgtatatccccatgcatggggtttcgttt

SEQ ID NO: 25417 - protein, 281 aa, Zea mays subsp. mays
  peptide (1)..(281): Ceres Seq. ID no. 12381030
  misc_feature (92)..(253): Pfam Name: Pfam Description:  Chlorophyll A-B binding protein
  misc_feature (35)..(281): NCBI GI NO: 3789952 NR Description: chlorophyll a/b-binding protein presursor
  misc_feature (56)..(281): NCBI GI NO: 9624495 NR Description: chlorophyll a/b-binding protein precursor
  misc_feature (35)..(280): NCBI GI NO: 100197 NR Description: chlorophyll a/b-binding protein (cab-12) - tomato
  misc_feature (35)..(280): NCBI GI NO: 100196 NR Description: chlorophyll a/b-binding protein (cab-11) - tomato
  misc_feature (35)..(281): NCBI GI NO: 13385204 NR Description: cDNA sequence BC002118
  misc_feature (35)..(281): NCBI GI NO: 322392 NR Description: chlorophyll a/b-binding protein type 4
  misc_feature (45)..(281): NCBI GI NO: 322393 NR Description: chlorophyll a/b-binding protein type 4
  misc_feature (35)..(280): NCBI GI NO: 30692874 NR Description: light-harvesting chlorophyll a/b binding protein
  misc_feature (35)..(281): NCBI GI NO: 20218813 NR Description: putative chlorophyll a/b-binding protein type 4
  misc_feature (35)..(281): NCBI GI NO: 11277626 NR Description: chlorophyll a/b-binding protein
IQTRLARGGKNQRARSPSATPSISSLPVPGKLRSMASVTARAPVAALRPSSASLKSSSAFLGHSSRLGRTASPTRRSLKAEAKGEWLPGLPSPSYLDGSLAGDNGFDPLGLAEDPENLRWFVQAELVNGRWAMLGVAGMLIPEVLTKAGLINAPQWYDAGKSEYFASSSTLFVVEFILFHYVEIRRWQDIKNPGSVNQDPIFKSYSLPPHECGYPGSVFNPLNFAPTLEAKEKELANGRLAMLAFLGFLIQHNVTGKGPFDNLLQHLSDPWHNTIIQTFSG

SEQ ID NO: 25418 - protein, 247 aa, Zea mays subsp. mays
  peptide (1)..(247): Ceres Seq. ID no. 12381031
  misc_feature (58)..(219): Pfam Name: Pfam Description:  Chlorophyll A-B binding protein
  misc_feature (1)..(247): NCBI GI NO: 3789952 NR Description: chlorophyll a/b-binding protein presursor
  misc_feature (22)..(247): NCBI GI NO: 9624495 NR Description: chlorophyll a/b-binding protein precursor
  misc_feature (1)..(246): NCBI GI NO: 100197 NR Description: chlorophyll a/b-binding protein (cab-12) - tomato
  misc_feature (1)..(246): NCBI GI NO: 100196 NR Description: chlorophyll a/b-binding protein (cab-11) - tomato
  misc_feature (1)..(247): NCBI GI NO: 13385204 NR Description: cDNA sequence BC002118
  misc_feature (1)..(247): NCBI GI NO: 322392 NR Description: chlorophyll a/b-binding protein type 4
  misc_feature (11)..(247): NCBI GI NO: 322393 NR Description: chlorophyll a/b-binding protein type 4
  misc_feature (1)..(246): NCBI GI NO: 30692874 NR Description: light-harvesting chlorophyll a/b binding protein
  misc_feature (1)..(247): NCBI GI NO: 20218813 NR Description: putative chlorophyll a/b-binding protein type 4
  misc_feature (1)..(247): NCBI GI NO: 11277626 NR Description: chlorophyll a/b-binding protein
MASVTARAPVAALRPSSASLKSSSAFLGHSSRLGRTASPTRRSLKAEAKGEWLPGLPSPSYLDGSLAGDNGFDPLGLAEDPENLRWFVQAELVNGRWAMLGVAGMLIPEVLTKAGLINAPQWYDAGKSEYFASSSTLFVVEFILFHYVEIRRWQDIKNPGSVNQDPIFKSYSLPPHECGYPGSVFNPLNFAPTLEAKEKELANGRLAMLAFLGFLIQHNVTGKGPFDNLLQHLSDPWHNTIIQTFSG

SEQ ID NO: 25419 - protein, 149 aa, Zea mays subsp. mays
  peptide (1)..(149): Ceres Seq. ID no. 12381032
  misc_feature (1)..(121): Pfam Name: Pfam Description:  Chlorophyll A-B binding protein
  misc_feature (1)..(149): NCBI GI NO: 3789952 NR Description: chlorophyll a/b-binding protein presursor
  misc_feature (1)..(149): NCBI GI NO: 9624495 NR Description: chlorophyll a/b-binding protein precursor
  misc_feature (1)..(148): NCBI GI NO: 100197 NR Description: chlorophyll a/b-binding protein (cab-12) - tomato
  misc_feature (1)..(148): NCBI GI NO: 100196 NR Description: chlorophyll a/b-binding protein (cab-11) - tomato
  misc_feature (1)..(149): NCBI GI NO: 13385204 NR Description: cDNA sequence BC002118
  misc_feature (1)..(149): NCBI GI NO: 322392 NR Description: chlorophyll a/b-binding protein type 4
  misc_feature (1)..(149): NCBI GI NO: 322393 NR Description: chlorophyll a/b-binding protein type 4
  misc_feature (1)..(148): NCBI GI NO: 30692874 NR Description: light-harvesting chlorophyll a/b binding protein
  misc_feature (1)..(149): NCBI GI NO: 20218813 NR Description: putative chlorophyll a/b-binding protein type 4
  misc_feature (1)..(149): NCBI GI NO: 11277626 NR Description: chlorophyll a/b-binding protein
MLGVAGMLIPEVLTKAGLINAPQWYDAGKSEYFASSSTLFVVEFILFHYVEIRRWQDIKNPGSVNQDPIFKSYSLPPHECGYPGSVFNPLNFAPTLEAKEKELANGRLAMLAFLGFLIQHNVTGKGPFDNLLQHLSDPWHNTIIQTFSG

SEQ ID NO: 25420 - DNA, 823 bp, Zea mays subsp. mays
  misc_feature (1)..(823): Ceres Seq. ID no. 12579071
acaagtccacaaccgtaccagcaccaccgcgccatggcgtcctccgccgatcccgatgccgccacgccaccatccgcgccgcagccggagcccgcacgaaaggcagtccgcgtggtggtgaaggggcgcgtcacgggggtggggttccgcgactggactgcgtccacggccgagtcgctcggcctccgccggctgggtccgcaaccgccgtgacggcagtgtggaggccctcctctccggagaccccgcgaagatcgaagacatgataacccgccgcctcccggtcggccccccagccgccaccgtcaccgccgtcgtcccgtccacggccgagcccgtggatccgtccaccgggttcgagatcaagttcaccgtctgatcccccgtcccccccgtcccgcgacaggttcgcgtctcgccgcgcgttcttggacggtctattcgtgcactactactgcgaatctgcgattaaagatcagaggcgacatctaatgtaccggagtctgtttacctgaaaagctctgctatctgctttgggggggaattcatgccagattgtgggtgcaaacctatttccttactacctagtgtccaagtcggaatattaataagctatgccaggattcagatcgaaatatttctgtcactgagaaatgtgttgcgtgacaactttcgaagactgttgcctctctgtgtttatccctagatcctaatgtacaaacagagtcttatacagtactatgcattaacgtcaagtttcagagttcagacatgtgcctcgtgcctgctttctaattacaaatatagtcgagttgtgttttgc

SEQ ID NO: 25421 - protein, 87 aa, Zea mays subsp. mays
  peptide (1)..(87): Ceres Seq. ID no. 12579072
KSTTVPAPPRHGVLRRSRCRHATIRAAAGARTKGSPRGGEGARHGGGVPRLDCVHGRVARPPPAGSATAVTAVWRPSSPETPRRSKT

SEQ ID NO: 25422 - protein, 70 aa, Zea mays subsp. mays
  peptide (1)..(70): Ceres Seq. ID no. 12579073
  misc_feature (28)..(63): NCBI GI NO: 15242739 NR Description: putative protein; protein id: At5g03370
  misc_feature (28)..(63): NCBI GI NO: 29028786 NR Description: At5g03370 [Arabidopsis thaliana]
  misc_feature (28)..(63): NCBI GI NO: 21593449 NR Description: unknown [Arabidopsis thaliana]
TSPQPYQHHRAMASSADPDAATPPSAPQPEPARKAVRVVVKGRVTGVGFRDWTASTAESLGLRRLGPQPP

SEQ ID NO: 25423 - protein, 59 aa, Zea mays subsp. mays
  peptide (1)..(59): Ceres Seq. ID no. 12579074
  misc_feature (17)..(52): NCBI GI NO: 15242739 NR Description: putative protein; protein id: At5g03370
  misc_feature (17)..(52): NCBI GI NO: 29028786 NR Description: At5g03370 [Arabidopsis thaliana]
  misc_feature (17)..(52): NCBI GI NO: 21593449 NR Description: unknown [Arabidopsis thaliana]
MASSADPDAATPPSAPQPEPARKAVRVVVKGRVTGVGFRDWTASTAESLGLRRLGPQPP

SEQ ID NO: 25424 - DNA, 887 bp, Zea mays subsp. mays
  misc_feature (1)..(887): Ceres Seq. ID no. 12381033
gaccattacctagaacatcctaatcgaaaaccctagttctctcgtgaccgccttccctcttctcctgcgtcccaactgggcaattccccaaacctaactaacctttgccaccgcgggagccaccatgggtggccagatgccggacgccgatgggaaggcccgctcggcggactcctcgtcctcttacgggtacccgccgtcggcgccgccgcagcaccagtacggcacctttggccccccatccggagcctccggggagtttccgcagccggcgggtcgggttcccccagccggcgccgccgcctgggatgcagcactacccgcagcctcctccggcgtcgtatgccgtctacccacccccgcagcaaccctactcggccgccgcgccgtactacgcccaaggctaccagatcgctcaaggttatattcctgttgttgaaggaaggcctgttagaatgcgtcctcttccatgttgtggccttggcatggggtggtttctgtttataattgggttcttctttgctgccattccatggtatcttggagcttttgtgctgatttgtgtccgagtacgtgatttacagggagaaaccaggatatgttgcttgcactattgctgcttcgcttgctgcaattgctgtgctgcttggcgccacaaaaggagcggaggtgtggtgagcattatgccttcaattaccagcagtctggttaatgtaaatgtccgttgctcggctactttgttacccgtgttgtacatgtgttgtgcgtacaaaggatagggtgtaacgaaaatgatgtatgctcctatttgtagttggacatatacatttgtcaaacggagtagcatgaatgcaccctcattaatcatttgatgtaaaattgcctgg

SEQ ID NO: 25425 - protein, 209 aa, Zea mays subsp. mays
  peptide (1)..(209): Ceres Seq. ID no. 12381034
  misc_feature (1)..(81): Pfam Name: Pfam Description:  Extensin-like region
  misc_feature (36)..(152): NCBI GI NO: 21593837 NR Description: 60S ribosomal protein L18A, putative
  misc_feature (36)..(152): NCBI GI NO: 18397305 NR Description: 60S ribosomal protein L18A, putative
  misc_feature (53)..(137): NCBI GI NO: 18394436 NR Description: expressed protein; protein id: At1g17080
  misc_feature (32)..(152): NCBI GI NO: 18404524 NR Description: expressed protein; protein id: At1g53560
  misc_feature (32)..(152): NCBI GI NO: 21554011 NR Description: unknown [Arabidopsis thaliana]
  misc_feature (36)..(152): NCBI GI NO: 25518134 NR Description: probable 60S ribosomal protein L18A - Arabidopsisthaliana
  misc_feature (55)..(159): NCBI GI NO: 18400450 NR Description: Expressed protein; protein id: At3g14595
  misc_feature (55)..(159): NCBI GI NO: 21554784 NR Description: unknown [Arabidopsis thaliana]
MGRPARRTPRPLTGTRRRRRRSTSTAPLAPHPEPPGSFRSRRVGFPQPAPPPGMQHYPQPPPASYAVYPPPQQPYSAAAPYYAQGYQIAQGYIPVVEGRPVRMRPLPCCGLGMGWFLFIIGFFFAAIPWYLGAFVLICVRVRDLQGETRICCLHYCCFACCNCCAAWRHKRSGGVVSIMPSITSSLVNVNVRCSATLLPVLYMCCAYKG

SEQ ID NO: 25426 - protein, 156 aa, Zea mays subsp. mays
  peptide (1)..(156): Ceres Seq. ID no. 12381035
  misc_feature (1)..(99): NCBI GI NO: 21593837 NR Description: 60S ribosomal protein L18A, putative
  misc_feature (1)..(99): NCBI GI NO: 18397305 NR Description: 60S ribosomal protein L18A, putative
  misc_feature (1)..(84): NCBI GI NO: 18394436 NR Description: expressed protein; protein id: At1g17080
  misc_feature (1)..(99): NCBI GI NO: 18404524 NR Description: expressed protein; protein id: At1g53560
  misc_feature (1)..(99): NCBI GI NO: 21554011 NR Description: unknown [Arabidopsis thaliana]
  misc_feature (1)..(99): NCBI GI NO: 25518134 NR Description: probable 60S ribosomal protein L18A - Arabidopsisthaliana
  misc_feature (2)..(106): NCBI GI NO: 18400450 NR Description: Expressed protein; protein id: At3g14595
  misc_feature (2)..(106): NCBI GI NO: 21554784 NR Description: unknown [Arabidopsis thaliana]
MQHYPQPPPASYAVYPPPQQPYSAAAPYYAQGYQIAQGYIPVVEGRPVRMRPLPCCGLGMGWFLFIIGFFFAAIPWYLGAFVLICVRVRDLQGETRICCLHYCCFACCNCCAAWRHKRSGGVVSIMPSITSSLVNVNVRCSATLLPVLYMCCAYKG

SEQ ID NO: 25427 - protein, 107 aa, Zea mays subsp. mays
  peptide (1)..(107): Ceres Seq. ID no. 12381036
  misc_feature (1)..(50): NCBI GI NO: 21593837 NR Description: 60S ribosomal protein L18A, putative
  misc_feature (1)..(50): NCBI GI NO: 18397305 NR Description: 60S ribosomal protein L18A, putative
  misc_feature (1)..(35): NCBI GI NO: 18394436 NR Description: expressed protein; protein id: At1g17080
  misc_feature (1)..(50): NCBI GI NO: 18404524 NR Description: expressed protein; protein id: At1g53560
  misc_feature (1)..(50): NCBI GI NO: 21554011 NR Description: unknown [Arabidopsis thaliana]
  misc_feature (1)..(50): NCBI GI NO: 25518134 NR Description: probable 60S ribosomal protein L18A - Arabidopsisthaliana
  misc_feature (1)..(57): NCBI GI NO: 18400450 NR Description: Expressed protein; protein id: At3g14595
  misc_feature (1)..(57): NCBI GI NO: 21554784 NR Description: unknown [Arabidopsis thaliana]
MRPLPCCGLGMGWFLFIIGFFFAAIPWYLGAFVLICVRVRDLQGETRICCLHYCCFACCNCCAAWRHKRSGGVVSIMPSITSSLVNVNVRCSATLLPVLYMCCAYKG

SEQ ID NO: 25428 - DNA, 874 bp, Zea mays subsp. mays
  misc_feature (1)..(874): Ceres Seq. ID no. 12342813
tccaactctgcgccgcaatccactcaagaaggttagccctcgtggtctcggatttggataatcctccgccgaggtatgaaacaggaggcggccaccagcatagtggtgacccaggaggacgtcctgcaccactacaaggagcctccaccccgccgcgaggacgatccgccagcactggctgcgtcgctgtcgttgccgtcgtcactgtcggaggacaatggcgacgccatgccgcagccatcttcatacgcggtcttgccgcgccgggatggcgagctggtgtctgcggaggagctgctgctggtgccgccgctcaacttcgccatggtggaccacggcgtgtaccgctccggattcccggacgcctccaacttgccgtttcttgagacgctccgactccgctccgtcctgtgcctgtgcccggagccatacccggaggctaatctggagttcctccgtgcccacgggatcaagctcttccagttcggaatcgacggctccaaggaaccatttgtgaacataccagaagatagaatccgtgaagctctagaagtcatcctagatgcaagcaaccatccggttcttattcactgcaagcgaggaaagcatcgaaccggctgtgtggttggatgctttaggaaattgcaacgctggtgtctaacttcaatatttgacgaataccagcgttttgctgctgccaaaacaagagtttctgacctacggttcatggagctatttgatgtatcgagcataaagcatttagcatttgagtcgtctgtatgatagtaacattggtgcatgataacaactcaatactggttccattacggtgtcatctttttcatttaagaaaaaaaatcatttctaaaaatgc

SEQ ID NO: 25429 - protein, 235 aa, Zea mays subsp. mays
  peptide (1)..(235): Ceres Seq. ID no. 12342814
  misc_feature (76)..(235): Pfam Name: Pfam Description:  Tyrosine phosphatase family
  misc_feature (44)..(235): NCBI GI NO: 15220383 NR Description: unkown protein; protein id: At1g05000.1
  misc_feature (48)..(234): NCBI GI NO: 15225761 NR Description: unknown protein; protein id: At2g32960.1
  misc_feature (138)..(234): NCBI GI NO: 30102538 NR Description: At2g32960 [Arabidopsis thaliana]
  misc_feature (48)..(143): NCBI GI NO: 30102538 NR Description: At2g32960 [Arabidopsis thaliana]
  misc_feature (49)..(234): NCBI GI NO: 18412419 NR Description: putative protein; protein id: At4g03960
  misc_feature (75)..(235): NCBI GI NO: 15232985 NR Description: unknown protein; protein id: At3g02800.1
  misc_feature (75)..(231): NCBI GI NO: 21553927 NR Description: unknown [Arabidopsis thaliana]
  misc_feature (75)..(231): NCBI GI NO: 15237359 NR Description: putative protein; protein id: At5g16480
  misc_feature (76)..(234): NCBI GI NO: 6324296 NR Description: Synthetic interaction with Whi2; Siw14p
  misc_feature (75)..(234): NCBI GI NO: 7487406 NR Description: hypothetical protein T24M8
MKQEAATSIVVTQEDVLHHYKEPPPRREDDPPALAASLSLPSSLSEDNGDAMPQPSSYAVLPRRDGELVSAEELLLVPPLNFAMVDHGVYRSGFPDASNLPFLETLRLRSVLCLCPEPYPEANLEFLRAHGIKLFQFGIDGSKEPFVNIPEDRIREALEVILDASNHPVLIHCKRGKHRTGCVVGCFRKLQRWCLTSIFDEYQRFAAAKTRVSDLRFMELFDVSSIKHLAFESSV

SEQ ID NO: 25430 - protein, 184 aa, Zea mays subsp. mays
  peptide (1)..(184): Ceres Seq. ID no. 12342815
  misc_feature (25)..(184): Pfam Name: Pfam Description:  Tyrosine phosphatase family
  misc_feature (1)..(184): NCBI GI NO: 15220383 NR Description: unkown protein; protein id: At1g05000.1
  misc_feature (1)..(183): NCBI GI NO: 15225761 NR Description: unknown protein; protein id: At2g32960.1
  misc_feature (87)..(183): NCBI GI NO: 30102538 NR Description: At2g32960 [Arabidopsis thaliana]
  misc_feature (1)..(92): NCBI GI NO: 30102538 NR Description: At2g32960 [Arabidopsis thaliana]
  misc_feature (1)..(183): NCBI GI NO: 18412419 NR Description: putative protein; protein id: At4g03960
  misc_feature (24)..(184): NCBI GI NO: 15232985 NR Description: unknown protein; protein id: At3g02800.1
  misc_feature (24)..(180): NCBI GI NO: 21553927 NR Description: unknown [Arabidopsis thaliana]
  misc_feature (24)..(180): NCBI GI NO: 15237359 NR Description: putative protein; protein id: At5g16480
  misc_feature (25)..(183): NCBI GI NO: 6324296 NR Description: Synthetic interaction with Whi2; Siw14p
  misc_feature (24)..(183): NCBI GI NO: 7487406 NR Description: hypothetical protein T24M8
MPQPSSYAVLPRRDGELVSAEELLLVPPLNFAMVDHGVYRSGFPDASNLPFLETLRLRSVLCLCPEPYPEANLEFLRAHGIKLFQFGIDGSKEPFVNIPEDRIREALEVILDASNHPVLIHCKRGKHRTGCVVGCFRKLQRWCLTSIFDEYQRFAAAKTRVSDLRFMELFDVSSIKHLAFESSV

SEQ ID NO: 25431 - protein, 152 aa, Zea mays subsp. mays
  peptide (1)..(152): Ceres Seq. ID no. 12342816
  misc_feature (1)..(152): Pfam Name: Pfam Description:  Tyrosine phosphatase family
  misc_feature (1)..(152): NCBI GI NO: 15220383 NR Description: unkown protein; protein id: At1g05000.1
  misc_feature (1)..(151): NCBI GI NO: 15225761 NR Description: unknown protein; protein id: At2g32960.1
  misc_feature (55)..(151): NCBI GI NO: 30102538 NR Description: At2g32960 [Arabidopsis thaliana]
  misc_feature (1)..(60): NCBI GI NO: 30102538 NR Description: At2g32960 [Arabidopsis thaliana]
  misc_feature (1)..(151): NCBI GI NO: 18412419 NR Description: putative protein; protein id: At4g03960
  misc_feature (1)..(152): NCBI GI NO: 15232985 NR Description: unknown protein; protein id: At3g02800.1
  misc_feature (1)..(148): NCBI GI NO: 21553927 NR Description: unknown [Arabidopsis thaliana]
  misc_feature (1)..(148): NCBI GI NO: 15237359 NR Description: putative protein; protein id: At5g16480
  misc_feature (1)..(151): NCBI GI NO: 6324296 NR Description: Synthetic interaction with Whi2; Siw14p
  misc_feature (1)..(151): NCBI GI NO: 7487406 NR Description: hypothetical protein T24M8
MVDHGVYRSGFPDASNLPFLETLRLRSVLCLCPEPYPEANLEFLRAHGIKLFQFGIDGSKEPFVNIPEDRIREALEVILDASNHPVLIHCKRGKHRTGCVVGCFRKLQRWCLTSIFDEYQRFAAAKTRVSDLRFMELFDVSSIKHLAFESSV

SEQ ID NO: 25432 - DNA, 1302 bp, Zea mays subsp. mays; identical to SEQ ID NO: 23393
  misc_feature (1)..(1302): Ceres Seq. ID no. 12411041

SEQ ID NO: 25433 - protein, 139 aa, Zea mays subsp. mays; identical to SEQ ID NO: 23394
  peptide (1)..(139): Ceres Seq. ID no. 12411042
  misc_feature (19)..(112): Pfam Name: Pfam Description:  Ribosomal protein L7Ae/L30e/S12e/Gadd45 family
  misc_feature (5)..(119): NCBI GI NO: 21592866 NR Description: Ribosomal protein L7Ae-like [Arabidopsis thaliana]
  misc_feature (5)..(119): NCBI GI NO: 15241276 NR Description: ribosomal protein L7Ae-like; protein id:At5g20160
  misc_feature (5)..(119): NCBI GI NO: 15236127 NR Description: Ribosomal protein L7Ae - like
  misc_feature (5)..(119): NCBI GI NO: 15235416 NR Description: Ribosomal protein L7Ae -like; protein id:At4g12600
  misc_feature (41)..(119): NCBI GI NO: 30687670 NR Description: ribosomal protein L7Ae family
  misc_feature (5)..(45): NCBI GI NO: 30687670 NR Description: ribosomal protein L7Ae family
  misc_feature (2)..(126): NCBI GI NO: 28302201 NR Description: Similar to NHP2 non-histone chromosome protein 2-like 1
  misc_feature (5)..(126): NCBI GI NO: 37530712 NR Description: putative ribosomal protein L7Ae-like
  misc_feature (2)..(126): NCBI GI NO: 38174386 NR Description: Unknown (protein for MGC:75724)
  misc_feature (2)..(126): NCBI GI NO: 4826860 NR Description: NHP2 non-histone chromosome protein 2-like 1; 15

SEQ ID NO: 25434 - protein, 85 aa, Zea mays subsp. mays; identical to SEQ ID NO: 23395
  peptide (1)..(85): Ceres Seq. ID no. 12411043
  misc_feature (1)..(58): Pfam Name: Pfam Description:  Ribosomal protein L7Ae/L30e/S12e/Gadd45 family
  misc_feature (1)..(65): NCBI GI NO: 21592866 NR Description: Ribosomal protein L7Ae-like [Arabidopsis thaliana]
  misc_feature (1)..(65): NCBI GI NO: 15241276 NR Description: ribosomal protein L7Ae-like; protein id:At5g20160
  misc_feature (1)..(65): NCBI GI NO: 15236127 NR Description: Ribosomal protein L7Ae - like
  misc_feature (1)..(65): NCBI GI NO: 15235416 NR Description: Ribosomal protein L7Ae -like; protein id:At4g12600
  misc_feature (1)..(65): NCBI GI NO: 30687670 NR Description: ribosomal protein L7Ae family
  misc_feature (1)..(72): NCBI GI NO: 28302201 NR Description: Similar to NHP2 non-histone chromosome protein 2-like 1
  misc_feature (1)..(72): NCBI GI NO: 37530712 NR Description: putative ribosomal protein L7Ae-like
  misc_feature (1)..(72): NCBI GI NO: 38174386 NR Description: Unknown (protein for MGC:75724)
  misc_feature (1)..(72): NCBI GI NO: 4826860 NR Description: NHP2 non-histone chromosome protein 2-like 1; 15
  misc_feature (1)..(72): NCBI GI NO: 12835698 NR Description: unnamed protein product [Mus musculus]

SEQ ID NO: 25435 - DNA, 520 bp, Zea mays subsp. mays
  misc_feature (1)..(520): Ceres Seq. ID no. 13564877
  misc_feature (8)..(8): n is a, c, t, g, unknown, or other
cacaaccngccgccgtccaccccctcctagagcggaaccacattccacggctctaaggccatgtcgccggcgtccctcgcagctcggctcctacgccgcgccgcttccacctcttcctctcctctctccgctcttgtccgccgcggtctctgttcctcggcgcccgttcccctcctccgccgtctccctgcggccacctcatcgacggcggggaccaccgcccgccgcttcctggcgtcgcagtccccggcgtcctcctccacgtcttcggmggacgataacctgaggmgcatcgtcgagtctgagatcgagtgcgttgtccagtcggaggagagcaacaccgacaagcacattgatctaccagaggacttcccttttgagatcatagacaatcctggtgatcagtcaataaccctccaaagggagattgcaggggagacaattaaagctgttatatacaccaactttgatacagatgaacatttggatgatgaggatgacaaaagtkggcacagatgag

SEQ ID NO: 25436 - protein, 152 aa, Zea mays subsp. mays
  peptide (1)..(152): Ceres Seq. ID no. 13564878
  misc_feature (79)..(148): Pfam Name: Pfam Description:  Mitochondrial glycoprotein
  misc_feature (10)..(148): NCBI GI NO: 21592321 NR Description: unknown [Arabidopsis thaliana]
  misc_feature (10)..(148): NCBI GI NO: 15241669 NR Description: expressed protein [Arabidopsis thaliana]
  misc_feature (5)..(147): NCBI GI NO: 18405164 NR Description: expressed protein [Arabidopsis thaliana]
  misc_feature (5)..(147): NCBI GI NO: 21593469 NR Description: unknown [Arabidopsis thaliana]
  misc_feature (8)..(147): NCBI GI NO: 18410318 NR Description: expressed protein [Arabidopsis thaliana]
  misc_feature (1)..(147): NCBI GI NO: 11357566 NR Description: hypothetical protein F1I16
  misc_feature (70)..(147): NCBI GI NO: 7487698 NR Description: hypothetical protein At2g39790
  misc_feature (63)..(148): NCBI GI NO: 15239320 NR Description: expressed protein [Arabidopsis thaliana]
  misc_feature (13)..(152): NCBI GI NO: 34895730 NR Description: P0019D06.23
  misc_feature (71)..(71): Xaa is any aa, unknown or other
  misc_feature (77)..(77): Xaa is any aa, unknown or other
  misc_feature (150)..(150): Xaa is any aa, unknown or other
MSPASLAARLLRRAASTSSSPLSALVRRGLCSSAPVPLLRRLPAATSSTAGTTARRFLASQSPASSSTSSXDDNLRXIVESEIECVVQSEESNTDKHIDLPEDFPFEIIDNPGDQSITLQREIAGETIKAVIYTNFDTDEHLDDEDDKSXHR

SEQ ID NO: 25437 - protein, 94 aa, Zea mays subsp. mays
  peptide (1)..(94): Ceres Seq. ID no. 13564879
  misc_feature (3)..(3): Xaa is any aa, unknown or other
  misc_feature (91)..(91): Xaa is any aa, unknown or other
TTXRRPPPPRAEPHSTALRPCRRRPSQLGSYAAPLPPLPLLSPLLSAAVSVPRRPFPSSAVSLRPPHRRRGPPPAASWRRSPRRPPPRLRXTIT

SEQ ID NO: 25438 - DNA, 698 bp, Zea mays subsp. mays
  misc_feature (1)..(698): Ceres Seq. ID no. 13492060
accggatcaccagcctacagctcgtcacatctctctctctccgcccggccgcggcctctagactcactctaaccgccatggccacggcgcacggcagcaggctcatcttcctcttcgaggccacgctcttctcggcgctgctgctcgtcccggcacgccctgcttccgccgcagacggcagcgcgtacccggccggcgactgcccctacccgtgcctgccgccgcccgccgtcaccgccaactgcccgccgcctccgccggctgcggcgtcgtactcgtacccgccaccgccgggggcttacattccctacttccagcctgcggcgggtggcggtggtggcggcggtagtggggggtacggcggctacccggcgccgccgccgcccaaccccatcctgccgtggtacccatggtactacaagacgccgccgtcgtccgcggccgccacgtcgggcagggggagtcgcgttcttcttgggtcggccgccatggtagctgctgctgccctgctgatcatggcttagccgcagcccgcagcagtcgttctttttgcatcttcgatcttgttctcacccccaggttttttttcctcttgttaatttactgctcaggatttatattcagaggtatataacgagggagcattatatatattgcttgtactcctaatttatcagctacatgtctctagttccttg

SEQ ID NO: 25439 - protein, 173 aa, Zea mays subsp. mays
  peptide (1)..(173): Ceres Seq. ID no. 13492061
  misc_feature (68)..(143): Pfam Name: Pfam Description:  Extensin-like region
  misc_feature (42)..(171): NCBI GI NO: 34894212 NR Description: P0439B06.27
  misc_feature (48)..(148): NCBI GI NO: 18423010 NR Description: proline-rich protein family [Arabidopsis thaliana]
  misc_feature (42)..(164): NCBI GI NO: 18397707 NR Description: proline-rich protein family [Arabidopsis thaliana]
  misc_feature (67)..(172): NCBI GI NO: 15220010 NR Description: expressed protein [Arabidopsis thaliana]
  misc_feature (67)..(170): NCBI GI NO: 18409730 NR Description: proline-rich protein family [Arabidopsis thaliana]
  misc_feature (83)..(168): NCBI GI NO: 34894480 NR Description: OJ1116_C07.3
  misc_feature (36)..(156): NCBI GI NO: 15234820 NR Description: proline-rich protein family [Arabidopsis thaliana]
  misc_feature (46)..(126): NCBI GI NO: 34894212 NR Description: P0439B06.27
  misc_feature (63)..(166): NCBI GI NO: 18422542 NR Description: proline-rich protein family [Arabidopsis thaliana]
  misc_feature (54)..(162): NCBI GI NO: 7510074 NR Description: hypothetical protein Y50E8A
RITSLQLVTSLSLRPAAASRLTLTAMATAHGSRLIFLFEATLFSALLLVPARPASAADGSAYPAGDCPYPCLPPPAVTANCPPPPPAAASYSYPPPPGAYIPYFQPAAGGGGGGGSGGYGGYPAPPPPNPILPWYPWYYKTPPSSAAATSGRGSRVLLGSAAMVAAAALLIMA

SEQ ID NO: 25440 - protein, 148 aa, Zea mays subsp. mays
  peptide (1)..(148): Ceres Seq. ID no. 13492062
  misc_feature (43)..(118): Pfam Name: Pfam Description:  Extensin-like region
  misc_feature (17)..(146): NCBI GI NO: 34894212 NR Description: P0439B06.27
  misc_feature (23)..(123): NCBI GI NO: 18423010 NR Description: proline-rich protein family [Arabidopsis thaliana]
  misc_feature (17)..(139): NCBI GI NO: 18397707 NR Description: proline-rich protein family [Arabidopsis thaliana]
  misc_feature (42)..(147): NCBI GI NO: 15220010 NR Description: expressed protein [Arabidopsis thaliana]
  misc_feature (42)..(145): NCBI GI NO: 18409730 NR Description: proline-rich protein family [Arabidopsis thaliana]
  misc_feature (58)..(143): NCBI GI NO: 34894480 NR Description: OJ1116_C07.3
  misc_feature (11)..(131): NCBI GI NO: 15234820 NR Description: proline-rich protein family [Arabidopsis thaliana]
  misc_feature (21)..(101): NCBI GI NO: 34894212 NR Description: P0439B06.27
  misc_feature (38)..(141): NCBI GI NO: 18422542 NR Description: proline-rich protein family [Arabidopsis thaliana]
  misc_feature (29)..(137): NCBI GI NO: 7510074 NR Description: hypothetical protein Y50E8A
MATAHGSRLIFLFEATLFSALLLVPARPASAADGSAYPAGDCPYPCLPPPAVTANCPPPPPAAASYSYPPPPGAYIPYFQPAAGGGGGGGSGGYGGYPAPPPPNPILPWYPWYYKTPPSSAAATSGRGSRVLLGSAAMVAAAALLIMA

SEQ ID NO: 25441 - DNA, 1179 bp, Zea mays subsp. mays
  misc_feature (1)..(1179): Ceres Seq. ID no. 12341648
tcgagggggaataaaatcccagcggcttcccccaaacaaaacctcttctccgccagagtccgcgtcggccagatcaaacgaatcggcacgacgcatcggcatcgcctccgacgatcttgagacaaacaaaacccaccgctgcggcaactccgcctcccgctgacacggggatcgcctgacaacaggcagagaaaagaggcgcagggtttgcccgcgaagatggaggacgtggacgtctcgcggcagctgaagcagatgacgaacttcatccgccaggaggccgtcgagaaggccgccgagatcgaggccgccgccgccgaggagttccaaatagaaaagttgcagctggtggaagctgaaaagaagaagatcaggcaggaatatgaccggaaagagaagcaagttggcatcaagaagaaaattgattactcgatgcagctcaatgcttccagaattaaagtccttcaagctcaggatgatttggtaacagatatgttggagtcagcaaggaaagagctactgtgcataagtagagatcaccccacttacaagaagctcctcaagacacttattgttcagagtttgctgcgcctgaaagaaccagctgtgcttctccgctgcaggaaggaggatcttcaacttgttgatttagttttggaatctgcaaggaatgagtatgcagataaagcaaaagtatatcctcctgagatagtggtagatcgtcaaatctatctgccatctgctcccagtcattatcaggcacctggcccctcatgctccggtggagttgtgctagcttcccgagatggaaagattgtctgtgaaaacacactggatgctagattgcaggtagttttcagaaagaagctgccagagattcgtcagagccttttcgggcaggtagctgcgtagccaattcttgaaagcagaacgtggcccagtactctttggggtaccctgacgatgtccaggagaaactttggcagctctcaatagtgatttatcacacttttggacctcgattattatttgtgtatacttttttcctggttatggatacctttgaatcctgcacagagcaaataaactgtgttcatttgtgggacgatcgtttgttgcaataaggcatcgagatgtgttgcgatgccacttctgttatagcatcatgttttttcgttg

SEQ ID NO: 25442 - protein, 230 aa, Zea mays subsp. mays
  peptide (1)..(230): Ceres Seq. ID no. 12341649
  misc_feature (16)..(224): Pfam Name: E/31 kDa Pfam Description: ATP synthase
  misc_feature (1)..(230): NCBI GI NO: 34904112 NR Description: unnamed protein product
  misc_feature (1)..(230): NCBI GI NO: 12585492 NR Description: Vacuolar ATP synthase subunit E
  misc_feature (1)..(230): NCBI GI NO: 12585474 NR Description: Vacuolar ATP synthase subunit E
  misc_feature (1)..(230): NCBI GI NO: 34912000 NR Description: putative YLP
  misc_feature (7)..(230): NCBI GI NO: 29290712 NR Description: vacuolar ATPase subunit E [Phaseolus acutifolius]
  misc_feature (1)..(230): NCBI GI NO: 3334405 NR Description: Vacuolar ATP synthase subunit E
  misc_feature (5)..(230): NCBI GI NO: 9652289 NR Description: putative vacuolar proton ATPase subunit E
  misc_feature (1)..(230): NCBI GI NO: 3334411 NR Description: Vacuolar ATP synthase subunit E
  misc_feature (1)..(230): NCBI GI NO: 15237054 NR Description: H+-transporting ATPase chain E, vacuolar
  misc_feature (1)..(224): NCBI GI NO: 4099148 NR Description: YLP [Hordeum vulgare]
MEDVDVSRQLKQMTNFIRQEAVEKAAEIEAAAAEEFQIEKLQLVEAEKKKIRQEYDRKEKQVGIKKKIDYSMQLNASRIKVLQAQDDLVTDMLESARKELLCISRDHPTYKKLLKTLIVQSLLRLKEPAVLLRCRKEDLQLVDLVLESARNEYADKAKVYPPEIVVDRQIYLPSAPSHYQAPGPSCSGGVVLASRDGKIVCENTLDARLQVVFRKKLPEIRQSLFGQVAA

SEQ ID NO: 25443 - protein, 218 aa, Zea mays subsp. mays
  peptide (1)..(218): Ceres Seq. ID no. 12341650
  misc_feature (4)..(212): Pfam Name: E/31 kDa Pfam Description: ATP synthase
  misc_feature (1)..(218): NCBI GI NO: 34904112 NR Description: unnamed protein product
  misc_feature (1)..(218): NCBI GI NO: 12585492 NR Description: Vacuolar ATP synthase subunit E
  misc_feature (1)..(218): NCBI GI NO: 12585474 NR Description: Vacuolar ATP synthase subunit E
  misc_feature (1)..(218): NCBI GI NO: 34912000 NR Description: putative YLP
  misc_feature (1)..(218): NCBI GI NO: 29290712 NR Description: vacuolar ATPase subunit E [Phaseolus acutifolius]
  misc_feature (1)..(218): NCBI GI NO: 3334405 NR Description: Vacuolar ATP synthase subunit E
  misc_feature (1)..(218): NCBI GI NO: 9652289 NR Description: putative vacuolar proton ATPase subunit E
  misc_feature (1)..(218): NCBI GI NO: 3334411 NR Description: Vacuolar ATP synthase subunit E
  misc_feature (1)..(218): NCBI GI NO: 15237054 NR Description: H+-transporting ATPase chain E, vacuolar
  misc_feature (1)..(212): NCBI GI NO: 4099148 NR Description: YLP [Hordeum vulgare]
MTNFIRQEAVEKAAEIEAAAAEEFQIEKLQLVEAEKKKIRQEYDRKEKQVGIKKKIDYSMQLNASRIKVLQAQDDLVTDMLESARKELLCISRDHPTYKKLLKTLIVQSLLRLKEPAVLLRCRKEDLQLVDLVLESARNEYADKAKVYPPEIVVDRQIYLPSAPSHYQAPGPSCSGGVVLASRDGKIVCENTLDARLQVVFRKKLPEIRQSLFGQVAA

SEQ ID NO: 25444 - protein, 159 aa, Zea mays subsp. mays
  peptide (1)..(159): Ceres Seq. ID no. 12341651
  misc_feature (1)..(153): Pfam Name: E/31 kDa Pfam Description: ATP synthase
  misc_feature (1)..(159): NCBI GI NO: 34904112 NR Description: unnamed protein product
  misc_feature (1)..(159): NCBI GI NO: 12585492 NR Description: Vacuolar ATP synthase subunit E
  misc_feature (1)..(159): NCBI GI NO: 12585474 NR Description: Vacuolar ATP synthase subunit E
  misc_feature (1)..(159): NCBI GI NO: 34912000 NR Description: putative YLP
  misc_feature (1)..(159): NCBI GI NO: 29290712 NR Description: vacuolar ATPase subunit E [Phaseolus acutifolius]
  misc_feature (1)..(159): NCBI GI NO: 3334405 NR Description: Vacuolar ATP synthase subunit E
  misc_feature (1)..(159): NCBI GI NO: 9652289 NR Description: putative vacuolar proton ATPase subunit E
  misc_feature (1)..(159): NCBI GI NO: 3334411 NR Description: Vacuolar ATP synthase subunit E
  misc_feature (1)..(159): NCBI GI NO: 15237054 NR Description: H+-transporting ATPase chain E, vacuolar
  misc_feature (1)..(153): NCBI GI NO: 4099148 NR Description: YLP [Hordeum vulgare]
MQLNASRIKVLQAQDDLVTDMLESARKELLCISRDHPTYKKLLKTLIVQSLLRLKEPAVLLRCRKEDLQLVDLVLESARNEYADKAKVYPPEIVVDRQIYLPSAPSHYQAPGPSCSGGVVLASRDGKIVCENTLDARLQVVFRKKLPEIRQSLFGQVAA

SEQ ID NO: 25445 - DNA, 883 bp, Zea mays subsp. mays
  misc_feature (1)..(883): Ceres Seq. ID no. 12404746
atccgagtccacccaactaatcacgcccaatcagaacagactcggtcgcttcaccactccactcgccgcaggccgccgggcgccgccgaggggatcggagcaagatgttcttccacatcgtgctggagcggaacatgcagctgcacccacgacacttcgggccgcacctccgcgacaagctcgtttccaagctcatcaaggacgtcgagggcacctgcagcgggcggcacgggttcgttgtggcgatcacgggtgtggaggacatcggcaaggggctcatccgggaaggcacgggatacgtcaccttccccgtcaagtaccagtgcgttgtctttagacccttcaagggcgagatcctcgaagctgtcgtcaccatggtgaacaagatgggcttctttgcggaggctgggccggtgcagatcttcgtgtccaaccatttgattccagacgatatggagttccaatcaggagatgtgccgaactacacaacttctgatggatcggtgaaaattcaaaaagagagtgaggtgcggctgaagattattggtactcgtgtcgatgctacagaaattttttgcattggcacaataaaggatgattttctgggtgttatcagcgatcctggtgcggcagtgtaaatggtctaagaagcgagattgtactccattgttctgacttctgagtactatcgcagacgtgtgtaatcgctggtccgttaaaactgcaatggctgtactgactgcggaacttgttgagaatgatgtgactaggaccttgtttagggcctgtttggttctttagtatggccctgattggcacaactgctgtttattgaaaaaacagcttatctgataagctggtgaaaaatagcttctgcttgttg

SEQ ID NO: 25446 - protein, 177 aa, Zea mays subsp. mays
  peptide (1)..(177): Ceres Seq. ID no. 12404747
  misc_feature (78)..(160): Pfam Name: Pfam Description:  S1 RNA binding domain
  misc_feature (1)..(173): NCBI GI NO: 1173137 NR Description: DNA-DIRECTED RNA POLYMERASE II 19 KD POLYPEPTIDE
  misc_feature (1)..(176): NCBI GI NO: 15237831 NR Description: RNA polymerase II; protein id: At5g59180.1
  misc_feature (1)..(172): NCBI GI NO: 24647020 NR Description: CG31155-PA [Drosophila melanogaster]
  misc_feature (1)..(171): NCBI GI NO: 4505947 NR Description: DNA directed RNA polymerase II polypeptide G
  misc_feature (1)..(171): NCBI GI NO: 28278826 NR Description: Unknown (protein for MGC:55297) [Danio rerio]
  misc_feature (1)..(169): NCBI GI NO: 39595528 NR Description: Hypothetical protein CBG04195
  misc_feature (1)..(169): NCBI GI NO: 17510349 NR Description: RNA polymerase Rpb7
  misc_feature (2)..(170): NCBI GI NO: 19114885 NR Description: RNA polymerase II subunit rpb7
  misc_feature (1)..(168): NCBI GI NO: 12655858 NR Description: RNA polymerase II subunit 7 [Candida albicans]
  misc_feature (1)..(168): NCBI GI NO: 38567178 NR Description: probable DNA-directed RNA polymerase II chain Rpb7
MFFHIVLERNMQLHPRHFGPHLRDKLVSKLIKDVEGTCSGRHGFVVAITGVEDIGKGLIREGTGYVTFPVKYQCVVFRPFKGEILEAVVTMVNKMGFFAEAGPVQIFVSNHLIPDDMEFQSGDVPNYTTSDGSVKIQKESEVRLKIIGTRVDATEIFCIGTIKDDFLGVISDPGAAV

SEQ ID NO: 25447 - protein, 167 aa, Zea mays subsp. mays
  peptide (1)..(167): Ceres Seq. ID no. 12404748
  misc_feature (68)..(150): Pfam Name: Pfam Description:  S1 RNA binding domain
  misc_feature (1)..(163): NCBI GI NO: 1173137 NR Description: DNA-DIRECTED RNA POLYMERASE II 19 KD POLYPEPTIDE
  misc_feature (1)..(166): NCBI GI NO: 15237831 NR Description: RNA polymerase II; protein id: At5g59180.1
  misc_feature (1)..(162): NCBI GI NO: 24647020 NR Description: CG31155-PA [Drosophila melanogaster]
  misc_feature (1)..(161): NCBI GI NO: 4505947 NR Description: DNA directed RNA polymerase II polypeptide G
  misc_feature (1)..(161): NCBI GI NO: 28278826 NR Description: Unknown (protein for MGC:55297) [Danio rerio]
  misc_feature (1)..(159): NCBI GI NO: 39595528 NR Description: Hypothetical protein CBG04195
  misc_feature (1)..(159): NCBI GI NO: 17510349 NR Description: RNA polymerase Rpb7
  misc_feature (1)..(160): NCBI GI NO: 19114885 NR Description: RNA polymerase II subunit rpb7
  misc_feature (1)..(158): NCBI GI NO: 12655858 NR Description: RNA polymerase II subunit 7 [Candida albicans]
  misc_feature (1)..(158): NCBI GI NO: 38567178 NR Description: probable DNA-directed RNA polymerase II chain Rpb7
MQLHPRHFGPHLRDKLVSKLIKDVEGTCSGRHGFVVAITGVEDIGKGLIREGTGYVTFPVKYQCVVFRPFKGEILEAVVTMVNKMGFFAEAGPVQIFVSNHLIPDDMEFQSGDVPNYTTSDGSVKIQKESEVRLKIIGTRVDATEIFCIGTIKDDFLGVISDPGAAV

SEQ ID NO: 25448 - protein, 126 aa, Zea mays subsp. mays
  peptide (1)..(126): Ceres Seq. ID no. 12404749
IRVHPTNHAQSEQTRSLHHSTRRRPPGAAEGIGARCSSTSCWSGTCSCTHDTSGRTSATSSFPSSSRTSRAPAAGGTGSLWRSRVWRTSARGSSGKARDTSPSPSSTSALSLDPSRARSSKLSSPW

SEQ ID NO: 25449 - DNA, 858 bp, Zea mays subsp. mays
  misc_feature (1)..(858): Ceres Seq. ID no. 12356124
aacgaactccagaaataatccgccctcgtatcctcacgcccacaaaacacccgaagaaaagaagagactgaacgccgcgagttcacgtgacgatggagaacgccgcctccgccatcgctaagccgtcgctgtccaagaagccctcgccgtcgttccgcctccggaacggcagcctcaacgcactgcgcctgcgccgcgtgttcgacctcttcgaccgcaacggcgacggcgagatcagcctcgacgagatggcctcggcgctcgacgcgctcggcctcggcgccgaccgctccggcctggaggccgcggttggcgggtacatcccggccggcgccgcggggctccgcttcaacgacttcgagtccctccaccgcgcgctcggggacgcgctgttcgggccccatgccggtggctgtgaccgaggatgacgacgacgagggggacatgaaggaggcgttccgggtgttcgatgaggacggcgacggcttcatctcggccgccgagctgcaggccgtgctcaagaagctcggcctgcccgaggctcggaacctggccactgtgcaggagatgatctgcaacgtcgaccgcaactgcgacggccgcgtcgacttcggcgagttcaagaacatgatgcaggggatcaccgtgtggggcgcttagctgccgcgcacctgcgttgtcacaccccctctactgcgtggtgtcatgtatgtatccaggcaccgtaggatgcgcttttctacccggcgcttcttcctcctcttgatggcgcagtggattcttcctgttcttggctttgctatctgactctgcttgtagtcttgagaatctggcggcacacagacatagttttctttc

SEQ ID NO: 25450 - protein, 111 aa, Zea mays subsp. mays
  peptide (1)..(111): Ceres Seq. ID no. 12356125
  misc_feature (1)..(103): NCBI GI NO: 13194672 NR Description: calmodulin-like protein [Pennisetum ciliare]
  misc_feature (7)..(111): NCBI GI NO: 29467539 NR Description: P0665F09.7
  misc_feature (7)..(107): NCBI GI NO: 33146667 NR Description: putative Avr9/Cf-9 rapidly elicited protein 31
  misc_feature (16)..(107): NCBI GI NO: 15233402 NR Description: calcium-binding protein - like
  misc_feature (10)..(109): NCBI GI NO: 15241500 NR Description: calmodulin-like protein; protein id: At5g44460.1
  misc_feature (14)..(102): NCBI GI NO: 12003380 NR Description: Avr9/Cf-9 rapidly elicited protein 31
  misc_feature (7)..(102): NCBI GI NO: 1168782 NR Description: Calcium-binding protein CAST
  misc_feature (5)..(109): NCBI GI NO: 1168696 NR Description: Calcium-binding allergen Bet v 3 (Bet v III)
  misc_feature (9)..(96): NCBI GI NO: 21740787 NR Description: OSJNBb0091E11.1
  misc_feature (15)..(96): NCBI GI NO: 15231685 NR Description: calmodulin-like protein; protein id: At3g59440.1
MENAASAIAKPSLSKKPSPSFRLRNGSLNALRLRRVFDLFDRNGDGEISLDEMASALDALGLGADRSGLEAAVGGYIPAGAAGLRFNDFESLHRALGDALFGPHAGGCDRG

SEQ ID NO: 25451 - protein, 85 aa, Zea mays subsp. mays
  peptide (1)..(85): Ceres Seq. ID no. 12356126
  misc_feature (14)..(42): Pfam Name: Pfam Description:  EF hand
  misc_feature (1)..(85): NCBI GI NO: 13194672 NR Description: calmodulin-like protein [Pennisetum ciliare]
  misc_feature (10)..(84): NCBI GI NO: 29467539 NR Description: P0665F09.7
  misc_feature (11)..(85): NCBI GI NO: 33146667 NR Description: putative Avr9/Cf-9 rapidly elicited protein 31
  misc_feature (1)..(82): NCBI GI NO: 15233402 NR Description: calcium-binding protein - like
  misc_feature (8)..(82): NCBI GI NO: 15241500 NR Description: calmodulin-like protein; protein id: At5g44460.1
  misc_feature (3)..(82): NCBI GI NO: 12003380 NR Description: Avr9/Cf-9 rapidly elicited protein 31
  misc_feature (1)..(82): NCBI GI NO: 1168782 NR Description: Calcium-binding protein CAST
  misc_feature (11)..(82): NCBI GI NO: 1168696 NR Description: Calcium-binding allergen Bet v 3 (Bet v III)
  misc_feature (4)..(79): NCBI GI NO: 21740787 NR Description: OSJNBb0091E11.1
  misc_feature (8)..(78): NCBI GI NO: 15231685 NR Description: calmodulin-like protein; protein id: At3g59440.1
MPVAVTEDDDDEGDMKEAFRVFDEDGDGFISAAELQAVLKKLGLPEARNLATVQEMICNVDRNCDGRVDFGEFKNMMQGITVWGA

SEQ ID NO: 25452 - protein, 71 aa, Zea mays subsp. mays
  peptide (1)..(71): Ceres Seq. ID no. 12356127
  misc_feature (1)..(28): Pfam Name: Pfam Description:  EF hand
  misc_feature (1)..(71): NCBI GI NO: 13194672 NR Description: calmodulin-like protein [Pennisetum ciliare]
  misc_feature (1)..(70): NCBI GI NO: 29467539 NR Description: P0665F09.7
  misc_feature (1)..(71): NCBI GI NO: 33146667 NR Description: putative Avr9/Cf-9 rapidly elicited protein 31
  misc_feature (1)..(68): NCBI GI NO: 15233402 NR Description: calcium-binding protein - like
  misc_feature (1)..(68): NCBI GI NO: 15241500 NR Description: calmodulin-like protein; protein id: At5g44460.1
  misc_feature (1)..(68): NCBI GI NO: 12003380 NR Description: Avr9/Cf-9 rapidly elicited protein 31
  misc_feature (1)..(68): NCBI GI NO: 1168782 NR Description: Calcium-binding protein CAST
  misc_feature (1)..(68): NCBI GI NO: 1168696 NR Description: Calcium-binding allergen Bet v 3 (Bet v III)
  misc_feature (1)..(65): NCBI GI NO: 21740787 NR Description: OSJNBb0091E11.1
  misc_feature (1)..(64): NCBI GI NO: 15231685 NR Description: calmodulin-like protein; protein id: At3g59440.1
MKEAFRVFDEDGDGFISAAELQAVLKKLGLPEARNLATVQEMICNVDRNCDGRVDFGEFKNMMQGITVWGA

SEQ ID NO: 25453 - DNA, 1512 bp, Zea mays subsp. mays
  misc_feature (1)..(1512): Ceres Seq. ID no. 12405701
gaaaatccttcactcgtccctctctcggtctgtccctttggagcgaaggcgaaccgcgtcgcgaacccaggatcccatcgagggcaggcgggcagatcccggcgtccgacggcgatgggcgaggaggacgcgagcgccgggggagatccgcagcggctgaagcggatcgccgctgcggcgtacgactacgagaacgatgcgcggtgggccgggtactggtccaacgtcctcgtgccgcccccacctcgcctcccgccccgacgtcgtcgaccacttcaagcgcaaagttctaccagcgatacatcgatcctggtttggttgttgaaccgatgtcctcccatgacttcaactcagtctagcagaccagcagcgaagtcttcagctacaccatctagtgagaatgtcagagctcgggactcaggctctagcacgagatcaactgggacctcccaacatccaccagcagagaggactgcaaattcattacagctagacggacggacaataaacttttctatcaatgcctgggtactggttgtagctagtctcggaatactcccagttctacccaaccatatctcgagtaaagcataccgtctttcattgctaggaacaatatgctcgtctgcatattctttatatggcacttatgggaaaccaagagcatggaatatgcctgcaattcagtcctggttgcagtctattattgtagctaaggactttgttcacttgatgttctctcttatgatgttcacatctaatgtgcactttaagattgctctacttcctgtgctttgctgggcgcttgatcatgttgctcgattcctaaggcgtaattttacacactcttctttatacaggaagtacttagaggacccttgcctatgggtagagacaaacaacactacactcagcctactttgttcgaatgctgaaatcaccctggggtttctcatgatcatctcgcttttctcgtcgagacgcaatataatccagacatttatgtactttcatcttttgaagttgatgtaccattctcctgtgacatctggttaccaccagagcgtgtgggcaagaataggccgggctgtaaacccgtacatttaccgctatgcgccattcctgaacacacctatttcggcagtccagagatggtggctgaggtaggaaagcatggaccgcagcacagtgaaaatatgcctaaacagctactctgatctcagcgcctcgatcttttagaaggcgtgcttgcacggcgtgttcttttcttgtaaaggttgtattctcagttcatgtcttactgagctactgaaggcataacactagagaatttcttacgatgagcagtagcgcttgagcaaactgtcgatttgatgggatacagttacaggcataaagtgattgcacagaattttcataaggatgcttgctgcagtcaataggatggaacatgcgagtggcactattgattcttgaagtaataaatgatgttcttgtctattttattttgcc

SEQ ID NO: 25454 - protein, 388 aa, Zea mays subsp. mays
  peptide (1)..(388): Ceres Seq. ID no. 12405702
  misc_feature (181)..(346): Pfam Name: UPF0121 Pfam Description: Uncharacterised protein family
  misc_feature (44)..(388): NCBI GI NO: 18396183 NR Description: expressed protein; protein id: At3g02420
  misc_feature (47)..(258): NCBI GI NO: 34912430 NR Description: P0681B11.19
  misc_feature (125)..(217): NCBI GI NO: 34911634 NR Description: P0039G05.19
ENPSLVPLSVCPFGAKANRVANPGSHRGQAGRSRRPTAMGEEDASAGGDPQRLKRIAAAAYDYENDARWAGYWSNVLVPPPPRLPPRRRRPLQAQSSTSDTSILVWLLNRCPPMTSTQSSRPAAKSSATPSSENVRARDSGSSTRSTGTSQHPPAERTANSLQLDGRTINFSINAWVLVVASLGILPVLPNHISSKAYRLSLLGTICSSAYSLYGTYGKPRAWNMPAIQSWLQSIIVAKDFVHLMFSLMMFTSNVHFKIALLPVLCWALDHVARFLRRNFTHSSLYRKYLEDPCLWVETNNTTLSLLCSNAEITLGFLMIISLFSSRRNIIQTFMYFHLLKLMYHSPVTSGYHQSVWARIGRAVNPYIYRYAPFLNTPISAVQRWWLR

SEQ ID NO: 25455 - protein, 350 aa, Zea mays subsp. mays
  peptide (1)..(350): Ceres Seq. ID no. 12405703
  misc_feature (143)..(308): Pfam Name: UPF0121 Pfam Description: Uncharacterised protein family
  misc_feature (6)..(350): NCBI GI NO: 18396183 NR Description: expressed protein; protein id: At3g02420
  misc_feature (9)..(220): NCBI GI NO: 34912430 NR Description: P0681B11.19
  misc_feature (87)..(179): NCBI GI NO: 34911634 NR Description: P0039G05.19
MGEEDASAGGDPQRLKRIAAAAYDYENDARWAGYWSNVLVPPPPRLPPRRRRPLQAQSSTSDTSILVWLLNRCPPMTSTQSSRPAAKSSATPSSENVRARDSGSSTRSTGTSQHPPAERTANSLQLDGRTINFSINAWVLVVASLGILPVLPNHISSKAYRLSLLGTICSSAYSLYGTYGKPRAWNMPAIQSWLQSIIVAKDFVHLMFSLMMFTSNVHFKIALLPVLCWALDHVARFLRRNFTHSSLYRKYLEDPCLWVETNNTTLSLLCSNAEITLGFLMIISLFSSRRNIIQTFMYFHLLKLMYHSPVTSGYHQSVWARIGRAVNPYIYRYAPFLNTPISAVQRWWLR

SEQ ID NO: 25456 - protein, 275 aa, Zea mays subsp. mays
  peptide (1)..(275): Ceres Seq. ID no. 12405704
  misc_feature (68)..(233): Pfam Name: UPF0121 Pfam Description: Uncharacterised protein family
  misc_feature (1)..(275): NCBI GI NO: 18396183 NR Description: expressed protein; protein id: At3g02420
  misc_feature (1)..(145): NCBI GI NO: 34912430 NR Description: P0681B11.19
  misc_feature (12)..(104): NCBI GI NO: 34911634 NR Description: P0039G05.19
MTSTQSSRPAAKSSATPSSENVRARDSGSSTRSTGTSQHPPAERTANSLQLDGRTINFSINAWVLVVASLGILPVLPNHISSKAYRLSLLGTICSSAYSLYGTYGKPRAWNMPAIQSWLQSIIVAKDFVHLMFSLMMFTSNVHFKIALLPVLCWALDHVARFLRRNFTHSSLYRKYLEDPCLWVETNNTTLSLLCSNAEITLGFLMIISLFSSRRNIIQTFMYFHLLKLMYHSPVTSGYHQSVWARIGRAVNPYIYRYAPFLNTPISAVQRWWLR

SEQ ID NO: 25457 - DNA, 1275 bp, Zea mays subsp. mays
  misc_feature (1)..(1275): Ceres Seq. ID no. 12410098
gagtcacatgctagcgtgcgtgtgcgtgtgcaacggctataccacctgcgcgacccaccgcgagcgcccgcagctaagctagctctcgctcgcgcgctctgggagaggagagatcaatggcgtcccgtggcagcatgacctgtagtcttcagctcgccgtcctcgtttccgccgccatcgcgctcgggttcggcgtccgggccggcgaggcgcagctgtccagcgagtactacggccagacgtgccccgtcgtgcaccgggtcgcgcggcgggtgctgaagaaggcgcacgaggccgacgtccgcatctacgccagcctcacccgcctccatttccacgactgcttcgtgcaaggctgcgacggctccatcctgctggacaacagctcgagcatcgtgtcggagaagttcgccacgcccaacaacaactcggcgcgcgggtaccccgtggtcgacgccgtcaaggcggcgctggaggagggcttgcccaggcgttgtctcctgcgctgacatactggcccatcgcccgccaagatctcggtcgaactgtccggcgggccaaggtggcgcgtgcctctcggccggcgcgacggcaccacggccaacatcaccgccgccaacaacctcccgagccccttcgacaacctcactacgctccagcagaagttcggcgccgtcggcctcgacgacaccgacctcgtcgcgctctcaggggcgcacacgttcgggcgcgtgcagtgccagttcgtgacggcgcggctgtacaacttcagcgggacgaaccggccggacccgacgctggacagggggtaccgggcgttcctctccctgcggtgcccgagggccggcaacgcgtcggcgctcaacgacctcgacccgaccacgccggacaccttcgacaacaattactacaccaacatcgaggcgcgccgtgggacgctgcagtccgaccaggagctgctgtcgacgcccggcgcgcccacggcgccgatcgtcggacggttcgccgccagccagaaggagttcttcaggagcttcgccaggtccatggtcaacatggggaacatccaggtgctgacggggagtcagggtgagatcaggaagaactgtaggatggtcaacggaagctagacccgtcgacggcacaagttactggtgaactgaaagcagttctgctgtatgtacgatgcctcaaacatgttgatgggataatggtgcgccgatcgatttatttgtcaaggagatccaataaattggttttttgcattttttttcc

SEQ ID NO: 25458 - protein, 130 aa, Zea mays subsp. mays
  peptide (1)..(130): Ceres Seq. ID no. 12410099
  misc_feature (51)..(130): Pfam Name: Pfam Description:  Peroxidase
  misc_feature (1)..(130): NCBI GI NO: 37530466 NR Description: putative peroxidase
  misc_feature (16)..(130): NCBI GI NO: 8546851 NR Description: peroxidase [Ipomoea batatas]
  misc_feature (15)..(130): NCBI GI NO: 2129513 NR Description: peroxidase (EC 1
  misc_feature (14)..(130): NCBI GI NO: 5002348 NR Description: peroxidase 5 precursor [Phaseolus vulgaris]
  misc_feature (32)..(130): NCBI GI NO: 1279654 NR Description: peroxidase
  misc_feature (11)..(130): NCBI GI NO: 2245683 NR Description: peroxidase precursor [Glycine max]
  misc_feature (21)..(130): NCBI GI NO: 5002342 NR Description: peroxidase 1 precursor [Phaseolus vulgaris]
  misc_feature (7)..(130): NCBI GI NO: 20330758 NR Description: Putative peroxidase
  misc_feature (43)..(130): NCBI GI NO: 485393 NR Description: peroxidase [Populus kitakamiensis]
  misc_feature (10)..(130): NCBI GI NO: 7433085 NR Description: peroxidase (EC 1.11.1.7) pxdC precursor - alfalfa
MASRGSMTCSLQLAVLVSAAIALGFGVRAGEAQLSSEYYGQTCPVVHRVARRVLKKAHEADVRIYASLTRLHFHDCFVQGCDGSILLDNSSSIVSEKFATPNNNSARGYPVVDAVKAALEEGLPRRCLLR

SEQ ID NO: 25459 - protein, 124 aa, Zea mays subsp. mays
  peptide (1)..(124): Ceres Seq. ID no. 12410100
  misc_feature (45)..(124): Pfam Name: Pfam Description:  Peroxidase
  misc_feature (1)..(124): NCBI GI NO: 37530466 NR Description: putative peroxidase
  misc_feature (10)..(124): NCBI GI NO: 8546851 NR Description: peroxidase [Ipomoea batatas]
  misc_feature (9)..(124): NCBI GI NO: 2129513 NR Description: peroxidase (EC 1
  misc_feature (8)..(124): NCBI GI NO: 5002348 NR Description: peroxidase 5 precursor [Phaseolus vulgaris]
  misc_feature (26)..(124): NCBI GI NO: 1279654 NR Description: peroxidase
  misc_feature (5)..(124): NCBI GI NO: 2245683 NR Description: peroxidase precursor [Glycine max]
  misc_feature (15)..(124): NCBI GI NO: 5002342 NR Description: peroxidase 1 precursor [Phaseolus vulgaris]
  misc_feature (1)..(124): NCBI GI NO: 20330758 NR Description: Putative peroxidase
  misc_feature (37)..(124): NCBI GI NO: 485393 NR Description: peroxidase [Populus kitakamiensis]
  misc_feature (4)..(124): NCBI GI NO: 7433085 NR Description: peroxidase (EC 1.11.1.7) pxdC precursor - alfalfa
MTCSLQLAVLVSAAIALGFGVRAGEAQLSSEYYGQTCPVVHRVARRVLKKAHEADVRIYASLTRLHFHDCFVQGCDGSILLDNSSSIVSEKFATPNNNSARGYPVVDAVKAALEEGLPRRCLLR

SEQ ID NO: 25460 - DNA, 1797 bp, Zea mays subsp. mays
  misc_feature (1)..(1797): Ceres Seq. ID no. 12423918
  misc_feature (1406)..(1406): n is a, c, t, g, unknown, or other
  misc_feature (1408)..(1408): n is a, c, t, g, unknown, or other
aaagctccagcacatccaatcgcacgacactccctgctgctctctgctgagaggtgctagatctcggactcgccgttgatttgattccaagttaaagacagcgagcaatccatagattgaccggtggagagcgagagaaagcgagagagagaagggaattggttggtaggtggagaccggagggagagctcagctcaggagattgatgcttgcatggtgatgcgggcgcgggcgatggggctgagcagcatccggcgggaggtgctggtctccgccgtcttcacggcgctcctcgtggcctccatcctcctcctcccctcgctcctcctaacgggcgctgggcccatcaggtggccgtccctgtccccgtcgaaggatgccggcatcggcgaggaggaggagcagcaggcgcggtaccccgtgacgttcgcgtacctgatctcggcgtcgacgggggacgcgtcccgcgccgcgcggctgctggcggcgctgtaccacccgggcaacagctacctgctgcacctggaccgggaggcccccgcggaggagcaccggcgtctggcggagctggtgtccgggcgcggcgtgtacgcgcgcgcgggcaacgtgtggatcgtgggcaggcccaacctggtaacctaccgtggccccaccatgctgaccaccacgctgcacgccgtcgccgtgctgctccgcctccgccgccgctgggactggttcatcaacctcagcgcctccgactacccgctcgtcacccaggacggtaccctgtgatgcttgcttgcttgcttgctgttggtcgtccactggatggacagactgtttctgaattttgggggttgcagatttgatggaggcgttcgccgggctgcccagggacctcaacttcatccagcacacgagccacctgggctggaagataaagaagcgggcgctgccggtgatcctggacacggcgctgtacgaggacgggagggcggagctgatccgcccggtgaacatctccaccaacctcaggaggctgcccacggcattcaagctcttcacagggtcggcgtggacgatgctgtcgcgggcgttcgcggagtacgtgacgatggggtgggacgacaacctgccgcggacgctgctgctgtaccacgccaacatcgtctcctcgcccgagttctacttccagacggtggcctgcaactcgcgccggttccgcaacgccacggtcaaccacgacctgcacttcatccgctgggacaccccgcccaagcagcacccgctctacctcaccgccagggactaccgccggatgctgctcagcggggccgccttcgcgcgcaagttcagggacggcgaccccgtgctgggaccgcatcgacagggacatcctccgccgccgggaccccgccgcccancnttctacggcggctggtgctccgaggccggcgaccaaaacggcggcgccgcgctctgctccaacccgcaggagcccgggaggcgcggggccgtcaagcccggcgccgggtccaggcggctcaaggccatgctcaggaagacgctgtcgccgaggaatttcaggaggcagcagtgtaggtaggggaactgttctgttatgttctgatcaaacaaacaggtcgttgactcaattttgtatgtatagaaaaggcagatctgaaacgcatcaaagcggcccaaagccaattttgttcagttgattcgcacaagtctgaattgaattgtagtagggagatactcctggtggttgatcatctcatacacggaataataatggaaggggcattatgt

SEQ ID NO: 25461 - protein, 257 aa, Zea mays subsp. mays
  peptide (1)..(257): Ceres Seq. ID no. 12423919
  misc_feature (199)..(199): Xaa is any aa, unknown or other
  misc_feature (200)..(200): Xaa is any aa, unknown or other
MDRLFLNFGGCRFDGGVRRAAQGPQLHPAHEPPGLEDKEAGAAGDPGHGAVRGREGGADPPGEHLHQPQEAAHGIQALHRVGVDDAVAGVRGVRDDGVGRQPAADAAAVPRQHRLLARVLLPDGGLQLAPVPQRHGQPRPALHPLGHPAQAAPALPHRQGLPPDAAQRGRLRAQVQGRRPRAGTASTGTSSAAGTPPPXXLRRLVLRGRRPKRRRRALLQPAGAREARGRQARRRVQAAQGHAQEDAVAEEFQEAAV

SEQ ID NO: 25462 - protein, 245 aa, Zea mays subsp. mays
  peptide (1)..(245): Ceres Seq. ID no. 12423920
  misc_feature (1)..(114): Pfam Name: Pfam Description:  Core-2/I-Branching enzyme
  misc_feature (67)..(245): NCBI GI NO: 37534694 NR Description: putative lycosylation enzyme-like protein
  misc_feature (1)..(73): NCBI GI NO: 37534694 NR Description: putative lycosylation enzyme-like protein
  misc_feature (1)..(169): NCBI GI NO: 13605509 NR Description: AT3g03690/T12J13_3 [Arabidopsis thaliana]
  misc_feature (212)..(245): NCBI GI NO: 13605509 NR Description: AT3g03690/T12J13_3 [Arabidopsis thaliana]
  misc_feature (1)..(169): NCBI GI NO: 15228609 NR Description: N-acetylglucosaminyltransferase family
  misc_feature (212)..(245): NCBI GI NO: 15228609 NR Description: N-acetylglucosaminyltransferase family
  misc_feature (1)..(245): NCBI GI NO: 15242532 NR Description: N-acetylglucosaminyltransferase family
  misc_feature (1)..(245): NCBI GI NO: 15242199 NR Description: N-acetylglucosaminyltransferase family
  misc_feature (1)..(244): NCBI GI NO: 15219202 NR Description: N-acetylglucosaminyltransferase family
  misc_feature (1)..(245): NCBI GI NO: 34903664 NR Description: B1015E06.17
  misc_feature (186)..(186): Xaa is any aa, unknown or other
MEAFAGLPRDLNFIQHTSHLGWKIKKRALPVILDTALYEDGRAELIRPVNISTNLRRLPTAFKLFTGSAWTMLSRAFAEYVTMGWDDNLPRTLLLYHANIVSSPEFYFQTVACNSRRFRNATVNHDLHFIRWDTPPKQHPLYLTARDYRRMLLSGAAFARKFRDGDPVLGPHRQGHPPPPGPRRPXFYGGWCSEAGDQNGGAALCSNPQEPGRRGAVKPGAGSRRLKAMLRKTLSPRNFRRQQCR

SEQ ID NO: 25463 - protein, 186 aa, Zea mays subsp. mays
  peptide (1)..(186): Ceres Seq. ID no. 12423921
  misc_feature (72)..(183): Pfam Name: Pfam Description:  Core-2/I-Branching enzyme
  misc_feature (14)..(183): NCBI GI NO: 37534694 NR Description: putative lycosylation enzyme-like protein
  misc_feature (12)..(183): NCBI GI NO: 13605509 NR Description: AT3g03690/T12J13_3 [Arabidopsis thaliana]
  misc_feature (12)..(183): NCBI GI NO: 15228609 NR Description: N-acetylglucosaminyltransferase family
  misc_feature (10)..(186): NCBI GI NO: 15242532 NR Description: N-acetylglucosaminyltransferase family
  misc_feature (69)..(186): NCBI GI NO: 15242199 NR Description: N-acetylglucosaminyltransferase family
  misc_feature (13)..(183): NCBI GI NO: 15219202 NR Description: N-acetylglucosaminyltransferase family
  misc_feature (18)..(186): NCBI GI NO: 34903664 NR Description: B1015E06.17
  misc_feature (18)..(186): NCBI GI NO: 15146308 NR Description: AT3g15350/K7L4_15 [Arabidopsis thaliana]
  misc_feature (18)..(186): NCBI GI NO: 18400725 NR Description: N-acetylglucosaminyltransferase family
  misc_feature (8)..(183): NCBI GI NO: 30687610 NR Description: N-acetylglucosaminyltransferase family
MVMRARAMGLSSIRREVLVSAVFTALLVASILLLPSLLLTGAGPIRWPSLSPSKDAGIGEEEEQQARYPVTFAYLISASTGDASRAARLLAALYHPGNSYLLHLDREAPAEEHRRLAELVSGRGVYARAGNVWIVGRPNLVTYRGPTMLTTTLHAVAVLLRLRRRWDWFINLSASDYPLVTQDGTL

SEQ ID NO: 25464 - DNA, 1191 bp, Zea mays subsp. mays
  misc_feature (1)..(1191): Ceres Seq. ID no. 12410095
acaccgcccgcacaccccaccggccggccacacaggcaccgacagcgactcggagatgacggccgggcagcttctgcgcaccgagccatcggcccagccccagcgggtgcgccacagcaccccgccggcggcactccaagcgggcatcgtgccgtcgtacccgccgcccgagtcggacggtgacgagtcgtgggtctggtcccagatcaaggcggaggcgcggcgcgacgcggacgcggagccggcgctggcctccttcctctacgcgacggtgctgtcgcacgcgtccctggaccggtccctggccttccacctggccaacaagctgtgctcctccacgctgctgtcgacgctcctctacgacctcttcgtggcgtcgctcgcggagcacccgtccgtccgcgccgcggccggtggccgacctgatcgccgcgcggtcgcgggacccggcctgcgcgggcttcgcgcactgcctcctcaactacaaggggttcctggccgtgcaggcgcaccgcgtggcgcacgtgctgtgggcgcagggccggcgcgcgctggcgctggcgctccagtcccgcgtcgccgaggtcttcgccgtggacatccacccggccgccaccgtcggcaggggcatcctgctggaccacgccacgggcgtcgtcgtcggggagacggccgtcgtgggcgacaacgtctccatactccaccacgtgacgctgggcggcaccggcaaggcggtgggcgaccggcaccccaagatcggggacggcgtgctcatcggcgccggcgcgaccgtcctgggcaacgtcaggatcggcgccggcgccaaggtcggcgccgggtccgtcgtgctcatcgacgtgccgcccaggagcaccgccgtggggaaccccgccaggctgatcggcgggaagaagggcgaggaggtgatgccgggggagtccatggaccacacctccttcatacagcagtggtcggactacatcatttgagcccgcaagctagaaaaaaaagagctcgtcttgctactgttgttatactgctgttgcgttttctgtgtatgtgcgtgcctgtgtggctgtgttagctgtatgctcttgttccagtgaggtgaaccgtggacatgctggtgtccagaaagatgtgttcaaagttcgctctgtaattttcgaagcgaatgaacagtgtttacgg

SEQ ID NO: 25465 - protein, 360 aa, Zea mays subsp. mays
  peptide (1)..(360): Ceres Seq. ID no. 12410096
  misc_feature (139)..(316): Pfam Name: Pfam Description:  HlyD family secretion protein
  misc_feature (19)..(137): NCBI GI NO: 25991547 NR Description: satase isoform I [Zea mays]
  misc_feature (19)..(136): NCBI GI NO: 34910686 NR Description: putative serine acetyltransferase
  misc_feature (50)..(137): NCBI GI NO: 6601494 NR Description: serine acetyltransferase [Allium cepa]
  misc_feature (51)..(136): NCBI GI NO: 7384806 NR Description: serine acetyltransferase [Allium tuberosum]
  misc_feature (38)..(136): NCBI GI NO: 25991545 NR Description: satase isoform III [Zea mays]
  misc_feature (39)..(137): NCBI GI NO: 23343585 NR Description: serine acetyltransferase 7 [Nicotiana tabacum]
  misc_feature (58)..(136): NCBI GI NO: 1361979 NR Description: serine O-acetyltransferase (EC 2
  misc_feature (21)..(136): NCBI GI NO: 15241928 NR Description: serine O-acetyltransferase (EC 2
  misc_feature (54)..(136): NCBI GI NO: 28460066 NR Description: serine O-acetyltransferase [Beta vulgaris]
  misc_feature (21)..(136): NCBI GI NO: 21537083 NR Description: serine O-acetyltransferase (EC 2.3.1.30) Sat-52
HRPHTPPAGHTGTDSDSEMTAGQLLRTEPSAQPQRVRHSTPPAALQAGIVPSYPPPESDGDESWVWSQIKAEARRDADAEPALASFLYATVLSHASLDRSLAFHLANKLCSSTLLSTLLYDLFVASLAEHPSVRAAAGGRPDRRAVAGPGLRGLRALPPQLQGVPGRAGAPRGARAVGAGPARAGAGAPVPRRRGLRRGHPPGRHRRQGHPAGPRHGRRRRGDGRRGRQRLHTPPRDAGRHRQGGGRPAPQDRGRRAHRRRRDRPGQRQDRRRRQGRRRVRRAHRRAAQEHRRGEPRQADRREEGRGGDAGGVHGPHLLHTAVVGLHHLSPQARKKRARLATVVILLLRFLCMCVPVWLC

SEQ ID NO: 25466 - protein, 342 aa, Zea mays subsp. mays
  peptide (1)..(342): Ceres Seq. ID no. 12410097
  misc_feature (121)..(298): Pfam Name: Pfam Description:  HlyD family secretion protein
  misc_feature (1)..(119): NCBI GI NO: 25991547 NR Description: satase isoform I [Zea mays]
  misc_feature (1)..(118): NCBI GI NO: 34910686 NR Description: putative serine acetyltransferase
  misc_feature (32)..(119): NCBI GI NO: 6601494 NR Description: serine acetyltransferase [Allium cepa]
  misc_feature (33)..(118): NCBI GI NO: 7384806 NR Description: serine acetyltransferase [Allium tuberosum]
  misc_feature (20)..(118): NCBI GI NO: 25991545 NR Description: satase isoform III [Zea mays]
  misc_feature (21)..(119): NCBI GI NO: 23343585 NR Description: serine acetyltransferase 7 [Nicotiana tabacum]
  misc_feature (40)..(118): NCBI GI NO: 1361979 NR Description: serine O-acetyltransferase (EC 2
  misc_feature (3)..(118): NCBI GI NO: 15241928 NR Description: serine O-acetyltransferase (EC 2
  misc_feature (36)..(118): NCBI GI NO: 28460066 NR Description: serine O-acetyltransferase [Beta vulgaris]
  misc_feature (3)..(118): NCBI GI NO: 21537083 NR Description: serine O-acetyltransferase (EC 2.3.1.30) Sat-52
MTAGQLLRTEPSAQPQRVRHSTPPAALQAGIVPSYPPPESDGDESWVWSQIKAEARRDADAEPALASFLYATVLSHASLDRSLAFHLANKLCSSTLLSTLLYDLFVASLAEHPSVRAAAGGRPDRRAVAGPGLRGLRALPPQLQGVPGRAGAPRGARAVGAGPARAGAGAPVPRRRGLRRGHPPGRHRRQGHPAGPRHGRRRRGDGRRGRQRLHTPPRDAGRHRQGGGRPAPQDRGRRAHRRRRDRPGQRQDRRRRQGRRRVRRAHRRAAQEHRRGEPRQADRREEGRGGDAGGVHGPHLLHTAVVGLHHLSPQARKKRARLATVVILLLRFLCMCVPVWLC

SEQ ID NO: 25467 - DNA, 1015 bp, Zea mays subsp. mays
  misc_feature (1)..(1015): Ceres Seq. ID no. 12595679
agcttcgtcatttccggcgccctcctcctttcctttatctctctccccacgcccccacgtttcgccccccatttcgaagcccaccgaattccctgcgattcctctcccctcgcctcctcgtctccccctaggggatcgtcggagaggaatcgcaaagagggccgtctcatccgagttaaggaagccatggagcacaaggaggctgggtgccaggcccccgagggacccatcctctgcatcaataactgtggcttcttcggcagcgcggcgaccatgaacatgtgctccaagtgccacaaggagatgataacgaagcaggatcaggccaagctggctgcctcctctatcgacagcatcgtgaacggcagcgacgccgtcatggagccggttgttgctggcagcaacacgggtagtagctgttgcccaagttgagttgcaaacaatgaacgtgcagcagcccgctggatgttgccggacccagccgagggggtggcggcgatctccaaaggggggaaggtagggccgaaccggtgcagcgcctgcaggaagagggttggacttacgggattcaactgccggtgtgggaacttgtactgcgcactccaccgctactccgacaagcacgactgcaagttcgactaccggactgctgccagggacgccattgccaaggctaatccggtggtgaaggcagacaagctcgacaagatctagggggggttccctacggttgggtatcaggaagattgtaaaccgcggtaactcgtcatgcggaactgctgccttgccccccgcgcctttctcttccatgtttgctgctacaatcttgttgttgggcattgcagtgcacggtgcacacttgtgtagcccgcctcgagaattcctgcctctgcatctggtcagttctaaaatgatttgcatgttggctatgttgtgtaagctctatttatggtggtctcgctgagacgggtatttggcttcgcagttatctagctatgtgatgtactgttgtctt

SEQ ID NO: 25468 - protein, 143 aa, Zea mays subsp. mays
  peptide (1)..(143): Ceres Seq. ID no. 12595680
  misc_feature (76)..(100): Pfam Name: Pfam Description:  A20-like zinc finger
  misc_feature (63)..(143): NCBI GI NO: 35187687 NR Description: zinc-finger protein
  misc_feature (63)..(143): NCBI GI NO: 11361253 NR Description: hypothetical protein p85RF
  misc_feature (63)..(143): NCBI GI NO: 18403408 NR Description: expressed protein; protein id: At1g51200
  misc_feature (63)..(143): NCBI GI NO: 25082726 NR Description: expressed protein [Arabidopsis thaliana]
  misc_feature (62)..(143): NCBI GI NO: 15231686 NR Description: zinc finger - like protein; protein id:At3g52800
  misc_feature (62)..(143): NCBI GI NO: 14596167 NR Description: zinc finger-like protein [Arabidopsis thaliana]
  misc_feature (64)..(136): NCBI GI NO: 28269431 NR Description: putative zinc finger protein
  misc_feature (67)..(103): NCBI GI NO: 30908921 NR Description: putative zinc finger transcription factor ZFP33
  misc_feature (62)..(143): NCBI GI NO: 18404102 NR Description: expressed protein; protein id: At2g36320
  misc_feature (71)..(143): NCBI GI NO: 29791559 NR Description: Unknown (protein for MGC:56057) [Danio rerio]
SFVISGALLLSFISLPTPPRFAPHFEAHRIPCDSSPLASSSPPRGSSERNRKEGRLIRVKEAMEHKEAGCQAPEGPILCINNCGFFGSAATMNMCSKCHKEMITKQDQAKLAASSIDSIVNGSDAVMEPVVAGSNTGSSCCPS

SEQ ID NO: 25469 - protein, 91 aa, Zea mays subsp. mays
  peptide (1)..(91): Ceres Seq. ID no. 12595681
ASSFPAPSSFPLSLSPRPHVSPPISKPTEFPAIPLPSPPRLPLGDRRRGIAKRAVSSELRKPWSTRRLGARPPRDPSSASITVASSAARRP

SEQ ID NO: 25470 - protein, 82 aa, Zea mays subsp. mays
  peptide (1)..(82): Ceres Seq. ID no. 12595682
  misc_feature (23)..(63): Pfam Name: Pfam Description:  AN1-like Zinc finger
  misc_feature (1)..(82): NCBI GI NO: 35187687 NR Description: zinc-finger protein
  misc_feature (1)..(82): NCBI GI NO: 11361253 NR Description: hypothetical protein p85RF
  misc_feature (1)..(82): NCBI GI NO: 18403408 NR Description: expressed protein; protein id: At1g51200
  misc_feature (1)..(82): NCBI GI NO: 25082726 NR Description: expressed protein [Arabidopsis thaliana]
  misc_feature (1)..(82): NCBI GI NO: 15231686 NR Description: zinc finger - like protein; protein id:At3g52800
  misc_feature (1)..(82): NCBI GI NO: 14596167 NR Description: zinc finger-like protein [Arabidopsis thaliana]
  misc_feature (6)..(82): NCBI GI NO: 28269431 NR Description: putative zinc finger protein
  misc_feature (3)..(82): NCBI GI NO: 30908921 NR Description: putative zinc finger transcription factor ZFP33
  misc_feature (1)..(82): NCBI GI NO: 18404102 NR Description: expressed protein; protein id: At2g36320
  misc_feature (3)..(82): NCBI GI NO: 29791559 NR Description: Unknown (protein for MGC:56057) [Danio rerio]
MLPDPAEGVAAISKGGKVGPNRCSACRKRVGLTGFNCRCGNLYCALHRYSDKHDCKFDYRTAARDAIAKANPVVKADKLDKI

SEQ ID NO: 25471 - protein, 81 aa, Zea mays subsp. mays
  peptide (1)..(81): Ceres Seq. ID no. 12595683
  misc_feature (14)..(38): Pfam Name: Pfam Description:  A20-like zinc finger
  misc_feature (1)..(81): NCBI GI NO: 35187687 NR Description: zinc-finger protein
  misc_feature (1)..(81): NCBI GI NO: 11361253 NR Description: hypothetical protein p85RF
  misc_feature (1)..(81): NCBI GI NO: 18403408 NR Description: expressed protein; protein id: At1g51200
  misc_feature (1)..(81): NCBI GI NO: 25082726 NR Description: expressed protein [Arabidopsis thaliana]
  misc_feature (1)..(81): NCBI GI NO: 15231686 NR Description: zinc finger - like protein; protein id:At3g52800
  misc_feature (1)..(81): NCBI GI NO: 14596167 NR Description: zinc finger-like protein [Arabidopsis thaliana]
  misc_feature (2)..(74): NCBI GI NO: 28269431 NR Description: putative zinc finger protein
  misc_feature (5)..(41): NCBI GI NO: 30908921 NR Description: putative zinc finger transcription factor ZFP33
  misc_feature (1)..(81): NCBI GI NO: 18404102 NR Description: expressed protein; protein id: At2g36320
  misc_feature (9)..(81): NCBI GI NO: 29791559 NR Description: Unknown (protein for MGC:56057) [Danio rerio]
MEHKEAGCQAPEGPILCINNCGFFGSAATMNMCSKCHKEMITKQDQAKLAASSIDSIVNGSDAVMEPVVAGSNTGSSCCPS

SEQ ID NO: 25472 - DNA, 770 bp, Zea mays subsp. mays
  misc_feature (1)..(770): Ceres Seq. ID no. 12403056
cagacttgcgcgcgcctccgctgctgcgacggcgagcccaagaaaaaatttcctctacgagcgcatggaggtgtccgctgggctccggccgccgcccgtcgctgcggcagcgtcgctccttggctgtcggtccgcgtcggtgccgccgcgcgtggcggcttcccattcggtgcggtccgtgtcccgcgcggttaagatcagagcagctgcaattaacggcctccaaagaaacagaagtaatttcgaatcattattccgctacgacaaatctgtccccgagcaggacattggagaaccatctggtctaaatctggaaaagaagaatgtcggggacaagcctccctgctcaagctgtgaagctaaaggtgccttgctgtgtgcaacgtgcgctggttcaggcttgtacgtcgactcgatactagagagccagggaatcatcgtgaaagtcagatgcctaggttgcggtggaactgggaacatcatgtgctccaaatgtggaggccgtgggcatacatgaacgcaaaagcttgcaccttgcagatcaaaggagttgactctatggagaattttctgtgttacatgttacggtgtgctgagctagctgctgtagctacatcgagacatgcttttattttgttcccctcattccgtgcttaaaagcatgatgcgtcataggatttcatgtgatgttgtaatcgtaaaggtgtaatggtatgtgaaagacacacttcgttcatggaggagaatgagagattaaattcagttgtgcc

SEQ ID NO: 25473 - protein, 171 aa, Zea mays subsp. mays
  peptide (1)..(171): Ceres Seq. ID no. 12403057
  misc_feature (61)..(170): NCBI GI NO: 15238662 NR Description: putative protein; protein id: At5g17840
  misc_feature (61)..(170): NCBI GI NO: 21554941 NR Description: unknown [Arabidopsis thaliana]
RLARASAAATASPRKNFLYERMEVSAGLRPPPVAAAASLLGCRSASVPPRVAASHSVRSVSRAVKIRAAAINGLQRNRSNFESLFRYDKSVPEQDIGEPSGLNLEKKNVGDKPPCSSCEAKGALLCATCAGSGLYVDSILESQGIIVKVRCLGCGGTGNIMCSKCGGRGHT

SEQ ID NO: 25474 - protein, 150 aa, Zea mays subsp. mays
  peptide (1)..(150): Ceres Seq. ID no. 12403058
  misc_feature (40)..(149): NCBI GI NO: 15238662 NR Description: putative protein; protein id: At5g17840
  misc_feature (40)..(149): NCBI GI NO: 21554941 NR Description: unknown [Arabidopsis thaliana]
MEVSAGLRPPPVAAAASLLGCRSASVPPRVAASHSVRSVSRAVKIRAAAINGLQRNRSNFESLFRYDKSVPEQDIGEPSGLNLEKKNVGDKPPCSSCEAKGALLCATCAGSGLYVDSILESQGIIVKVRCLGCGGTGNIMCSKCGGRGHT

SEQ ID NO: 25475 - protein, 101 aa, Zea mays subsp. mays
  peptide (1)..(101): Ceres Seq. ID no. 12403059
DLRAPPLLRRRAQEKISSTSAWRCPLGSGRRPSLRQRRSLAVGPRRCRRAWRLPIRCGPCPARLRSEQLQLTASKETEVISNHYSATTNLSPSRTLENHLV

SEQ ID NO: 25476 - DNA, 733 bp, Zea mays subsp. mays
  misc_feature (1)..(733): Ceres Seq. ID no. 12345910
ataaagcagatagagcgggcaacatcgcagatatatatatatatatatatatagagagagagagagagagagagagagagagaggcaaactggagaggccgaggctgatggtttccaaggagcagaataagcgaggagctttgcatgagaagctcaagattctccgcagcgttactcactctcatgcgggggataaagtgtccataatagcggacgcgtcatcgtacatcaaggaactaaagcagaagatcgcgaagctaagccaagagatggcatcgtcgtctccgcagcacgccactactggtgtctgccaacaacaacggtcgtcgtcgtcggtgagtgtgggagtcctggacaagaagggccgtttcctcgtcagtgtgttcatggacgagagctgcggcccgccgccggccgggctactcgcttccgtcctcgaggccttcgacgacatcggactcacggtgcttgaggctagggctacctgcgctggttcctttcggctagaagctgtaggagaggaagtagtagatgggggcctcatcatcgacgcgcacgcggtggagcaagcagtagttcaggcaatcaagaattgccctgcaaattaaactaatcgacctagtcctccaattcgatcgatcgagttgacgatgcgctggtggtgtagcacaaagttcatgccaagagactccgagctatatatacatactgattcgcatcgtactttttgaag

SEQ ID NO: 25477 - protein, 201 aa, Zea mays subsp. mays
  peptide (1)..(201): Ceres Seq. ID no. 12345911
  misc_feature (36)..(198): NCBI GI NO: 22296306 NR Description: hypothetical protein~similar to Arabidopsisthaliana chromosome 2
  misc_feature (36)..(197): NCBI GI NO: 18405384 NR Description: unknown protein; protein id: At2g40435.1
  misc_feature (36)..(196): NCBI GI NO: 15228867 NR Description: putative protein; protein id: At3g56220.1
  misc_feature (20)..(193): NCBI GI NO: 15238199 NR Description: bHLH protein; protein id: At5g10570
  misc_feature (20)..(193): NCBI GI NO: 20127062 NR Description: putative bHLH transcription factor
KADRAGNIADIYIYIYIERERERERERGKLERPRLMVSKEQNKRGALHEKLKILRSVTHSHAGDKVSIIADASSYIKELKQKIAKLSQEMASSSPQHATTGVCQQQRSSSSVSVGVLDKKGRFLVSVFMDESCGPPPAGLLASVLEAFDDIGLTVLEARATCAGSFRLEAVGEEVVDGGLIIDAHAVEQAVVQAIKNCPAN

SEQ ID NO: 25478 - protein, 166 aa, Zea mays subsp. mays
  peptide (1)..(166): Ceres Seq. ID no. 12345912
  misc_feature (1)..(163): NCBI GI NO: 22296306 NR Description: hypothetical protein~similar to Arabidopsisthaliana chromosome 2
  misc_feature (1)..(162): NCBI GI NO: 18405384 NR Description: unknown protein; protein id: At2g40435.1
  misc_feature (1)..(161): NCBI GI NO: 15228867 NR Description: putative protein; protein id: At3g56220.1
  misc_feature (1)..(158): NCBI GI NO: 15238199 NR Description: bHLH protein; protein id: At5g10570
  misc_feature (1)..(158): NCBI GI NO: 20127062 NR Description: putative bHLH transcription factor
MVSKEQNKRGALHEKLKILRSVTHSHAGDKVSIIADASSYIKELKQKIAKLSQEMASSSPQHATTGVCQQQRSSSSVSVGVLDKKGRFLVSVFMDESCGPPPAGLLASVLEAFDDIGLTVLEARATCAGSFRLEAVGEEVVDGGLIIDAHAVEQAVVQAIKNCPAN

SEQ ID NO: 25479 - protein, 112 aa, Zea mays subsp. mays
  peptide (1)..(112): Ceres Seq. ID no. 12345913
  misc_feature (1)..(109): NCBI GI NO: 22296306 NR Description: hypothetical protein~similar to Arabidopsisthaliana chromosome 2
  misc_feature (1)..(108): NCBI GI NO: 18405384 NR Description: unknown protein; protein id: At2g40435.1
  misc_feature (1)..(107): NCBI GI NO: 15228867 NR Description: putative protein; protein id: At3g56220.1
  misc_feature (1)..(104): NCBI GI NO: 15238199 NR Description: bHLH protein; protein id: At5g10570
  misc_feature (1)..(104): NCBI GI NO: 20127062 NR Description: putative bHLH transcription factor
MASSSPQHATTGVCQQQRSSSSVSVGVLDKKGRFLVSVFMDESCGPPPAGLLASVLEAFDDIGLTVLEARATCAGSFRLEAVGEEVVDGGLIIDAHAVEQAVVQAIKNCPAN

SEQ ID NO: 25480 - DNA, 1032 bp, Zea mays subsp. mays
  misc_feature (1)..(1032): Ceres Seq. ID no. 12403846
gcacgagaccattacctagaacatcctaatcgaaaaccaccacatctaatccttcctcccagctggtccctgcggccgctgctgctcgtccctacaagtatatcaaccaacagtgctcacatcatgcactctgtggtgtcttggtagtagttgttggggtagctagctagagagagcagcaggccagcacagcagcatggggaggtcgccgtgctgcgagaaggcgcacacgaacaagggcgcctggaccaaggaggaggaccagcggctcgtcgcctacatcaaggcccacggcgaaggctgctggaggtcgctccccaaggccgcgggcctgctgcgctgcggcaagagctgccgcctccggtggatcaactacctgcgccccgacctcaagcgcggcaacttcacccaggaggaggacgacgtcatcatcaagctccaccaggtcctcggaaacaagtggtcgctgatcgccgcccagctgccggggcggacggacaacgagatcaagaactactggaacacgcacatcaagcgcaagctcatcgcccggggcatcgacccacggacgcaccagccggcgagtgccgccgcagttgcccccgccgccgccgcgcaaagcagctttcgccaccatggcgacgacgaggcggtggcgcggcgcagctgctcgcgagacagcggctgcatcgcggcgcacagcagcgacgacgacgacagcacgtccgggtccctgccacaccaacatgctgtcggcggcatcgacctcaacctctcgctaagcccaccgacgagccaaccgtcatcgccggccgccgccaagggagttgtagctagcggatatggccaagggagtgagagctagctgtacctcctctgcactgccacgatgatggttgtcaattgttgttagctcctcctcctcgtcttatgttcttccatgcaggccggaagatcctaaagagaacgtgtgcgtgcgtgtgagaattaaactcgtgtctgttgttcgatcgggcgctctaagatttggcc

SEQ ID NO: 25481 - protein, 222 aa, Zea mays subsp. mays
  peptide (1)..(222): Ceres Seq. ID no. 12403847
  misc_feature (14)..(61): Pfam Name: Pfam Description:  Myb-like DNA-binding domain
  misc_feature (1)..(139): NCBI GI NO: 34907282 NR Description: putative myb-related protein
  misc_feature (125)..(222): NCBI GI NO: 34907282 NR Description: putative myb-related protein
  misc_feature (1)..(204): NCBI GI NO: 421983 NR Description: myb-related protein 2 - barley
  misc_feature (1)..(215): NCBI GI NO: 7438344 NR Description: myb-related protein 1 - rice
  misc_feature (1)..(209): NCBI GI NO: 13346194 NR Description: GHMYB9 [Gossypium hirsutum]
  misc_feature (1)..(216): NCBI GI NO: 82310 NR Description: myb-related protein 330 - garden snapdragon
  misc_feature (1)..(157): NCBI GI NO: 7438345 NR Description: myb-related protein A - upland cotton
  misc_feature (1)..(133): NCBI GI NO: 19072766 NR Description: typical P-type R2R3 Myb protein [Oryza sativa]
  misc_feature (1)..(157): NCBI GI NO: 23476279 NR Description: myb-like transcription factor 1
  misc_feature (1)..(133): NCBI GI NO: 19072748 NR Description: typical P-type R2R3 Myb protein [Zea mays]
MGRSPCCEKAHTNKGAWTKEEDQRLVAYIKAHGEGCWRSLPKAAGLLRCGKSCRLRWINYLRPDLKRGNFTQEEDDVIIKLHQVLGNKWSLIAAQLPGRTDNEIKNYWNTHIKRKLIARGIDPRTHQPASAAAVAPAAAAQSSFRHHGDDEAVARRSCSRDSGCIAAHSSDDDDSTSGSLPHQHAVGGIDLNLSLSPPTSQPSSPAAAKGVVASGYGQGSES

SEQ ID NO: 25482 - DNA, 1152 bp, Zea mays subsp. mays
  misc_feature (1)..(1152): Ceres Seq. ID no. 12362891
atatatctttttctccccaagaaaaaaaaggcggcgagagcataagaaaaaaacacacacacacacacacacacaaagcgcacttttcaaatcgacaaaggggaaaggttcgcttcttctcgcatcttgctttacttcgagtgccatggccgatccggcggaggagaacgttgtctcgccgccaccgacccctgcggccccagccgtgggcgcctcagactcgcccctgcagcctgttgctgacggcgcctcaacggagaaggtgtctgccccggcgccggaggtaaggtcccggggattcaggcttcttggagaggacacttccgtgcacaaatcccttgggggcggtaaaactgctgacgttctgttatggaaagacaagaaaacttctgctgttgtaataggcggcgcaactgtcatctgggttctgttcgaagtgcttgattaccacctcctgaccctgatatcccatgtactgattggtgtgcttgccaccttattcctgtggtccaaagcaaccacgttcatcaagaagagtccaccggatattccagtagtgcaggtatctgaggaccttgttgtgaatgtttcacgggcattacggaatgacatcaacagagcgcttcacttgttccgtgagatcgcaatggggcatgatctgaagaagtttttgggtgtgatcgtgggtctgtgggttctctccggagttggaagcagctgtgacttcctcacgttgacatacattgccgtcctgatgctccacacggtgccaatcttgtacgacaagtaccaggacaaggtggaccatgtcgctggaagggcacacaccgaggccctcaagcagtacaaggtgctggatgccaaggtcctgagcaaaatccccaggggtgcggtcaaatccaaaaagcagaactagttaggataagccgcagattgtgaatgcccgtatcatgagtatcgggcttgtggtttgcatggcatatgtaaatctgtctgttggcttcagcttggttcttctgcgactactttgttgatgttattatagtcctatgtatgtactgtgtacatgacagatgttcggacgtctcggctactgctgtagcttgtaaattccagtggtgcgttgctaagcacgatgctccccttgttttg

SEQ ID NO: 25483 - protein, 304 aa, Zea mays subsp. mays
  peptide (1)..(304): Ceres Seq. ID no. 12362892
  misc_feature (46)..(302): NCBI GI NO: 34904202 NR Description: P0492F05.25
  misc_feature (73)..(304): NCBI GI NO: 15237093 NR Description: putative protein; protein id: At4g11220
  misc_feature (85)..(304): NCBI GI NO: 15236556 NR Description: putative protein; protein id: At4g23630
  misc_feature (70)..(302): NCBI GI NO: 34909318 NR Description: OSJNBb0021A09.5
  misc_feature (86)..(301): NCBI GI NO: 18406991 NR Description: expressed protein; protein id: At2g46170
  misc_feature (95)..(297): NCBI GI NO: 15222616 NR Description: hypothetical protein; protein id: At1g64090
  misc_feature (70)..(302): NCBI GI NO: 15238125 NR Description: putative protein; protein id: At5g41600
  misc_feature (101)..(302): NCBI GI NO: 34897094 NR Description: unknown protein
  misc_feature (68)..(304): NCBI GI NO: 34899590 NR Description: hypothetical protein~similar to Oryza sativachromosome3
  misc_feature (95)..(303): NCBI GI NO: 18398810 NR Description: expressed protein; protein id: At3g10260
YIFFSPRKKRRREHKKKTHTHTHTQSALFKSTKGKGSLLLASCFTSSAMADPAEENVVSPPPTPAAPAVGASDSPLQPVADGASTEKVSAPAPEVRSRGFRLLGEDTSVHKSLGGGKTADVLLWKDKKTSAVVIGGATVIWVLFEVLDYHLLTLISHVLIGVLATLFLWSKATTFIKKSPPDIPVVQVSEDLVVNVSRALRNDINRALHLFREIAMGHDLKKFLGVIVGLWVLSGVGSSCDFLTLTYIAVLMLHTVPILYDKYQDKVDHVAGRAHTEALKQYKVLDAKVLSKIPRGAVKSKKQN

SEQ ID NO: 25484 - protein, 256 aa, Zea mays subsp. mays
  peptide (1)..(256): Ceres Seq. ID no. 12362893
  misc_feature (1)..(254): NCBI GI NO: 34904202 NR Description: P0492F05.25
  misc_feature (25)..(256): NCBI GI NO: 15237093 NR Description: putative protein; protein id: At4g11220
  misc_feature (37)..(256): NCBI GI NO: 15236556 NR Description: putative protein; protein id: At4g23630
  misc_feature (22)..(254): NCBI GI NO: 34909318 NR Description: OSJNBb0021A09.5
  misc_feature (38)..(253): NCBI GI NO: 18406991 NR Description: expressed protein; protein id: At2g46170
  misc_feature (47)..(249): NCBI GI NO: 15222616 NR Description: hypothetical protein; protein id: At1g64090
  misc_feature (22)..(254): NCBI GI NO: 15238125 NR Description: putative protein; protein id: At5g41600
  misc_feature (53)..(254): NCBI GI NO: 34897094 NR Description: unknown protein
  misc_feature (20)..(256): NCBI GI NO: 34899590 NR Description: hypothetical protein~similar to Oryza sativachromosome3
  misc_feature (47)..(255): NCBI GI NO: 18398810 NR Description: expressed protein; protein id: At3g10260
MADPAEENVVSPPPTPAAPAVGASDSPLQPVADGASTEKVSAPAPEVRSRGFRLLGEDTSVHKSLGGGKTADVLLWKDKKTSAVVIGGATVIWVLFEVLDYHLLTLISHVLIGVLATLFLWSKATTFIKKSPPDIPVVQVSEDLVVNVSRALRNDINRALHLFREIAMGHDLKKFLGVIVGLWVLSGVGSSCDFLTLTYIAVLMLHTVPILYDKYQDKVDHVAGRAHTEALKQYKVLDAKVLSKIPRGAVKSKKQN

SEQ ID NO: 25485 - DNA, 1075 bp, Zea mays subsp. mays
  misc_feature (1)..(1075): Ceres Seq. ID no. 12372530
aaacccataaaaaatactgtattttccaaccaagccactcgcccgaccttcatccgcattccacgcgcactccgctgcctcactccgagactccgccgctgcttccaacttccgttgcgcacgagcgaaacatccggagctagcaagggaggaggaggaggaggcgatggcggggggcggggataaggtggactacgtcttcaaggtggtgctcatcggcgactccgctgtcggcaagtcgcagatccttgcgcgcttcgcccgcaacgagtttagcctcgactcgaaggccaccattggggtcgagttccagactcggacgctcgtcatcgaacacaagtccgtcaaggcgcagatctgggacaccgccgggcaggagaggtatagagctgtcacaagtgcctactacagaggtgctttgggagctctgctagtctatgatatcacaaaacgccagagcttcgaccacatacctcgctggctggaagagcttcggggccatgctgacaaaaacattgtgatcatgctggttggcaacaagagcgacctcgaagacgagcgtgccgtaagcaccgaggacgccaaggagtttgccgagaaggagaacctcttcttccttgagacctccgcgctgcaggcgaccaatgtagaaaatgccttccagaccgtcttgacagagatctttaagatccacagcaagaagaacatggcagcggacccaagggccaatggggccgcaccatcgctggcagggaagaaggtcatcgtcccaggcccagctcaggagatccctaagagcaagtgctgcagttccatgtgacatgttgcctgaattttatttgggtttgttcgtgtccgaggtattctcagcatctttgtggatgtataatactggaataggcttagatttgaattgctggttaacttgattttcggttttgaagggaccgatatcgtagtttagatttgtcacccgtcttcaagatgacgaggatagggagcgagaagaaaacatatgtttgcatagactttgttggattttacaaaaatagcagtgtaagcacattattttttc

SEQ ID NO: 25486 - protein, 217 aa, Zea mays subsp. mays
  peptide (1)..(217): Ceres Seq. ID no. 12372531
  misc_feature (13)..(173): Pfam Name: Pfam Description:  Ras family
  misc_feature (4)..(217): NCBI GI NO: 37533688 NR Description: putative Ras-related protein Rab
  misc_feature (1)..(216): NCBI GI NO: 3024505 NR Description: RAS-RELATED PROTEIN RAB11D
  misc_feature (1)..(216): NCBI GI NO: 3024503 NR Description: RAS-RELATED PROTEIN RAB11C
  misc_feature (1)..(216): NCBI GI NO: 7438430 NR Description: GTP-binding protein - garden pea
  misc_feature (1)..(216): NCBI GI NO: 3024500 NR Description: RAS-RELATED PROTEIN RAB11A
  misc_feature (3)..(216): NCBI GI NO: 7438425 NR Description: GTP-binding protein sra1 - soybean (fragment)
  misc_feature (3)..(216): NCBI GI NO: 15238392 NR Description: GTP-binding protein, putative
  misc_feature (1)..(216): NCBI GI NO: 15236099 NR Description: GTP-binding protein, putative
  misc_feature (1)..(216): NCBI GI NO: 1184985 NR Description: ATGB3 [Arabidopsis thaliana]
  misc_feature (1)..(216): NCBI GI NO: 21617896 NR Description: GTP-binding protein GB3 [Arabidopsis thaliana]
MAGGGDKVDYVFKVVLIGDSAVGKSQILARFARNEFSLDSKATIGVEFQTRTLVIEHKSVKAQIWDTAGQERYRAVTSAYYRGALGALLVYDITKRQSFDHIPRWLEELRGHADKNIVIMLVGNKSDLEDERAVSTEDAKEFAEKENLFFLETSALQATNVENAFQTVLTEIFKIHSKKNMAADPRANGAAPSLAGKKVIVPGPAQEIPKSKCCSSM

SEQ ID NO: 25487 - DNA, 777 bp, Zea mays subsp. mays
  misc_feature (1)..(777): Ceres Seq. ID no. 12342769
gggcaactcgaagaagccgcgtgcgttatcctttgagcagtttgggcgctgagcaagtccagtgagagagggagagcggcgagaggatggctgggatggcatcgctgcagggcgccatggcgtcgctctccatctccgcgctaggcgcggcgacggcgagcagcagcagcttctggggcaaccggctcgccacctactccgcgccgcagcctggggtaaggtttatggtcaagatatgcccaattgaaatgagacttaagagatgggagcgaaagaagtgtaaaccaaacagtcttcctgtgctgcacaagatgcatgttaggatcggggacacggtacaggttattgcaggccgtgagaaaggaaaggttggagaagtcacacgccttttcaagcacaacagcacggtgatcgtgaaggacctgaacttgaagtcgaagcacaagaaaggcacagacgatgaacccggtgaaatcgtcatgattgaaggccccattcatagctcaaatgtgatgctctactctaaggagaagagtgtggtaagcagggttggccacaaattcctggaggacgggaccaaggtccgatacctggtcaagaccggtgaagtaatcgacagtgttgagaagtgggtaaaggtttttaaggaaggaaattcggagtaacagttttagcatgaaaacctgcaaaatgctctgaacgctgactgcgtcttgcatgttgaattgagcctgtttatccctctatgttgttatttacgccagtttttccccctgt

SEQ ID NO: 25488 - protein, 192 aa, Zea mays subsp. mays
  peptide (1)..(192): Ceres Seq. ID no. 12342770
  misc_feature (78)..(111): Pfam Name: Pfam Description:  KOW motif
  misc_feature (1)..(192): NCBI GI NO: 30696483 NR Description: 50S ribosomal protein L24, chloroplast precursor
  misc_feature (1)..(192): NCBI GI NO: 1694974 NR Description: plastid ribosomal protein [Arabidopsis thaliana]
  misc_feature (4)..(192): NCBI GI NO: 132819 NR Description: 50S RIBOSOMAL PROTEIN L24, CHLOROPLAST PRECURSOR
  misc_feature (11)..(188): NCBI GI NO: 400989 NR Description: 50S RIBOSOMAL PROTEIN L24, CHLOROPLAST PRECURSOR
  misc_feature (1)..(108): NCBI GI NO: 30696487 NR Description: 50S ribosomal protein L24, chloroplast precursor
  misc_feature (127)..(192): NCBI GI NO: 30696487 NR Description: 50S ribosomal protein L24, chloroplast precursor
  misc_feature (11)..(192): NCBI GI NO: 132821 NR Description: 50S RIBOSOMAL PROTEIN L24, CHLOROPLAST PRECURSOR
  misc_feature (62)..(177): NCBI GI NO: 23042779 NR Description: hypothetical protein
  misc_feature (66)..(177): NCBI GI NO: 22297636 NR Description: 50S ribosomal protein L24
  misc_feature (66)..(177): NCBI GI NO: 23124117 NR Description: hypothetical protein [Nostoc punctiforme]
MAGMASLQGAMASLSISALGAATASSSSFWGNRLATYSAPQPGVRFMVKICPIEMRLKRWERKKCKPNSLPVLHKMHVRIGDTVQVIAGREKGKVGEVTRLFKHNSTVIVKDLNLKSKHKKGTDDEPGEIVMIEGPIHSSNVMLYSKEKSVVSRVGHKFLEDGTKVRYLVKTGEVIDSVEKWVKVFKEGNSE

SEQ ID NO: 25489 - protein, 189 aa, Zea mays subsp. mays
  peptide (1)..(189): Ceres Seq. ID no. 12342771
  misc_feature (75)..(108): Pfam Name: Pfam Description:  KOW motif
  misc_feature (1)..(189): NCBI GI NO: 30696483 NR Description: 50S ribosomal protein L24, chloroplast precursor
  misc_feature (1)..(189): NCBI GI NO: 1694974 NR Description: plastid ribosomal protein [Arabidopsis thaliana]
  misc_feature (1)..(189): NCBI GI NO: 132819 NR Description: 50S RIBOSOMAL PROTEIN L24, CHLOROPLAST PRECURSOR
  misc_feature (8)..(185): NCBI GI NO: 400989 NR Description: 50S RIBOSOMAL PROTEIN L24, CHLOROPLAST PRECURSOR
  misc_feature (1)..(105): NCBI GI NO: 30696487 NR Description: 50S ribosomal protein L24, chloroplast precursor
  misc_feature (124)..(189): NCBI GI NO: 30696487 NR Description: 50S ribosomal protein L24, chloroplast precursor
  misc_feature (8)..(189): NCBI GI NO: 132821 NR Description: 50S RIBOSOMAL PROTEIN L24, CHLOROPLAST PRECURSOR
  misc_feature (59)..(174): NCBI GI NO: 23042779 NR Description: hypothetical protein
  misc_feature (63)..(174): NCBI GI NO: 22297636 NR Description: 50S ribosomal protein L24
  misc_feature (63)..(174): NCBI GI NO: 23124117 NR Description: hypothetical protein [Nostoc punctiforme]
MASLQGAMASLSISALGAATASSSSFWGNRLATYSAPQPGVRFMVKICPIEMRLKRWERKKCKPNSLPVLHKMHVRIGDTVQVIAGREKGKVGEVTRLFKHNSTVIVKDLNLKSKHKKGTDDEPGEIVMIEGPIHSSNVMLYSKEKSVVSRVGHKFLEDGTKVRYLVKTGEVIDSVEKWVKVFKEGNSE

SEQ ID NO: 25490 - protein, 182 aa, Zea mays subsp. mays
  peptide (1)..(182): Ceres Seq. ID no. 12342772
  misc_feature (68)..(101): Pfam Name: Pfam Description:  KOW motif
  misc_feature (1)..(182): NCBI GI NO: 30696483 NR Description: 50S ribosomal protein L24, chloroplast precursor
  misc_feature (1)..(182): NCBI GI NO: 1694974 NR Description: plastid ribosomal protein [Arabidopsis thaliana]
  misc_feature (1)..(182): NCBI GI NO: 132819 NR Description: 50S RIBOSOMAL PROTEIN L24, CHLOROPLAST PRECURSOR
  misc_feature (1)..(178): NCBI GI NO: 400989 NR Description: 50S RIBOSOMAL PROTEIN L24, CHLOROPLAST PRECURSOR
  misc_feature (1)..(98): NCBI GI NO: 30696487 NR Description: 50S ribosomal protein L24, chloroplast precursor
  misc_feature (117)..(182): NCBI GI NO: 30696487 NR Description: 50S ribosomal protein L24, chloroplast precursor
  misc_feature (1)..(182): NCBI GI NO: 132821 NR Description: 50S RIBOSOMAL PROTEIN L24, CHLOROPLAST PRECURSOR
  misc_feature (52)..(167): NCBI GI NO: 23042779 NR Description: hypothetical protein
  misc_feature (56)..(167): NCBI GI NO: 22297636 NR Description: 50S ribosomal protein L24
  misc_feature (56)..(167): NCBI GI NO: 23124117 NR Description: hypothetical protein [Nostoc punctiforme]
MASLSISALGAATASSSSFWGNRLATYSAPQPGVRFMVKICPIEMRLKRWERKKCKPNSLPVLHKMHVRIGDTVQVIAGREKGKVGEVTRLFKHNSTVIVKDLNLKSKHKKGTDDEPGEIVMIEGPIHSSNVMLYSKEKSVVSRVGHKFLEDGTKVRYLVKTGEVIDSVEKWVKVFKEGNSE

SEQ ID NO: 25491 - DNA, 674 bp, Zea mays subsp. mays
  misc_feature (1)..(674): Ceres Seq. ID no. 12353693
gatttcgtgtccctgcagccacggccaccgcccaatctccacttctttatcttctccgaggtgagagagcccaggcgatccaattccaccctcgttctcaggcactgtcacacagacacagctgacctgccactgccaggaaagtaggtcgaggatgccccgcagcggcttctcggggtccttcaggtcgcccaagatcgacgtcgtcatcgacatgggaaaccccttcctcaaccgcaccgtcgacggcttcctcaagatcggcgccgtcggcgcctgcaaggtggctgccgaggagaccttcgagtgcctccacaggggggatgtttcgaagcacaaggttgagcatgccctgaggaagatgtgcaaggagggcgcatattggggcactgttgctggagtttatgtgggcatggtgtacggcgtggaaagggtccgtggccgcagtgactggaagaacgcgatgatcgggggcgccttgtccggcgccctgatctccggcgccagcaacagcgacagaggcaaggtcgtcaaggacgccatcaccgccggcgcggtcgccacagccgtcgagttcatcaactgcattacctagccgagcaaggagcaactgcatttgcagtgccattgtcgtgcaaaaatatgaataaagtacttcgtcatgtccagttcat

SEQ ID NO: 25492 - protein, 146 aa, Zea mays subsp. mays
  peptide (1)..(146): Ceres Seq. ID no. 12353694
  misc_feature (19)..(146): Pfam Name: Pfam Description:  Tim17/Tim22/Tim23 family
  misc_feature (1)..(146): NCBI GI NO: 3758827 NR Description: amino acid selective channel protein
  misc_feature (1)..(146): NCBI GI NO: 7488792 NR Description: core protein - garden pea
  misc_feature (1)..(143): NCBI GI NO: 21536521 NR Description: putative membrane channel protein
  misc_feature (1)..(143): NCBI GI NO: 15226998 NR Description: putative membrane channel protein
  misc_feature (101)..(146): NCBI GI NO: 34906056 NR Description: P0698H10.23
  misc_feature (1)..(41): NCBI GI NO: 34906056 NR Description: P0698H10.23
  misc_feature (55)..(145): NCBI GI NO: 16555405 NR Description: stress-inducible membrane pore protein
  misc_feature (18)..(50): NCBI GI NO: 16555405 NR Description: stress-inducible membrane pore protein
  misc_feature (55)..(145): NCBI GI NO: 30683558 NR Description: pore protein homolog [Arabidopsis thaliana]
  misc_feature (18)..(50): NCBI GI NO: 30683558 NR Description: pore protein homolog [Arabidopsis thaliana]
MPRSGFSGSFRSPKIDVVIDMGNPFLNRTVDGFLKIGAVGACKVAAEETFECLHRGDVSKHKVEHALRKMCKEGAYWGTVAGVYVGMVYGVERVRGRSDWKNAMIGGALSGALISGASNSDRGKVVKDAITAGAVATAVEFINCIT

SEQ ID NO: 25493 - protein, 126 aa, Zea mays subsp. mays
  peptide (1)..(126): Ceres Seq. ID no. 12353695
  misc_feature (1)..(126): Pfam Name: Pfam Description:  Tim17/Tim22/Tim23 family
  misc_feature (1)..(126): NCBI GI NO: 3758827 NR Description: amino acid selective channel protein
  misc_feature (1)..(126): NCBI GI NO: 7488792 NR Description: core protein - garden pea
  misc_feature (1)..(123): NCBI GI NO: 21536521 NR Description: putative membrane channel protein
  misc_feature (1)..(123): NCBI GI NO: 15226998 NR Description: putative membrane channel protein
  misc_feature (81)..(126): NCBI GI NO: 34906056 NR Description: P0698H10.23
  misc_feature (1)..(21): NCBI GI NO: 34906056 NR Description: P0698H10.23
  misc_feature (35)..(125): NCBI GI NO: 16555405 NR Description: stress-inducible membrane pore protein
  misc_feature (1)..(30): NCBI GI NO: 16555405 NR Description: stress-inducible membrane pore protein
  misc_feature (35)..(125): NCBI GI NO: 30683558 NR Description: pore protein homolog [Arabidopsis thaliana]
  misc_feature (1)..(30): NCBI GI NO: 30683558 NR Description: pore protein homolog [Arabidopsis thaliana]
MGNPFLNRTVDGFLKIGAVGACKVAAEETFECLHRGDVSKHKVEHALRKMCKEGAYWGTVAGVYVGMVYGVERVRGRSDWKNAMIGGALSGALISGASNSDRGKVVKDAITAGAVATAVEFINCIT

SEQ ID NO: 25494 - protein, 77 aa, Zea mays subsp. mays
  peptide (1)..(77): Ceres Seq. ID no. 12353696
  misc_feature (1)..(77): Pfam Name: Pfam Description:  Tim17/Tim22/Tim23 family
  misc_feature (1)..(77): NCBI GI NO: 3758827 NR Description: amino acid selective channel protein
  misc_feature (1)..(77): NCBI GI NO: 7488792 NR Description: core protein - garden pea
  misc_feature (1)..(74): NCBI GI NO: 21536521 NR Description: putative membrane channel protein
  misc_feature (1)..(74): NCBI GI NO: 15226998 NR Description: putative membrane channel protein
  misc_feature (32)..(77): NCBI GI NO: 34906056 NR Description: P0698H10.23
  misc_feature (1)..(76): NCBI GI NO: 16555405 NR Description: stress-inducible membrane pore protein
  misc_feature (1)..(76): NCBI GI NO: 30683558 NR Description: pore protein homolog [Arabidopsis thaliana]
  misc_feature (1)..(76): NCBI GI NO: 34905526 NR Description: B1146F03.20
  misc_feature (1)..(76): NCBI GI NO: 7485023 NR Description: hypothetical protein - Arabidopsis thaliana
  misc_feature (1)..(76): NCBI GI NO: 18414605 NR Description: pore protein homolog; protein id: At4g16160
MCKEGAYWGTVAGVYVGMVYGVERVRGRSDWKNAMIGGALSGALISGASNSDRGKVVKDAITAGAVATAVEFINCIT

SEQ ID NO: 25495 - DNA, 1029 bp, Zea mays subsp. mays
  misc_feature (1)..(1029): Ceres Seq. ID no. 13564872
  misc_feature (599)..(599): n is a, c, t, g, unknown, or other
  misc_feature (651)..(651): n is a, c, t, g, unknown, or other
ctcgcaccaccaccgtcactcaacacagcacaggcagctcgagagagagagagaaagatgtcgtggttcgggcaccaccaccacaaccagccggctcccccggcgtcgggccccaaccaggtgttcaagatcttctgccgcgccaacgagaactactgcctggccgtccgcgacggcgccgtcgtgctggccccggtcaaccccaaggacgaccaccagcactggtacaaggacatgcgcttcagcacccgggtcaaggacgaggaaggcatgccggcgttcgcgctcgtcaacaaggccacggggctcgccatcaagcactccctcggccagtcccacccggtcaagctcgcgcctttcagcccggaccaggaggacgcgtcggtgctgtggacggagagcaaggacgtgggcaagggcttccgctgcatccgcatggtcaacaacacccgcctcaacttcgacgccttccacggcgacaaggaccacggcggcgtgcacgacggcaccaccgtggtgctgtgggagtgggccaagggcgacaaccagagctggaagatcctgccctggggcgacgaggcctacgccgggggcggcancagcgccgccaacgcgccccgcttcggcggcggcgagcccaccgtccgcatntactgcaaggccgacgaagggttcagcgccacggtccgcaacggcgccgtgtgcctcgcgcccaccaacccgcgcgacgagtaccagcactggatcaaggacatgcgccacatcaacagcgtcaaggacgaggaagggtacccggccttcgcgctcgtcaacagggtcaccggcgaggccatcaagcactccctgtgtgtttgtgtttagttccagtcgtttgtgaggaagtcagttatgtttgagtgagaggggtacttcgctcttcggttaactctgtacttgtcatgaggagagttttcatacccggagtgtagaactctgtactgtactcggatccttcctttttcatccaagtgggttttattttatcaaccg

SEQ ID NO: 25496 - protein, 297 aa, Zea mays subsp. mays
  peptide (1)..(297): Ceres Seq. ID no. 13564873
  misc_feature (23)..(265): Pfam Name: Pfam Description:  High molecular weight glutenin subunit
  misc_feature (199)..(199): Xaa is any aa, unknown or other
  misc_feature (217)..(217): Xaa is any aa, unknown or other
RTTTVTQHSTGSSREREKDVVVRAPPPQPAGSPGVGPQPGVQDLLPRQRELLPGRPRRRRRAGPGQPQGRPPALVQGHALQHPGQGRGRHAGVRARQQGHGARHQALPRPVPPGQARAFQPGPGGRVGAVDGEQGRGQGLPLHPHGQQHPPQLRRLPRRQGPRRRARRHHRGAVGVGQGRQPELEDPALGRRGLRRGRXQRRQRAPLRRRRAHRPHXLQGRRRVQRHGPQRRRVPRAHQPARRVPALDQGHAPHQQRQGRGRVPGLRARQQGHRRGHQALPVCLCLVPVVCEEVSYV

SEQ ID NO: 25497 - protein, 291 aa, Zea mays subsp. mays
  peptide (1)..(291): Ceres Seq. ID no. 13564874
  misc_feature (23)..(280): Pfam Name: Pfam Description:  Equine herpesvirus glycoprotein gp2
  misc_feature (120)..(282): NCBI GI NO: 34394516 NR Description: putative r40c1 protein
  misc_feature (25)..(282): NCBI GI NO: 28574039 NR Description: Salivary gland secretion 1 CG3047-PA
  misc_feature (34)..(228): NCBI GI NO: 34394516 NR Description: putative r40c1 protein
  misc_feature (25)..(282): NCBI GI NO: 28574039 NR Description: Salivary gland secretion 1 CG3047-PA
  misc_feature (25)..(280): NCBI GI NO: 28574039 NR Description: Salivary gland secretion 1 CG3047-PA
  misc_feature (23)..(291): NCBI GI NO: 13592175 NR Description: ppg3 [Leishmania major]
  misc_feature (25)..(280): NCBI GI NO: 28574039 NR Description: Salivary gland secretion 1 CG3047-PA
  misc_feature (25)..(280): NCBI GI NO: 28574039 NR Description: Salivary gland secretion 1 CG3047-PA
  misc_feature (23)..(280): NCBI GI NO: 28574039 NR Description: Salivary gland secretion 1 CG3047-PA
  misc_feature (26)..(280): NCBI GI NO: 28574039 NR Description: Salivary gland secretion 1 CG3047-PA
  misc_feature (200)..(200): Xaa is any aa, unknown or other
  misc_feature (217)..(217): Xaa is any aa, unknown or other
SHHHRHSTQHRQLERERERCRGSGTTTTTSRLPRRRAPTRCSRSSAAPTRTTAWPSATAPSCWPRSTPRTTTSTGTRTCASAPGSRTRKACRRSRSSTRPRGSPSSTPSASPTRSSSRLSARTRRTRRCCGRRARTWARASAASAWSTTPASTSTPSTATRTTAACTTAPPWCCGSGPRATTRAGRSCPGATRPTPGAAXAPPTRPASAAASPPSAXTARPTKGSAPRSATAPCASRPPTRATSTSTGSRTCATSTASRTRKGTRPSRSSTGSPARPSSTPCVFVFSSSRL

SEQ ID NO: 25498 - protein, 286 aa, Zea mays subsp. mays
  peptide (1)..(286): Ceres Seq. ID no. 13564875
  misc_feature (142)..(190): Pfam Name: Pfam Description:  QXW lectin repeat
  misc_feature (20)..(281): NCBI GI NO: 7489571 NR Description: r40c1 protein - rice
  misc_feature (20)..(281): NCBI GI NO: 34902150 NR Description: Putative r40c1 protein - rice
  misc_feature (20)..(281): NCBI GI NO: 34394517 NR Description: r40g2 protein
  misc_feature (20)..(281): NCBI GI NO: 7489572 NR Description: r40g2 protein - rice (fragment)
  misc_feature (79)..(281): NCBI GI NO: 34394518 NR Description: putative r40c2 protein
  misc_feature (20)..(190): NCBI GI NO: 34394517 NR Description: r40g2 protein
  misc_feature (20)..(190): NCBI GI NO: 34394518 NR Description: putative r40c2 protein
  misc_feature (23)..(115): NCBI GI NO: 34394516 NR Description: putative r40c1 protein
  misc_feature (38)..(190): NCBI GI NO: 7489573 NR Description: r40g3 protein - rice
  misc_feature (20)..(190): NCBI GI NO: 7489572 NR Description: r40g2 protein - rice (fragment)
  misc_feature (200)..(200): Xaa is any aa, unknown or other
  misc_feature (217)..(217): Xaa is any aa, unknown or other
LAPPPSLNTAQAARERERKMSWFGHHHHNQPAPPASGPNQVFKIFCRANENYCLAVRDGAVVLAPVNPKDDHQHWYKDMRFSTRVKDEEGMPAFALVNKATGLAIKHSLGQSHPVKLAPFSPDQEDASVLWTESKDVGKGFRCIRMVNNTRLNFDAFHGDKDHGGVHDGTTVVLWEWAKGDNQSWKILPWGDEAYAGGGXSAANAPRFGGGEPTVRXYCKADEGFSATVRNGAVCLAPTNPRDEYQHWIKDMRHINSVKDEEGYPAFALVNRVTGEAIKHSLCVCV

SEQ ID NO: 25499 - protein, 267 aa, Zea mays subsp. mays
  peptide (1)..(267): Ceres Seq. ID no. 13564876
  misc_feature (123)..(171): Pfam Name: Pfam Description:  QXW lectin repeat
  misc_feature (1)..(262): NCBI GI NO: 7489571 NR Description: r40c1 protein - rice
  misc_feature (1)..(262): NCBI GI NO: 34902150 NR Description: Putative r40c1 protein - rice
  misc_feature (1)..(262): NCBI GI NO: 34394517 NR Description: r40g2 protein
  misc_feature (1)..(262): NCBI GI NO: 7489572 NR Description: r40g2 protein - rice (fragment)
  misc_feature (60)..(262): NCBI GI NO: 34394518 NR Description: putative r40c2 protein
  misc_feature (1)..(171): NCBI GI NO: 34394517 NR Description: r40g2 protein
  misc_feature (1)..(171): NCBI GI NO: 34394518 NR Description: putative r40c2 protein
  misc_feature (4)..(96): NCBI GI NO: 34394516 NR Description: putative r40c1 protein
  misc_feature (19)..(171): NCBI GI NO: 7489573 NR Description: r40g3 protein - rice
  misc_feature (1)..(171): NCBI GI NO: 7489572 NR Description: r40g2 protein - rice (fragment)
  misc_feature (181)..(181): Xaa is any aa, unknown or other
  misc_feature (198)..(198): Xaa is any aa, unknown or other
MSWFGHHHHNQPAPPASGPNQVFKIFCRANENYCLAVRDGAVVLAPVNPKDDHQHWYKDMRFSTRVKDEEGMPAFALVNKATGLAIKHSLGQSHPVKLAPFSPDQEDASVLWTESKDVGKGFRCIRMVNNTRLNFDAFHGDKDHGGVHDGTTVVLWEWAKGDNQSWKILPWGDEAYAGGGXSAANAPRFGGGEPTVRXYCKADEGFSATVRNGAVCLAPTNPRDEYQHWIKDMRHINSVKDEEGYPAFALVNRVTGEAIKHSLCVCV

SEQ ID NO: 25500 - DNA, 901 bp, Zea mays subsp. mays
  misc_feature (1)..(901): Ceres Seq. ID no. 12342757
aaccaacccactcatcactcctcactcactcactcaaaacgaaagccagctcagctcagctctgctcagctcatctgctcacacctcacacccacaggccggccgccacagcaccgcggatagcagagcggcagctaggtcggtcgtcgtcgtcgtcgtcagccatgagcaaggacaagcaccacaagcacgagcaccacctgcggcgttgctgcgggtgcatggcgtcgtgcctcctggcgctggtcctcatcgtggccttcgtctcgctggtggtgtacctggcgctgcgcccctcgaagccgtccttctacctgcaggacctgcagctgcgcaggcccatctcgctgggcgacccgtcgctgacggcgtcggcgcaggtgacgctggcctcccgcaaccccaacgaccgcgtgggcatcttctacaagcgcctggacgtgttcgtcacctaccgcgacgaggccgtgacggtgcccgtgtctctgccgccgcagtaccagggccaccgcgacttcaccgtctggtcccccgtgctgtcggccgagtccgtgcccgtggccgcctacgtcgccgacgccatgaagcaggacgtcgccgcgggcttcgtcgcgctgcaggtcaaggtggacggccgcgtcaagtggaaggtcggcagctgggtctccggcagctaccacctcttcgtcagctgccccgccgtgctctccgcgggctaccccggcgtcaacaacaccgtgtcgtcgctcaagttcgcccagcccacaggatgcagcgtcgaggtgtgagtttgtgaccaaacaagtgccctgccctgccccctacgtattgttgcgtgctactcaaatttcatcttttgggtgcgacggccgccgttaactgggctcttttaattttgtcc

SEQ ID NO: 25501 - protein, 264 aa, Zea mays subsp. mays
  peptide (1)..(264): Ceres Seq. ID no. 12342758
TNPLITPHSLTQNESQLSSALLSSSAHTSHPQAGRHSTADSRAAARSVVVVVVSHEQGQAPQARAPPAALLRVHGVVPPGAGPHRGLRLAGGVPGAAPLEAVLLPAGPAAAQAHLAGRPVADGVGAGDAGLPQPQRPRGHLLQAPGRVRHLPRRGRDGARVSAAAVPGPPRLHRLVPRAVGRVRARGRLRRRRHEAGRRRGLRRAAGQGGRPRQVEGRQLGLRQLPPLRQLPRRALRGLPRRQQHRVVAQVRPAHRMQRRGVSL

SEQ ID NO: 25502 - protein, 261 aa, Zea mays subsp. mays
  peptide (1)..(261): Ceres Seq. ID no. 12342759
  misc_feature (55)..(261): NCBI GI NO: 38344036 NR Description: OJ991214_12.17
  misc_feature (58)..(261): NCBI GI NO: 22326984 NR Description: similar to hairpin-induced protein, putative
  misc_feature (58)..(261): NCBI GI NO: 15229906 NR Description: hairpin-induced protein, putative
  misc_feature (62)..(261): NCBI GI NO: 32488715 NR Description: OSJNBa0088H09.16
  misc_feature (63)..(261): NCBI GI NO: 18399308 NR Description: VAMP protein SEC22; protein id: At3g11660
  misc_feature (63)..(261): NCBI GI NO: 28392929 NR Description: putative VAMP protein SEC22 [Arabidopsis thaliana]
  misc_feature (56)..(261): NCBI GI NO: 15240001 NR Description: hairpin-induced protein, putative
  misc_feature (68)..(261): NCBI GI NO: 38637038 NR Description: harpin-induced protein 1 family (HIN1)-like
  misc_feature (55)..(261): NCBI GI NO: 15231227 NR Description: hairpin-induced protein, putative
  misc_feature (69)..(261): NCBI GI NO: 15227538 NR Description: hairpin-induced protein, putative
PTHSSLLTHSLKTKASSAQLCSAHLLTPHTHRPAATAPRIAERQLGRSSSSSSAMSKDKHHKHEHHLRRCCGCMASCLLALVLIVAFVSLVVYLALRPSKPSFYLQDLQLRRPISLGDPSLTASAQVTLASRNPNDRVGIFYKRLDVFVTYRDEAVTVPVSLPPQYQGHRDFTVWSPVLSAESVPVAAYVADAMKQDVAAGFVALQVKVDGRVKWKVGSWVSGSYHLFVSCPAVLSAGYPGVNNTVSSLKFAQPTGCSVEV

SEQ ID NO: 25503 - protein, 207 aa, Zea mays subsp. mays
  peptide (1)..(207): Ceres Seq. ID no. 12342760
  misc_feature (1)..(207): NCBI GI NO: 38344036 NR Description: OJ991214_12.17
  misc_feature (4)..(207): NCBI GI NO: 22326984 NR Description: similar to hairpin-induced protein, putative
  misc_feature (4)..(207): NCBI GI NO: 15229906 NR Description: hairpin-induced protein, putative
  misc_feature (8)..(207): NCBI GI NO: 32488715 NR Description: OSJNBa0088H09.16
  misc_feature (9)..(207): NCBI GI NO: 18399308 NR Description: VAMP protein SEC22; protein id: At3g11660
  misc_feature (9)..(207): NCBI GI NO: 28392929 NR Description: putative VAMP protein SEC22 [Arabidopsis thaliana]
  misc_feature (2)..(207): NCBI GI NO: 15240001 NR Description: hairpin-induced protein, putative
  misc_feature (14)..(207): NCBI GI NO: 38637038 NR Description: harpin-induced protein 1 family (HIN1)-like
  misc_feature (1)..(207): NCBI GI NO: 15231227 NR Description: hairpin-induced protein, putative
  misc_feature (15)..(207): NCBI GI NO: 15227538 NR Description: hairpin-induced protein, putative
MSKDKHHKHEHHLRRCCGCMASCLLALVLIVAFVSLVVYLALRPSKPSFYLQDLQLRRPISLGDPSLTASAQVTLASRNPNDRVGIFYKRLDVFVTYRDEAVTVPVSLPPQYQGHRDFTVWSPVLSAESVPVAAYVADAMKQDVAAGFVALQVKVDGRVKWKVGSWVSGSYHLFVSCPAVLSAGYPGVNNTVSSLKFAQPTGCSVEV

SEQ ID NO: 25504 - DNA, 1097 bp, Zea mays subsp. mays
  misc_feature (1)..(1097): Ceres Seq. ID no. 13494437
gcacgagaccattacctagaacatcctaatcgaaaaacagcgagtaccgagtaggagcaaccgcttgcgtcagacgcacactgacggagagtgatcactgatttctggtcatggcaaccgtaactgaggaagttgctccggtcgtcaccgtctccgaggagccggcgccggaagcggcgaaggaggtggtggagaagccggaggaggggaagaagcccgacgaggagggtgacgagaggaagaaggccgaccccgccgccgagaaggagaagaaggcgaggaagccgcggagcaggaagcccaagtccgccgggctgcaccacccgccctatttcgagatgatcaaggaggcgatcctgtcgcaggacggcgggaaggtcggggcgagcccgtacgcgatcgccaagcacatgggggagaagcaccgggacgtgctcccgcccaattaccgcaaggtgctggcagtgcagctgcgcggcttcgccgccaagggccgcctcgtcaaggtcaaggcttccttcaagctcgccgccgccgaggagaggaagccctccgcggccgcgaaggcgaagaagaaggcgtcggcgggaatggccaagcgcaagagggccgccgcgccggccaagaagaagccggcggccgctgcctcggcgccgtcgagggaggcacgtaaggtgcgcgcgaagcgagcgaggaaggtggccccggcgcccgcgcagcccaagcccaagccagcccgcgccgccgcttccggtgccggcaagaaggtcaacaaggccagcgcctgattagcggcggccgtcctggtccccccgcgcgcgcctccgtgtattatactagccggtagtagcagtaggagttgcaagtactagcagcgtggtagtcgtgatgatgttgtggtcgtcgtctccgccggcccgatcgatcgggcgctctgttccgccgtgtggcagagttttgtaaataactagtctggtgtgatgcgctcatggcaataaagcgcgcgcttctagcttccttgatgaaacatccatgatccattatcagtgcagtcttgtggttatcgtgttggttagttcgatcactggaactggctc

SEQ ID NO: 25505 - protein, 225 aa, Zea mays subsp. mays
  peptide (1)..(225): Ceres Seq. ID no. 13494438
  misc_feature (70)..(141): Pfam Name: Pfam Description:  linker histone H1 and H5 family
  misc_feature (1)..(225): NCBI GI NO: 6006363 NR Description: ESTs AU078183
  misc_feature (26)..(220): NCBI GI NO: 7439658 NR Description: histone H1, stress-inducible - tomato
  misc_feature (27)..(220): NCBI GI NO: 23506611 NR Description: histone H1D [Nicotiana tabacum]
  misc_feature (22)..(220): NCBI GI NO: 7595978 NR Description: histone H1 variant [Lycopersicon chilense]
  misc_feature (21)..(220): NCBI GI NO: 27529850 NR Description: stress-inducible H1 histone-like protein
  misc_feature (27)..(220): NCBI GI NO: 729668 NR Description: Histone H1
  misc_feature (27)..(220): NCBI GI NO: 5726575 NR Description: histone H1C [Nicotiana tabacum]
  misc_feature (77)..(215): NCBI GI NO: 7489483 NR Description: histone H1 homolog - rice
  misc_feature (1)..(225): NCBI GI NO: 2623960 NR Description: histone H1 [Apium graveolens]
  misc_feature (15)..(225): NCBI GI NO: 13540391 NR Description: histone H1 [Pisum sativum]
MATVTEEVAPVVTVSEEPAPEAAKEVVEKPEEGKKPDEEGDERKKADPAAEKEKKARKPRSRKPKSAGLHHPPYFEMIKEAILSQDGGKVGASPYAIAKHMGEKHRDVLPPNYRKVLAVQLRGFAAKGRLVKVKASFKLAAAEERKPSAAAKAKKKASAGMAKRKRAAAPAKKKPAAAASAPSREARKVRAKRARKVAPAPAQPKPKPARAAASGAGKKVNKASA

SEQ ID NO: 25506 - protein, 149 aa, Zea mays subsp. mays
  peptide (1)..(149): Ceres Seq. ID no. 13494439
  misc_feature (1)..(65): Pfam Name: Pfam Description:  linker histone H1 and H5 family
  misc_feature (1)..(149): NCBI GI NO: 6006363 NR Description: ESTs AU078183
  misc_feature (1)..(144): NCBI GI NO: 7439658 NR Description: histone H1, stress-inducible - tomato
  misc_feature (1)..(144): NCBI GI NO: 23506611 NR Description: histone H1D [Nicotiana tabacum]
  misc_feature (1)..(144): NCBI GI NO: 7595978 NR Description: histone H1 variant [Lycopersicon chilense]
  misc_feature (1)..(144): NCBI GI NO: 27529850 NR Description: stress-inducible H1 histone-like protein
  misc_feature (1)..(144): NCBI GI NO: 729668 NR Description: Histone H1
  misc_feature (1)..(144): NCBI GI NO: 5726575 NR Description: histone H1C [Nicotiana tabacum]
  misc_feature (1)..(139): NCBI GI NO: 7489483 NR Description: histone H1 homolog - rice
  misc_feature (1)..(149): NCBI GI NO: 2623960 NR Description: histone H1 [Apium graveolens]
  misc_feature (1)..(149): NCBI GI NO: 13540391 NR Description: histone H1 [Pisum sativum]
MIKEAILSQDGGKVGASPYAIAKHMGEKHRDVLPPNYRKVLAVQLRGFAAKGRLVKVKASFKLAAAEERKPSAAAKAKKKASAGMAKRKRAAAPAKKKPAAAASAPSREARKVRAKRARKVAPAPAQPKPKPARAAASGAGKKVNKASA

SEQ ID NO: 25507 - protein, 125 aa, Zea mays subsp. mays
  peptide (1)..(125): Ceres Seq. ID no. 13494440
  misc_feature (1)..(125): NCBI GI NO: 6006363 NR Description: ESTs AU078183
  misc_feature (1)..(120): NCBI GI NO: 7439658 NR Description: histone H1, stress-inducible - tomato
  misc_feature (1)..(120): NCBI GI NO: 23506611 NR Description: histone H1D [Nicotiana tabacum]
  misc_feature (1)..(120): NCBI GI NO: 7595978 NR Description: histone H1 variant [Lycopersicon chilense]
  misc_feature (1)..(120): NCBI GI NO: 27529850 NR Description: stress-inducible H1 histone-like protein
  misc_feature (1)..(120): NCBI GI NO: 729668 NR Description: Histone H1
  misc_feature (1)..(120): NCBI GI NO: 5726575 NR Description: histone H1C [Nicotiana tabacum]
  misc_feature (1)..(115): NCBI GI NO: 7489483 NR Description: histone H1 homolog - rice
  misc_feature (1)..(125): NCBI GI NO: 2623960 NR Description: histone H1 [Apium graveolens]
  misc_feature (1)..(125): NCBI GI NO: 13540391 NR Description: histone H1 [Pisum sativum]
MGEKHRDVLPPNYRKVLAVQLRGFAAKGRLVKVKASFKLAAAEERKPSAAAKAKKKASAGMAKRKRAAAPAKKKPAAAASAPSREARKVRAKRARKVAPAPAQPKPKPARAAASGAGKKVNKASA

SEQ ID NO: 25508 - DNA, 986 bp, Zea mays subsp. mays
  misc_feature (1)..(986): Ceres Seq. ID no. 12368544
acagaccacgccacgttcgcaattacagagatctagagagagagagagagagagggcagatctacgctagagcgacagagccacaactaaccgagagggacagtccagtatggtggtggcgctcgggcccggccggttctacggcagcggcctgccgaggccgcgcttcttcccgggcgaccgcgtggacccgccggcgtccgtcaccgacccgctgctcgagtgggcgcgcgaagcgcactggtccatgggcggcatcagcgtgaagcgcctccgcctgcagggccgcatcgagggctccgtcgacaagctccgccgccgcgcgcaccgcgatgccagggtcaaggccaaggccaaggcccgcgccgctggccacatgccggcttcgctcgccgcgcttgggtccgacgacgacgcctccagcggcgactccgaggacgagcaggaggtggcggcgcgggagcgggccctgaagcgtgagcttgtcgacgacgacgaggactccgacgggtccggcgagtcggaggaggacgagcccctcgcggccatcgtcaccgccgccaagaagaggcgcgcgaggaagctcagcgacgagttcgaccgcatcgccgcggagcagcagcagcagctggtgttggagagcaagcagaagccgggtgccgcgacgccggcgacgacgtcaacaaagaggaaggctaccgtgccgagggcttcgccaaagaggaaggcttctgtacccgctgctggggcgccggcgaggttgtcgccaaagaggaaggctgctgcaacagccgcggcgcccttgtcggcggctgggtcaaggaggacctcgccgaggaataagcactgagtggtggtcgccgtatgtgctgctctagttcctgatctgtttcttggcgatcgtggagtcctgaaaatgtattgtgtggttgggtgtctactgctggattgaaacgatgatgaaatggaatcgaattgatggttat

SEQ ID NO: 25509 - protein, 246 aa, Zea mays subsp. mays
  peptide (1)..(246): Ceres Seq. ID no. 12368545
  misc_feature (61)..(141): Pfam Name: Pfam Description:  60s Acidic ribosomal protein
  misc_feature (1)..(246): NCBI GI NO: 34897956 NR Description: contains ESTsAU058449
  misc_feature (3)..(128): NCBI GI NO: 7486199 NR Description: hypothetical protein F26K10
  misc_feature (3)..(128): NCBI GI NO: 18417168 NR Description: expressed protein; protein id: At4g28310
MVVALGPGRFYGSGLPRPRFFPGDRVDPPASVTDPLLEWAREAHWSMGGISVKRLRLQGRIEGSVDKLRRRAHRDARVKAKAKARAAGHMPASLAALGSDDDASSGDSEDEQEVAARERALKRELVDDDEDSDGSGESEEDEPLAAIVTAAKKRRARKLSDEFDRIAAEQQQQLVLESKQKPGAATPATTSTKRKATVPRASPKRKASVPAAGAPARLSPKRKAAATAAAPLSAAGSRRTSPRNKH

SEQ ID NO: 25510 - protein, 200 aa, Zea mays subsp. mays
  peptide (1)..(200): Ceres Seq. ID no. 12368546
  misc_feature (15)..(95): Pfam Name: Pfam Description:  60s Acidic ribosomal protein
  misc_feature (1)..(200): NCBI GI NO: 34897956 NR Description: contains ESTsAU058449
  misc_feature (1)..(82): NCBI GI NO: 7486199 NR Description: hypothetical protein F26K10
  misc_feature (1)..(82): NCBI GI NO: 18417168 NR Description: expressed protein; protein id: At4g28310
MGGISVKRLRLQGRIEGSVDKLRRRAHRDARVKAKAKARAAGHMPASLAALGSDDDASSGDSEDEQEVAARERALKRELVDDDEDSDGSGESEEDEPLAAIVTAAKKRRARKLSDEFDRIAAEQQQQLVLESKQKPGAATPATTSTKRKATVPRASPKRKASVPAAGAPARLSPKRKAAATAAAPLSAAGSRRTSPRNKH

SEQ ID NO: 25511 - protein, 157 aa, Zea mays subsp. mays
  peptide (1)..(157): Ceres Seq. ID no. 12368547
  misc_feature (1)..(52): Pfam Name: Pfam Description:  60s Acidic ribosomal protein
  misc_feature (1)..(157): NCBI GI NO: 34897956 NR Description: contains ESTsAU058449
  misc_feature (1)..(39): NCBI GI NO: 7486199 NR Description: hypothetical protein F26K10
  misc_feature (1)..(39): NCBI GI NO: 18417168 NR Description: expressed protein; protein id: At4g28310
MPASLAALGSDDDASSGDSEDEQEVAARERALKRELVDDDEDSDGSGESEEDEPLAAIVTAAKKRRARKLSDEFDRIAAEQQQQLVLESKQKPGAATPATTSTKRKATVPRASPKRKASVPAAGAPARLSPKRKAAATAAAPLSAAGSRRTSPRNKH

SEQ ID NO: 25512 - DNA, 1240 bp, Zea mays subsp. mays
  misc_feature (1)..(1240): Ceres Seq. ID no. 12403575
tggatggttggaacggacaaccgtggaggatatggacattgctgttagggcacatctccatggctggaagtttatattcctgaatgacgttgagtgccagtgcgaattgcccgagtcttatgaggcttacaggaagcagcagcatcggtggcattcgggtccaatgcagctattcaggctttgtttaccggacatcatcaaatgcaagattgcattttggaagaaggcgaacctgatattccttttcttcctgctccggaagctcatactgcctttctactccttcacgctgttctgcatcatcctcccgatgacgatgttcgtgccggaggccgagctccccgactgggtggtgtgctacgtcccggccctgatgtccctgctgaacatcctgccgtcccccaagtcgttccccttcatcatcccgtacctgctcttcgagaacaccatgtccgtgaccaagttcaacgcgatgatctccgggctgttccagctggggagcgcgtacgagtgggtggtaccaagaagtcgggccgctcgtcggagggcgacctcatcgcgctggccccgcccaaggagcccgtgaagcttcacgcgacgaggacgggctccgcgccgaacctcgacgccgtcgccaaggaggagcacctggcggcggcatcgaggaaggacgctgccgccgccgccgccaccgtgaagaagaagaaggagaagcacaaccggatatacaagaaggagctggcgctgtcgatgctgctcctgaccgcggccgcccggagcctgctgtcgaagcagggcatacacttctacttcctcctgttccagggcgtgtccttcttgctagtaggccttgacctcataggcgagcaggtcgagtgaaatgtgtaaaacaggaaattgataggtgtggggaaaaaaaaacggtgagtcaccatggatggaagtgctgggagaggagggggatgtgttatttctggctggctgccatggcacggcggcatggcatggcatggcagcagctcttgggcgcttcttggctgagattcggaacatgcgttgtgcggttgagccttcccggatctgtcctggctgcacggcatggtatcccacacgtgaggagagcaacctcctccgcctgtacggaggtgtagatacagttttctcttgttttttcatgtgtgtgggcctgttcgcctgtacgaatggtgaaggtaaacagagagtcgccgctggattaggg

SEQ ID NO: 25513 - protein, 225 aa, Zea mays subsp. mays
  peptide (1)..(225): Ceres Seq. ID no. 12403576
  misc_feature (127)..(225): NCBI GI NO: 16974749 NR Description: CSLC9 [Oryza sativa]
  misc_feature (127)..(225): NCBI GI NO: 17385963 NR Description: CSLC9 [Oryza sativa]
  misc_feature (107)..(225): NCBI GI NO: 28201308 NR Description: putative CSLC9(cellulose synthase-like)
  misc_feature (107)..(225): NCBI GI NO: 15235900 NR Description: putative glucosyltransferase; protein id:At4g07960
  misc_feature (134)..(225): NCBI GI NO: 34909854 NR Description: putative glucosyltransferase
  misc_feature (107)..(224): NCBI GI NO: 34419220 NR Description: TPA: cellulose synthase-like C3
  misc_feature (107)..(224): NCBI GI NO: 18405677 NR Description: expressed protein; protein id: At3g28180
  misc_feature (107)..(224): NCBI GI NO: 15236004 NR Description: putative protein; protein id: At4g31590.1
  misc_feature (107)..(225): NCBI GI NO: 17385965 NR Description: CSLC7 [Oryza sativa]
  misc_feature (107)..(225): NCBI GI NO: 17385981 NR Description: CSLC2 [Oryza sativa]
MQDCILEEGEPDIPFLPAPEAHTAFLLLHAVLHHPPDDDVRAGGRAPRLGGVLRPGPDVPAEHPAVPQVVPLHHPVPALREHHVRDQVQRDDLRAVPAGERVRVGGTKKSGRSSEGDLIALAPPKEPVKLHATRTGSAPNLDAVAKEEHLAAASRKDAAAAAATVKKKKEKHNRIYKKELALSMLLLTAAARSLLSKQGIHFYFLLFQGVSFLLVGLDLIGEQVE

SEQ ID NO: 25514 - protein, 194 aa, Zea mays subsp. mays
  peptide (1)..(194): Ceres Seq. ID no. 12403577
  misc_feature (1)..(175): NCBI GI NO: 16974749 NR Description: CSLC9 [Oryza sativa]
  misc_feature (1)..(175): NCBI GI NO: 17385963 NR Description: CSLC9 [Oryza sativa]
  misc_feature (1)..(175): NCBI GI NO: 28201308 NR Description: putative CSLC9(cellulose synthase-like)
  misc_feature (1)..(175): NCBI GI NO: 15235900 NR Description: putative glucosyltransferase; protein id:At4g07960
  misc_feature (1)..(194): NCBI GI NO: 34909854 NR Description: putative glucosyltransferase
  misc_feature (1)..(185): NCBI GI NO: 34419220 NR Description: TPA: cellulose synthase-like C3
  misc_feature (1)..(175): NCBI GI NO: 18405677 NR Description: expressed protein; protein id: At3g28180
  misc_feature (1)..(180): NCBI GI NO: 15236004 NR Description: putative protein; protein id: At4g31590.1
  misc_feature (25)..(175): NCBI GI NO: 17385965 NR Description: CSLC7 [Oryza sativa]
  misc_feature (1)..(175): NCBI GI NO: 17385981 NR Description: CSLC2 [Oryza sativa]
GWLERTTVEDMDIAVRAHLHGWKFIFLNDVECQCELPESYEAYRKQQHRWHSGPMQLFRLCLPDIIKCKIAFWKKANLIFLFFLLRKLILPFYSFTLFCIILPMTMFVPEAELPDWVVCYVPALMSLLNILPSPKSFPFIIPYLLFENTMSVTKFNAMISGLFQLGSAYEWVVPRSRAARRRATSSRWPRPRSP

SEQ ID NO: 25515 - protein, 184 aa, Zea mays subsp. mays
  peptide (1)..(184): Ceres Seq. ID no. 12403578
  misc_feature (1)..(165): NCBI GI NO: 16974749 NR Description: CSLC9 [Oryza sativa]
  misc_feature (1)..(165): NCBI GI NO: 17385963 NR Description: CSLC9 [Oryza sativa]
  misc_feature (1)..(165): NCBI GI NO: 28201308 NR Description: putative CSLC9(cellulose synthase-like)
  misc_feature (1)..(165): NCBI GI NO: 15235900 NR Description: putative glucosyltransferase; protein id:At4g07960
  misc_feature (1)..(184): NCBI GI NO: 34909854 NR Description: putative glucosyltransferase
  misc_feature (1)..(175): NCBI GI NO: 34419220 NR Description: TPA: cellulose synthase-like C3
  misc_feature (1)..(165): NCBI GI NO: 18405677 NR Description: expressed protein; protein id: At3g28180
  misc_feature (1)..(170): NCBI GI NO: 15236004 NR Description: putative protein; protein id: At4g31590.1
  misc_feature (15)..(165): NCBI GI NO: 17385965 NR Description: CSLC7 [Oryza sativa]
  misc_feature (1)..(165): NCBI GI NO: 17385981 NR Description: CSLC2 [Oryza sativa]
MDIAVRAHLHGWKFIFLNDVECQCELPESYEAYRKQQHRWHSGPMQLFRLCLPDIIKCKIAFWKKANLIFLFFLLRKLILPFYSFTLFCIILPMTMFVPEAELPDWVVCYVPALMSLLNILPSPKSFPFIIPYLLFENTMSVTKFNAMISGLFQLGSAYEWVVPRSRAARRRATSSRWPRPRSP

SEQ ID NO: 25516 - DNA, 1146 bp, Zea mays subsp. mays
  misc_feature (1)..(1146): Ceres Seq. ID no. 12368495
gcacgagaccattacctagaacatcctaatcgaaaagaaacaaaaaacattcggggacgcgcctgcttgcttctttccccaaaccccaaaccgcaggtaggaagcaaaccgcacgccccgctccagaacggatcctcatctctcacgttgtcaccacagtctgaatccagaatccaactagtagctccataaaagcggcaatgatccagctgctgttcgtcgtgctggtggcggaggcgtccctgacggcggcgctgctcttcaagacgccgctgcggaagctcgccgtgctagtgatcgaccggctcaagcgcggccgccacgcgcccgtcgtcgtcaagacggtcgcgggcgtcatccttgccctgctcgcttcaacgctctacagcatgacacagatcgccggcagcacgagcgactccgactctggcggcgggcccacccccaccgaccaggtgctcttctcgcgtcacctcctggaggcgtgcctcatggggtactccttatttcttgctctagtgattgaccggctccaccaatacatcagagatttgcgccggtttaaaaaggacttagaggctgtacgtaagcataataaaatgttggaggaggcaaaacatggaaactcggaggaggcaaagaaataccaggaagagattgccactctgaacaaggagatgaagaaactgaagctacaagtccaagaaaagacagaagaggtccatgtttcagaggacaaggcacttgctatccaaaaacaatccgaaggcttgctgactgaatatgaccgcctgctggaggataatcagcatcttcggacacagctgctgtcaattgaccgcaggctttccaactcttcttgaacgaagagtctatttaggggatgctgaagaatttctgtggaagatcatgttaccacccaaagtgtatggcagctacctgcttcctcacttgttagtcttagcatcttcaattaactagctattgcattatattgttggcaaaactagtgcaagcattatatggtctagaactttggagtttctcttgtgtgtttcttgtaatgcctactttttatgtgtgcttatagtgattactgttttgaacagaattttatgattattgcagacgggcattcacatgttg

SEQ ID NO: 25517 - protein, 220 aa, Zea mays subsp. mays
  peptide (1)..(220): Ceres Seq. ID no. 12368496
  misc_feature (4)..(196): Pfam Name: Pfam Description:  B-cell receptor-associated protein 31-like
  misc_feature (1)..(212): NCBI GI NO: 9759015 NR Description: gene_id:K16E1.4~unknown protein
  misc_feature (1)..(212): NCBI GI NO: 18422225 NR Description: expressed protein; protein id: At5g42570
  misc_feature (1)..(212): NCBI GI NO: 21553655 NR Description: unknown [Arabidopsis thaliana]
  misc_feature (1)..(220): NCBI GI NO: 22655198 NR Description: unknown protein [Arabidopsis thaliana]
  misc_feature (1)..(209): NCBI GI NO: 34897474 NR Description: unknown protein
  misc_feature (1)..(210): NCBI GI NO: 15239667 NR Description: putative protein; protein id: At5g48660.1
  misc_feature (1)..(210): NCBI GI NO: 15231412 NR Description: unknown protein; protein id: At3g07190.1
  misc_feature (1)..(169): NCBI GI NO: 30682503 NR Description: expressed protein [Arabidopsis thaliana]
  misc_feature (1)..(130): NCBI GI NO: 18402620 NR Description: expressed protein; protein id: At3g20450
MIQLLFVVLVAEASLTAALLFKTPLRKLAVLVIDRLKRGRHAPVVVKTVAGVILALLASTLYSMTQIAGSTSDSDSGGGPTPTDQVLFSRHLLEACLMGYSLFLALVIDRLHQYIRDLRRFKKDLEAVRKHNKMLEEAKHGNSEEAKKYQEEIATLNKEMKKLKLQVQEKTEEVHVSEDKALAIQKQSEGLLTEYDRLLEDNQHLRTQLLSIDRRLSNSS

SEQ ID NO: 25518 - protein, 157 aa, Zea mays subsp. mays
  peptide (1)..(157): Ceres Seq. ID no. 12368497
  misc_feature (1)..(133): Pfam Name: Pfam Description:  B-cell receptor-associated protein 31-like
  misc_feature (1)..(149): NCBI GI NO: 9759015 NR Description: gene_id:K16E1.4~unknown protein
  misc_feature (1)..(149): NCBI GI NO: 18422225 NR Description: expressed protein; protein id: At5g42570
  misc_feature (1)..(149): NCBI GI NO: 21553655 NR Description: unknown [Arabidopsis thaliana]
  misc_feature (1)..(157): NCBI GI NO: 22655198 NR Description: unknown protein [Arabidopsis thaliana]
  misc_feature (1)..(146): NCBI GI NO: 34897474 NR Description: unknown protein
  misc_feature (1)..(147): NCBI GI NO: 15239667 NR Description: putative protein; protein id: At5g48660.1
  misc_feature (1)..(147): NCBI GI NO: 15231412 NR Description: unknown protein; protein id: At3g07190.1
  misc_feature (1)..(106): NCBI GI NO: 30682503 NR Description: expressed protein [Arabidopsis thaliana]
  misc_feature (1)..(67): NCBI GI NO: 18402620 NR Description: expressed protein; protein id: At3g20450
MTQIAGSTSDSDSGGGPTPTDQVLFSRHLLEACLMGYSLFLALVIDRLHQYIRDLRRFKKDLEAVRKHNKMLEEAKHGNSEEAKKYQEEIATLNKEMKKLKLQVQEKTEEVHVSEDKALAIQKQSEGLLTEYDRLLEDNQHLRTQLLSIDRRLSNSS

SEQ ID NO: 25519 - protein, 123 aa, Zea mays subsp. mays
  peptide (1)..(123): Ceres Seq. ID no. 12368498
  misc_feature (1)..(99): Pfam Name: Pfam Description:  B-cell receptor-associated protein 31-like
  misc_feature (1)..(115): NCBI GI NO: 9759015 NR Description: gene_id:K16E1.4~unknown protein
  misc_feature (1)..(115): NCBI GI NO: 18422225 NR Description: expressed protein; protein id: At5g42570
  misc_feature (1)..(115): NCBI GI NO: 21553655 NR Description: unknown [Arabidopsis thaliana]
  misc_feature (1)..(123): NCBI GI NO: 22655198 NR Description: unknown protein [Arabidopsis thaliana]
  misc_feature (1)..(112): NCBI GI NO: 34897474 NR Description: unknown protein
  misc_feature (1)..(113): NCBI GI NO: 15239667 NR Description: putative protein; protein id: At5g48660.1
  misc_feature (1)..(113): NCBI GI NO: 15231412 NR Description: unknown protein; protein id: At3g07190.1
  misc_feature (1)..(72): NCBI GI NO: 30682503 NR Description: expressed protein [Arabidopsis thaliana]
  misc_feature (1)..(33): NCBI GI NO: 18402620 NR Description: expressed protein; protein id: At3g20450
MGYSLFLALVIDRLHQYIRDLRRFKKDLEAVRKHNKMLEEAKHGNSEEAKKYQEEIATLNKEMKKLKLQVQEKTEEVHVSEDKALAIQKQSEGLLTEYDRLLEDNQHLRTQLLSIDRRLSNSS

SEQ ID NO: 25520 - DNA, 897 bp, Zea mays subsp. mays
  misc_feature (1)..(897): Ceres Seq. ID no. 12365275
aaagcattgaagcaaagaaccctgcaactgcaacaagccctgacgcttaatacatcggccggcactcgatcggcagcagatcaaagatggcggcggaggagggggagaaggcgaagagcggcggcggcgggcagcagatgacggtggtgcgggggctggacgtggcgcggtacatggggcggtggtacgagatcgcgtcgttcccgtccttcttccagccgcgggacggccgcgacacgcgcgccacctaccggctgctggaggacggcgccacggtgcacgtgctcaacgagacgtggagcaagggcaagcgcgactacatcgagggcacggcctacaaggccgaccccggcagcgacgaggccaagctcaaggtcaagttctacctcccgcccttcctccccatcgtccccgtcgtcggcgactactgggtgctctacgtcgacgatgactaccagtacgcgctcgtcggcgagccgcgccgcaagaacctctggatcctgtgcaggaagacgagcatcgacgaggacgtgtacaaccagctggtggagcgggccaaggaggaaggctacgacgtgagcaagctgcacaggacgccgcaggacgacccgccgccggagagcgacgccgcgcccaccgacaccaagggggtgtggtggttcaagtcgctcttcgggaaatgactgcccgtcaccgcacgcgcgcgtgctccggtactgtgcttgcagttgcagcaaataaaaccaggcctgagtgagtgaggattggtattttagctttgtagtatctgtctcgctatctgtgtgtgtggaactgtggactgtgctgttacgttatacgtgcatgtatttttaagatttctctagctaattgcatcgatcggcgaggtagtcacgc

SEQ ID NO: 25521 - protein, 198 aa, Zea mays subsp. mays
  peptide (1)..(198): Ceres Seq. ID no. 12365276
  misc_feature (15)..(198): NCBI GI NO: 18650668 NR Description: temperature stress-induced lipocalin
  misc_feature (16)..(198): NCBI GI NO: 15242942 NR Description: outer membrane lipoprotein - like
  misc_feature (18)..(198): NCBI GI NO: 21553811 NR Description: outer membrane lipoprotein-like
  misc_feature (18)..(171): NCBI GI NO: 21233298 NR Description: outer membrane lipoprotein Blc
  misc_feature (17)..(171): NCBI GI NO: 21244675 NR Description: outer membrane lipoprotein Blc
  misc_feature (15)..(172): NCBI GI NO: 33598585 NR Description: outer membrane lipoprotein
  misc_feature (24)..(171): NCBI GI NO: 15600300 NR Description: outer membrane lipoprotein Blc
  misc_feature (9)..(167): NCBI GI NO: 23058021 NR Description: hypothetical protein
  misc_feature (24)..(167): NCBI GI NO: 26990735 NR Description: outer membrane lipoprotein Blc, putative
  misc_feature (9)..(169): NCBI GI NO: 39997424 NR Description: outer membrane lipoprotein
MAAEEGEKAKSGGGGQQMTVVRGLDVARYMGRWYEIASFPSFFQPRDGRDTRATYRLLEDGATVHVLNETWSKGKRDYIEGTAYKADPGSDEAKLKVKFYLPPFLPIVPVVGDYWVLYVDDDYQYALVGEPRRKNLWILCRKTSIDEDVYNQLVERAKEEGYDVSKLHRTPQDDPPPESDAAPTDTKGVWWFKSLFGK

SEQ ID NO: 25522 - protein, 181 aa, Zea mays subsp. mays
  peptide (1)..(181): Ceres Seq. ID no. 12365277
  misc_feature (1)..(181): NCBI GI NO: 18650668 NR Description: temperature stress-induced lipocalin
  misc_feature (1)..(181): NCBI GI NO: 15242942 NR Description: outer membrane lipoprotein - like
  misc_feature (1)..(181): NCBI GI NO: 21553811 NR Description: outer membrane lipoprotein-like
  misc_feature (1)..(154): NCBI GI NO: 21233298 NR Description: outer membrane lipoprotein Blc
  misc_feature (1)..(154): NCBI GI NO: 21244675 NR Description: outer membrane lipoprotein Blc
  misc_feature (1)..(155): NCBI GI NO: 33598585 NR Description: outer membrane lipoprotein
  misc_feature (7)..(154): NCBI GI NO: 15600300 NR Description: outer membrane lipoprotein Blc
  misc_feature (1)..(150): NCBI GI NO: 23058021 NR Description: hypothetical protein
  misc_feature (7)..(150): NCBI GI NO: 26990735 NR Description: outer membrane lipoprotein Blc, putative
  misc_feature (1)..(152): NCBI GI NO: 39997424 NR Description: outer membrane lipoprotein
MTVVRGLDVARYMGRWYEIASFPSFFQPRDGRDTRATYRLLEDGATVHVLNETWSKGKRDYIEGTAYKADPGSDEAKLKVKFYLPPFLPIVPVVGDYWVLYVDDDYQYALVGEPRRKNLWILCRKTSIDEDVYNQLVERAKEEGYDVSKLHRTPQDDPPPESDAAPTDTKGVWWFKSLFGK

SEQ ID NO: 25523 - protein, 169 aa, Zea mays subsp. mays
  peptide (1)..(169): Ceres Seq. ID no. 12365278
  misc_feature (1)..(169): NCBI GI NO: 18650668 NR Description: temperature stress-induced lipocalin
  misc_feature (1)..(169): NCBI GI NO: 15242942 NR Description: outer membrane lipoprotein - like
  misc_feature (1)..(169): NCBI GI NO: 21553811 NR Description: outer membrane lipoprotein-like
  misc_feature (1)..(142): NCBI GI NO: 21233298 NR Description: outer membrane lipoprotein Blc
  misc_feature (1)..(142): NCBI GI NO: 21244675 NR Description: outer membrane lipoprotein Blc
  misc_feature (1)..(143): NCBI GI NO: 33598585 NR Description: outer membrane lipoprotein
  misc_feature (1)..(142): NCBI GI NO: 15600300 NR Description: outer membrane lipoprotein Blc
  misc_feature (1)..(138): NCBI GI NO: 23058021 NR Description: hypothetical protein
  misc_feature (1)..(138): NCBI GI NO: 26990735 NR Description: outer membrane lipoprotein Blc, putative
  misc_feature (1)..(140): NCBI GI NO: 39997424 NR Description: outer membrane lipoprotein
MGRWYEIASFPSFFQPRDGRDTRATYRLLEDGATVHVLNETWSKGKRDYIEGTAYKADPGSDEAKLKVKFYLPPFLPIVPVVGDYWVLYVDDDYQYALVGEPRRKNLWILCRKTSIDEDVYNQLVERAKEEGYDVSKLHRTPQDDPPPESDAAPTDTKGVWWFKSLFGK

SEQ ID NO: 25524 - DNA, 970 bp, Zea mays subsp. mays
  misc_feature (1)..(970): Ceres Seq. ID no. 12365291
aatgactcctcttttagcggcgagagactgagagcttggctcaacgcgtcctcggcttctgtggaaggccattccatgcgctccgtgtagccagccattcggtacaaccaactaccctagaagtaacttttcttttcttttttgctctcgagatggatccggttggccccttcctcgtcgcctctataagaagcatccccacacgttctctccacccatcactgcagctcaaacacaaagcagcatcacactgactccactgctctgcctccataataagcacagaagcgccccaataatcagcagcgcaggagcgagcgatcgctatggctcagggaagaggcagtgcgacgcgggggcttgccctcggcagcctactcgccgccgctttcctcctcctcctcggcgtcgccgacgcggccacccacagggtcgactggtccttcaacgcggacagctggtccaagggcaagagcttccgtgccggcgacgtcctcgagttcaactacgacccctccgtgcacaacgtggtggccgtggacgccggcggctacaacggctgccggccctccggcacgtcgtacggctccgggagcgaccgcatcacgctcggccccggcaccagctatttcatctgcagcctcaacgggcactgcgggatggggatgaagatggtcgtcaacgccagctgagcacgacgcttatatgttagtactgcaaaaatatatgggctagtggtggtccgatagatcgtgcaagaactcaatcgtgtgcatactcgtaccgtgtgttcgatggacacggttcatgtgttgtgtatgcatgcgactgctggtaggtcaggcatgatgtacgtgtggctgatggcgtgttagtaaagcgtcctgcagctttgttgttactttgttcgatcgaagcagcggcttcttttgtttgttcatcaataacatctttcattaaattttttttt

SEQ ID NO: 25525 - protein, 121 aa, Zea mays subsp. mays
  peptide (1)..(121): Ceres Seq. ID no. 12365292
  misc_feature (38)..(114): Pfam Name: Pfam Description:  Plastocyanin-like domain
  misc_feature (1)..(121): NCBI GI NO: 13702826 NR Description: putative basic protein [Oryza sativa]
  misc_feature (1)..(120): NCBI GI NO: 21536649 NR Description: putative basic blue protein plantacyanin
  misc_feature (1)..(120): NCBI GI NO: 15227048 NR Description: putative basic blue protein
  misc_feature (1)..(121): NCBI GI NO: 40288370 NR Description: chemocyanin [Lilium longiflorum]
  misc_feature (1)..(120): NCBI GI NO: 13702832 NR Description: putative disease resistance protein [Oryza sativa]
  misc_feature (1)..(120): NCBI GI NO: 7430872 NR Description: plantacyanin precursor [validated] - spinach
  misc_feature (4)..(121): NCBI GI NO: 27573337 NR Description: putative basic blue copper protein
  misc_feature (38)..(120): NCBI GI NO: 2094888 NR Description: Cucumber Basic Protein, A Blue Copper Protein
  misc_feature (38)..(120): NCBI GI NO: 114806 NR Description: Basic blue protein
  misc_feature (1)..(120): NCBI GI NO: 3860333 NR Description: basic blue copper protein [Cicer arietinum]
MAQGRGSATRGLALGSLLAAAFLLLLGVADAATHRVDWSFNADSWSKGKSFRAGDVLEFNYDPSVHNVVAVDAGGYNGCRPSGTSYGSGSDRITLGPGTSYFICSLNGHCGMGMKMVVNAS

SEQ ID NO: 25526 - DNA, 1029 bp, Zea mays subsp. mays
  misc_feature (1)..(1029): Ceres Seq. ID no. 12403756
gcacgagaccattacctagaacatcctaatcgaaaaagactatcatgtctcggtactgcgtcaacgagcagtcgagcacccggcctcatcctgcctcggcaggcagttggcacggcagcaccccagcaggcagcagcccctccaatttaaagcaagcaacgacgggcaaagagcagctcggcgggggctgctgcagcgccgcgcgtttgcgagtccgggacgacgacatggggaggggccgcagcgagataaagcggatcgagaacccgacgcagcggcagtccaccttctacaagcgcagggacgggctcttcaagaaggcaagggagctcgccgtcctgtgcgacgtcgacctgctgctgctcctcttctccggctccgggaagctgtaccactacctctcgcccaccgtgcccactgtcaaggacctggtcgagaggtacgaggccgcgacgcacagcaaggtctgggccgacgttcgccaggagcggcgcgcggagctggagaaggcggagcggatgtgcgagctcatggagaaggagctgcggttcatgacggtggacgacggggagcagtacacggtgccgtcgctggagctgctggagcacagcctggaggcggccgtgcacagggtgcgctccgagaaggaccgcaagatcggcggcgagatcgactgcctccagaacattatcagaggacgccacgaggagcgctacgggttgtgcgacaagcttgctcattctcaggcctggaacaacggcggggaaggtggagggtcgaccccaccaagcggcggcggcggcctggaactcaaactgggtttcaactgacgctggctggcttggaagctcgaggatggatcgaagactatgagctccttcattgtgccctgtcaggctacctacccctgcaccctgttggttatggtttaaaatggttattgaccaaagttgtcctgcatcaaacaaggctcagcttgatgttaatgtgctgagggatctaatgtattattagcgttatccagctctt

SEQ ID NO: 25527 - protein, 261 aa, Zea mays subsp. mays
  peptide (1)..(261): Ceres Seq. ID no. 12403757
  misc_feature (133)..(232): Pfam Name: Pfam Description:  K-box region
  misc_feature (62)..(261): NCBI GI NO: 34910770 NR Description: P0042A10.14
  misc_feature (65)..(235): NCBI GI NO: 40644782 NR Description: putative transcription factor MADS32
  misc_feature (62)..(235): NCBI GI NO: 27151621 NR Description: MADS box protein GGM13
  misc_feature (62)..(244): NCBI GI NO: 23304678 NR Description: MADS-box protein FUL-d
  misc_feature (62)..(226): NCBI GI NO: 3170502 NR Description: APETALA3 homolog PnAP3-2 [Papaver nudicaule]
  misc_feature (62)..(213): NCBI GI NO: 27151620 NR Description: MADS box protein ZMM17
  misc_feature (62)..(242): NCBI GI NO: 18424410 NR Description: MADS-box protein; protein id: At5g60910
  misc_feature (62)..(242): NCBI GI NO: 16549070 NR Description: putative MADS-domain transcription factor MpMADS7
  misc_feature (62)..(244): NCBI GI NO: 23304676 NR Description: MADS-box protein FUL-c
  misc_feature (62)..(245): NCBI GI NO: 20513264 NR Description: MADS-box transcription factor [Lilium regale]
MSRYCVNEQSSTRPHPASAGSWHGSTPAGSSPSNLKQATTGKEQLGGGCCSAARLRVRDDDMGRGRSEIKRIENPTQRQSTFYKRRDGLFKKARELAVLCDVDLLLLLFSGSGKLYHYLSPTVPTVKDLVERYEAATHSKVWADVRQERRAELEKAERMCELMEKELRFMTVDDGEQYTVPSLELLEHSLEAAVHRVRSEKDRKIGGEIDCLQNIIRGRHEERYGLCDKLAHSQAWNNGGEGGGSTPPSGGGGLELKLGFN

SEQ ID NO: 25528 - protein, 200 aa, Zea mays subsp. mays
  peptide (1)..(200): Ceres Seq. ID no. 12403758
  misc_feature (72)..(171): Pfam Name: Pfam Description:  K-box region
  misc_feature (1)..(200): NCBI GI NO: 34910770 NR Description: P0042A10.14
  misc_feature (4)..(174): NCBI GI NO: 40644782 NR Description: putative transcription factor MADS32
  misc_feature (1)..(174): NCBI GI NO: 27151621 NR Description: MADS box protein GGM13
  misc_feature (1)..(183): NCBI GI NO: 23304678 NR Description: MADS-box protein FUL-d
  misc_feature (1)..(165): NCBI GI NO: 3170502 NR Description: APETALA3 homolog PnAP3-2 [Papaver nudicaule]
  misc_feature (1)..(152): NCBI GI NO: 27151620 NR Description: MADS box protein ZMM17
  misc_feature (1)..(181): NCBI GI NO: 18424410 NR Description: MADS-box protein; protein id: At5g60910
  misc_feature (1)..(181): NCBI GI NO: 16549070 NR Description: putative MADS-domain transcription factor MpMADS7
  misc_feature (1)..(183): NCBI GI NO: 23304676 NR Description: MADS-box protein FUL-c
  misc_feature (1)..(184): NCBI GI NO: 20513264 NR Description: MADS-box transcription factor [Lilium regale]
MGRGRSEIKRIENPTQRQSTFYKRRDGLFKKARELAVLCDVDLLLLLFSGSGKLYHYLSPTVPTVKDLVERYEAATHSKVWADVRQERRAELEKAERMCELMEKELRFMTVDDGEQYTVPSLELLEHSLEAAVHRVRSEKDRKIGGEIDCLQNIIRGRHEERYGLCDKLAHSQAWNNGGEGGGSTPPSGGGGLELKLGFN

SEQ ID NO: 25529 - DNA, 790 bp, Zea mays subsp. mays
  misc_feature (1)..(790): Ceres Seq. ID no. 12404755
gccttcaaccatcgttagagtttccttggtagtttttttccctcttgtcacagcaccccccacccacacacacccaaggccccaactgcagtgcccatccggcagacaggtcgatggcggcggaagcagcggcagcggggaaggagaagatgcggacgctagtcagcagcgacttcaagaagttcgatgtggaggagtctgtggcgagggaatcgctgattatcctgaacctgatggcggactgcgacgacagtgacatcccggtcttcaacgtcaacgccaatatcctcgacaaggtcatcgcgtactgcaggaagcacgcctcggcgccgcgcgccgatggcggtgatgcggagccaagtgctgcgagtaacaaggcctcagcggacgatctcaagtcctttgatgctgagttcgtcgatgttgacctggtcaccctcttggagctcattaaggctgcagactacctggagatcaatgggctgctggacctgacctgccaggccgtcgcggacatgatcaaggggaagactccagaggagatacgcgagacattcgacatcgagaatgacttcacacctgaggaagaggctaaagtgaggagggagaatcagtgggcctttgaatgaagaagctgcaggctagctttttttttttctaacaaaacaatagcaatatcatataaccaggccagagatgaagtgcttgttcaggatgttatgagtcgaaggtttggttggtcgtgagcagactatattgctgttccagtattttggctggtttggttccc

SEQ ID NO: 25530 - protein, 171 aa, Zea mays subsp. mays
  peptide (1)..(171): Ceres Seq. ID no. 12404756
  misc_feature (94)..(171): Pfam Name: Pfam Description:  Skp1 family, dimerisation domain
  misc_feature (1)..(171): NCBI GI NO: 40644754 NR Description: putative SKP1 protein [Triticum aestivum]
  misc_feature (1)..(171): NCBI GI NO: 7378764 NR Description: putative kinetochore protein
  misc_feature (10)..(171): NCBI GI NO: 7489299 NR Description: fimbriata-associated protein - garden snapdragon
  misc_feature (12)..(171): NCBI GI NO: 7489300 NR Description: fimbriata-associated protein 2 - garden snapdragon
  misc_feature (15)..(171): NCBI GI NO: 3719211 NR Description: UIP2 [Arabidopsis thaliana]
  misc_feature (15)..(171): NCBI GI NO: 18422184 NR Description: E3 ubiquitin ligase SCF complex subunit, SKP1/ASK1
  misc_feature (12)..(171): NCBI GI NO: 18958249 NR Description: kinetochore protein [Brassica juncea]
  misc_feature (12)..(171): NCBI GI NO: 18958255 NR Description: kinetochore protein [Brassica juncea]
  misc_feature (12)..(171): NCBI GI NO: 18958257 NR Description: kinetochore protein [Brassica juncea]
  misc_feature (12)..(171): NCBI GI NO: 3551838 NR Description: SKP1-like protein [Nicotiana clevelandii]
MAAEAAAAGKEKMRTLVSSDFKKFDVEESVARESLIILNLMADCDDSDIPVFNVNANILDKVIAYCRKHASAPRADGGDAEPSAASNKASADDLKSFDAEFVDVDLVTLLELIKAADYLEINGLLDLTCQAVADMIKGKTPEEIRETFDIENDFTPEEEAKVRRENQWAFE

SEQ ID NO: 25531 - protein, 159 aa, Zea mays subsp. mays
  peptide (1)..(159): Ceres Seq. ID no. 12404757
  misc_feature (82)..(159): Pfam Name: Pfam Description:  Skp1 family, dimerisation domain
  misc_feature (1)..(159): NCBI GI NO: 40644754 NR Description: putative SKP1 protein [Triticum aestivum]
  misc_feature (1)..(159): NCBI GI NO: 7378764 NR Description: putative kinetochore protein
  misc_feature (1)..(159): NCBI GI NO: 7489299 NR Description: fimbriata-associated protein - garden snapdragon
  misc_feature (1)..(159): NCBI GI NO: 7489300 NR Description: fimbriata-associated protein 2 - garden snapdragon
  misc_feature (3)..(159): NCBI GI NO: 3719211 NR Description: UIP2 [Arabidopsis thaliana]
  misc_feature (3)..(159): NCBI GI NO: 18422184 NR Description: E3 ubiquitin ligase SCF complex subunit, SKP1/ASK1
  misc_feature (1)..(159): NCBI GI NO: 18958249 NR Description: kinetochore protein [Brassica juncea]
  misc_feature (1)..(159): NCBI GI NO: 18958255 NR Description: kinetochore protein [Brassica juncea]
  misc_feature (1)..(159): NCBI GI NO: 18958257 NR Description: kinetochore protein [Brassica juncea]
  misc_feature (1)..(159): NCBI GI NO: 3551838 NR Description: SKP1-like protein [Nicotiana clevelandii]
MRTLVSSDFKKFDVEESVARESLIILNLMADCDDSDIPVFNVNANILDKVIAYCRKHASAPRADGGDAEPSAASNKASADDLKSFDAEFVDVDLVTLLELIKAADYLEINGLLDLTCQAVADMIKGKTPEEIRETFDIENDFTPEEEAKVRRENQWAFE

SEQ ID NO: 25532 - protein, 131 aa, Zea mays subsp. mays
  peptide (1)..(131): Ceres Seq. ID no. 12404758
  misc_feature (54)..(131): Pfam Name: Pfam Description:  Skp1 family, dimerisation domain
  misc_feature (1)..(131): NCBI GI NO: 40644754 NR Description: putative SKP1 protein [Triticum aestivum]
  misc_feature (1)..(131): NCBI GI NO: 7378764 NR Description: putative kinetochore protein
  misc_feature (1)..(131): NCBI GI NO: 7489299 NR Description: fimbriata-associated protein - garden snapdragon
  misc_feature (1)..(131): NCBI GI NO: 7489300 NR Description: fimbriata-associated protein 2 - garden snapdragon
  misc_feature (1)..(131): NCBI GI NO: 3719211 NR Description: UIP2 [Arabidopsis thaliana]
  misc_feature (1)..(131): NCBI GI NO: 18422184 NR Description: E3 ubiquitin ligase SCF complex subunit, SKP1/ASK1
  misc_feature (1)..(131): NCBI GI NO: 18958249 NR Description: kinetochore protein [Brassica juncea]
  misc_feature (1)..(131): NCBI GI NO: 18958255 NR Description: kinetochore protein [Brassica juncea]
  misc_feature (1)..(131): NCBI GI NO: 18958257 NR Description: kinetochore protein [Brassica juncea]
  misc_feature (1)..(131): NCBI GI NO: 3551838 NR Description: SKP1-like protein [Nicotiana clevelandii]
MADCDDSDIPVFNVNANILDKVIAYCRKHASAPRADGGDAEPSAASNKASADDLKSFDAEFVDVDLVTLLELIKAADYLEINGLLDLTCQAVADMIKGKTPEEIRETFDIENDFTPEEEAKVRRENQWAFE

SEQ ID NO: 25533 - DNA, 1268 bp, Zea mays subsp. mays
  misc_feature (1)..(1268): Ceres Seq. ID no. 12410087
agggagaaaaatagcaggccgccttgagctggcataggatgcgacggtccggcaggggcagggctcggcggtcgacggaggccaattctttaacttccttcctccgtcgatcatccagcaccagcaggagaatcccgtcgaatccccctccccaacccaagggagcgcgcgcgtatgcctcctccagatccaaagcaacaagcaacagacagcgaggggcaccggggtccgccgcatgtgtgtggttcatggaggatcatgctttcctgcttactgcattagctcctgacgcgccaccctcccctcgcgttcattgatttctgttataattactcacattattattggtaaagaaagatagggcaccgcttctaatttgatgggcattccgttaccgtctcaacgtcaacaacaggtcttttcagcggctcgggcaaaaggcgacaagtcagtgcagagaagatagtgtttgatctaaccccactacaggaacagaggctgcaaagtctgaaggaaaggctaaatgtgccatatgacgaaactcggacagatcatcaagaatcgcttagggctctatggaatgcctcctttcccgatacggagctcactagcttagtttcagaacagtggaaagacatggggtggcagggcgtgaacccagcaactgatttcaggggctgtgggtttgtttcgctcgagaaccttttgttttttgcaagaacatacccggcttctttcaagaggctgatgctgaagcagcaaggaatgcgaactacatgggagtacccatttgcggtcgcgggtgtaaacatctcatacatgctgattcaactgctggagctcaactcagggcgcccgaagtctttgccagggattaacttcatcaaagtgttgacagaacacgaggatgcgttcgacgtgctgtactgcatagcgttcgagatgatggacgcccagtggctagcaatgcgagcctcgtacatgcagttcaaagaggtgctggaggccacaaggcagcagctcgagagggagctctccctggaggatctcaatggcatccatgacctccctgcctgcaacctcttgtacaaatagtgctactggtacttagattatattactgggatgcagtcaaaggaaaatttgatcaggttacatcgtaaccagcatcatcagcctgtaaaaaagaaaaaggaaaagaaaaggagagaagggagacacacatctctggttgtcagtaattcacgtacgccacagttttgcccagg

SEQ ID NO: 25534 - protein, 152 aa, Zea mays subsp. mays
  peptide (1)..(152): Ceres Seq. ID no. 12410088
  misc_feature (1)..(132): Pfam Name: Pfam Description:  Protein of unknown function, DUF609
  misc_feature (1)..(152): NCBI GI NO: 38344760 NR Description: OSJNBa0068L06.3
  misc_feature (1)..(152): NCBI GI NO: 38567695 NR Description: B1160F02.16
  misc_feature (1)..(152): NCBI GI NO: 15218859 NR Description: hypothetical protein; protein id: At1g03620.1
  misc_feature (1)..(152): NCBI GI NO: 25363286 NR Description: protein F21B7.23 [imported] - Arabidopsis thaliana
  misc_feature (1)..(152): NCBI GI NO: 18396599 NR Description: expressed protein; protein id: At3g03610
  misc_feature (1)..(152): NCBI GI NO: 21555509 NR Description: unknown [Arabidopsis thaliana]
  misc_feature (1)..(150): NCBI GI NO: 14140119 NR Description: putative protein [Oryza sativa]
  misc_feature (1)..(150): NCBI GI NO: 18406626 NR Description: expressed protein; protein id: At2g44770
  misc_feature (1)..(150): NCBI GI NO: 15810014 NR Description: At2g44770/F16B22.26 [Arabidopsis thaliana]
  misc_feature (1)..(150): NCBI GI NO: 38345956 NR Description: OSJNBb0038F03.14
MGWQGVNPATDFRGCGFVSLENLLFFARTYPASFKRLMLKQQGMRTTWEYPFAVAGVNISYMLIQLLELNSGRPKSLPGINFIKVLTEHEDAFDVLYCIAFEMMDAQWLAMRASYMQFKEVLEATRQQLERELSLEDLNGIHDLPACNLLYK

SEQ ID NO: 25535 - protein, 115 aa, Zea mays subsp. mays
  peptide (1)..(115): Ceres Seq. ID no. 12410089
  misc_feature (1)..(95): Pfam Name: Pfam Description:  Protein of unknown function, DUF609
  misc_feature (1)..(115): NCBI GI NO: 38344760 NR Description: OSJNBa0068L06.3
  misc_feature (1)..(115): NCBI GI NO: 38567695 NR Description: B1160F02.16
  misc_feature (1)..(115): NCBI GI NO: 15218859 NR Description: hypothetical protein; protein id: At1g03620.1
  misc_feature (1)..(115): NCBI GI NO: 25363286 NR Description: protein F21B7.23 [imported] - Arabidopsis thaliana
  misc_feature (1)..(115): NCBI GI NO: 18396599 NR Description: expressed protein; protein id: At3g03610
  misc_feature (1)..(115): NCBI GI NO: 21555509 NR Description: unknown [Arabidopsis thaliana]
  misc_feature (1)..(113): NCBI GI NO: 14140119 NR Description: putative protein [Oryza sativa]
  misc_feature (1)..(113): NCBI GI NO: 18406626 NR Description: expressed protein; protein id: At2g44770
  misc_feature (1)..(113): NCBI GI NO: 15810014 NR Description: At2g44770/F16B22.26 [Arabidopsis thaliana]
  misc_feature (1)..(113): NCBI GI NO: 38345956 NR Description: OSJNBb0038F03.14
MLKQQGMRTTWEYPFAVAGVNISYMLIQLLELNSGRPKSLPGINFIKVLTEHEDAFDVLYCIAFEMMDAQWLAMRASYMQFKEVLEATRQQLERELSLEDLNGIHDLPACNLLYK

SEQ ID NO: 25536 - protein, 109 aa, Zea mays subsp. mays
  peptide (1)..(109): Ceres Seq. ID no. 12410090
  misc_feature (1)..(89): Pfam Name: Pfam Description:  Protein of unknown function, DUF609
  misc_feature (1)..(109): NCBI GI NO: 38344760 NR Description: OSJNBa0068L06.3
  misc_feature (1)..(109): NCBI GI NO: 38567695 NR Description: B1160F02.16
  misc_feature (1)..(109): NCBI GI NO: 15218859 NR Description: hypothetical protein; protein id: At1g03620.1
  misc_feature (1)..(109): NCBI GI NO: 25363286 NR Description: protein F21B7.23 [imported] - Arabidopsis thaliana
  misc_feature (1)..(109): NCBI GI NO: 18396599 NR Description: expressed protein; protein id: At3g03610
  misc_feature (1)..(109): NCBI GI NO: 21555509 NR Description: unknown [Arabidopsis thaliana]
  misc_feature (1)..(107): NCBI GI NO: 14140119 NR Description: putative protein [Oryza sativa]
  misc_feature (1)..(107): NCBI GI NO: 18406626 NR Description: expressed protein; protein id: At2g44770
  misc_feature (1)..(107): NCBI GI NO: 15810014 NR Description: At2g44770/F16B22.26 [Arabidopsis thaliana]
  misc_feature (1)..(107): NCBI GI NO: 38345956 NR Description: OSJNBb0038F03.14
MRTTWEYPFAVAGVNISYMLIQLLELNSGRPKSLPGINFIKVLTEHEDAFDVLYCIAFEMMDAQWLAMRASYMQFKEVLEATRQQLERELSLEDLNGIHDLPACNLLYK

SEQ ID NO: 25537 - DNA, 1233 bp, Zea mays subsp. mays
  misc_feature (1)..(1233): Ceres Seq. ID no. 12365333
gatttagcatcgacacgatggttcaaagcaaaagggtctacatgcagcactcgctcgcttccctccgcctcgaatggtcacgccacccagaccctgcagcagcagttaatcgtcacgcccccatccttccccagcaaacacaacacaagcagacggggagagattcagatccactcgtcacacatccgcgttaccccctctcccttggtttcctctcccaccaccaacccccatcccggttatctccgccgccgcccgctttgggaaggcgcgacgaaggcaggcgagaggctccagccggacgaggaggaaagaggagcagcagggccggaggagagatgttcctgtgggactggttctacggggtgctggcctccctcggcctgtggcagaaggaggcgaagatcctcttcctctgcctcgacaacgccggcaagaccacgctgctccacatgctcaaggacgagcggttggtgcagcaccagccgacgcagcacccgacgtcggaggagctcagcatcggcaagatcaagttcaaggccttcgacctcggcggccaccagatcgcgcgccgcgtctggaaggattactacgcaaaggttgatgctgtagtatacctggtagatgcgtatgataaggagcgatttgctgaatcaaaaaaggagctggacgctctcctgtcagatgattccttggcaaatgttccatttctcatccttggcaacaagattgatatcccgtatgctgcctctgaagaggagctgcggtatcacctaggccttagcaacttcacaaccgggaagggcaaggtcaaccttggcgactccaatgtccggccacttgaggttttcatgtgcagtgttgttcgcaagatgggctacggcgatggtttcaagtgggtctcccaatacatcaagtagggcccttgccggggcgcttgctcagcccagcgatttttttgccttgttatttgttctggttggtatttcgtcacgtgaacgatgatcatcatatcatgacagtatcatggaggggtatgaagaggaaaaaacagtgcttaacattggggaacatgttgaatctttagcgtgaaaacattttgttatgtcagtcaaactcctggaattcttttgcttttccgtaggacctttactaaggacttccctgcgatgcattataagattattgattgcttaaattatgtgttatatatatggtggtggattggtactg

SEQ ID NO: 25538 - protein, 305 aa, Zea mays subsp. mays
  peptide (1)..(305): Ceres Seq. ID no. 12365334
  misc_feature (117)..(304): Pfam Name: Pfam Description:  ADP-ribosylation factor family
  misc_feature (113)..(305): NCBI GI NO: 34894960 NR Description: putative GTP-binding protein
  misc_feature (113)..(304): NCBI GI NO: 25294172 NR Description: ras-like small monomeric GTP-binding protein
  misc_feature (113)..(305): NCBI GI NO: 15235226 NR Description: SAR1/GTP-binding secretory factor
  misc_feature (113)..(304): NCBI GI NO: 15223516 NR Description: GTP-binding protein (SAR1B); protein id:At1g56330
  misc_feature (113)..(304): NCBI GI NO: 15228793 NR Description: Sar1-like GTP binding protein
  misc_feature (113)..(305): NCBI GI NO: 3334321 NR Description: GTP-binding protein SAR1A
  misc_feature (113)..(305): NCBI GI NO: 1549222 NR Description: NtSar1 protein [Nicotiana tabacum]
  misc_feature (113)..(305): NCBI GI NO: 34902852 NR Description: unnamed protein product
  misc_feature (113)..(305): NCBI GI NO: 7438457 NR Description: GTP-binding protein - curled-leaved tobacco
  misc_feature (113)..(304): NCBI GI NO: 3334322 NR Description: GTP-binding protein SAR1B
FSIDTMVQSKRVYMQHSLASLRLEWSRHPDPAAAVNRHAPILPQQTQHKQTGRDSDPLVTHPRYPLSLGFLSHHQPPSRLSPPPPALGRRDEGRREAPAGRGGKRSSRAGGEMFLWDWFYGVLASLGLWQKEAKILFLCLDNAGKTTLLHMLKDERLVQHQPTQHPTSEELSIGKIKFKAFDLGGHQIARRVWKDYYAKVDAVVYLVDAYDKERFAESKKELDALLSDDSLANVPFLILGNKIDIPYAASEEELRYHLGLSNFTTGKGKVNLGDSNVRPLEVFMCSVVRKMGYGDGFKWVSQYIK

SEQ ID NO: 25539 - protein, 300 aa, Zea mays subsp. mays
  peptide (1)..(300): Ceres Seq. ID no. 12365335
  misc_feature (112)..(299): Pfam Name: Pfam Description:  ADP-ribosylation factor family
  misc_feature (108)..(300): NCBI GI NO: 34894960 NR Description: putative GTP-binding protein
  misc_feature (108)..(299): NCBI GI NO: 25294172 NR Description: ras-like small monomeric GTP-binding protein
  misc_feature (108)..(300): NCBI GI NO: 15235226 NR Description: SAR1/GTP-binding secretory factor
  misc_feature (108)..(299): NCBI GI NO: 15223516 NR Description: GTP-binding protein (SAR1B); protein id:At1g56330
  misc_feature (108)..(299): NCBI GI NO: 15228793 NR Description: Sar1-like GTP binding protein
  misc_feature (108)..(300): NCBI GI NO: 3334321 NR Description: GTP-binding protein SAR1A
  misc_feature (108)..(300): NCBI GI NO: 1549222 NR Description: NtSar1 protein [Nicotiana tabacum]
  misc_feature (108)..(300): NCBI GI NO: 34902852 NR Description: unnamed protein product
  misc_feature (108)..(300): NCBI GI NO: 7438457 NR Description: GTP-binding protein - curled-leaved tobacco
  misc_feature (108)..(299): NCBI GI NO: 3334322 NR Description: GTP-binding protein SAR1B
MVQSKRVYMQHSLASLRLEWSRHPDPAAAVNRHAPILPQQTQHKQTGRDSDPLVTHPRYPLSLGFLSHHQPPSRLSPPPPALGRRDEGRREAPAGRGGKRSSRAGGEMFLWDWFYGVLASLGLWQKEAKILFLCLDNAGKTTLLHMLKDERLVQHQPTQHPTSEELSIGKIKFKAFDLGGHQIARRVWKDYYAKVDAVVYLVDAYDKERFAESKKELDALLSDDSLANVPFLILGNKIDIPYAASEEELRYHLGLSNFTTGKGKVNLGDSNVRPLEVFMCSVVRKMGYGDGFKWVSQYIK

SEQ ID NO: 25540 - protein, 292 aa, Zea mays subsp. mays
  peptide (1)..(292): Ceres Seq. ID no. 12365336
  misc_feature (104)..(291): Pfam Name: Pfam Description:  ADP-ribosylation factor family
  misc_feature (100)..(292): NCBI GI NO: 34894960 NR Description: putative GTP-binding protein
  misc_feature (100)..(291): NCBI GI NO: 25294172 NR Description: ras-like small monomeric GTP-binding protein
  misc_feature (100)..(292): NCBI GI NO: 15235226 NR Description: SAR1/GTP-binding secretory factor
  misc_feature (100)..(291): NCBI GI NO: 15223516 NR Description: GTP-binding protein (SAR1B); protein id:At1g56330
  misc_feature (100)..(291): NCBI GI NO: 15228793 NR Description: Sar1-like GTP binding protein
  misc_feature (100)..(292): NCBI GI NO: 3334321 NR Description: GTP-binding protein SAR1A
  misc_feature (100)..(292): NCBI GI NO: 1549222 NR Description: NtSar1 protein [Nicotiana tabacum]
  misc_feature (100)..(292): NCBI GI NO: 34902852 NR Description: unnamed protein product
  misc_feature (100)..(292): NCBI GI NO: 7438457 NR Description: GTP-binding protein - curled-leaved tobacco
  misc_feature (100)..(291): NCBI GI NO: 3334322 NR Description: GTP-binding protein SAR1B
MQHSLASLRLEWSRHPDPAAAVNRHAPILPQQTQHKQTGRDSDPLVTHPRYPLSLGFLSHHQPPSRLSPPPPALGRRDEGRREAPAGRGGKRSSRAGGEMFLWDWFYGVLASLGLWQKEAKILFLCLDNAGKTTLLHMLKDERLVQHQPTQHPTSEELSIGKIKFKAFDLGGHQIARRVWKDYYAKVDAVVYLVDAYDKERFAESKKELDALLSDDSLANVPFLILGNKIDIPYAASEEELRYHLGLSNFTTGKGKVNLGDSNVRPLEVFMCSVVRKMGYGDGFKWVSQYIK

SEQ ID NO: 25541 - DNA, 1563 bp, Zea mays subsp. mays
  misc_feature (1)..(1563): Ceres Seq. ID no. 12410083
gtttacggattctttttctagcatttctcaattcttttttgttccggccccaatatgctctgtctcaaagtcaatttgcctacgagttcgaacgaaccgacaagaaggagcaatacacaagagagaagacaaggaatagcgccagcggcggccagggtgccgctcgatctctatgacttgttcttccctccctttcttcccttcacaaggttcctgaggcccgctttgagctgagatggattcgtcccagtagtgttctgggtgctcccgtttcttgatttcttccgaacttaggcattactgtttacagaatacgaccacaagattccggacactgtgttttgctcttctccgagtttgcactttgcttgatattccatttggaggagctgcgatgggctgtctgcaaacaaagcacgccagtcgatcgccgcacttgctggatacacgggaagctgtagcccttgctgctgaaacatcttgtgagaaagtggatcttccagattttgttaatattgctactggaacactgcggcgtgagaattgaattccatcttccataagaaagaggaatcaaacggttgctttcagatatactgccatgttttcctgcttacattcatgcctacctccttatttttttcccatattttttcggttaacaagcctagcgaaaacaccgtggcattgcaacttctctgactaactctgatacgcatgtattgttgtgtacttgtgttttgggtctagtttgttaagctccacctattgttgcagttacagtgagtgaagttgaagcactgcatgacctcttccggaaaataagtaattcagttatcagagataatctaattcacaaggaagaattccaacttgctctctttaggggcaagaagcagcaaaatctctttgttgatagggtatttgacttgtttgatcaaaaacgaaatggtgtaattgaatttggtgagtttgttcgatctcttggtgtgtttcatccagatgcaccagaagatcagaaagttgcatttgcatttaagttgtatgacttaaaacagacaggctttatagaacggcatgagttaaaggagatggtgctggctctgctggacgaatcagatttggatattgcgagcgacgctgtcgagatgattgttgacaggacatttgatcaggccgacacaaaaggtgatgggaagatagatcaggaagaatggactgaatatgctaaagacaatccatacgtgctgaggaatatgacccttccatacctcaaggacattactatggtattcccaagctttgtgatgcactcagaaatcagtgaaacagacatggctgtctaacctgaaaagtaactgcaaactcacagcttctctgcacagcctgatgtatattaatgatggaaccggaatcttttcatcaagaaaaggttaatttgcaaccttctctcgtgaacagaaatttgtggactggtgtaaatggtgggaataggaaaggtgttctgttatattaccgacaagcaaacgagcaatctagcatctatctgattgtcgttttcag

SEQ ID NO: 25542 - protein, 84 aa, Zea mays subsp. mays
  peptide (1)..(84): Ceres Seq. ID no. 12410084
  misc_feature (1)..(82): NCBI GI NO: 15290058 NR Description: calcineurin B-like protein
  misc_feature (1)..(82): NCBI GI NO: 15237928 NR Description: calcium sensor homolog (gb|AAC26110
  misc_feature (1)..(79): NCBI GI NO: 15217657 NR Description: calcineurin B-like protein; protein id:At1g64480
  misc_feature (1)..(80): NCBI GI NO: 22137326 NR Description: calcineurin B [Pisum sativum]
  misc_feature (1)..(80): NCBI GI NO: 16924116 NR Description: putative calcineurin B-like protein [Oryza sativa]
  misc_feature (1)..(79): NCBI GI NO: 25295757 NR Description: protein F1N19.5 [imported] - Arabidopsis thaliana
  misc_feature (1)..(79): NCBI GI NO: 15238015 NR Description: calcineurin B 1; protein id: At5g47100
  misc_feature (1)..(80): NCBI GI NO: 15241101 NR Description: calcineurin B-like protein 2 (gb|AAC26009
  misc_feature (1)..(80): NCBI GI NO: 15236778 NR Description: calcineurin B-like protein 3; protein id:At4g26570
  misc_feature (1)..(80): NCBI GI NO: 21593228 NR Description: calcineurin B-like protein 2
MVLALLDESDLDIASDAVEMIVDRTFDQADTKGDGKIDQEEWTEYAKDNPYVLRNMTLPYLKDITMVFPSFVMHSEISETDMAV

SEQ ID NO: 25543 - protein, 65 aa, Zea mays subsp. mays
  peptide (1)..(65): Ceres Seq. ID no. 12410085
  misc_feature (1)..(63): NCBI GI NO: 15290058 NR Description: calcineurin B-like protein
  misc_feature (1)..(63): NCBI GI NO: 15237928 NR Description: calcium sensor homolog (gb|AAC26110
  misc_feature (1)..(60): NCBI GI NO: 15217657 NR Description: calcineurin B-like protein; protein id:At1g64480
  misc_feature (1)..(61): NCBI GI NO: 22137326 NR Description: calcineurin B [Pisum sativum]
  misc_feature (1)..(61): NCBI GI NO: 16924116 NR Description: putative calcineurin B-like protein [Oryza sativa]
  misc_feature (1)..(60): NCBI GI NO: 25295757 NR Description: protein F1N19.5 [imported] - Arabidopsis thaliana
  misc_feature (1)..(60): NCBI GI NO: 15238015 NR Description: calcineurin B 1; protein id: At5g47100
  misc_feature (1)..(61): NCBI GI NO: 15241101 NR Description: calcineurin B-like protein 2 (gb|AAC26009
  misc_feature (1)..(61): NCBI GI NO: 15236778 NR Description: calcineurin B-like protein 3; protein id:At4g26570
  misc_feature (1)..(61): NCBI GI NO: 21593228 NR Description: calcineurin B-like protein 2
MIVDRTFDQADTKGDGKIDQEEWTEYAKDNPYVLRNMTLPYLKDITMVFPSFVMHSEISETDMAV

SEQ ID NO: 25544 - protein, 59 aa, Zea mays subsp. mays
  peptide (1)..(59): Ceres Seq. ID no. 12410086
MLCLKVNLPTSSNEPTRRSNTQERRQGIAPAAARVPLDLYDLFFPPFLPFTRFLRPALS

SEQ ID NO: 25545 - DNA, 1622 bp, Zea mays subsp. mays
  misc_feature (1)..(1622): Ceres Seq. ID no. 12407965
aaaacgcacccccaagctaccaacgcacgcaaagcacggacgggcgcatacagctttccctttcgcgagtgcgtgccccttctcttctctagttctcttctccgtcgcgtcagagatcagggagagaccagagcaaacaacaaccaccgcttgtttcatcaagaatcgtggaggagaaccgaaaggtgtagtagccttttccggtagggcatctgctagagccggccggttgaagcaggggagcgagaggaggagggcagccgagcaggagcatcgcagtggtggttaagcagcagcaacgacgacgacgacgacgctgagaggtttccccgttcccgacggcacgtccaccgaggcggcgccatcgcgatgggtcctctggcgccgctgaggtgtaacccgccgccgccgttctccaagtcgccggggtccctgctgctgctgtccaagtcgctcaccctctactgctgagccgagccccctcctcgatcggttccatgggcgccgtggcctcgtcggcgggtggggcccggggaggcgatggcacggtgctgggcgacctgccggagaactgcgtcgcggaggtgctgctcaggctggacccgctggagatctgccggatggcgcggctcagccgcacgttccgtggcgccgcgtccggggacggtgtctgggagtccaagctaccgaggaactacgcgcgcctcctcgccgttgctgcggccggcgatggggaaggtgggcaggccgccgcgtcggcgccgggggcagagctgctgcccaagaaggaactgtacgcgcggctttgccgtcggaaccgtttcgacggcggcaaaaaggagttctggctggacaagggcggtggaggtctatgtatgtcaatttcttcaagggcgctttcaataacaggcattgatgataggaggtattggaacttcattcccagtgatgaatcaagattccgcacggttgcgtacctctcgcaaatctggtggtttgaagtgagaggggaggttgaattcttcttcccagaaggcacgtacagcctattctaccgcattcatctcggccgaccattcaagcgtcttggccggcgagtctacagctcggagcacgtccacggctgggacatgaagccggtgcgtttccagatgtcgacctccgacggacagcatgttcagtccaagtgctacttgagcgatcccggtatctggatcaaccaccatgtcggggacttcgtcgtgaaggactcgagcaggccagtgaacatcaggttcgcgatgattcagatagactgcacgcacacgaaaggcggcctctgcgtggattcggtcgtggtgaaaccgcagcacctcgcgcagaaaaaagcgccctggacttacgtctagggaggagggatatgatccatagtttccttttggattgttctactaccagatgtgcgttttgtttacagaagtgcggttttttacatttgcacttatacgcgtattttgcagtcatgtaatgtaattgaaggggtaagtgatttttttagttcctcttgtcccccctaggaacatgttggacctctgtaaattgttcgtttgaactttgaaatgtacatcggctgtgttctgcct

SEQ ID NO: 25546 - protein, 296 aa, Zea mays subsp. mays
  peptide (1)..(296): Ceres Seq. ID no. 12407966
  misc_feature (19)..(64): Pfam Name: Pfam Description:  F-box domain
  misc_feature (1)..(290): NCBI GI NO: 37536186 NR Description: unknown protein
  misc_feature (22)..(284): NCBI GI NO: 38567911 NR Description: OSJNBa0088I22.7
  misc_feature (19)..(289): NCBI GI NO: 30695337 NR Description: F-box protein (lectin-related)
  misc_feature (19)..(289): NCBI GI NO: 23397334 NR Description: unknown protein [Arabidopsis thaliana]
  misc_feature (5)..(283): NCBI GI NO: 15222051 NR Description: hypothetical protein; protein id: At1g12710.1
  misc_feature (19)..(283): NCBI GI NO: 15221677 NR Description: unknown protein; protein id: At1g63090.1
  misc_feature (1)..(283): NCBI GI NO: 15242282 NR Description: putative protein; protein id: At5g52120
  misc_feature (1)..(283): NCBI GI NO: 15231726 NR Description: putative protein; protein id: At3g53000.1
  misc_feature (107)..(283): NCBI GI NO: 27754673 NR Description: unknown protein [Arabidopsis thaliana]
  misc_feature (23)..(283): NCBI GI NO: 15226939 NR Description: putative phloem-specific lectin
MGAVASSAGGARGGDGTVLGDLPENCVAEVLLRLDPLEICRMARLSRTFRGAASGDGVWESKLPRNYARLLAVAAAGDGEGGQAAASAPGAELLPKKELYARLCRRNRFDGGKKEFWLDKGGGGLCMSISSRALSITGIDDRRYWNFIPSDESRFRTVAYLSQIWWFEVRGEVEFFFPEGTYSLFYRIHLGRPFKRLGRRVYSSEHVHGWDMKPVRFQMSTSDGQHVQSKCYLSDPGIWINHHVGDFVVKDSSRPVNIRFAMIQIDCTHTKGGLCVDSVVVKPQHLAQKKAPWTYV

SEQ ID NO: 25547 - protein, 255 aa, Zea mays subsp. mays
  peptide (1)..(255): Ceres Seq. ID no. 12407967
  misc_feature (1)..(249): NCBI GI NO: 37536186 NR Description: unknown protein
  misc_feature (1)..(243): NCBI GI NO: 38567911 NR Description: OSJNBa0088I22.7
  misc_feature (1)..(248): NCBI GI NO: 30695337 NR Description: F-box protein (lectin-related)
  misc_feature (1)..(248): NCBI GI NO: 23397334 NR Description: unknown protein [Arabidopsis thaliana]
  misc_feature (1)..(242): NCBI GI NO: 15222051 NR Description: hypothetical protein; protein id: At1g12710.1
  misc_feature (1)..(242): NCBI GI NO: 15221677 NR Description: unknown protein; protein id: At1g63090.1
  misc_feature (1)..(242): NCBI GI NO: 15242282 NR Description: putative protein; protein id: At5g52120
  misc_feature (1)..(242): NCBI GI NO: 15231726 NR Description: putative protein; protein id: At3g53000.1
  misc_feature (66)..(242): NCBI GI NO: 27754673 NR Description: unknown protein [Arabidopsis thaliana]
  misc_feature (1)..(242): NCBI GI NO: 15226939 NR Description: putative phloem-specific lectin
MARLSRTFRGAASGDGVWESKLPRNYARLLAVAAAGDGEGGQAAASAPGAELLPKKELYARLCRRNRFDGGKKEFWLDKGGGGLCMSISSRALSITGIDDRRYWNFIPSDESRFRTVAYLSQIWWFEVRGEVEFFFPEGTYSLFYRIHLGRPFKRLGRRVYSSEHVHGWDMKPVRFQMSTSDGQHVQSKCYLSDPGIWINHHVGDFVVKDSSRPVNIRFAMIQIDCTHTKGGLCVDSVVVKPQHLAQKKAPWTYV

SEQ ID NO: 25548 - protein, 170 aa, Zea mays subsp. mays
  peptide (1)..(170): Ceres Seq. ID no. 12407968
  misc_feature (1)..(164): NCBI GI NO: 37536186 NR Description: unknown protein
  misc_feature (1)..(158): NCBI GI NO: 38567911 NR Description: OSJNBa0088I22.7
  misc_feature (1)..(163): NCBI GI NO: 30695337 NR Description: F-box protein (lectin-related)
  misc_feature (1)..(163): NCBI GI NO: 23397334 NR Description: unknown protein [Arabidopsis thaliana]
  misc_feature (1)..(157): NCBI GI NO: 15222051 NR Description: hypothetical protein; protein id: At1g12710.1
  misc_feature (1)..(157): NCBI GI NO: 15221677 NR Description: unknown protein; protein id: At1g63090.1
  misc_feature (1)..(157): NCBI GI NO: 15242282 NR Description: putative protein; protein id: At5g52120
  misc_feature (1)..(157): NCBI GI NO: 15231726 NR Description: putative protein; protein id: At3g53000.1
  misc_feature (1)..(157): NCBI GI NO: 27754673 NR Description: unknown protein [Arabidopsis thaliana]
  misc_feature (1)..(157): NCBI GI NO: 15226939 NR Description: putative phloem-specific lectin
MSISSRALSITGIDDRRYWNFIPSDESRFRTVAYLSQIWWFEVRGEVEFFFPEGTYSLFYRIHLGRPFKRLGRRVYSSEHVHGWDMKPVRFQMSTSDGQHVQSKCYLSDPGIWINHHVGDFVVKDSSRPVNIRFAMIQIDCTHTKGGLCVDSVVVKPQHLAQKKAPWTYV

SEQ ID NO: 25549 - DNA, 873 bp, Zea mays subsp. mays
  misc_feature (1)..(873): Ceres Seq. ID no. 12410079
caatgtcgcgtgcggccactagatttttcctgacgcggtgtctgctcccacttcccctcctctcccccaggtggcggcagcggcggcggggtagcatttgtgctacgagggcttttgcaatggcggcttcggggttcggcggcggcgaggcgccaaaaccctaccgccgccgcgaatcccgcacgaccccaaccatgaccgtgctgagccgccctaccccgggcacggcccagtgcttcgggcggaagaagaccgccgtcgcggtcgcgttacacgaagccggggcgcggcctgatcaaggtgaacggcgtcccgattgagctgatccgaccggagatgctccgcctcaaggccttcgagcccatcctgctggcgggggcggtcccggttcaaggacatcgacatgcggatccgcgtccgcggcggcgggaagacgtcgcagatctacgccatccgccaggccgtcgccaaggggctcgtcgcctactaccagaagtacgtcgacgaggccgccaagaaggagatcaaggacatctttacccgctacgatcgcaccctcctcgtcgctgacccccggcgctgcgagccgaagaagttcggcggacgtggtgcccgcgccaggttccagaagtcgtaccgttgagcggctgcctgctccatctcgatttttcagatcgttgtgggtgttcttcgctttatttcctatcaatggatctgcttatctggttctatatctagctgctgctttaccataatgtttagactttaatgcctagcctgaaaccttgtttgcaatgtgaaattaatgtgagagattatgaagactattttggctagtccctctattatgattttcatcattccagtattgtg

SEQ ID NO: 25550 - protein, 105 aa, Zea mays subsp. mays
  peptide (1)..(105): Ceres Seq. ID no. 12410080
  misc_feature (68)..(94): NCBI GI NO: 1172818 NR Description: 40S RIBOSOMAL PROTEIN S16
MSRAATRFFLTRCLLPLPLLSPRWRQRRRGSICATRAFAMAASGFGGGEAPKPYRRRESRTTPTMTVLSRPTPGTAQCFGRKKTAVAVALHEAGARPDQGERRPD

SEQ ID NO: 25551 - protein, 79 aa, Zea mays subsp. mays
  peptide (1)..(79): Ceres Seq. ID no. 12410081
  misc_feature (1)..(79): Pfam Name: Pfam Description:  Ribosomal protein S9/S16
  misc_feature (1)..(79): NCBI GI NO: 1172818 NR Description: 40S RIBOSOMAL PROTEIN S16
  misc_feature (1)..(79): NCBI GI NO: 3122800 NR Description: 40S RIBOSOMAL PROTEIN S16
  misc_feature (1)..(79): NCBI GI NO: 6984222 NR Description: 40S ribosomal protein S16 [Euphorbia esula]
  misc_feature (1)..(79): NCBI GI NO: 133808 NR Description: 40S RIBOSOMAL PROTEIN S16
  misc_feature (1)..(79): NCBI GI NO: 40556671 NR Description: small subunit ribosomal protein S16
  misc_feature (1)..(79): NCBI GI NO: 1173209 NR Description: 40S RIBOSOMAL PROTEIN S16
  misc_feature (1)..(79): NCBI GI NO: 17369864 NR Description: 40S ribosomal protein S16
  misc_feature (1)..(79): NCBI GI NO: 15226676 NR Description: 40S ribosomal protein S16; protein id: At2g09990
  misc_feature (1)..(79): NCBI GI NO: 15238809 NR Description: 40S RIBOSOMAL PROTEIN S16; protein id: At5g18380
  misc_feature (1)..(79): NCBI GI NO: 15229252 NR Description: putative 40S ribosomal protein S16
MRIRVRGGGKTSQIYAIRQAVAKGLVAYYQKYVDEAAKKEIKDIFTRYDRTLLVADPRRCEPKKFGGRGARARFQKSYR

SEQ ID NO: 25552 - protein, 77 aa, Zea mays subsp. mays
  peptide (1)..(77): Ceres Seq. ID no. 12410082
  misc_feature (1)..(14): NCBI GI NO: 1172818 NR Description: 40S RIBOSOMAL PROTEIN S16
  misc_feature (1)..(14): NCBI GI NO: 3122800 NR Description: 40S RIBOSOMAL PROTEIN S16
  misc_feature (1)..(14): NCBI GI NO: 6984222 NR Description: 40S ribosomal protein S16 [Euphorbia esula]
  misc_feature (1)..(14): NCBI GI NO: 133808 NR Description: 40S RIBOSOMAL PROTEIN S16
  misc_feature (1)..(14): NCBI GI NO: 40556671 NR Description: small subunit ribosomal protein S16
  misc_feature (1)..(14): NCBI GI NO: 1173209 NR Description: 40S RIBOSOMAL PROTEIN S16
  misc_feature (1)..(14): NCBI GI NO: 17369864 NR Description: 40S ribosomal protein S16
  misc_feature (1)..(14): NCBI GI NO: 15226676 NR Description: 40S ribosomal protein S16; protein id: At2g09990
  misc_feature (1)..(14): NCBI GI NO: 15238809 NR Description: 40S RIBOSOMAL PROTEIN S16; protein id: At5g18380
  misc_feature (1)..(14): NCBI GI NO: 15229252 NR Description: putative 40S ribosomal protein S16
MLRLKAFEPILLAGAVPVQGHRHADPRPRRREDVADLRHPPGRRQGARRLLPEVRRRGRQEGDQGHLYPLRSHPPRR

SEQ ID NO: 25553 - DNA, 1773 bp, Zea mays subsp. mays
  misc_feature (1)..(1773): Ceres Seq. ID no. 12407294
  misc_feature (1742)..(1742): n is a, c, t, g, unknown, or other
  misc_feature (1743)..(1743): n is a, c, t, g, unknown, or other
  misc_feature (824)..(824): n is a, c, t, g, unknown, or other
  misc_feature (1767)..(1767): n is a, c, t, g, unknown, or other
actcactagctagcttccagcagcagcagccttgtcgtgcaacagcagcaccaggaccaggctaccaccagttagctgctggggacctggggtacggttgctgttccgtgactctcgtcgcacaacacaatgccggccatggtagaggaggggctcgtcaggcgggcggcgcccgagccgcacttcctggtggtgaccttcccggcgcagggccacatcaacccggcgcgccacctcgcgcgccgcctgctacgcgccacgggggcgcgggtcaccgtctgcacggccgtgtccgcgctccgcaagatgttcccgggcgccgaggcagacgcggaggaggagggccaccgcgacggcgcgggggtgcggtacgtgccctactccgacggctacgacgacggcttcgacggcgccgtgcacgacgccacgcgctacatggaccaggtcaaggtcgtggggtcccgcacgctgggggacgtcctggcccgcctccgcggcgcgggcaggcccgccacgctcgtcgtgtacacgctgctgctgtcgtgggtggccgacgtggcgcgcgaccacgccgtgcccgccgcgctctactggatccagccggccaccgtgctcgccgtctacctgcacttcttccgcgccacgggcggcgtcgacgcggccgtcgccgcggcgggcggcgacccgtgggcgggcgtccggttcccgggcctcccgccgctccgcgtccgcgacctgccgtcgttcatcgtctccacctccgaggacgacccctacgcgttcgtcgcggacgcgttccgcgagctcgtcgggcggctggacgncggcgaggacagccccagcgtgctggccaacacgttcgacgccgtggagcccgaggcggtggcgtcgctgcgggagcacggcgtggacgtggtccccgtcggccccgtcctctccttcctggacgacgacgcggcggccggcggcaacaacgacctgttcacgcaggacggcaagggctacctcgagtggctggacgcacaggcgccgggctccgtggtgtacatctcgttcgggagcctgtcggtgatgcgcaggcggcagatcgaggaggtggcgcgggggatgtccgagagcggccgcccgttcctgtgggtgctgcgggaggacaaccgcagaagcgagggcgccgacgccgacgccgcgacgctggccggcggcgggcgcggcatggtggtggggtggtgcgaccaggtgcgggtgttgtcgcacccggccgtgggctgcttcgtcacggcactggcggctggaactccacgctggagagcacggcgtgcggcgtccccgtcgtgtgcgtgccgcagtggacggaccagggcaccaacgcgtggctggtggagaggatcgggaccggcgtcagggccgccgtcagcgacaaggacggggtgctggaggccggcgagctgcggaggtgtatcgacctcgctacctccgacatggtgcgcgccaaggccgccgtgtggagggagaaggcgcgcgccgccgcgtcgaagggcggctcgtcggagaggaacctcaaggcgttcgtcgccaagcagatcgccggcgggaataactaggccgtcagctctcgtgcggtcgacataggttatgggactcgatctacaactgtacttaattaattgttgctctaagcgcatgtgcaagtgcaaacatgtgtgtcaacgtgataatattgatattctctgcaggtgtgtgtnnacgtgataatttatataattctcncttaat

SEQ ID NO: 25554 - protein, 532 aa, Zea mays subsp. mays
  peptide (1)..(532): Ceres Seq. ID no. 12407295
  misc_feature (380)..(525): Pfam Name: Pfam Description:  UDP-glucoronosyl and UDP-glucosyl transferase
  misc_feature (380)..(525): NCBI GI NO: 34906162 NR Description: putative anthocyanin 5-O-glucosyltransferase
  misc_feature (429)..(530): NCBI GI NO: 20146093 NR Description: glucosyltransferase NTGT2 [Nicotiana tabacum]
  misc_feature (429)..(523): NCBI GI NO: 14192682 NR Description: cold-induced glucosyl transferase
  misc_feature (429)..(531): NCBI GI NO: 40714353 NR Description: anthocyanin 5-O-glucosyltransferase
  misc_feature (429)..(530): NCBI GI NO: 6683052 NR Description: anthocyanin 5-O-glucosyltransferase
  misc_feature (429)..(529): NCBI GI NO: 18390540 NR Description: UDP-glucose transferase
  misc_feature (429)..(523): NCBI GI NO: 15220556 NR Description: UDP-glycosyltransferase family
  misc_feature (429)..(523): NCBI GI NO: 7433892 NR Description: hypothetical protein - Arabidopsis thaliana
  misc_feature (429)..(529): NCBI GI NO: 4115563 NR Description: UDP-glucose:anthocyanin 5-O-glucosyltransferase
  misc_feature (429)..(527): NCBI GI NO: 27530877 NR Description: anthocyanin 5-glucosyltransferase
  misc_feature (274)..(274): Xaa is any aa, unknown or other
SLASFQQQQPCRATAAPGPGYHQLAAGDLGYGCCSVTLVAQHNAGHGRGGARQAGGARAALPGGDLPGAGPHQPGAPPRAPPATRHGGAGHRLHGRVRAPQDVPGRRGRRGGGGPPRRRGGAVRALLRRLRRRLRRRRARRHALHGPGQGRGVPHAGGRPGPPPRRGQARHARRVHAAAVVGGRRGARPRRARRALLDPAGHRARRLPALLPRHGRRRRGRRRGGRRPVGGRPVPGPPAAPRPRPAVVHRLHLRGRPLRVRRGRVPRARRAAGXRRGQPQRAGQHVRRRGARGGGVAAGARRGRGPRRPRPLLPGRRRGGRRQQRPVHAGRQGLPRVAGRTGAGLRGVHLVREPVGDAQAADRGGGAGDVRERPPVPVGAAGGQPQKRGRRRRRRDAGRRRARHGGGVVRPGAGVVAPGRGLLRHGTGGWNSTLESTACGVPVVCVPQWTDQGTNAWLVERIGTGVRAAVSDKDGVLEAGELRRCIDLATSDMVRAKAAVWREKARAAASKGGSSERNLKAFVAKQIAGGNN

SEQ ID NO: 25555 - protein, 499 aa, Zea mays subsp. mays
  peptide (1)..(499): Ceres Seq. ID no. 12407296
  misc_feature (37)..(383): Pfam Name: Pfam Description:  UDP-glucoronosyl and UDP-glucosyl transferase
  misc_feature (1)..(383): NCBI GI NO: 34906162 NR Description: putative anthocyanin 5-O-glucosyltransferase
  misc_feature (16)..(383): NCBI GI NO: 20146093 NR Description: glucosyltransferase NTGT2 [Nicotiana tabacum]
  misc_feature (16)..(383): NCBI GI NO: 14192682 NR Description: cold-induced glucosyl transferase
  misc_feature (18)..(383): NCBI GI NO: 40714353 NR Description: anthocyanin 5-O-glucosyltransferase
  misc_feature (16)..(383): NCBI GI NO: 6683052 NR Description: anthocyanin 5-O-glucosyltransferase
  misc_feature (193)..(383): NCBI GI NO: 18390540 NR Description: UDP-glucose transferase
  misc_feature (14)..(211): NCBI GI NO: 18390540 NR Description: UDP-glucose transferase
  misc_feature (192)..(383): NCBI GI NO: 15220556 NR Description: UDP-glycosyltransferase family
  misc_feature (16)..(207): NCBI GI NO: 15220556 NR Description: UDP-glycosyltransferase family
  misc_feature (162)..(383): NCBI GI NO: 7433892 NR Description: hypothetical protein - Arabidopsis thaliana
  misc_feature (232)..(232): Xaa is any aa, unknown or other
MPAMVEEGLVRRAAPEPHFLVVTFPAQGHINPARHLARRLLRATGARVTVCTAVSALRKMFPGAEADAEEEGHRDGAGVRYVPYSDGYDDGFDGAVHDATRYMDQVKVVGSRTLGDVLARLRGAGRPATLVVYTLLLSWVADVARDHAVPAALYWIQPATVLAVYLHFFRATGGVDAAVAAAGGDPWAGVRFPGLPPLRVRDLPSFIVSTSEDDPYAFVADAFRELVGRLDXGEDSPSVLANTFDAVEPEAVASLREHGVDVVPVGPVLSFLDDDAAAGGNNDLFTQDGKGYLEWLDAQAPGSVVYISFGSLSVMRRRQIEEVARGMSESGRPFLWVLREDNRRSEGADADAATLAGGGRGMVVGWCDQVRVLSHPAVGCFVTALAAGTPRWRARRAASPSCACRSGRTRAPTRGWWRGSGPASGPPSATRTGCWRPASCGGVSTSLPPTWCAPRPPCGGRRRAPPRRRAARRRGTSRRSSPSRSPAGITRPSALVRST

SEQ ID NO: 25556 - protein, 496 aa, Zea mays subsp. mays
  peptide (1)..(496): Ceres Seq. ID no. 12407297
  misc_feature (34)..(380): Pfam Name: Pfam Description:  UDP-glucoronosyl and UDP-glucosyl transferase
  misc_feature (1)..(380): NCBI GI NO: 34906162 NR Description: putative anthocyanin 5-O-glucosyltransferase
  misc_feature (13)..(380): NCBI GI NO: 20146093 NR Description: glucosyltransferase NTGT2 [Nicotiana tabacum]
  misc_feature (13)..(380): NCBI GI NO: 14192682 NR Description: cold-induced glucosyl transferase
  misc_feature (15)..(380): NCBI GI NO: 40714353 NR Description: anthocyanin 5-O-glucosyltransferase
  misc_feature (13)..(380): NCBI GI NO: 6683052 NR Description: anthocyanin 5-O-glucosyltransferase
  misc_feature (190)..(380): NCBI GI NO: 18390540 NR Description: UDP-glucose transferase
  misc_feature (11)..(208): NCBI GI NO: 18390540 NR Description: UDP-glucose transferase
  misc_feature (189)..(380): NCBI GI NO: 15220556 NR Description: UDP-glycosyltransferase family
  misc_feature (13)..(204): NCBI GI NO: 15220556 NR Description: UDP-glycosyltransferase family
  misc_feature (159)..(380): NCBI GI NO: 7433892 NR Description: hypothetical protein - Arabidopsis thaliana
  misc_feature (229)..(229): Xaa is any aa, unknown or other
MVEEGLVRRAAPEPHFLVVTFPAQGHINPARHLARRLLRATGARVTVCTAVSALRKMFPGAEADAEEEGHRDGAGVRYVPYSDGYDDGFDGAVHDATRYMDQVKVVGSRTLGDVLARLRGAGRPATLVVYTLLLSWVADVARDHAVPAALYWIQPATVLAVYLHFFRATGGVDAAVAAAGGDPWAGVRFPGLPPLRVRDLPSFIVSTSEDDPYAFVADAFRELVGRLDXGEDSPSVLANTFDAVEPEAVASLREHGVDVVPVGPVLSFLDDDAAAGGNNDLFTQDGKGYLEWLDAQAPGSVVYISFGSLSVMRRRQIEEVARGMSESGRPFLWVLREDNRRSEGADADAATLAGGGRGMVVGWCDQVRVLSHPAVGCFVTALAAGTPRWRARRAASPSCACRSGRTRAPTRGWWRGSGPASGPPSATRTGCWRPASCGGVSTSLPPTWCAPRPPCGGRRRAPPRRRAARRRGTSRRSSPSRSPAGITRPSALVRST

SEQ ID NO: 25557 - DNA, 1522 bp, Zea mays subsp. mays
  misc_feature (1)..(1522): Ceres Seq. ID no. 12410063
gaagtcaacaggcatgccgaacggtggcggcaagaggtggctgctgctgctgccgctgtcgcggtgggttctcctcctcggcagcctccagctcccggcggtcggcggcagcggccatgtcgtcacgcgcatgcgcgggttcgacgggccacttccgttctacctcgaaaccgggtacgtggaggtggacgagcagcaaggtgtgcagctcttctactacttcgtgcgctcggagcgcgacccctacgaggacccgctgctgctgtggctgtccggcggcccaggctgctccggcatctccggccttgcctacgagataggacccttaaaatttgatgcccgagggcaaggtgaatttcccactcttctctaccgaccggagacatggaccaaggtgagcaacatcatatttgtggactcgccggtggggactgggttctcgtacgccaagtccgaggaagggctcgagaccggcgacaccaagcaagtgaagcagctagtcattttcctcaggaagtggctccaagaccatccccggttcgtgatgaatcctctttatattgctggagattcatacagtggtctcatcattcctactcttgcattagaaattgacagaagcatagaactcggtgaaaagatattttccggtctcaaggggtacattgctggcaacccgttgactggcggacagtttgatacagacagccaaattccatactttcatgccatgggacttgtatccgatgaactttacaagtgcacacgggatatcaataagcaatacatcttggatcctgcttgcccggatgatgatctgttgagccccaagactgtagcagagacagatggaacgagcaggttgatgctagagtctgcagattttctacttggttccaaatgtgcagaagctttatacattctatcctacgcttgggggaatgatgatacagttcaggagagcctcggtatccgcaaggggacaattggagcatggaaacgatacagccatgcattgccttacaattatgatatccagagtgtagtggattaccattcaaggctagccacaaaaggatacagggcgctgatatacagcggcgaccacgatgctgttgtaccccatgttggcacacaagcatggattagatacctcaacttgacaatcgttgatgattggcgaccatggtacgttggaggccaagttgctggattcacaaggagttatgcgagcggcctaacatttgccaccgtgaagggtgctggacatgttgcgccgttgtataagaccttggaatgccaaaaaatgtttataacatggatttcagggaatcctctttgatgcaagtctgatagaatgacccatcggttatctgagtgggcgtcagccgtcaggaatcctctttgaagggtcagttgcttgggtttctttggtgtcaactggttcaaatccttgatcgatatggttgatcgtaatatttttggaacttatttcaagatttattaacggtattgttctctt

SEQ ID NO: 25558 - protein, 446 aa, Zea mays subsp. mays
  peptide (1)..(446): Ceres Seq. ID no. 12410064
  misc_feature (46)..(268): Pfam Name: Pfam Description:  Serine carboxypeptidase
  misc_feature (14)..(266): NCBI GI NO: 38344210 NR Description: OSJNBb0051N19.2
  misc_feature (254)..(446): NCBI GI NO: 38344210 NR Description: OSJNBb0051N19.2
  misc_feature (11)..(268): NCBI GI NO: 37530314 NR Description: putative serine carboxypeptidase
  misc_feature (304)..(446): NCBI GI NO: 37530314 NR Description: putative serine carboxypeptidase
  misc_feature (22)..(342): NCBI GI NO: 4101705 NR Description: glucose acyltransferase [Solanum berthaultii]
  misc_feature (298)..(446): NCBI GI NO: 4101705 NR Description: glucose acyltransferase [Solanum berthaultii]
  misc_feature (19)..(266): NCBI GI NO: 7579025 NR Description: glucose acyltransferase [Lycopersicon pennellii]
  misc_feature (253)..(446): NCBI GI NO: 7579025 NR Description: glucose acyltransferase [Lycopersicon pennellii]
  misc_feature (23)..(446): NCBI GI NO: 15228300 NR Description: putative glucose acyltransferase
  misc_feature (22)..(446): NCBI GI NO: 25289782 NR Description: probable serine carboxypeptidase I
KSTGMPNGGGKRWLLLLPLSRWVLLLGSLQLPAVGGSGHVVTRMRGFDGPLPFYLETGYVEVDEQQGVQLFYYFVRSERDPYEDPLLLWLSGGPGCSGISGLAYEIGPLKFDARGQGEFPTLLYRPETWTKVSNIIFVDSPVGTGFSYAKSEEGLETGDTKQVKQLVIFLRKWLQDHPRFVMNPLYIAGDSYSGLIIPTLALEIDRSIELGEKIFSGLKGYIAGNPLTGGQFDTDSQIPYFHAMGLVSDELYKCTRDINKQYILDPACPDDDLLSPKTVAETDGTSRLMLESADFLLGSKCAEALYILSYAWGNDDTVQESLGIRKGTIGAWKRYSHALPYNYDIQSVVDYHSRLATKGYRALIYSGDHDAVVPHVGTQAWIRYLNLTIVDDWRPWYVGGQVAGFTRSYASGLTFATVKGAGHVAPLYKTLECQKMFITWISGNPL

SEQ ID NO: 25559 - protein, 442 aa, Zea mays subsp. mays
  peptide (1)..(442): Ceres Seq. ID no. 12410065
  misc_feature (42)..(264): Pfam Name: Pfam Description:  Serine carboxypeptidase
  misc_feature (10)..(262): NCBI GI NO: 38344210 NR Description: OSJNBb0051N19.2
  misc_feature (250)..(442): NCBI GI NO: 38344210 NR Description: OSJNBb0051N19.2
  misc_feature (7)..(264): NCBI GI NO: 37530314 NR Description: putative serine carboxypeptidase
  misc_feature (300)..(442): NCBI GI NO: 37530314 NR Description: putative serine carboxypeptidase
  misc_feature (18)..(338): NCBI GI NO: 4101705 NR Description: glucose acyltransferase [Solanum berthaultii]
  misc_feature (294)..(442): NCBI GI NO: 4101705 NR Description: glucose acyltransferase [Solanum berthaultii]
  misc_feature (15)..(262): NCBI GI NO: 7579025 NR Description: glucose acyltransferase [Lycopersicon pennellii]
  misc_feature (249)..(442): NCBI GI NO: 7579025 NR Description: glucose acyltransferase [Lycopersicon pennellii]
  misc_feature (19)..(442): NCBI GI NO: 15228300 NR Description: putative glucose acyltransferase
  misc_feature (18)..(442): NCBI GI NO: 25289782 NR Description: probable serine carboxypeptidase I
MPNGGGKRWLLLLPLSRWVLLLGSLQLPAVGGSGHVVTRMRGFDGPLPFYLETGYVEVDEQQGVQLFYYFVRSERDPYEDPLLLWLSGGPGCSGISGLAYEIGPLKFDARGQGEFPTLLYRPETWTKVSNIIFVDSPVGTGFSYAKSEEGLETGDTKQVKQLVIFLRKWLQDHPRFVMNPLYIAGDSYSGLIIPTLALEIDRSIELGEKIFSGLKGYIAGNPLTGGQFDTDSQIPYFHAMGLVSDELYKCTRDINKQYILDPACPDDDLLSPKTVAETDGTSRLMLESADFLLGSKCAEALYILSYAWGNDDTVQESLGIRKGTIGAWKRYSHALPYNYDIQSVVDYHSRLATKGYRALIYSGDHDAVVPHVGTQAWIRYLNLTIVDDWRPWYVGGQVAGFTRSYASGLTFATVKGAGHVAPLYKTLECQKMFITWISGNPL

SEQ ID NO: 25560 - protein, 403 aa, Zea mays subsp. mays
  peptide (1)..(403): Ceres Seq. ID no. 12410066
  misc_feature (3)..(225): Pfam Name: Pfam Description:  Serine carboxypeptidase
  misc_feature (1)..(223): NCBI GI NO: 38344210 NR Description: OSJNBb0051N19.2
  misc_feature (211)..(403): NCBI GI NO: 38344210 NR Description: OSJNBb0051N19.2
  misc_feature (1)..(225): NCBI GI NO: 37530314 NR Description: putative serine carboxypeptidase
  misc_feature (261)..(403): NCBI GI NO: 37530314 NR Description: putative serine carboxypeptidase
  misc_feature (1)..(299): NCBI GI NO: 4101705 NR Description: glucose acyltransferase [Solanum berthaultii]
  misc_feature (255)..(403): NCBI GI NO: 4101705 NR Description: glucose acyltransferase [Solanum berthaultii]
  misc_feature (1)..(223): NCBI GI NO: 7579025 NR Description: glucose acyltransferase [Lycopersicon pennellii]
  misc_feature (210)..(403): NCBI GI NO: 7579025 NR Description: glucose acyltransferase [Lycopersicon pennellii]
  misc_feature (1)..(403): NCBI GI NO: 15228300 NR Description: putative glucose acyltransferase
  misc_feature (1)..(403): NCBI GI NO: 25289782 NR Description: probable serine carboxypeptidase I
MRGFDGPLPFYLETGYVEVDEQQGVQLFYYFVRSERDPYEDPLLLWLSGGPGCSGISGLAYEIGPLKFDARGQGEFPTLLYRPETWTKVSNIIFVDSPVGTGFSYAKSEEGLETGDTKQVKQLVIFLRKWLQDHPRFVMNPLYIAGDSYSGLIIPTLALEIDRSIELGEKIFSGLKGYIAGNPLTGGQFDTDSQIPYFHAMGLVSDELYKCTRDINKQYILDPACPDDDLLSPKTVAETDGTSRLMLESADFLLGSKCAEALYILSYAWGNDDTVQESLGIRKGTIGAWKRYSHALPYNYDIQSVVDYHSRLATKGYRALIYSGDHDAVVPHVGTQAWIRYLNLTIVDDWRPWYVGGQVAGFTRSYASGLTFATVKGAGHVAPLYKTLECQKMFITWISGNPL

SEQ ID NO: 25561 - DNA, 1300 bp, Zea mays subsp. mays
  misc_feature (1)..(1300): Ceres Seq. ID no. 13494465
gagcaaaatataaagtttataaacccactcctccccttcccctgttccctctaccaccaccaccggcaccgcgggacagtctgctctcgtcccgctgcagcccgtccccgacccggaaccctagcgactgccattgcccacgcgccgctcgcccgatgaacggcgggggctctgggctggcgcccaacgccgcgcacaccgcggacgaggtcttccgcgactacaaaggccgccgcgccggcatgatcaaggccctcaccactgatgtggagaggttcttcaaactctgtgaccctgaaaaggagaacttgtgcctttatggctatcccgatgagacgtgggaggtgaccttgccagctgaggaagttccccctgagatccctgaaccagcattaggaatcaactttgctagggatggcatgaatgagaaagactggctggcgctagttgcagtccacagtgattcctggttactgtctgttgcattctactttggtgcacgctttggatttgacagagaaactaggaggcgactctttagcctgataaacaacatgcccacgatatttgaggtagtgacaggagcagccaagaagcaggcgaaggagaagacacctaatagtagcagcaagagcaacaggcctagttcaaaagtgtcaagagcagagtctcgttcaaaggctaaggtcccccaagacgaagaagagagcggtgatgacgatgaggatgaggaggcagacgagcacaacaataccttgtgtggaacttgcggaactaacgacagcaaggaccagttctggatctgttgtgataactgcgagaagtggtaccatgggaagtgtgtcaagatcacgccagctcgagctgagcatatcaagcagtacaagtgcccagactgcaccaacaagcgggccagggcatgagcggcaaacatcggcatcgggcgacctttgataggaaggaagaaaccacctcctggcttcaagatccctagatatggcgtaggtccctagtttacgaagtctgcattttcatgtgttcattaatatatctgctgattagctgttcgacctagcagtgtctaaaacgtgccgtgtgtcttctgtgctgagtgttgacatggggcctcctccctccagcctgtaaacgctgtcactgaaggtacctctcaactgaccatccttcattgttggtgtcgtgcagtgagtagtggccgtactctttgttcccagttcctagcatttgaattgctcaaatgcgtaccttgctgagtaaggccgttggaaaatgacgaatagct

SEQ ID NO: 25562 - protein, 306 aa, Zea mays subsp. mays
  peptide (1)..(306): Ceres Seq. ID no. 13494466
  misc_feature (252)..(302): Pfam Name: Pfam Description:  PHD-finger
  misc_feature (54)..(306): NCBI GI NO: 4091080 NR Description: nucleic acid binding protein [Oryza sativa]
  misc_feature (54)..(306): NCBI GI NO: 34907474 NR Description: nucleic acid binding protein
  misc_feature (54)..(306): NCBI GI NO: 11281498 NR Description: nucleic acid binding protein [imported] - rice
  misc_feature (52)..(306): NCBI GI NO: 15239624 NR Description: nucleic acid binding protein - like
  misc_feature (52)..(305): NCBI GI NO: 30687843 NR Description: zinc finger protein - like [Arabidopsis thaliana]
  misc_feature (52)..(306): NCBI GI NO: 15229157 NR Description: nucleic acid binding protein-related
  misc_feature (58)..(305): NCBI GI NO: 15226967 NR Description: PHD-type zinc finger protein -related
  misc_feature (58)..(305): NCBI GI NO: 21593407 NR Description: putative PHD-type zinc finger protein
  misc_feature (58)..(306): NCBI GI NO: 15223786 NR Description: nucleic acid binding protein (alfin-1) -related
  misc_feature (58)..(305): NCBI GI NO: 7488751 NR Description: probable zinc finger protein - alfalfa (fragment)
AKYKVYKPTPPLPLFPLPPPPAPRDSLLSSRCSPSPTRNPSDCHCPRAARPMNGGGSGLAPNAAHTADEVFRDYKGRRAGMIKALTTDVERFFKLCDPEKENLCLYGYPDETWEVTLPAEEVPPEIPEPALGINFARDGMNEKDWLALVAVHSDSWLLSVAFYFGARFGFDRETRRRLFSLINNMPTIFEVVTGAAKKQAKEKTPNSSSKSNRPSSKVSRAESRSKAKVPQDEEESGDDDEDEEADEHNNTLCGTCGTNDSKDQFWICCDNCEKWYHGKCVKITPARAEHIKQYKCPDCTNKRARA

SEQ ID NO: 25563 - protein, 255 aa, Zea mays subsp. mays
  peptide (1)..(255): Ceres Seq. ID no. 13494467
  misc_feature (201)..(251): Pfam Name: Pfam Description:  PHD-finger
  misc_feature (3)..(255): NCBI GI NO: 4091080 NR Description: nucleic acid binding protein [Oryza sativa]
  misc_feature (3)..(255): NCBI GI NO: 34907474 NR Description: nucleic acid binding protein
  misc_feature (3)..(255): NCBI GI NO: 11281498 NR Description: nucleic acid binding protein [imported] - rice
  misc_feature (1)..(255): NCBI GI NO: 15239624 NR Description: nucleic acid binding protein - like
  misc_feature (1)..(254): NCBI GI NO: 30687843 NR Description: zinc finger protein - like [Arabidopsis thaliana]
  misc_feature (1)..(255): NCBI GI NO: 15229157 NR Description: nucleic acid binding protein-related
  misc_feature (7)..(254): NCBI GI NO: 15226967 NR Description: PHD-type zinc finger protein -related
  misc_feature (7)..(254): NCBI GI NO: 21593407 NR Description: putative PHD-type zinc finger protein
  misc_feature (7)..(255): NCBI GI NO: 15223786 NR Description: nucleic acid binding protein (alfin-1) -related
  misc_feature (7)..(254): NCBI GI NO: 7488751 NR Description: probable zinc finger protein - alfalfa (fragment)
MNGGGSGLAPNAAHTADEVFRDYKGRRAGMIKALTTDVERFFKLCDPEKENLCLYGYPDETWEVTLPAEEVPPEIPEPALGINFARDGMNEKDWLALVAVHSDSWLLSVAFYFGARFGFDRETRRRLFSLINNMPTIFEVVTGAAKKQAKEKTPNSSSKSNRPSSKVSRAESRSKAKVPQDEEESGDDDEDEEADEHNNTLCGTCGTNDSKDQFWICCDNCEKWYHGKCVKITPARAEHIKQYKCPDCTNKRARA

SEQ ID NO: 25564 - protein, 226 aa, Zea mays subsp. mays
  peptide (1)..(226): Ceres Seq. ID no. 13494468
  misc_feature (172)..(222): Pfam Name: Pfam Description:  PHD-finger
  misc_feature (1)..(226): NCBI GI NO: 4091080 NR Description: nucleic acid binding protein [Oryza sativa]
  misc_feature (1)..(226): NCBI GI NO: 34907474 NR Description: nucleic acid binding protein
  misc_feature (1)..(226): NCBI GI NO: 11281498 NR Description: nucleic acid binding protein [imported] - rice
  misc_feature (1)..(226): NCBI GI NO: 15239624 NR Description: nucleic acid binding protein - like
  misc_feature (1)..(225): NCBI GI NO: 30687843 NR Description: zinc finger protein - like [Arabidopsis thaliana]
  misc_feature (1)..(226): NCBI GI NO: 15229157 NR Description: nucleic acid binding protein-related
  misc_feature (1)..(225): NCBI GI NO: 15226967 NR Description: PHD-type zinc finger protein -related
  misc_feature (1)..(225): NCBI GI NO: 21593407 NR Description: putative PHD-type zinc finger protein
  misc_feature (1)..(226): NCBI GI NO: 15223786 NR Description: nucleic acid binding protein (alfin-1) -related
  misc_feature (1)..(225): NCBI GI NO: 7488751 NR Description: probable zinc finger protein - alfalfa (fragment)
MIKALTTDVERFFKLCDPEKENLCLYGYPDETWEVTLPAEEVPPEIPEPALGINFARDGMNEKDWLALVAVHSDSWLLSVAFYFGARFGFDRETRRRLFSLINNMPTIFEVVTGAAKKQAKEKTPNSSSKSNRPSSKVSRAESRSKAKVPQDEEESGDDDEDEEADEHNNTLCGTCGTNDSKDQFWICCDNCEKWYHGKCVKITPARAEHIKQYKCPDCTNKRARA

SEQ ID NO: 25565 - DNA, 1586 bp, Zea mays subsp. mays
  misc_feature (1)..(1586): Ceres Seq. ID no. 12405130
gcaacggtccaggtttccaaggtccaacgttccgacccacgggaagcttctagaaaccattagacgcaccggtcgcgttcctcctcatggcccccacttgtcatccgtccatcctcacgtctctgccccaccattttaccggtagccaacaaaactaggttccgtggcgtcgggtgggaccagcaaccagccgccgcagccggcccccaggcgcctctatatacggcactccgactccgatacattggcgacatcacagatcacacacactcgagaactccatttcgatcccatttgaaatcaacccatcctcgtttcctccgtctagcagcctctcaccctcatggccaagatcaagatcgggatcaatgggttcggcaggatcggaaggctggtggccagagtggccctgcagagcgacgacgtcgagctcgtcgccgtgaacgaccccttcatcagcaccgattacatgacctacatgttcaagtatgacactgtgcacggacagtggaagcaccatgaggtcaaggtgaaggactccaagacccttctctttggtgagaaggaggttactgtgtttggctgcaggaaccctgaggagatcccatggggttcggttggcgctgaatatgttgttgagtctactggtgttttcactgaccaggagaaggctgcagctcacttgaagggtggtgccaagaaggttgtcatttctgctcctagcaaggatgcccccatgttcgttgttggtgtcaacgagaaggagtacaagtctgacatcaacattgtctctaatgctagctgcacaaccaactgtcttgctcctcttgctaaggtcatcaatgacaagttcggtattgttgagggtctgatgaccactgttcatgccatcactgctacccagaagactgttgatgggccctcatctaaggactggaggggtggaagggctgctagtttcaacatcattcccagcagcactggagctgctaaggctgttggcaaagtgcttcctgtcctcaatggaaagctgactggaatgtctttccgtgtcccaactgtcgatgtttctgttgttgatctaactgttaggcttgagaagtctgccacctatgatgagatcaaggctgcggtcaaggccgagtcagagggtagcctcaagggcattctgggttatgtcgaggaggaccttgtttccaccgatttccagggtgacagcaggtctagcatctttgatgcgaaggctggcattgccttgaacggcaactttgtgaagcttgtgtcctggtacgacaacgagtggggatacagcacccgagtggtcgacctgatccgccacatgaacagcaccaagtaaatgaacaaactgatgaaagcatgcaaagagtgatgaaagcatgcaaagagagttgtgtttcttccccggaagtgcttccgagaataaatttttcttatctgattgtctaaaacctataattggtgtaatggtatcgtagtggttggttgagcattgagtgactcatattttgtcaggtctatgtgttatcgttaaacttttaacggtcattctatttcaaaagttttcc

SEQ ID NO: 25566 - protein, 337 aa, Zea mays subsp. mays
  peptide (1)..(337): Ceres Seq. ID no. 12405131
  misc_feature (155)..(316): Pfam Name: Pfam Description:  Glyceraldehyde 3-phosphate dehydrogenase
  misc_feature (1)..(337): NCBI GI NO: 6166167 NR Description: Glyceraldehyde 3-phosphate dehydrogenase
  misc_feature (1)..(336): NCBI GI NO: 7431535 NR Description: glyceraldehyde-3-phosphate dehydrogenase
  misc_feature (43)..(337): NCBI GI NO: 29150193 NR Description: putative glyceraldehydes 3-phosphate dehydrogenase
  misc_feature (1)..(47): NCBI GI NO: 29150193 NR Description: putative glyceraldehydes 3-phosphate dehydrogenase
  misc_feature (1)..(337): NCBI GI NO: 462141 NR Description: Glyceraldehyde 3-phosphate dehydrogenase (GAPDH)
  misc_feature (1)..(337): NCBI GI NO: 4539543 NR Description: glyceraldehyde-3-phosphate dehydrogenase
  misc_feature (1)..(337): NCBI GI NO: 120680 NR Description: Glyceraldehyde 3-phosphate dehydrogenase
  misc_feature (1)..(337): NCBI GI NO: 6016075 NR Description: Glyceraldehyde 3-phosphate dehydrogenase
  misc_feature (1)..(337): NCBI GI NO: 120666 NR Description: Glyceraldehyde 3-phosphate dehydrogenase
  misc_feature (3)..(337): NCBI GI NO: 462140 NR Description: Glyceraldehyde 3-phosphate dehydrogenase
MAKIKIGINGFGRIGRLVARVALQSDDVELVAVNDPFISTDYMTYMFKYDTVHGQWKHHEVKVKDSKTLLFGEKEVTVFGCRNPEEIPWGSVGAEYVVESTGVFTDQEKAAAHLKGGAKKVVISAPSKDAPMFVVGVNEKEYKSDINIVSNASCTTNCLAPLAKVINDKFGIVEGLMTTVHAITATQKTVDGPSSKDWRGGRAASFNIIPSSTGAAKAVGKVLPVLNGKLTGMSFRVPTVDVSVVDLTVRLEKSATYDEIKAAVKAESEGSLKGILGYVEEDLVSTDFQGDSRSSIFDAKAGIALNGNFVKLVSWYDNEWGYSTRVVDLIRHMNSTK

SEQ ID NO: 25567 - protein, 295 aa, Zea mays subsp. mays
  peptide (1)..(295): Ceres Seq. ID no. 12405132
  misc_feature (113)..(274): Pfam Name: Pfam Description:  Glyceraldehyde 3-phosphate dehydrogenase
  misc_feature (1)..(295): NCBI GI NO: 6166167 NR Description: Glyceraldehyde 3-phosphate dehydrogenase
  misc_feature (1)..(294): NCBI GI NO: 7431535 NR Description: glyceraldehyde-3-phosphate dehydrogenase
  misc_feature (1)..(295): NCBI GI NO: 29150193 NR Description: putative glyceraldehydes 3-phosphate dehydrogenase
  misc_feature (1)..(295): NCBI GI NO: 462141 NR Description: Glyceraldehyde 3-phosphate dehydrogenase (GAPDH)
  misc_feature (1)..(295): NCBI GI NO: 4539543 NR Description: glyceraldehyde-3-phosphate dehydrogenase
  misc_feature (1)..(295): NCBI GI NO: 120680 NR Description: Glyceraldehyde 3-phosphate dehydrogenase
  misc_feature (1)..(295): NCBI GI NO: 6016075 NR Description: Glyceraldehyde 3-phosphate dehydrogenase
  misc_feature (1)..(295): NCBI GI NO: 120666 NR Description: Glyceraldehyde 3-phosphate dehydrogenase
  misc_feature (1)..(295): NCBI GI NO: 462140 NR Description: Glyceraldehyde 3-phosphate dehydrogenase
  misc_feature (1)..(295): NCBI GI NO: 120674 NR Description: Glyceraldehyde 3-phosphate dehydrogenase
MTYMFKYDTVHGQWKHHEVKVKDSKTLLFGEKEVTVFGCRNPEEIPWGSVGAEYVVESTGVFTDQEKAAAHLKGGAKKVVISAPSKDAPMFVVGVNEKEYKSDINIVSNASCTTNCLAPLAKVINDKFGIVEGLMTTVHAITATQKTVDGPSSKDWRGGRAASFNIIPSSTGAAKAVGKVLPVLNGKLTGMSFRVPTVDVSVVDLTVRLEKSATYDEIKAAVKAESEGSLKGILGYVEEDLVSTDFQGDSRSSIFDAKAGIALNGNFVKLVSWYDNEWGYSTRVVDLIRHMNSTK

SEQ ID NO: 25568 - protein, 292 aa, Zea mays subsp. mays
  peptide (1)..(292): Ceres Seq. ID no. 12405133
  misc_feature (110)..(271): Pfam Name: Pfam Description:  Glyceraldehyde 3-phosphate dehydrogenase
  misc_feature (1)..(292): NCBI GI NO: 6166167 NR Description: Glyceraldehyde 3-phosphate dehydrogenase
  misc_feature (1)..(291): NCBI GI NO: 7431535 NR Description: glyceraldehyde-3-phosphate dehydrogenase
  misc_feature (1)..(292): NCBI GI NO: 29150193 NR Description: putative glyceraldehydes 3-phosphate dehydrogenase
  misc_feature (1)..(292): NCBI GI NO: 462141 NR Description: Glyceraldehyde 3-phosphate dehydrogenase (GAPDH)
  misc_feature (1)..(292): NCBI GI NO: 4539543 NR Description: glyceraldehyde-3-phosphate dehydrogenase
  misc_feature (1)..(292): NCBI GI NO: 120680 NR Description: Glyceraldehyde 3-phosphate dehydrogenase
  misc_feature (1)..(292): NCBI GI NO: 6016075 NR Description: Glyceraldehyde 3-phosphate dehydrogenase
  misc_feature (1)..(292): NCBI GI NO: 120666 NR Description: Glyceraldehyde 3-phosphate dehydrogenase
  misc_feature (1)..(292): NCBI GI NO: 462140 NR Description: Glyceraldehyde 3-phosphate dehydrogenase
  misc_feature (1)..(292): NCBI GI NO: 120674 NR Description: Glyceraldehyde 3-phosphate dehydrogenase
MFKYDTVHGQWKHHEVKVKDSKTLLFGEKEVTVFGCRNPEEIPWGSVGAEYVVESTGVFTDQEKAAAHLKGGAKKVVISAPSKDAPMFVVGVNEKEYKSDINIVSNASCTTNCLAPLAKVINDKFGIVEGLMTTVHAITATQKTVDGPSSKDWRGGRAASFNIIPSSTGAAKAVGKVLPVLNGKLTGMSFRVPTVDVSVVDLTVRLEKSATYDEIKAAVKAESEGSLKGILGYVEEDLVSTDFQGDSRSSIFDAKAGIALNGNFVKLVSWYDNEWGYSTRVVDLIRHMNSTK

SEQ ID NO: 25569 - DNA, 1349 bp, Zea mays subsp. mays
  misc_feature (1)..(1349): Ceres Seq. ID no. 13498573
attgaactgctctgggaccgccctgtaacatccaccaactcgaggaggaggaggaggaggaggaggaggaggagagatccccccaccgagcctcggtttccaagcgccagcagaagaagaagagacaggacacatggcggcaggtttcggcccgaggttcgccgccggcgatgctccggcgagacggtgtaacctggagcggttcctcgaggccaccacgcccgtcgttgcgtcctccagctgctcgtccaaggagaccgcgaacggttgggggcagcggcggtcagacgacgcagacggctcgtcgccgttcttcgctctgggcgacctctgggactcgttcaaggagtgcagcgcgtacggcaccgctgtgccccttgctctgaacggctgcagcgacggcgtcgttcagtactacgtcccctacctgtctgcaatccagctttacggagccctcagcaggcacatcggcccttcgaggacgggtgcagaggagagcgacagcgacgcggagcgcgagacgagctccagcacgaacacgttatcggcgcgggaggaggcgagcgagagcagcaccagcggcagcgaagcctccggcgacgagggcgagccgggaccggggagctggtgccaggagcggctcctcttcgagttcctcgagtccgagcctccctaccagcgcgagcctctggctgacaagatttgtagccttgcccagcggtttccggagctcaagactctcaggagctgcgacctgtctccggcaagctggatctccgtggcgtggtacggtggacgaactagatagatgtacccgatctaccggatcccgacggggccaacgctgcgcgacctggacgcctgcttcctcacctaccactccctgtccacgcagttcgcagcaggcgccagcagcaacggccccagaccggcgacggcagccaccgcgacggcgatgatgtggctcccgacgttcgcgatggcgtcgtacaaggtgaaggcggcggcgtggacgccgggctggcgcgaccggcaggtggccgcgtccctcgcgcaggccgccgacgcctggctcaggctcctgcgcgccgaccacccggaccaccgcttcttcgccgcccggcggcctcccaggagatggtgatcatttgagtgtatagagtactctctctctctggcaagtctgaaggtagttgtcctgaaaaaagaaacggctgaggtagttagggttcactagcggaaccggagtgataaagtatgttcatcctgtagtttcaatgttttttccttttttttgtatccgccatgttctcaggaaaaaaatgtatcagaaaacgtataataggtgt

SEQ ID NO: 25570 - protein, 224 aa, Zea mays subsp. mays
  peptide (1)..(224): Ceres Seq. ID no. 13498574
  misc_feature (20)..(224): Pfam Name: DUF789 Pfam Description: Protein of unknown function
  misc_feature (20)..(224): NCBI GI NO: 18379188 NR Description: expressed protein [Arabidopsis thaliana]
  misc_feature (16)..(224): NCBI GI NO: 22329567 NR Description: expressed protein [Arabidopsis thaliana]
  misc_feature (20)..(224): NCBI GI NO: 34897254 NR Description: hypothetical protein
  misc_feature (20)..(224): NCBI GI NO: 10177151 NR Description: gb|AAF31026
  misc_feature (20)..(224): NCBI GI NO: 15450996 NR Description: Unknown protein [Arabidopsis thaliana]
  misc_feature (20)..(224): NCBI GI NO: 22327664 NR Description: expressed protein [Arabidopsis thaliana]
  misc_feature (154)..(224): NCBI GI NO: 34914654 NR Description: P0504D03.18
  misc_feature (58)..(106): NCBI GI NO: 34914654 NR Description: P0504D03.18
  misc_feature (20)..(217): NCBI GI NO: 25373432 NR Description: hypothetical protein At2g01260
  misc_feature (50)..(224): NCBI GI NO: 34394268 NR Description: hypothetical protein
MAAGFGPRFAAGDAPARRCNLERFLEATTPVVASSSCSSKETANGWGQRRSDDADGSSPFFALGDLWDSFKECSAYGTAVPLALNGCSDGVVQYYVPYLSAIQLYGALSRHIGPSRTGAEESDSDAERETSSSTNTLSAREEASESSTSGSEASGDEGEPGPGSWCQERLLFEFLESEPPYQREPLADKICSLAQRFPELKTLRSCDLSPASWISVAWYGGRTR

SEQ ID NO: 25571 - DNA, 986 bp, Zea mays subsp. mays
  misc_feature (1)..(986): Ceres Seq. ID no. 12376299
attcaagcatcgacagtcgacgctgcagcaggaagccaaagaggagagaatccatcgagtcgaccaccgagcacggtcagggcggcggggctcgccgtggccacagctcaggaatccaatcccccactcctcaccggcgcccgcggttttataaatagattccctcgtcactgtcgcggtcgcggcttgatcggattcaactcacctaccccaccccctcgattccttcccagctctggctacttcctacgccaccaccgcccgctccggcctcggctcctcgagcaagctgccatggctgccgccgcgctgagggagcaactcaacgctctcctctcctccatgttcgcctcgggtctggtggacgagcagttccagcagctgcagatgctgcaggaagacgggggcacgccgggcttcgtcgccgaggtcgtcaccctcttctgcgacgacgccgacaggatcatctccgagctcgccgctctgcttgaccagcccatcgtggactttgataaggtggacgcctacgtgcatcagctcaaagggagcagcgccagtgttggcgctcagaaagtgaagtttacttgcatgcagttccgtcagttatgtcaggataagaacagagacgggtgcatcatggcattggctgttgtgagaaatgagttctatgatctgcgcaataaattccagactatgcttcagcttgagcagcaaatccaggctcaacaataaatcgaagcagaaagcgtagctgcatgtggcctcacatgataagtgtatctttaaagatgtagaccatgttctctgtgttcctacaattgtgacaaaatcatcgtcgttgaggccggctcacatgcatgtaactgttagctataacaattattgtctaacgttgtccttgttactccacccgtttgtgttggattgccatcgaccatcatatgaaaacttttttttttccaatcccctccaatccatgtgggatg

SEQ ID NO: 25572 - protein, 243 aa, Zea mays subsp. mays
  peptide (1)..(243): Ceres Seq. ID no. 12376300
  misc_feature (99)..(243): NCBI GI NO: 5689238 NR Description: histidine-containing phosphotransfer protein
  misc_feature (99)..(241): NCBI GI NO: 33637784 NR Description: two-component phosphorelay mediator HP1
  misc_feature (99)..(241): NCBI GI NO: 33637786 NR Description: two-component phosphorelay mediator HP2
  misc_feature (99)..(239): NCBI GI NO: 22036126 NR Description: his-containing phosphotransfer protein [Zea mays]
  misc_feature (99)..(239): NCBI GI NO: 6009622 NR Description: histidine-containing phosphotransfer protein
  misc_feature (105)..(241): NCBI GI NO: 15233079 NR Description: two-component phosphorelay mediator, putative
  misc_feature (99)..(241): NCBI GI NO: 13774348 NR Description: histidine-containing phosphotransfer protein
  misc_feature (99)..(239): NCBI GI NO: 18379097 NR Description: putative AHP2; protein id: At1g03430
  misc_feature (99)..(239): NCBI GI NO: 21593802 NR Description: putative AHP2 [Arabidopsis thaliana]
  misc_feature (102)..(239): NCBI GI NO: 15228686 NR Description: ATHP2, putative; protein id: At3g29350
IQASTVDAAAGSQRGENPSSRPPSTVRAAGLAVATAQESNPPLLTGARGFINRFPRHCRGRGLIGFNSPTPPPRFLPSSGYFLRHHRPLRPRLLEQAAMAAAALREQLNALLSSMFASGLVDEQFQQLQMLQEDGGTPGFVAEVVTLFCDDADRIISELAALLDQPIVDFDKVDAYVHQLKGSSASVGAQKVKFTCMQFRQLCQDKNRDGCIMALAVVRNEFYDLRNKFQTMLQLEQQIQAQQ

SEQ ID NO: 25573 - protein, 145 aa, Zea mays subsp. mays
  peptide (1)..(145): Ceres Seq. ID no. 12376301
  misc_feature (1)..(145): NCBI GI NO: 5689238 NR Description: histidine-containing phosphotransfer protein
  misc_feature (1)..(143): NCBI GI NO: 33637784 NR Description: two-component phosphorelay mediator HP1
  misc_feature (1)..(143): NCBI GI NO: 33637786 NR Description: two-component phosphorelay mediator HP2
  misc_feature (1)..(141): NCBI GI NO: 22036126 NR Description: his-containing phosphotransfer protein [Zea mays]
  misc_feature (1)..(141): NCBI GI NO: 6009622 NR Description: histidine-containing phosphotransfer protein
  misc_feature (7)..(143): NCBI GI NO: 15233079 NR Description: two-component phosphorelay mediator, putative
  misc_feature (1)..(143): NCBI GI NO: 13774348 NR Description: histidine-containing phosphotransfer protein
  misc_feature (1)..(141): NCBI GI NO: 18379097 NR Description: putative AHP2; protein id: At1g03430
  misc_feature (1)..(141): NCBI GI NO: 21593802 NR Description: putative AHP2 [Arabidopsis thaliana]
  misc_feature (4)..(141): NCBI GI NO: 15228686 NR Description: ATHP2, putative; protein id: At3g29350
MAAAALREQLNALLSSMFASGLVDEQFQQLQMLQEDGGTPGFVAEVVTLFCDDADRIISELAALLDQPIVDFDKVDAYVHQLKGSSASVGAQKVKFTCMQFRQLCQDKNRDGCIMALAVVRNEFYDLRNKFQTMLQLEQQIQAQQ

SEQ ID NO: 25574 - protein, 129 aa, Zea mays subsp. mays
  peptide (1)..(129): Ceres Seq. ID no. 12376302
  misc_feature (1)..(129): NCBI GI NO: 5689238 NR Description: histidine-containing phosphotransfer protein
  misc_feature (1)..(127): NCBI GI NO: 33637784 NR Description: two-component phosphorelay mediator HP1
  misc_feature (1)..(127): NCBI GI NO: 33637786 NR Description: two-component phosphorelay mediator HP2
  misc_feature (1)..(125): NCBI GI NO: 22036126 NR Description: his-containing phosphotransfer protein [Zea mays]
  misc_feature (1)..(125): NCBI GI NO: 6009622 NR Description: histidine-containing phosphotransfer protein
  misc_feature (1)..(127): NCBI GI NO: 15233079 NR Description: two-component phosphorelay mediator, putative
  misc_feature (1)..(127): NCBI GI NO: 13774348 NR Description: histidine-containing phosphotransfer protein
  misc_feature (1)..(125): NCBI GI NO: 18379097 NR Description: putative AHP2; protein id: At1g03430
  misc_feature (1)..(125): NCBI GI NO: 21593802 NR Description: putative AHP2 [Arabidopsis thaliana]
  misc_feature (1)..(125): NCBI GI NO: 15228686 NR Description: ATHP2, putative; protein id: At3g29350
MFASGLVDEQFQQLQMLQEDGGTPGFVAEVVTLFCDDADRIISELAALLDQPIVDFDKVDAYVHQLKGSSASVGAQKVKFTCMQFRQLCQDKNRDGCIMALAVVRNEFYDLRNKFQTMLQLEQQIQAQQ

SEQ ID NO: 25575 - DNA, 1429 bp, Zea mays subsp. mays
  misc_feature (1)..(1429): Ceres Seq. ID no. 12374435
agtccaagtctccagctacgactgccaggtctccgcttgtcgccgtcacgcgcgcgcaggggcagggcgcaccatccccgcgccgccatgtccggcaccgggtgcctccccaccgacggcccggccctatcccgggtctgccgggacggcgcggccgccgcacggctcaagacggggtcgctgctggccattctcgtcgccagcgccgtcggcatctgcctccccgtcgcgctcacgcgggccttccgcggcagcccaaactacgcgcggggcctgctcctcgtcaagtgctacgcggctggggtcatcctctccacctcgctcgtccacgtgctccccgacgcgcacgccgccctcgccgactgcgccgtcgcctcgcgcaggccctggagggacttccccttcgcgggccttttcaccctcgtcggcgcgctgctcgcgctcctcgtcgacctctccgcctcctcccacctcgaggcccacgcccacgtcggcgcccaccacgaaactccctacgccccgatcccgaagaaggtacccgtgttcgagctcgccggcgaaatgagccccaagaaacgcgctttcttgggcgacgaccgagaagaggaccccgcgccgcacgccgccaccaacggcgcagacccggaccgcgacgacgtggcgctcttcggacccaagaagggcgcccgcagcgacgaggtcccggtcatcactgccgggtgccatgccgtcgcccatgaagtggtggaggtaggggaggggcccggtgaggacgaggaggaggccaggaggaagcagaagatggtgtccaaagtgctggagattgggatagtcttccactccgtcatcatcggagttacaatggggatgtcccaggatgtctgtgcaatccggccacttgtggttgcgctctccttccatcaggtgttcgaggggatgggcctgggcggatgcatcgcacaggctggttttgggatggcaacagttggctacatgtgcataatgttctcagtgacgacgccattgggaattcttcttggaatgctagtgttccacatgactggctacgacgatagcaatccaaatgccttaataatggaagggatccttggttcactttcggctggaattctcatctatatggcgctagtcgacctagtttctcttgattttttccacaacaagatgatgtcagcgtctttgaagctgaagaaggcgtgttacattgccttggtgcttggatctgcttctatgtcggtattagctctctgggcataggcattttgaagaaaagccttatttacgatcttcagaggtattgctccttgatgtaaaggaatggataatttgggggccaacagtacactagtccctcatgtaaatttgaacacaaaggaaactgaaaattcacgaccacagtttgtgagct

SEQ ID NO: 25576 - protein, 425 aa, Zea mays subsp. mays
  peptide (1)..(425): Ceres Seq. ID no. 12374436
  misc_feature (54)..(184): Pfam Name: Pfam Description:  ZIP Zinc transporter
  misc_feature (249)..(425): NCBI GI NO: 15227702 NR Description: putative Fe
  misc_feature (38)..(184): NCBI GI NO: 15227702 NR Description: putative Fe
  misc_feature (249)..(425): NCBI GI NO: 40782197 NR Description: zinc transporter ZIP6
  misc_feature (47)..(184): NCBI GI NO: 40782197 NR Description: zinc transporter ZIP6
  misc_feature (258)..(425): NCBI GI NO: 40888872 NR Description: TPA: putative ZIP-like protein
  misc_feature (242)..(425): NCBI GI NO: 30526082 NR Description: putative ZIP-like zinc transporter
  misc_feature (19)..(161): NCBI GI NO: 30526082 NR Description: putative ZIP-like zinc transporter
  misc_feature (229)..(425): NCBI GI NO: 32966053 NR Description: iron transporter Fe2
  misc_feature (48)..(157): NCBI GI NO: 32966053 NR Description: iron transporter Fe2
  misc_feature (229)..(425): NCBI GI NO: 34900456 NR Description: putative zinc transporter protein ZIP1
SPSLQLRLPGLRLSPSRARRGRAHHPRAAMSGTGCLPTDGPALSRVCRDGAAAARLKTGSLLAILVASAVGICLPVALTRAFRGSPNYARGLLLVKCYAAGVILSTSLVHVLPDAHAALADCAVASRRPWRDFPFAGLFTLVGALLALLVDLSASSHLEAHAHVGAHHETPYAPIPKKVPVFELAGEMSPKKRAFLGDDREEDPAPHAATNGADPDRDDVALFGPKKGARSDEVPVITAGCHAVAHEVVEVGEGPGEDEEEARRKQKMVSKVLEIGIVFHSVIIGVTMGMSQDVCAIRPLVVALSFHQVFEGMGLGGCIAQAGFGMATVGYMCIMFSVTTPLGILLGMLVFHMTGYDDSNPNALIMEGILGSLSAGILIYMALVDLVSLDFFHNKMMSASLKLKKACYIALVLGSASMSVLALWA

SEQ ID NO: 25577 - protein, 396 aa, Zea mays subsp. mays
  peptide (1)..(396): Ceres Seq. ID no. 12374437
  misc_feature (25)..(155): Pfam Name: Pfam Description:  ZIP Zinc transporter
  misc_feature (220)..(396): NCBI GI NO: 15227702 NR Description: putative Fe
  misc_feature (9)..(155): NCBI GI NO: 15227702 NR Description: putative Fe
  misc_feature (220)..(396): NCBI GI NO: 40782197 NR Description: zinc transporter ZIP6
  misc_feature (18)..(155): NCBI GI NO: 40782197 NR Description: zinc transporter ZIP6
  misc_feature (229)..(396): NCBI GI NO: 40888872 NR Description: TPA: putative ZIP-like protein
  misc_feature (213)..(396): NCBI GI NO: 30526082 NR Description: putative ZIP-like zinc transporter
  misc_feature (1)..(132): NCBI GI NO: 30526082 NR Description: putative ZIP-like zinc transporter
  misc_feature (200)..(396): NCBI GI NO: 32966053 NR Description: iron transporter Fe2
  misc_feature (19)..(128): NCBI GI NO: 32966053 NR Description: iron transporter Fe2
  misc_feature (200)..(396): NCBI GI NO: 34900456 NR Description: putative zinc transporter protein ZIP1
MSGTGCLPTDGPALSRVCRDGAAAARLKTGSLLAILVASAVGICLPVALTRAFRGSPNYARGLLLVKCYAAGVILSTSLVHVLPDAHAALADCAVASRRPWRDFPFAGLFTLVGALLALLVDLSASSHLEAHAHVGAHHETPYAPIPKKVPVFELAGEMSPKKRAFLGDDREEDPAPHAATNGADPDRDDVALFGPKKGARSDEVPVITAGCHAVAHEVVEVGEGPGEDEEEARRKQKMVSKVLEIGIVFHSVIIGVTMGMSQDVCAIRPLVVALSFHQVFEGMGLGGCIAQAGFGMATVGYMCIMFSVTTPLGILLGMLVFHMTGYDDSNPNALIMEGILGSLSAGILIYMALVDLVSLDFFHNKMMSASLKLKKACYIALVLGSASMSVLALWA

SEQ ID NO: 25578 - protein, 245 aa, Zea mays subsp. mays
  peptide (1)..(245): Ceres Seq. ID no. 12374438
  misc_feature (109)..(219): Pfam Name: Pfam Description:  Cupin
  misc_feature (3)..(245): NCBI GI NO: 5821145 NR Description: RNA binding protein [Homo sapiens]
SKSPATTARSPLVAVTRAQGQGAPSPRRHVRHRVPPHRRPGPIPGLPGRRGRRTAQDGVAAGHSRRQRRRHLPPRRAHAGLPRQPKLRAGPAPRQVLRGWGHPLHLARPRAPRRARRPRRLRRRLAQALEGLPLRGPFHPRRRAARAPRRPLRLLPPRGPRPRRRPPRNSLRPDPEEGTRVRARRRNEPQETRFLGRRPRRGPRAARRHQRRRPGPRRRGALRTQEGRPQRRGPGHHCRVPCRRP

SEQ ID NO: 25579 - DNA, 1476 bp, Zea mays subsp. mays
  misc_feature (1)..(1476): Ceres Seq. ID no. 13492814
agcccactcgtagtcgtaggcactttcatctgtgccctctgcgttcgagatcgatctcagctggcaccgtcccagttcgccatggcggaggaccggagccccaagcccatccactgcaaagcggcggtgtgccgagccgccggcgagccactcaccatcgaggagatcgtcgtcgacccgccgaaagcgtacgagatccgcatccgggtcatctgcacctcactctgccacaccgatatcaccttctggaaagctaaggtggcaccggtgtttccaagaatactagggcatgaggcgtacggggtagtggagagcgtgggggagcacgtggagggcttcgccggcgggggacaccgtggtgccgacgttcctggggcagtgcgagcgctgcgccagctgcgcgtcggagcacagcaacgtgtgcgacgcggtgccgttcgtcatcggccccgggatgcggcgcgacggcaccacccggttccgggacgcgcgggggagcccgctgcacgacctcctcgccgtctccagcttcagcgagtacaccgtcgtggacgtgaaccaggtggtcaaggtcgaccccgccgtgccgcccaagctcgcctgcctcctcagctgcggcgccggcaccggggtaggagcagcgtggaggtctgccaaggtggagccaggatccactgttgcaatctttggccttggatctgtcggtttggcggtggtccaaggcgcgaaaatgtgtggcgcatccaagatcatcggcgttgatctcaaccctgacaaggaggaagtagggagatcgttcggcgtcacagacttcgtcaatccatcgcagctggacaagcgttccgtcgtagaggtgatcgttgagatgaccggcggcggcgtggactacagcttcgagtgcatcggcgtgccgtcggtgatgaccgacgccttcagatgcaccaagatggggaagggcaagacgatcgtgctggggctggggagggacagcgacgaggtgtgcctgccgtcgctggagctgctgttcgggaggtgcgtcatggggtcgctcttcggcgggctgaagcccaagacccacatccccgtcctcgccaagaaatgcatggacaaggagctgcagctggacgcgctggtcacgcatgagcttggactgcaggacatcaacaaggccttcgacctgctcctgcaggggaaaagtctgcgctgcatcctctggatggacaaggacaagtaacggaaggagaggggcggccggaccaatccttcctgtctctgaataaatttgccctgttttttcagcgaggcgtcgctgaaagctgctgttagcggcgaccaagactatctgttcctgaaagccggtgtatcagtatcgtttcgttgtctgaactgattaaatcctaatatcgatagattagactctcccagcaactgctttgtcccctaaataaagtgattcatcatctcttttttacatct

SEQ ID NO: 25580 - protein, 259 aa, Zea mays subsp. mays
  peptide (1)..(259): Ceres Seq. ID no. 13492815
  misc_feature (1)..(257): NCBI GI NO: 7705214 NR Description: alcohol dehydrogenase ADH
  misc_feature (1)..(255): NCBI GI NO: 15238330 NR Description: alcohol dehydrogenase (ADH), putative
  misc_feature (1)..(257): NCBI GI NO: 1076579 NR Description: probable alcohol dehydrogenase (EC 1
  misc_feature (1)..(259): NCBI GI NO: 34906828 NR Description: contains EST C99136
  misc_feature (1)..(257): NCBI GI NO: 7705215 NR Description: alcohol dehydrogenase  ADH
  misc_feature (1)..(257): NCBI GI NO: 1076580 NR Description: probable alcohol dehydrogenase (EC 1
  misc_feature (1)..(257): NCBI GI NO: 21618210 NR Description: alcohol dehydrogenase like protein
  misc_feature (1)..(257): NCBI GI NO: 18415840 NR Description: alcohol dehydrogenase (ADH), putative
  misc_feature (1)..(257): NCBI GI NO: 15219884 NR Description: alcohol dehydrogenase (ADH), putative
  misc_feature (1)..(257): NCBI GI NO: 15219882 NR Description: alcohol dehydrogenase (ADH), putative
MRRDGTTRFRDARGSPLHDLLAVSSFSEYTVVDVNQVVKVDPAVPPKLACLLSCGAGTGVGAAWRSAKVEPGSTVAIFGLGSVGLAVVQGAKMCGASKIIGVDLNPDKEEVGRSFGVTDFVNPSQLDKRSVVEVIVEMTGGGVDYSFECIGVPSVMTDAFRCTKMGKGKTIVLGLGRDSDEVCLPSLELLFGRCVMGSLFGGLKPKTHIPVLAKKCMDKELQLDALVTHELGLQDINKAFDLLLQGKSLRCILWMDKDK

SEQ ID NO: 25581 - protein, 253 aa, Zea mays subsp. mays
  peptide (1)..(253): Ceres Seq. ID no. 13492816
  misc_feature (35)..(116): NCBI GI NO: 7705214 NR Description: alcohol dehydrogenase ADH
  misc_feature (33)..(116): NCBI GI NO: 15238330 NR Description: alcohol dehydrogenase (ADH), putative
  misc_feature (35)..(116): NCBI GI NO: 1076579 NR Description: probable alcohol dehydrogenase (EC 1
  misc_feature (35)..(116): NCBI GI NO: 34906828 NR Description: contains EST C99136
  misc_feature (35)..(116): NCBI GI NO: 7705215 NR Description: alcohol dehydrogenase  ADH
  misc_feature (35)..(116): NCBI GI NO: 1076580 NR Description: probable alcohol dehydrogenase (EC 1
  misc_feature (35)..(116): NCBI GI NO: 21618210 NR Description: alcohol dehydrogenase like protein
  misc_feature (24)..(116): NCBI GI NO: 18415840 NR Description: alcohol dehydrogenase (ADH), putative
  misc_feature (35)..(116): NCBI GI NO: 15219884 NR Description: alcohol dehydrogenase (ADH), putative
  misc_feature (35)..(116): NCBI GI NO: 15219882 NR Description: alcohol dehydrogenase (ADH), putative
SPLVVVGTFICALCVRDRSQLAPSQFAMAEDRSPKPIHCKAAVCRAAGEPLTIEEIVVDPPKAYEIRIRVICTSLCHTDITFWKAKVAPVFPRILGHEAYGVVESVGEHVEGFAGGGHRGADVPGAVRALRQLRVGAQQRVRRGAVRHRPRDAARRHHPVPGRAGEPAARPPRRLQLQRVHRRGREPGGQGRPRRAAQARLPPQLRRRHRGRSSVEVCQGGARIHCCNLWPWICRFGGGPRRENVWRIQDHRR

SEQ ID NO: 25582 - protein, 226 aa, Zea mays subsp. mays
  peptide (1)..(226): Ceres Seq. ID no. 13492817
  misc_feature (8)..(89): NCBI GI NO: 7705214 NR Description: alcohol dehydrogenase ADH
  misc_feature (6)..(89): NCBI GI NO: 15238330 NR Description: alcohol dehydrogenase (ADH), putative
  misc_feature (8)..(89): NCBI GI NO: 1076579 NR Description: probable alcohol dehydrogenase (EC 1
  misc_feature (8)..(89): NCBI GI NO: 34906828 NR Description: contains EST C99136
  misc_feature (8)..(89): NCBI GI NO: 7705215 NR Description: alcohol dehydrogenase  ADH
  misc_feature (8)..(89): NCBI GI NO: 1076580 NR Description: probable alcohol dehydrogenase (EC 1
  misc_feature (8)..(89): NCBI GI NO: 21618210 NR Description: alcohol dehydrogenase like protein
  misc_feature (1)..(89): NCBI GI NO: 18415840 NR Description: alcohol dehydrogenase (ADH), putative
  misc_feature (8)..(89): NCBI GI NO: 15219884 NR Description: alcohol dehydrogenase (ADH), putative
  misc_feature (8)..(89): NCBI GI NO: 15219882 NR Description: alcohol dehydrogenase (ADH), putative
MAEDRSPKPIHCKAAVCRAAGEPLTIEEIVVDPPKAYEIRIRVICTSLCHTDITFWKAKVAPVFPRILGHEAYGVVESVGEHVEGFAGGGHRGADVPGAVRALRQLRVGAQQRVRRGAVRHRPRDAARRHHPVPGRAGEPAARPPRRLQLQRVHRRGREPGGQGRPRRAAQARLPPQLRRRHRGRSSVEVCQGGARIHCCNLWPWICRFGGGPRRENVWRIQDHRR

SEQ ID NO: 25583 - DNA, 1334 bp, Zea mays subsp. mays; identical to SEQ ID NO: 25095
  misc_feature (1)..(1334): Ceres Seq. ID no. 12414173

SEQ ID NO: 25584 - protein, 361 aa, Zea mays subsp. mays; identical to SEQ ID NO: 25096
  peptide (1)..(361): Ceres Seq. ID no. 12414174
  misc_feature (43)..(149): Pfam Name: Pfam Description:  Protein of unknown function DUF260
  misc_feature (40)..(360): NCBI GI NO: 34914608 NR Description: P0520B06.17
  misc_feature (40)..(249): NCBI GI NO: 18396229 NR Description: expressed protein; protein id: At3g02550
  misc_feature (40)..(249): NCBI GI NO: 21554191 NR Description: unknown [Arabidopsis thaliana]
  misc_feature (40)..(216): NCBI GI NO: 34895540 NR Description: unnamed protein product
  misc_feature (40)..(187): NCBI GI NO: 15221429 NR Description: expressed protein; protein id: At1g68510
  misc_feature (40)..(186): NCBI GI NO: 15219829 NR Description: hypothetical protein; protein id: At1g67100.1
  misc_feature (42)..(164): NCBI GI NO: 15229644 NR Description: putative protein; protein id: At3g49940
  misc_feature (42)..(164): NCBI GI NO: 21553886 NR Description: unknown [Arabidopsis thaliana]
  misc_feature (42)..(164): NCBI GI NO: 15240739 NR Description: putative protein; protein id: At5g67420
  misc_feature (42)..(164): NCBI GI NO: 21593577 NR Description: unknown [Arabidopsis thaliana]

SEQ ID NO: 25585 - protein, 322 aa, Zea mays subsp. mays; identical to SEQ ID NO: 25097
  peptide (1)..(322): Ceres Seq. ID no. 12414175
  misc_feature (4)..(110): Pfam Name: Pfam Description:  Protein of unknown function DUF260
  misc_feature (1)..(321): NCBI GI NO: 34914608 NR Description: P0520B06.17
  misc_feature (1)..(210): NCBI GI NO: 18396229 NR Description: expressed protein; protein id: At3g02550
  misc_feature (1)..(210): NCBI GI NO: 21554191 NR Description: unknown [Arabidopsis thaliana]
  misc_feature (1)..(177): NCBI GI NO: 34895540 NR Description: unnamed protein product
  misc_feature (1)..(148): NCBI GI NO: 15221429 NR Description: expressed protein; protein id: At1g68510
  misc_feature (1)..(147): NCBI GI NO: 15219829 NR Description: hypothetical protein; protein id: At1g67100.1
  misc_feature (3)..(125): NCBI GI NO: 15229644 NR Description: putative protein; protein id: At3g49940
  misc_feature (3)..(125): NCBI GI NO: 21553886 NR Description: unknown [Arabidopsis thaliana]
  misc_feature (3)..(125): NCBI GI NO: 15240739 NR Description: putative protein; protein id: At5g67420
  misc_feature (3)..(125): NCBI GI NO: 21593577 NR Description: unknown [Arabidopsis thaliana]

SEQ ID NO: 25586 - protein, 320 aa, Zea mays subsp. mays; identical to SEQ ID NO: 25098
  peptide (1)..(320): Ceres Seq. ID no. 12414176
  misc_feature (2)..(108): Pfam Name: Pfam Description:  Protein of unknown function DUF260
  misc_feature (1)..(319): NCBI GI NO: 34914608 NR Description: P0520B06.17
  misc_feature (1)..(208): NCBI GI NO: 18396229 NR Description: expressed protein; protein id: At3g02550
  misc_feature (1)..(208): NCBI GI NO: 21554191 NR Description: unknown [Arabidopsis thaliana]
  misc_feature (1)..(175): NCBI GI NO: 34895540 NR Description: unnamed protein product
  misc_feature (1)..(146): NCBI GI NO: 15221429 NR Description: expressed protein; protein id: At1g68510
  misc_feature (1)..(145): NCBI GI NO: 15219829 NR Description: hypothetical protein; protein id: At1g67100.1
  misc_feature (1)..(123): NCBI GI NO: 15229644 NR Description: putative protein; protein id: At3g49940
  misc_feature (1)..(123): NCBI GI NO: 21553886 NR Description: unknown [Arabidopsis thaliana]
  misc_feature (1)..(123): NCBI GI NO: 15240739 NR Description: putative protein; protein id: At5g67420
  misc_feature (1)..(123): NCBI GI NO: 21593577 NR Description: unknown [Arabidopsis thaliana]

SEQ ID NO: 25587 - DNA, 1368 bp, Zea mays subsp. mays
  misc_feature (1)..(1368): Ceres Seq. ID no. 12376414
acgggtgctccaaacaactgcactagacatctcaattaattagctaatgagcaagcggctgagctgcactcaagacaaactaccatggatcagtcaaacattagcaacaagcacataacgatgacaaccctaatgctcctcctctgtgtcatagccattgcagactgcatttgccaagccgcagtggcagcccgggtggagccatccaccaccgtcggcagaactacaggaggagacgaggcgatgatgatggcgaggtacaagaagtggatggcgcagtatcgccggaagtacaaggacgacgccgagaaagcacaccgtttccaggtattcaaggcgaacgcggagtttattgacaggtctaacgctggaggcaagaagaagtacgtcctagggaccaaccagtttgccgacctgaccagcaaagagttcgcggccatgtacaccggtttgaggaaaccggcggcggtgccttccggggccaagcagatccctgcaggtttcaagtaccagaattttacgcgcctagatgatgatgtccaggttgattggaggcagcagggtgctgtcactcctgtcaagaaccaaggccaatgtggctgttgctgggcgttctctgcagtaggtgccatggaaggtttgatcatgataacgacaggaaacctggtttccctgtcggagcagcagattctagactgcgacgagtcagacgggaaccagggctgcaacggtggctacatggacaacgccttccagtacgtcgtcaacaatggcggcgtcactactgaggacgcctacccttactctgcagtccaagggacgtgccaaaacgtccagccagccgccaccatcagcggcttccaggacctgcccagcggcgacgagaacgcgctcgccaacgcagtcgccaaccagccggtgtctgttggcgtcgacggcggatcgagtcctttccagttttaccagggtggcatatacgacggggatggctgtggcacggacatgaaccatgcagtgacggcgatcggctacggcgccgatgaccagggaacccagtactggatcctcaagaactcctggggcacaggatggggtgagaacggtttcatgcagctacagatgggcgtcggcgcctgtggtatctccacgatggcctcctacccaactccatgaacacaaatcttcagataaagcatagtatatatcagtccatgcgtatgactgcagaataaagcatggaagattaattacatgcgtgcatcaaggcatgctacgtactgtattaaaacttcggtactggccagatatatgtacaaaggtagaatgttcgtgtgataatataaaagttcgtaatgcttgtacgaatgc

SEQ ID NO: 25588 - protein, 362 aa, Zea mays subsp. mays
  peptide (1)..(362): Ceres Seq. ID no. 12376415
  misc_feature (154)..(360): Pfam Name: Pfam Description:  Papain family cysteine protease
  misc_feature (13)..(360): NCBI GI NO: 7435799 NR Description: cysteine proteinase (EC 3.4.22.-) - barley
  misc_feature (19)..(361): NCBI GI NO: 38346003 NR Description: OSJNBa0035O13.5
  misc_feature (18)..(361): NCBI GI NO: 38345008 NR Description: OSJNBa0052O21.11
  misc_feature (18)..(360): NCBI GI NO: 21070926 NR Description: putative cysteine proteinase
  misc_feature (52)..(361): NCBI GI NO: 13491750 NR Description: cysteine protease [Ipomoea batatas]
  misc_feature (55)..(361): NCBI GI NO: 38346007 NR Description: OSJNBa0035O13.9
  misc_feature (52)..(361): NCBI GI NO: 24285904 NR Description: cysteine proteinase precursor [Ipomoea batatas]
  misc_feature (42)..(360): NCBI GI NO: 34899394 NR Description: putative cysteine proteinase
  misc_feature (45)..(361): NCBI GI NO: 40806498 NR Description: putative cysteine protease 1 [Iris hollandica]
  misc_feature (23)..(361): NCBI GI NO: 37780047 NR Description: cysteine protease 8 [Trifolium repens]
MDQSNISNKHITMTTLMLLLCVIAIADCICQAAVAARVEPSTTVGRTTGGDEAMMMARYKKWMAQYRRKYKDDAEKAHRFQVFKANAEFIDRSNAGGKKKYVLGTNQFADLTSKEFAAMYTGLRKPAAVPSGAKQIPAGFKYQNFTRLDDDVQVDWRQQGAVTPVKNQGQCGCCWAFSAVGAMEGLIMITTGNLVSLSEQQILDCDESDGNQGCNGGYMDNAFQYVVNNGGVTTEDAYPYSAVQGTCQNVQPAATISGFQDLPSGDENALANAVANQPVSVGVDGGSSPFQFYQGGIYDGDGCGTDMNHAVTAIGYGADDQGTQYWILKNSWGTGWGENGFMQLQMGVGACGISTMASYPTP

SEQ ID NO: 25589 - protein, 350 aa, Zea mays subsp. mays
  peptide (1)..(350): Ceres Seq. ID no. 12376416
  misc_feature (142)..(348): Pfam Name: Pfam Description:  Papain family cysteine protease
  misc_feature (1)..(348): NCBI GI NO: 7435799 NR Description: cysteine proteinase (EC 3.4.22.-) - barley
  misc_feature (7)..(349): NCBI GI NO: 38346003 NR Description: OSJNBa0035O13.5
  misc_feature (6)..(349): NCBI GI NO: 38345008 NR Description: OSJNBa0052O21.11
  misc_feature (6)..(348): NCBI GI NO: 21070926 NR Description: putative cysteine proteinase
  misc_feature (40)..(349): NCBI GI NO: 13491750 NR Description: cysteine protease [Ipomoea batatas]
  misc_feature (43)..(349): NCBI GI NO: 38346007 NR Description: OSJNBa0035O13.9
  misc_feature (40)..(349): NCBI GI NO: 24285904 NR Description: cysteine proteinase precursor [Ipomoea batatas]
  misc_feature (30)..(348): NCBI GI NO: 34899394 NR Description: putative cysteine proteinase
  misc_feature (33)..(349): NCBI GI NO: 40806498 NR Description: putative cysteine protease 1 [Iris hollandica]
  misc_feature (11)..(349): NCBI GI NO: 37780047 NR Description: cysteine protease 8 [Trifolium repens]
MTTLMLLLCVIAIADCICQAAVAARVEPSTTVGRTTGGDEAMMMARYKKWMAQYRRKYKDDAEKAHRFQVFKANAEFIDRSNAGGKKKYVLGTNQFADLTSKEFAAMYTGLRKPAAVPSGAKQIPAGFKYQNFTRLDDDVQVDWRQQGAVTPVKNQGQCGCCWAFSAVGAMEGLIMITTGNLVSLSEQQILDCDESDGNQGCNGGYMDNAFQYVVNNGGVTTEDAYPYSAVQGTCQNVQPAATISGFQDLPSGDENALANAVANQPVSVGVDGGSSPFQFYQGGIYDGDGCGTDMNHAVTAIGYGADDQGTQYWILKNSWGTGWGENGFMQLQMGVGACGISTMASYPTP

SEQ ID NO: 25590 - protein, 346 aa, Zea mays subsp. mays
  peptide (1)..(346): Ceres Seq. ID no. 12376417
  misc_feature (138)..(344): Pfam Name: Pfam Description:  Papain family cysteine protease
  misc_feature (1)..(344): NCBI GI NO: 7435799 NR Description: cysteine proteinase (EC 3.4.22.-) - barley
  misc_feature (3)..(345): NCBI GI NO: 38346003 NR Description: OSJNBa0035O13.5
  misc_feature (2)..(345): NCBI GI NO: 38345008 NR Description: OSJNBa0052O21.11
  misc_feature (2)..(344): NCBI GI NO: 21070926 NR Description: putative cysteine proteinase
  misc_feature (36)..(345): NCBI GI NO: 13491750 NR Description: cysteine protease [Ipomoea batatas]
  misc_feature (39)..(345): NCBI GI NO: 38346007 NR Description: OSJNBa0035O13.9
  misc_feature (36)..(345): NCBI GI NO: 24285904 NR Description: cysteine proteinase precursor [Ipomoea batatas]
  misc_feature (26)..(344): NCBI GI NO: 34899394 NR Description: putative cysteine proteinase
  misc_feature (29)..(345): NCBI GI NO: 40806498 NR Description: putative cysteine protease 1 [Iris hollandica]
  misc_feature (7)..(345): NCBI GI NO: 37780047 NR Description: cysteine protease 8 [Trifolium repens]
MLLLCVIAIADCICQAAVAARVEPSTTVGRTTGGDEAMMMARYKKWMAQYRRKYKDDAEKAHRFQVFKANAEFIDRSNAGGKKKYVLGTNQFADLTSKEFAAMYTGLRKPAAVPSGAKQIPAGFKYQNFTRLDDDVQVDWRQQGAVTPVKNQGQCGCCWAFSAVGAMEGLIMITTGNLVSLSEQQILDCDESDGNQGCNGGYMDNAFQYVVNNGGVTTEDAYPYSAVQGTCQNVQPAATISGFQDLPSGDENALANAVANQPVSVGVDGGSSPFQFYQGGIYDGDGCGTDMNHAVTAIGYGADDQGTQYWILKNSWGTGWGENGFMQLQMGVGACGISTMASYPTP

SEQ ID NO: 25591 - DNA, 1069 bp, Zea mays subsp. mays
  misc_feature (1)..(1069): Ceres Seq. ID no. 12403740
gccccaagccgcaaccgcaaccaccttcccaaatctcagtagtcgcctctcgtcgtcttcgtctagcccggcccgttccaaaacctccgtagccgccgccgccaccccggcgaccgaagatgatctccccggacgcagcccgcaacgtagtcggcatcatcggcaatgtcatctccttcggcctcttcctgtccccagtgctgacgttctggcggatctacaaggccaaggacgtggaggagttcaagccggacccttacctggcgacgctgctcaactgcatgctctgggtgttctatggcatccccgtcgtccaccccaacagcattctcgtcgtcaccatcaacggcatcggcctcgtcatcgaggccgtctacctcactatcttcttcctctattccgacagccagaagcgcaagaaggcgttcgcgatcctggccgtggagattctgttcatggtcgccgtggtgctcggtgtgatcctcggcgcgcacactcacgagaaacgttccatgatcgtcggcatcctctgcgtcatcttcggctcgatgatgtacgcctcaccactcactatcatgagtcgagtgatcaagaccaagagcgttgagtacatgcccttcctcctgtcgctggtgagcttcctcaacggctgctgctggacggcctacgcgctcatccgcttcgacctctacgtcacgatcccgaacgccctgggcgcattcttcggcctcgtccagctgatcctctacttctgctactacaagtcgacccccaagaaggagaagaacgtggagctgcccaccgtctccagcaacgtcggcggcggcaacgtcaccgtcagcgttgagcgatagatgatgtagctgccgccgcccgtcgagaacgaactcgacgagacgtgctttacccacaagtagttttggccttgtctaattgctcttctcggatgatcgtttaagtgagtgttagttagttttgccctgcgtgtgatgtcaggaacaattaatatatccatgtggctgtgtttgccattctagataattaagaacaatcgtatctgattgctacc

SEQ ID NO: 25592 - protein, 244 aa, Zea mays subsp. mays
  peptide (1)..(244): Ceres Seq. ID no. 12403741
  misc_feature (9)..(98): Pfam Name: Pfam Description:  MtN3/saliva family
  misc_feature (1)..(244): NCBI GI NO: 34912462 NR Description: MtN3-like protein
  misc_feature (1)..(244): NCBI GI NO: 34912454 NR Description: P0681B11.31
  misc_feature (1)..(225): NCBI GI NO: 18405611 NR Description: Expressed protein; protein id: At3g28007
  misc_feature (1)..(225): NCBI GI NO: 21592355 NR Description: contains similarity to nodulin MtN3 protein
  misc_feature (8)..(219): NCBI GI NO: 18413388 NR Description: putative protein; protein id: At4g10850
  misc_feature (1)..(225): NCBI GI NO: 18421965 NR Description: putative protein; protein id: At5g40260
  misc_feature (1)..(194): NCBI GI NO: 10177463 NR Description: contains similarity to MtN3 protein~gene_id:MQB2
  misc_feature (39)..(217): NCBI GI NO: 431154 NR Description: ORF [Lilium longiflorum]
  misc_feature (8)..(243): NCBI GI NO: 15219732 NR Description: hypothetical protein; protein id: At1g66770.1
  misc_feature (39)..(225): NCBI GI NO: 11994120 NR Description: contains similarity to nodulin MtN3protein~gene_id:MMG15
MISPDAARNVVGIIGNVISFGLFLSPVLTFWRIYKAKDVEEFKPDPYLATLLNCMLWVFYGIPVVHPNSILVVTINGIGLVIEAVYLTIFFLYSDSQKRKKAFAILAVEILFMVAVVLGVILGAHTHEKRSMIVGILCVIFGSMMYASPLTIMSRVIKTKSVEYMPFLLSLVSFLNGCCWTAYALIRFDLYVTIPNALGAFFGLVQLILYFCYYKSTPKKEKNVELPTVSSNVGGGNVTVSVER

SEQ ID NO: 25593 - protein, 201 aa, Zea mays subsp. mays
  peptide (1)..(201): Ceres Seq. ID no. 12403742
PQAATATTFPNLSSRLSSSSSSPARSKTSVAAAATPATEDDLPGRSPQRSRHHRQCHLLRPLPVPSADVLADLQGQGRGGVQAGPLPGDAAQLHALGVLWHPRRPPQQHSRRHHQRHRPRHRGRLPHYLLPLFRQPEAQEGVRDPGRGDSVHGRRGARCDPRRAHSRETFHDRRHPLRHLRLDDVRLTTHYHESSDQDQER

SEQ ID NO: 25594 - protein, 190 aa, Zea mays subsp. mays
  peptide (1)..(190): Ceres Seq. ID no. 12403743
  misc_feature (1)..(190): NCBI GI NO: 34912462 NR Description: MtN3-like protein
  misc_feature (1)..(190): NCBI GI NO: 34912454 NR Description: P0681B11.31
  misc_feature (1)..(171): NCBI GI NO: 18405611 NR Description: Expressed protein; protein id: At3g28007
  misc_feature (1)..(171): NCBI GI NO: 21592355 NR Description: contains similarity to nodulin MtN3 protein
  misc_feature (1)..(165): NCBI GI NO: 18413388 NR Description: putative protein; protein id: At4g10850
  misc_feature (1)..(171): NCBI GI NO: 18421965 NR Description: putative protein; protein id: At5g40260
  misc_feature (1)..(140): NCBI GI NO: 10177463 NR Description: contains similarity to MtN3 protein~gene_id:MQB2
  misc_feature (1)..(163): NCBI GI NO: 431154 NR Description: ORF [Lilium longiflorum]
  misc_feature (1)..(189): NCBI GI NO: 15219732 NR Description: hypothetical protein; protein id: At1g66770.1
  misc_feature (1)..(171): NCBI GI NO: 11994120 NR Description: contains similarity to nodulin MtN3protein~gene_id:MMG15
MLWVFYGIPVVHPNSILVVTINGIGLVIEAVYLTIFFLYSDSQKRKKAFAILAVEILFMVAVVLGVILGAHTHEKRSMIVGILCVIFGSMMYASPLTIMSRVIKTKSVEYMPFLLSLVSFLNGCCWTAYALIRFDLYVTIPNALGAFFGLVQLILYFCYYKSTPKKEKNVELPTVSSNVGGGNVTVSVER

SEQ ID NO: 25595 - DNA, 1237 bp, Zea mays subsp. mays
  misc_feature (1)..(1237): Ceres Seq. ID no. 12365371
aggaggggactaggggagagagagagagagagagggggaaggccaagaagaggcttcctctccccccattctccaatccgtgccctagtcgagccagccgcgaggaaggaggcgtctcgcctagcgcccgccctcggccgaccttctgctgcaccttcgaactctggaaagttcatagatttttgggcaatagcaagtggacatggaaccatcctctcagcctcagcctgcgatgggtgttgccgccggtgggtcacaagtgtatcctgcctctgcctacccgcctgcagcaacagtagctcctcctgctgttgcatctgctggtttacagtcagtgcaaccattcccagccaaccctgcccatatgaggtgctcagcaccagattgtctaccagcaagctcaacagttccaccaacagctccagcagcagcaacagcagcagcttcaccagttctgggtcgaacgcatgactgaaatcgaggcaacagctgatttcaggaaccacaacttgccacttgcgaggataaagaagatcatgaaggccgacgaagatgtccgcatgatctcagccgaagctcccgtggtcttcgcaaaagcttgcgagatattcatactggagctgacgctgaggtcgtggatgcacaccgaggagaacaagcgccgcaccttgcagaagaacgacattgccgcagccatcaccaggaccgacatttacgacttcttggtcgacattgttcccagggatgagatgaaggacgacggaatcgggcttcctaggcccgggctgccacccatgggagccccagctgacgcatatccatactactacatgccacagcagcaggtgcctggtcctgggatggtttatggcgcccagcaaggccacccggtgacgtatctgtggcaggatcctcaggaacagcaggagcaagctcctgaagagcagcagtctctgcatgaaagggactgaggatgtcgctcaagctatcacctgatttttcagagctctcattttaggttctctaaactgcaggttttcgttggctaatatcgttgggtatcaaactgaaacaggtagggtgtagcatcatggtagtttgatttctgctgtggtgttagttggagggataatgattagcggctagtggattaaagttacccataccgtttcctttcgttccaaaagttcgccttcatgaggcctctgatatgaaaaatgctgggtgttaatgcttc

SEQ ID NO: 25596 - protein, 167 aa, Zea mays subsp. mays
  peptide (1)..(167): Ceres Seq. ID no. 12365372
  misc_feature (1)..(141): NCBI GI NO: 15223482 NR Description: transcription factor, putative
  misc_feature (1)..(141): NCBI GI NO: 21554704 NR Description: transcription factor, putative
  misc_feature (1)..(159): NCBI GI NO: 15223986 NR Description: putative transcription factor
  misc_feature (1)..(159): NCBI GI NO: 25372763 NR Description: hypothetical protein
  misc_feature (1)..(159): NCBI GI NO: 6289057 NR Description: heme activated protein [Arabidopsis thaliana]
  misc_feature (1)..(160): NCBI GI NO: 15221912 NR Description: heme activated protein, putative
  misc_feature (1)..(167): NCBI GI NO: 15228405 NR Description: transcription factor Hap5a; protein id:At3g48590
  misc_feature (1)..(151): NCBI GI NO: 15242784 NR Description: transcription factor Hap5a-like protein
  misc_feature (1)..(141): NCBI GI NO: 25404100 NR Description: transcription factor
  misc_feature (1)..(125): NCBI GI NO: 2398533 NR Description: Transcription factor [Arabidopsis thaliana]
MTEIEATADFRNHNLPLARIKKIMKADEDVRMISAEAPVVFAKACEIFILELTLRSWMHTEENKRRTLQKNDIAAAITRTDIYDFLVDIVPRDEMKDDGIGLPRPGLPPMGAPADAYPYYYMPQQQVPGPGMVYGAQQGHPVTYLWQDPQEQQEQAPEEQQSLHERD

SEQ ID NO: 25597 - protein, 156 aa, Zea mays subsp. mays
  peptide (1)..(156): Ceres Seq. ID no. 12365373
RRGLGERERERGGRPRRGFLSPHSPIRALVEPAARKEASRLAPALGRPSAAPSNSGKFIDFWAIASGHGTILSASACDGCCRRWVTSVSCLCLPACSNSSSSCCCICWFTVSATIPSQPCPYEVLSTRLSTSKLNSSTNSSSSSNSSSFTSSGSNA

SEQ ID NO: 25598 - protein, 144 aa, Zea mays subsp. mays
  peptide (1)..(144): Ceres Seq. ID no. 12365374
  misc_feature (1)..(118): NCBI GI NO: 15223482 NR Description: transcription factor, putative
  misc_feature (1)..(118): NCBI GI NO: 21554704 NR Description: transcription factor, putative
  misc_feature (1)..(136): NCBI GI NO: 15223986 NR Description: putative transcription factor
  misc_feature (1)..(136): NCBI GI NO: 25372763 NR Description: hypothetical protein
  misc_feature (1)..(136): NCBI GI NO: 6289057 NR Description: heme activated protein [Arabidopsis thaliana]
  misc_feature (1)..(137): NCBI GI NO: 15221912 NR Description: heme activated protein, putative
  misc_feature (1)..(144): NCBI GI NO: 15228405 NR Description: transcription factor Hap5a; protein id:At3g48590
  misc_feature (1)..(128): NCBI GI NO: 15242784 NR Description: transcription factor Hap5a-like protein
  misc_feature (1)..(118): NCBI GI NO: 25404100 NR Description: transcription factor
  misc_feature (1)..(102): NCBI GI NO: 2398533 NR Description: Transcription factor [Arabidopsis thaliana]
MKADEDVRMISAEAPVVFAKACEIFILELTLRSWMHTEENKRRTLQKNDIAAAITRTDIYDFLVDIVPRDEMKDDGIGLPRPGLPPMGAPADAYPYYYMPQQQVPGPGMVYGAQQGHPVTYLWQDPQEQQEQAPEEQQSLHERD

SEQ ID NO: 25599 - DNA, 873 bp, Zea mays subsp. mays
  misc_feature (1)..(873): Ceres Seq. ID no. 12353716
gtttgatgtgagccttggagtgctagattctgtttccattgtccattctcagtcacctgagcagccgaacgttctcagtcacctgcaggtcaggaaccaacgatgccgggcatccaccgctacaccgccgagctgctggtgctgctcaccatcattacccgcctcctgctgctggccacggcgtggccggcattgcccgccccagcgtcgctcgagccgtcgctgcttttcccgtccgccggcgccacctcgcccacgcagacccagtcagccggggtcgcctccacaatcccggccttcccggagcagtcagaggccgccgcggctgctgccacctccgtctgccagctcaccccgtcgcctccgctccttcccgctgtcctagcatcgtgcaacgccaatgccggcgggagtggcgtgacgctcccgccgcgcctaagatgctgcccggcgctcgccgcgtggctgtacactgcgtacgcgcccaccgcgctctcgggcagcggcgtcggagaagcgtcggtggccgcgtcggccgaggccgccgccgtggtggacttgccagtgctgccggacgacgcggaggaatgcgccggcgcggcggaccgtgcgctgcgggcggccggggtggcgctaccgcggccgcattggggcgaaagcaccggcactggcaacgggacggcggcgtgcgacgtagcgttctgctactgcggggtgaggctgcggcggcctgcgtgcgcggcgccgcagggccggatggcaaggagactggagagggactgcgcgctgccggggctcgccggctgctccaggtgcctgcgggcgctcagcaagctgggtgggaggagcaacgccacgtcgtcggcgaaggcg

SEQ ID NO: 25600 - protein, 257 aa, Zea mays subsp. mays
  peptide (1)..(257): Ceres Seq. ID no. 12353717
  misc_feature (44)..(251): NCBI GI NO: 18401752 NR Description: expressed protein; protein id: At3g18050
  misc_feature (60)..(247): NCBI GI NO: 34394002 NR Description: unknown protein
  misc_feature (61)..(253): NCBI GI NO: 18417127 NR Description: expressed protein; protein id: At4g28100
  misc_feature (61)..(253): NCBI GI NO: 21593735 NR Description: unknown [Arabidopsis thaliana]
MPGIHRYTAELLVLLTIITRLLLLATAWPALPAPASLEPSLLFPSAGATSPTQTQSAGVASTIPAFPEQSEAAAAAATSVCQLTPSPPLLPAVLASCNANAGGSGVTLPPRLRCCPALAAWLYTAYAPTALSGSGVGEASVAASAEAAAVVDLPVLPDDAEECAGAADRALRAAGVALPRPHWGESTGTGNGTAACDVAFCYCGVRLRRPACAAPQGRMARRLERDCALPGLAGCSRCLRALSKLGGRSNATSSAKA

SEQ ID NO: 25601 - protein, 144 aa, Zea mays subsp. mays
  peptide (1)..(144): Ceres Seq. ID no. 12353718
MLPGARRVAVHCVRAHRALGQRRRRSVGGRVGRGRRRGGLASAAGRRGGMRRRGGPCAAGGRGGATAAALGRKHRHWQRDGGVRRSVLLLRGEAAAACVRGAAGPDGKETGEGLRAAGARRLLQVPAGAQQAGWEEQRHVVGEG

SEQ ID NO: 25602 - DNA, 1615 bp, Zea mays subsp. mays
  misc_feature (1)..(1615): Ceres Seq. ID no. 12344675
aatccgaaccgcaaccctagatttcgcttcctctctgtcccctccgctgcgccgccataacataaatccgccgcccctctccctcagtaaacccctctcttcttcccgcggtctgctcgttcgatctgtgcagcagatctgaggtcccgggcgaccgtgaagcagcttcaatcgtcggcatggcgctcgtattgcatagtggggctggaaacaagaatgccttcaaagcacttattgctgcagaatacagtgggatcaaggttgagttgaccaaggattttgagatgggtgtctccaacaagacccctgagtttcttaagatgaacccccttgggaaggttcctgttctggagactcctgatggccctgtttttgagagtaatgctatcgcacgctatgttgctcgcttgaaggatgacaaccctctttttgggtcttcccgtattgaacaagcccacgttgagcaatggatggattttgccgcaacagaagttgatcctggtgttgcatggtacttgtatccaaggcttgggtacctcccttatgttagcacaactgaggaaacagctatttcttcattgaagaggtcgcttggtgctctgaacacacaccttgcttcaaacacataccttgttgggcatgctgttactctagctgacattgtaatgacatgcaacctctaccatggaattgcacggatcttgaccaagaccttcacgtctgatttccctcatgtcgagaggtatttctggaccatggttaaccagcctaacttcaagaaggtcattggtgaggtcaagcaggcagagtctgcacctcctattccgaaaaaggctgctccttctaaggagccaaaggcaaaggatgtcaagaaggaggctccaaaggaggcccccaagccaaaggtggttgaggcaccagcagaagaggaagcaccaaagccaaagccaaagaatcctcttgacttgctgccaccaagcaagatggtccttgatgactggaagaggctatactcaaacacaaagactaacttccgggaggttgccatcaaaggtttctgggacatgtacgacccagagggctactctttgtggttctgtgactacaagtacaatgatgagaacaccgtctcctttgtgaccctgaacaaggttggtggattcctgcagcggatggacctgtgccgcaagtacgcctttgggaagatgctcgtgataggctctgagccacccttcaagctgaagggcctttggctcttccgtggccaggatgttcccaagtttgtaatggacgaggtctatgacatcgagctctacgagtggaccaaggtggacatctctgatgaggcccagaaggagcgtgtcaatgcgatgattgaggaccaggagccctttgagggcgaggccttgcttgacgcgaaatgcttcaagtgagtgtgcttgcctggagacaactgtttagcccttgaatttgcctatggaagagtttgcccttttactagtgtcgatgttgatctggtataccttgctatgaactggttaaagtttgtgctggtttgggattttttgtgcatcttgtgatacctcaagtcttcatcatttaaatgtttagccgc

SEQ ID NO: 25603 - protein, 417 aa, Zea mays subsp. mays
  peptide (1)..(417): Ceres Seq. ID no. 12344676
  misc_feature (256)..(364): Pfam Name: Pfam Description:  Elongation factor 1 gamma, conserved domain
  misc_feature (4)..(417): NCBI GI NO: 29367381 NR Description: elongation factor 1 gamma-like protein
  misc_feature (1)..(417): NCBI GI NO: 13626515 NR Description: Elongation factor 1-gamma
  misc_feature (10)..(417): NCBI GI NO: 29367403 NR Description: elongation factor 1 gamma-like protein
  misc_feature (1)..(417): NCBI GI NO: 13626392 NR Description: Elongation factor 1-gamma
  misc_feature (3)..(417): NCBI GI NO: 18958499 NR Description: elongation factor 1-gamma [Glycine max]
  misc_feature (1)..(417): NCBI GI NO: 14334818 NR Description: putative elongation factor 1B gamma
  misc_feature (1)..(417): NCBI GI NO: 15223649 NR Description: elongation factor 1B-gamma, putative
  misc_feature (1)..(417): NCBI GI NO: 18391048 NR Description: elongation factor 1B-gamma, putative
  misc_feature (70)..(417): NCBI GI NO: 19423960 NR Description: unknown protein [Arabidopsis thaliana]
  misc_feature (5)..(251): NCBI GI NO: 15528539 NR Description: elongation factor-1 gamma [Carassius auratus]
MALVLHSGAGNKNAFKALIAAEYSGIKVELTKDFEMGVSNKTPEFLKMNPLGKVPVLETPDGPVFESNAIARYVARLKDDNPLFGSSRIEQAHVEQWMDFAATEVDPGVAWYLYPRLGYLPYVSTTEETAISSLKRSLGALNTHLASNTYLVGHAVTLADIVMTCNLYHGIARILTKTFTSDFPHVERYFWTMVNQPNFKKVIGEVKQAESAPPIPKKAAPSKEPKAKDVKKEAPKEAPKPKVVEAPAEEEAPKPKPKNPLDLLPPSKMVLDDWKRLYSNTKTNFREVAIKGFWDMYDPEGYSLWFCDYKYNDENTVSFVTLNKVGGFLQRMDLCRKYAFGKMLVIGSEPPFKLKGLWLFRGQDVPKFVMDEVYDIELYEWTKVDISDEAQKERVNAMIEDQEPFEGEALLDAKCFK

SEQ ID NO: 25604 - protein, 382 aa, Zea mays subsp. mays
  peptide (1)..(382): Ceres Seq. ID no. 12344677
  misc_feature (221)..(329): Pfam Name: Pfam Description:  Elongation factor 1 gamma, conserved domain
  misc_feature (1)..(382): NCBI GI NO: 29367381 NR Description: elongation factor 1 gamma-like protein
  misc_feature (1)..(382): NCBI GI NO: 13626515 NR Description: Elongation factor 1-gamma
  misc_feature (1)..(382): NCBI GI NO: 29367403 NR Description: elongation factor 1 gamma-like protein
  misc_feature (1)..(382): NCBI GI NO: 13626392 NR Description: Elongation factor 1-gamma
  misc_feature (1)..(382): NCBI GI NO: 18958499 NR Description: elongation factor 1-gamma [Glycine max]
  misc_feature (1)..(382): NCBI GI NO: 14334818 NR Description: putative elongation factor 1B gamma
  misc_feature (1)..(382): NCBI GI NO: 15223649 NR Description: elongation factor 1B-gamma, putative
  misc_feature (1)..(382): NCBI GI NO: 18391048 NR Description: elongation factor 1B-gamma, putative
  misc_feature (35)..(382): NCBI GI NO: 19423960 NR Description: unknown protein [Arabidopsis thaliana]
  misc_feature (1)..(216): NCBI GI NO: 15528539 NR Description: elongation factor-1 gamma [Carassius auratus]
MGVSNKTPEFLKMNPLGKVPVLETPDGPVFESNAIARYVARLKDDNPLFGSSRIEQAHVEQWMDFAATEVDPGVAWYLYPRLGYLPYVSTTEETAISSLKRSLGALNTHLASNTYLVGHAVTLADIVMTCNLYHGIARILTKTFTSDFPHVERYFWTMVNQPNFKKVIGEVKQAESAPPIPKKAAPSKEPKAKDVKKEAPKEAPKPKVVEAPAEEEAPKPKPKNPLDLLPPSKMVLDDWKRLYSNTKTNFREVAIKGFWDMYDPEGYSLWFCDYKYNDENTVSFVTLNKVGGFLQRMDLCRKYAFGKMLVIGSEPPFKLKGLWLFRGQDVPKFVMDEVYDIELYEWTKVDISDEAQKERVNAMIEDQEPFEGEALLDAKCFK

SEQ ID NO: 25605 - protein, 370 aa, Zea mays subsp. mays
  peptide (1)..(370): Ceres Seq. ID no. 12344678
  misc_feature (209)..(317): Pfam Name: Pfam Description:  Elongation factor 1 gamma, conserved domain
  misc_feature (1)..(370): NCBI GI NO: 29367381 NR Description: elongation factor 1 gamma-like protein
  misc_feature (1)..(370): NCBI GI NO: 13626515 NR Description: Elongation factor 1-gamma
  misc_feature (1)..(370): NCBI GI NO: 29367403 NR Description: elongation factor 1 gamma-like protein
  misc_feature (1)..(370): NCBI GI NO: 13626392 NR Description: Elongation factor 1-gamma
  misc_feature (1)..(370): NCBI GI NO: 18958499 NR Description: elongation factor 1-gamma [Glycine max]
  misc_feature (1)..(370): NCBI GI NO: 14334818 NR Description: putative elongation factor 1B gamma
  misc_feature (1)..(370): NCBI GI NO: 15223649 NR Description: elongation factor 1B-gamma, putative
  misc_feature (1)..(370): NCBI GI NO: 18391048 NR Description: elongation factor 1B-gamma, putative
  misc_feature (23)..(370): NCBI GI NO: 19423960 NR Description: unknown protein [Arabidopsis thaliana]
  misc_feature (1)..(204): NCBI GI NO: 15528539 NR Description: elongation factor-1 gamma [Carassius auratus]
MNPLGKVPVLETPDGPVFESNAIARYVARLKDDNPLFGSSRIEQAHVEQWMDFAATEVDPGVAWYLYPRLGYLPYVSTTEETAISSLKRSLGALNTHLASNTYLVGHAVTLADIVMTCNLYHGIARILTKTFTSDFPHVERYFWTMVNQPNFKKVIGEVKQAESAPPIPKKAAPSKEPKAKDVKKEAPKEAPKPKVVEAPAEEEAPKPKPKNPLDLLPPSKMVLDDWKRLYSNTKTNFREVAIKGFWDMYDPEGYSLWFCDYKYNDENTVSFVTLNKVGGFLQRMDLCRKYAFGKMLVIGSEPPFKLKGLWLFRGQDVPKFVMDEVYDIELYEWTKVDISDEAQKERVNAMIEDQEPFEGEALLDAKCFK

SEQ ID NO: 25606 - DNA, 1539 bp, Zea mays subsp. mays
  misc_feature (1)..(1539): Ceres Seq. ID no. 12391407
aaaagtggattccaaaatccttcgtccagctgctgactagcgcagtcccgtcgctctcccactccttttcctccttaaatttccacacgaaaaattctcggtggacagaaaaaacaaggcaaagatcagaagagaacgcggaagtgatggccatggatccaagcgtcgcggcgcgccagagcgaggaggcggcggaggccttcttccgcgcggcgccgccgctccgtgaccgcgaccgtctcgccgccagcctcgccgatttcctcgcccgccactcagccgggggtggtggagtggtgtgcgtcacctccggcggcactacggtgcccctggagcagcgttgcgtgcgctacatcgacaattttagctccggccagcgcggtgccgcctccaccgagtattttcttaaggccggctacgctgtcatcttcatccatcgccgtgggagcaagcagccttactgtaggtttcttccagaggattcctttctcgatctttttgagctcggggaagactcagagatccaagttccacagtctcattcatcggtggtcaaggcagcaattagcaattaccggaaggcaatcgatgaatgccttcttctcaaactgcctttcacaacaatttttgagtaccttcagttactacaaatggtggctacttctatgaattgcttggggcaccgtggaatgttttatcttgctgctgcagtttccgacttctatgttccatgggaaagtatggctaaacataaaattgagtcagcaggcggccctttgaacatgcaactcaaccaagtccctaagatgcttttcatcctccggaaaaactgggcccctgctgcattttgtgtatccttcaagctcgaaacagatcctaacattctcctacagaaggcagagatggctttgaagaagtacggtatgaacgtcgtggtggcaaatgaactcgcaaactacaaagatgtagtggtgatggtcacaagcaacggggggaggacgaccgtgagcaggaggagcaaggcggaagacctggaagcgcagctaaccgacctcctggtgaagatgcactcggagcacattgcacagcccaattcgtaggaccatcgagcgagcgagatggttaaattaaatcagacatgccggcggcaagtatgagcgattctacttctactcgcctagcaaattgtgatatacagagttcaccgggtttgtcataaagacgctcatcaatgtgctgcagcagattaattcaaaaaattatagctgaatagctcacaccaggtacatgcaagtttttgaacataacctaggtaagggcatgtacagtggtgtttaatgtggaggctcttaaggtgtttaagggggttatttgaaaaaaaaatcttagagccgtctctccgtgaagagacgcttctggctcgtaaaccaagtagcaacagacgcttcacttcccactgtacgaatttgtcgtctgttctatcgatctaatgctatacaaatacatttaattatgtatttattaatagactacatttat

SEQ ID NO: 25607 - protein, 365 aa, Zea mays subsp. mays
  peptide (1)..(365): Ceres Seq. ID no. 12391408
  misc_feature (98)..(338): Pfam Name: Pfam Description:  DNA / pantothenate metabolism flavoprotein
  misc_feature (49)..(365): NCBI GI NO: 40253297 NR Description: putative Chain A
  misc_feature (61)..(362): NCBI GI NO: 30682728 NR Description: expressed protein [Arabidopsis thaliana]
  misc_feature (200)..(365): NCBI GI NO: 15241677 NR Description: putative protein; protein id: At5g02080.1
  misc_feature (78)..(175): NCBI GI NO: 15241677 NR Description: putative protein; protein id: At5g02080.1
  misc_feature (179)..(362): NCBI GI NO: 8778623 NR Description: F5O11.7 [Arabidopsis thaliana]
  misc_feature (61)..(150): NCBI GI NO: 8778623 NR Description: F5O11.7 [Arabidopsis thaliana]
  misc_feature (79)..(364): NCBI GI NO: 34870890 NR Description: similar to RIKEN cDNA 6330579B17 gene
  misc_feature (79)..(364): NCBI GI NO: 18255582 NR Description: RIKEN cDNA 6330579B17 gene [Mus musculus]
  misc_feature (79)..(364): NCBI GI NO: 34810081 NR Description: Chain A
  misc_feature (79)..(329): NCBI GI NO: 13385982 NR Description: RIKEN cDNA 6330579B17 [Mus musculus]
KWIPKSFVQLLTSAVPSLSHSFSSLNFHTKNSRWTEKTRQRSEENAEVMAMDPSVAARQSEEAAEAFFRAAPPLRDRDRLAASLADFLARHSAGGGGVVCVTSGGTTVPLEQRCVRYIDNFSSGQRGAASTEYFLKAGYAVIFIHRRGSKQPYCRFLPEDSFLDLFELGEDSEIQVPQSHSSVVKAAISNYRKAIDECLLLKLPFTTIFEYLQLLQMVATSMNCLGHRGMFYLAAAVSDFYVPWESMAKHKIESAGGPLNMQLNQVPKMLFILRKNWAPAAFCVSFKLETDPNILLQKAEMALKKYGMNVVVANELANYKDVVVMVTSNGGRTTVSRRSKAEDLEAQLTDLLVKMHSEHIAQPNS

SEQ ID NO: 25608 - protein, 317 aa, Zea mays subsp. mays
  peptide (1)..(317): Ceres Seq. ID no. 12391409
  misc_feature (50)..(290): Pfam Name: Pfam Description:  DNA / pantothenate metabolism flavoprotein
  misc_feature (1)..(317): NCBI GI NO: 40253297 NR Description: putative Chain A
  misc_feature (13)..(314): NCBI GI NO: 30682728 NR Description: expressed protein [Arabidopsis thaliana]
  misc_feature (152)..(317): NCBI GI NO: 15241677 NR Description: putative protein; protein id: At5g02080.1
  misc_feature (30)..(127): NCBI GI NO: 15241677 NR Description: putative protein; protein id: At5g02080.1
  misc_feature (131)..(314): NCBI GI NO: 8778623 NR Description: F5O11.7 [Arabidopsis thaliana]
  misc_feature (13)..(102): NCBI GI NO: 8778623 NR Description: F5O11.7 [Arabidopsis thaliana]
  misc_feature (31)..(316): NCBI GI NO: 34870890 NR Description: similar to RIKEN cDNA 6330579B17 gene
  misc_feature (31)..(316): NCBI GI NO: 18255582 NR Description: RIKEN cDNA 6330579B17 gene [Mus musculus]
  misc_feature (31)..(316): NCBI GI NO: 34810081 NR Description: Chain A
  misc_feature (31)..(281): NCBI GI NO: 13385982 NR Description: RIKEN cDNA 6330579B17 [Mus musculus]
MAMDPSVAARQSEEAAEAFFRAAPPLRDRDRLAASLADFLARHSAGGGGVVCVTSGGTTVPLEQRCVRYIDNFSSGQRGAASTEYFLKAGYAVIFIHRRGSKQPYCRFLPEDSFLDLFELGEDSEIQVPQSHSSVVKAAISNYRKAIDECLLLKLPFTTIFEYLQLLQMVATSMNCLGHRGMFYLAAAVSDFYVPWESMAKHKIESAGGPLNMQLNQVPKMLFILRKNWAPAAFCVSFKLETDPNILLQKAEMALKKYGMNVVVANELANYKDVVVMVTSNGGRTTVSRRSKAEDLEAQLTDLLVKMHSEHIAQPNS

SEQ ID NO: 25609 - protein, 315 aa, Zea mays subsp. mays
  peptide (1)..(315): Ceres Seq. ID no. 12391410
  misc_feature (48)..(288): Pfam Name: Pfam Description:  DNA / pantothenate metabolism flavoprotein
  misc_feature (1)..(315): NCBI GI NO: 40253297 NR Description: putative Chain A
  misc_feature (11)..(312): NCBI GI NO: 30682728 NR Description: expressed protein [Arabidopsis thaliana]
  misc_feature (150)..(315): NCBI GI NO: 15241677 NR Description: putative protein; protein id: At5g02080.1
  misc_feature (28)..(125): NCBI GI NO: 15241677 NR Description: putative protein; protein id: At5g02080.1
  misc_feature (129)..(312): NCBI GI NO: 8778623 NR Description: F5O11.7 [Arabidopsis thaliana]
  misc_feature (11)..(100): NCBI GI NO: 8778623 NR Description: F5O11.7 [Arabidopsis thaliana]
  misc_feature (29)..(314): NCBI GI NO: 34870890 NR Description: similar to RIKEN cDNA 6330579B17 gene
  misc_feature (29)..(314): NCBI GI NO: 18255582 NR Description: RIKEN cDNA 6330579B17 gene [Mus musculus]
  misc_feature (29)..(314): NCBI GI NO: 34810081 NR Description: Chain A
  misc_feature (29)..(279): NCBI GI NO: 13385982 NR Description: RIKEN cDNA 6330579B17 [Mus musculus]
MDPSVAARQSEEAAEAFFRAAPPLRDRDRLAASLADFLARHSAGGGGVVCVTSGGTTVPLEQRCVRYIDNFSSGQRGAASTEYFLKAGYAVIFIHRRGSKQPYCRFLPEDSFLDLFELGEDSEIQVPQSHSSVVKAAISNYRKAIDECLLLKLPFTTIFEYLQLLQMVATSMNCLGHRGMFYLAAAVSDFYVPWESMAKHKIESAGGPLNMQLNQVPKMLFILRKNWAPAAFCVSFKLETDPNILLQKAEMALKKYGMNVVVANELANYKDVVVMVTSNGGRTTVSRRSKAEDLEAQLTDLLVKMHSEHIAQPNS

SEQ ID NO: 25610 - DNA, 1285 bp, Zea mays subsp. mays
  misc_feature (1)..(1285): Ceres Seq. ID no. 12357949
ctggtacttggcaatcctctctagctagctcagcatccgacgacgggacttgcacgatggatgctgctctgctcgtcgtctccctcgtcctctgcctgctggcggctgcccctgcggcgtccgcggcgcgggccttcttcgtcttcggcgactccctcgtcgacaacggcaacaacaactacctgctgaccacggcgcgcgccgacgcgcccccctacggcatcgacttccccacgcaccaagccacgggccgcttctccaacgggcttaacatccccgacatcatcagcgagcacctcggggccgaacctgcgctgccgtacctgagccccgagctccgaggggagaagctgctcgtcggcgccaacttcgcgtcggccggcgtcgggatcctcaacgacacaggaatacagtttgtgaacatcatcaggatcggcgaccagctgcagtacttccgggagtaccagcggaagctgcgagccctcgtcggcgagccgcaggcgacgcagctcgtgaaccaggccctcgtgctcatcacgctcggcggcaacgacttcgtgaacaactactacctggtgcccatgtccgtgcggtcgcgccagtacgcactcccggactacgtccgcttcatcgtctccgagtacaggaagatcctctcgaggctgtacgagctgggcgcgcggcgcgtgatcgtgacggggacggggccgctggggtgcgtcccggccgagctggcgctgcacagccagaacggcgagtgcgcggcggagctgacgcgcgccgtgaacctcttcaacccgcagatggtggacatggtgcgcggcatcaaccgcgccatcggcgccgacgtcttcgtcaccgccaacacctaccgcatgaacttcgactacctcgcaaacccgcaggacttcgggttcacgaacgtgcaggtggcgtgctgcggccagggccccgtacaacgggatcgggctgtgcacggcggcgtcgaacgtgtgcgacaaccgcgacgtgttcgcgttctgggacgcgttccaccccacggagagggcaaaccgcatcatcgtcgcccagttcatgcacggcgacacggactacatgcaccccatgaacctcagcaccatcctcgccacggaccaggagggcctctagactatagcttgatcagccggacacgattatacgtacatgcgtgatgtgtctcacgtgcctagcacgttagccatgtgttggatgatggcagcccaatttgccaataatattcgtgcctcgatccaagtttcacctt

SEQ ID NO: 25611 - protein, 396 aa, Zea mays subsp. mays
  peptide (1)..(396): Ceres Seq. ID no. 12357950
  misc_feature (45)..(317): Pfam Name: Pfam Description:  GDSL-like Lipase/Acylhydrolase
  misc_feature (15)..(317): NCBI GI NO: 32489520 NR Description: OSJNBa0043L24.11
  misc_feature (17)..(317): NCBI GI NO: 37535146 NR Description: putative early nodulin gene (Enod) related protein
  misc_feature (25)..(317): NCBI GI NO: 15229265 NR Description: putative GDSL-motif lipase/acylhydrolase
  misc_feature (23)..(317): NCBI GI NO: 22758315 NR Description: putative early nodulin gene (Enod) related protein
  misc_feature (22)..(317): NCBI GI NO: 15242808 NR Description: putative protein; protein id: At5g33370
  misc_feature (21)..(317): NCBI GI NO: 28071322 NR Description: P0705A05.30
  misc_feature (23)..(316): NCBI GI NO: 15235421 NR Description: Proline-rich APG - like protein
  misc_feature (18)..(317): NCBI GI NO: 15238814 NR Description: putative protein; protein id: At5g18430.1
  misc_feature (29)..(204): NCBI GI NO: 37789825 NR Description: putative GDSL-motif lipase [Vitis vinifera]
  misc_feature (7)..(316): NCBI GI NO: 15227849 NR Description: putative GDSL-motif lipase/hydrolase
GTWQSSLASSASDDGTCTMDAALLVVSLVLCLLAAAPAASAARAFFVFGDSLVDNGNNNYLLTTARADAPPYGIDFPTHQATGRFSNGLNIPDIISEHLGAEPALPYLSPELRGEKLLVGANFASAGVGILNDTGIQFVNIIRIGDQLQYFREYQRKLRALVGEPQATQLVNQALVLITLGGNDFVNNYYLVPMSVRSRQYALPDYVRFIVSEYRKILSRLYELGARRVIVTGTGPLGCVPAELALHSQNGECAAELTRAVNLFNPQMVDMVRGINRAIGADVFVTANTYRMNFDYLANPQDFGFTNVQVACCGQGPVQRDRAVHGGVERVRQPRRVRVLGRVPPHGEGKPHHRRPVHARRHGLHAPHEPQHHPRHGPGGPLDYSLISRTRLYVHA

SEQ ID NO: 25612 - protein, 378 aa, Zea mays subsp. mays
  peptide (1)..(378): Ceres Seq. ID no. 12357951
  misc_feature (27)..(299): Pfam Name: Pfam Description:  GDSL-like Lipase/Acylhydrolase
  misc_feature (1)..(299): NCBI GI NO: 32489520 NR Description: OSJNBa0043L24.11
  misc_feature (1)..(299): NCBI GI NO: 37535146 NR Description: putative early nodulin gene (Enod) related protein
  misc_feature (7)..(299): NCBI GI NO: 15229265 NR Description: putative GDSL-motif lipase/acylhydrolase
  misc_feature (5)..(299): NCBI GI NO: 22758315 NR Description: putative early nodulin gene (Enod) related protein
  misc_feature (4)..(299): NCBI GI NO: 15242808 NR Description: putative protein; protein id: At5g33370
  misc_feature (3)..(299): NCBI GI NO: 28071322 NR Description: P0705A05.30
  misc_feature (5)..(298): NCBI GI NO: 15235421 NR Description: Proline-rich APG - like protein
  misc_feature (1)..(299): NCBI GI NO: 15238814 NR Description: putative protein; protein id: At5g18430.1
  misc_feature (11)..(186): NCBI GI NO: 37789825 NR Description: putative GDSL-motif lipase [Vitis vinifera]
  misc_feature (1)..(298): NCBI GI NO: 15227849 NR Description: putative GDSL-motif lipase/hydrolase
MDAALLVVSLVLCLLAAAPAASAARAFFVFGDSLVDNGNNNYLLTTARADAPPYGIDFPTHQATGRFSNGLNIPDIISEHLGAEPALPYLSPELRGEKLLVGANFASAGVGILNDTGIQFVNIIRIGDQLQYFREYQRKLRALVGEPQATQLVNQALVLITLGGNDFVNNYYLVPMSVRSRQYALPDYVRFIVSEYRKILSRLYELGARRVIVTGTGPLGCVPAELALHSQNGECAAELTRAVNLFNPQMVDMVRGINRAIGADVFVTANTYRMNFDYLANPQDFGFTNVQVACCGQGPVQRDRAVHGGVERVRQPRRVRVLGRVPPHGEGKPHHRRPVHARRHGLHAPHEPQHHPRHGPGGPLDYSLISRTRLYVHA

SEQ ID NO: 25613 - protein, 203 aa, Zea mays subsp. mays
  peptide (1)..(203): Ceres Seq. ID no. 12357952
  misc_feature (1)..(124): Pfam Name: Pfam Description:  GDSL-like Lipase/Acylhydrolase
  misc_feature (1)..(124): NCBI GI NO: 32489520 NR Description: OSJNBa0043L24.11
  misc_feature (1)..(124): NCBI GI NO: 37535146 NR Description: putative early nodulin gene (Enod) related protein
  misc_feature (1)..(124): NCBI GI NO: 15229265 NR Description: putative GDSL-motif lipase/acylhydrolase
  misc_feature (1)..(124): NCBI GI NO: 22758315 NR Description: putative early nodulin gene (Enod) related protein
  misc_feature (1)..(124): NCBI GI NO: 15242808 NR Description: putative protein; protein id: At5g33370
  misc_feature (1)..(124): NCBI GI NO: 28071322 NR Description: P0705A05.30
  misc_feature (1)..(123): NCBI GI NO: 15235421 NR Description: Proline-rich APG - like protein
  misc_feature (1)..(124): NCBI GI NO: 15238814 NR Description: putative protein; protein id: At5g18430.1
  misc_feature (1)..(11): NCBI GI NO: 37789825 NR Description: putative GDSL-motif lipase [Vitis vinifera]
  misc_feature (1)..(123): NCBI GI NO: 15227849 NR Description: putative GDSL-motif lipase/hydrolase
MSVRSRQYALPDYVRFIVSEYRKILSRLYELGARRVIVTGTGPLGCVPAELALHSQNGECAAELTRAVNLFNPQMVDMVRGINRAIGADVFVTANTYRMNFDYLANPQDFGFTNVQVACCGQGPVQRDRAVHGGVERVRQPRRVRVLGRVPPHGEGKPHHRRPVHARRHGLHAPHEPQHHPRHGPGGPLDYSLISRTRLYVHA

SEQ ID NO: 25614 - DNA, 1579 bp, Zea mays subsp. mays
  misc_feature (1)..(1579): Ceres Seq. ID no. 12376418
agaaccgaacctcgccgccgccgactcctcttccgtctctctctctatcatctactccttgtctccttccctctaaacccgcacccgcagcagcgccgctagggtttgctcaggccccgaaccccacccttggattgctctgatttcgtggcggctgtttcccgaagtttgcagtatggcggggtacccggaggacaaccagcacgagttgaacgggtacgacgaggaggtcgacgaagaggagggacaccccgggaggcgggtaggccgggatgggggctctgggtacgctgatgctgtcggagaggatgggaggggggcgggtggcgactcgttgggaaagatttttgtcggaggcgttgcttgggagacaactgaagaatcattctccaagcattttgagaagtatggggcaataactgattctgtaattatgaaggacaagcatactaagatgcctcgtggatttggatttgttacattttctgatccatctgttatagacaaggttttggaggatgatcacgttatagatggcagaacggttgaagttaagaggactgtcccgagggaagagatgatcaccaaagacggccctaagacaagaaagatcttcatcggtgggctaccaccatctcttactgaagatgaattgaaggatcacttttcatcatatggtaatgtggttgaacatcagataatgcttgatcatagcactgggcgttctagagggtttggttttgtcacatttgaaagtgaagattctgttgaaagggtcatatcagaggggagaatgcgtgatcttggtgggaagcaggttgaaataaagaaggctgaaccaaagaaacatggatctgaccacagcagtaatgggagatcaaaccacggaggtggagcttaccgcaattcttaccgtagtggtggtggagctggtagtggcagcagtggaggcggcggtggttatgggtatggtggtgcttatcgatctgctgcagcaggttatggatatgatggtggcgcaggagcaggatatggctatggtagagggtatggctatggaggcaatgctggctttgggtctagttttggtggtggttatggtggatccatgtatggaggtgctgcctatggtgcatatggtgcctatggtggtggcgcctatggaggaggtgcctacggaggcggtgcctatggaggtggtgctgcctatggtggcgccccaggtggttatggcactggcggatacggcagttatggcggagcaggtagtactggtggtgggagcacaggtgctcggggttctagcaggtatcatccatacggaaaataagcgacgagtttaaactatttttctgggtctcaggtgttcctcttctcctagaagttcagatttcatggcatgtccatctaaacagtgggcattggaacgtagttgggtctaattaagtcaccgtgagaactgtgtaattgctgcagctgagcctccctgcctgccttgtttgcagtacaagctacacataaaacctgtgttgtattctttagtttggtatatgcagagtttagaaccctgagatcgagc

SEQ ID NO: 25615 - protein, 384 aa, Zea mays subsp. mays
  peptide (1)..(384): Ceres Seq. ID no. 12376419
  misc_feature (146)..(217): Pfam Name: a.k.a. RRM, RBD, or RNP domain Pfam Description: RNA recognition motif.
  misc_feature (48)..(379): NCBI GI NO: 15242719 NR Description: RRM-containing RNA-binding protein, putative
  misc_feature (51)..(384): NCBI GI NO: 35215091 NR Description: putative heterogeneous nuclear ribonucleoprotein A3homolog 1
  misc_feature (51)..(384): NCBI GI NO: 30682553 NR Description: RNA recognition motif (RRM)-containing protein
  misc_feature (7)..(360): NCBI GI NO: 15220810 NR Description: RRM-containing RNA-binding protein, putative
  misc_feature (56)..(360): NCBI GI NO: 8778468 NR Description: F1L3.34 [Arabidopsis thaliana]
  misc_feature (140)..(377): NCBI GI NO: 37535274 NR Description: putative RNA-binding protein
  misc_feature (55)..(134): NCBI GI NO: 37535274 NR Description: putative RNA-binding protein
  misc_feature (42)..(383): NCBI GI NO: 27882514 NR Description: Similar to heterogeneous nuclear ribonucleoproteinA1
  misc_feature (52)..(383): NCBI GI NO: 28374304 NR Description: similar to heterogeneous ribonuclear particleprotein
  misc_feature (52)..(383): NCBI GI NO: 1710626 NR Description: Heterogeneous nuclear ribonucleo protein A3 homolog2
MAGYPEDNQHELNGYDEEVDEEEGHPGRRVGRDGGSGYADAVGEDGRGAGGDSLGKIFVGGVAWETTEESFSKHFEKYGAITDSVIMKDKHTKMPRGFGFVTFSDPSVIDKVLEDDHVIDGRTVEVKRTVPREEMITKDGPKTRKIFIGGLPPSLTEDELKDHFSSYGNVVEHQIMLDHSTGRSRGFGFVTFESEDSVERVISEGRMRDLGGKQVEIKKAEPKKHGSDHSSNGRSNHGGGAYRNSYRSGGGAGSGSSGGGGGYGYGGAYRSAAAGYGYDGGAGAGYGYGRGYGYGGNAGFGSSFGGGYGGSMYGGAAYGAYGAYGGGAYGGGAYGGGAYGGGAAYGGAPGGYGTGGYGSYGGAGSTGGGSTGARGSSRYHPYGK

SEQ ID NO: 25616 - protein, 298 aa, Zea mays subsp. mays
  peptide (1)..(298): Ceres Seq. ID no. 12376420
  misc_feature (60)..(131): Pfam Name: a.k.a. RRM, RBD, or RNP domain Pfam Description: RNA recognition motif.
  misc_feature (1)..(293): NCBI GI NO: 15242719 NR Description: RRM-containing RNA-binding protein, putative
  misc_feature (1)..(298): NCBI GI NO: 35215091 NR Description: putative heterogeneous nuclear ribonucleoprotein A3homolog 1
  misc_feature (1)..(298): NCBI GI NO: 30682553 NR Description: RNA recognition motif (RRM)-containing protein
  misc_feature (1)..(274): NCBI GI NO: 15220810 NR Description: RRM-containing RNA-binding protein, putative
  misc_feature (1)..(274): NCBI GI NO: 8778468 NR Description: F1L3.34 [Arabidopsis thaliana]
  misc_feature (54)..(291): NCBI GI NO: 37535274 NR Description: putative RNA-binding protein
  misc_feature (1)..(48): NCBI GI NO: 37535274 NR Description: putative RNA-binding protein
  misc_feature (1)..(297): NCBI GI NO: 27882514 NR Description: Similar to heterogeneous nuclear ribonucleoproteinA1
  misc_feature (1)..(297): NCBI GI NO: 28374304 NR Description: similar to heterogeneous ribonuclear particleprotein
  misc_feature (1)..(297): NCBI GI NO: 1710626 NR Description: Heterogeneous nuclear ribonucleo protein A3 homolog2
MKDKHTKMPRGFGFVTFSDPSVIDKVLEDDHVIDGRTVEVKRTVPREEMITKDGPKTRKIFIGGLPPSLTEDELKDHFSSYGNVVEHQIMLDHSTGRSRGFGFVTFESEDSVERVISEGRMRDLGGKQVEIKKAEPKKHGSDHSSNGRSNHGGGAYRNSYRSGGGAGSGSSGGGGGYGYGGAYRSAAAGYGYDGGAGAGYGYGRGYGYGGNAGFGSSFGGGYGGSMYGGAAYGAYGAYGGGAYGGGAYGGGAYGGGAAYGGAPGGYGTGGYGSYGGAGSTGGGSTGARGSSRYHPYGK

SEQ ID NO: 25617 - protein, 291 aa, Zea mays subsp. mays
  peptide (1)..(291): Ceres Seq. ID no. 12376421
  misc_feature (53)..(124): Pfam Name: a.k.a. RRM, RBD, or RNP domain Pfam Description: RNA recognition motif.
  misc_feature (1)..(286): NCBI GI NO: 15242719 NR Description: RRM-containing RNA-binding protein, putative
  misc_feature (1)..(291): NCBI GI NO: 35215091 NR Description: putative heterogeneous nuclear ribonucleoprotein A3homolog 1
  misc_feature (1)..(291): NCBI GI NO: 30682553 NR Description: RNA recognition motif (RRM)-containing protein
  misc_feature (1)..(267): NCBI GI NO: 15220810 NR Description: RRM-containing RNA-binding protein, putative
  misc_feature (1)..(267): NCBI GI NO: 8778468 NR Description: F1L3.34 [Arabidopsis thaliana]
  misc_feature (47)..(284): NCBI GI NO: 37535274 NR Description: putative RNA-binding protein
  misc_feature (1)..(41): NCBI GI NO: 37535274 NR Description: putative RNA-binding protein
  misc_feature (1)..(290): NCBI GI NO: 27882514 NR Description: Similar to heterogeneous nuclear ribonucleoproteinA1
  misc_feature (1)..(290): NCBI GI NO: 28374304 NR Description: similar to heterogeneous ribonuclear particleprotein
  misc_feature (1)..(290): NCBI GI NO: 1710626 NR Description: Heterogeneous nuclear ribonucleo protein A3 homolog2
MPRGFGFVTFSDPSVIDKVLEDDHVIDGRTVEVKRTVPREEMITKDGPKTRKIFIGGLPPSLTEDELKDHFSSYGNVVEHQIMLDHSTGRSRGFGFVTFESEDSVERVISEGRMRDLGGKQVEIKKAEPKKHGSDHSSNGRSNHGGGAYRNSYRSGGGAGSGSSGGGGGYGYGGAYRSAAAGYGYDGGAGAGYGYGRGYGYGGNAGFGSSFGGGYGGSMYGGAAYGAYGAYGGGAYGGGAYGGGAYGGGAAYGGAPGGYGTGGYGSYGGAGSTGGGSTGARGSSRYHPYGK

SEQ ID NO: 25618 - DNA, 1494 bp, Zea mays subsp. mays
  misc_feature (1)..(1494): Ceres Seq. ID no. 12566181
gcacgagaccattacctagaacatcctaatcaaaaaacaagcaacgagagctactagctagctagcagcactgcgggtacgtacccaactactacacattacgtacgtgagctagctagctagcagctagtgatagagaccagatcagctgcagcggcgacgatggctcctgagaagctgaagctgctcgtcggagtgctggccctgcagttccttctggcagggttccacatcgtctccagggcggcgctcaacatgggcatcagcgagatcgtgttcatggtgtacaggaacctcatctccctcgccttgctcgctccgttcgcctacttcctcgagaagaaagacaggccgccactcaccttctctttgctggtggagttcttcctgctagcgctgtgtgggataactgcgaaccagggcttctacctcctgggcctgtatcacctgtcaccaacctacgcctctgcgatacagaacaccgtccccgcgatcaccttcgccatggccgctgtcctcaggctagagcaggtggacctgagcaggaggcatgggctggccaaggtggtgggcacggtggtgagcatcggaggggccaccgtcataaccctgtacaagggcctgccgctgctccatcacagtgatgtgcacgtcaagtcgtctccggtgacgctgtcctcctccagcggcagccccatcctcaactggactctcggctgcgtcttcatcctcggccactgcctctcctggtccggatggatggtccttcaggtgccggtgctgaagaggtacccagccaggctctcggttctgtcactgacctgcatcttcgggctcctccagttcctggccattgccgccttcaccgaggaggacctgagcaggtggaaggtccgctcaggaggggagctcttcaccatcctatacgctggccttgtggcatccggggtagcgtttgctctgcagatctggtgcatcgacaggggaggcccgctcttcaccgccgtcttccagccagtgcagaccgtggccgtcgccgtcatggcttccgccatcctcggggaccagctctacacgggagggatcattggagctgtgctgatcgtcatcggcctctacttcgtgctgtggggcaagagcgccgagaagaagggcgccaggaacctgctgcaggatcagctggcgcagggagcagacgtgacgcggcacctgctcggcggagaagcttcggcgaaagatgaagaagcagccccggccatgctggcgtgatgatcgtttagtcgtctgtcaattggagcacagcgtagtcctgttgcatttgggaccgtatgagtcgtgtgatttcagctgttccaatctggcaaccaagaacaagtgtgcatgggttgccggtgtggaacagtgtgtagccatgctgctgtgagtctgtactctgttgctgtaatgttctgtgcaagcgtaggtaaggtgtataactataaaatcacttcatcc

SEQ ID NO: 25619 - protein, 368 aa, Zea mays subsp. mays
  peptide (1)..(368): Ceres Seq. ID no. 12566182
  misc_feature (17)..(150): Pfam Name: Pfam Description:  Integral membrane protein DUF6
  misc_feature (1)..(363): NCBI GI NO: 34895316 NR Description: putative nodulin
  misc_feature (3)..(332): NCBI GI NO: 18410867 NR Description: nodulin-like protein; protein id: At1g75500
  misc_feature (1)..(362): NCBI GI NO: 9294076 NR Description: nodulin-like protein [Arabidopsis thaliana]
  misc_feature (4)..(362): NCBI GI NO: 15229596 NR Description: integral membrane protein, putative
  misc_feature (3)..(344): NCBI GI NO: 18409794 NR Description: putative protein; protein id: At3g53210
  misc_feature (142)..(332): NCBI GI NO: 25404978 NR Description: protein F10A5.28 [imported] - Arabidopsis thaliana
  misc_feature (3)..(81): NCBI GI NO: 25404978 NR Description: protein F10A5.28 [imported] - Arabidopsis thaliana
  misc_feature (20)..(344): NCBI GI NO: 21593130 NR Description: nodulin-like protein [Arabidopsis thaliana]
  misc_feature (12)..(368): NCBI GI NO: 15240683 NR Description: MtN21 nodulin protein-like; protein id: At5g07050
  misc_feature (1)..(358): NCBI GI NO: 38605909 NR Description: OSJNBb0088C09.3
MAPEKLKLLVGVLALQFLLAGFHIVSRAALNMGISEIVFMVYRNLISLALLAPFAYFLEKKDRPPLTFSLLVEFFLLALCGITANQGFYLLGLYHLSPTYASAIQNTVPAITFAMAAVLRLEQVDLSRRHGLAKVVGTVVSIGGATVITLYKGLPLLHHSDVHVKSSPVTLSSSSGSPILNWTLGCVFILGHCLSWSGWMVLQVPVLKRYPARLSVLSLTCIFGLLQFLAIAAFTEEDLSRWKVRSGGELFTILYAGLVASGVAFALQIWCIDRGGPLFTAVFQPVQTVAVAVMASAILGDQLYTGGIIGAVLIVIGLYFVLWGKSAEKKGARNLLQDQLAQGADVTRHLLGGEASAKDEEAAPAMLA

SEQ ID NO: 25620 - protein, 337 aa, Zea mays subsp. mays
  peptide (1)..(337): Ceres Seq. ID no. 12566183
  misc_feature (1)..(119): Pfam Name: Pfam Description:  Integral membrane protein DUF6
  misc_feature (1)..(332): NCBI GI NO: 34895316 NR Description: putative nodulin
  misc_feature (1)..(301): NCBI GI NO: 18410867 NR Description: nodulin-like protein; protein id: At1g75500
  misc_feature (1)..(331): NCBI GI NO: 9294076 NR Description: nodulin-like protein [Arabidopsis thaliana]
  misc_feature (1)..(331): NCBI GI NO: 15229596 NR Description: integral membrane protein, putative
  misc_feature (1)..(313): NCBI GI NO: 18409794 NR Description: putative protein; protein id: At3g53210
  misc_feature (111)..(301): NCBI GI NO: 25404978 NR Description: protein F10A5.28 [imported] - Arabidopsis thaliana
  misc_feature (1)..(50): NCBI GI NO: 25404978 NR Description: protein F10A5.28 [imported] - Arabidopsis thaliana
  misc_feature (1)..(313): NCBI GI NO: 21593130 NR Description: nodulin-like protein [Arabidopsis thaliana]
  misc_feature (1)..(337): NCBI GI NO: 15240683 NR Description: MtN21 nodulin protein-like; protein id: At5g07050
  misc_feature (1)..(327): NCBI GI NO: 38605909 NR Description: OSJNBb0088C09.3
MGISEIVFMVYRNLISLALLAPFAYFLEKKDRPPLTFSLLVEFFLLALCGITANQGFYLLGLYHLSPTYASAIQNTVPAITFAMAAVLRLEQVDLSRRHGLAKVVGTVVSIGGATVITLYKGLPLLHHSDVHVKSSPVTLSSSSGSPILNWTLGCVFILGHCLSWSGWMVLQVPVLKRYPARLSVLSLTCIFGLLQFLAIAAFTEEDLSRWKVRSGGELFTILYAGLVASGVAFALQIWCIDRGGPLFTAVFQPVQTVAVAVMASAILGDQLYTGGIIGAVLIVIGLYFVLWGKSAEKKGARNLLQDQLAQGADVTRHLLGGEASAKDEEAAPAMLA

SEQ ID NO: 25621 - protein, 329 aa, Zea mays subsp. mays
  peptide (1)..(329): Ceres Seq. ID no. 12566184
  misc_feature (1)..(111): Pfam Name: Pfam Description:  Integral membrane protein DUF6
  misc_feature (1)..(324): NCBI GI NO: 34895316 NR Description: putative nodulin
  misc_feature (1)..(293): NCBI GI NO: 18410867 NR Description: nodulin-like protein; protein id: At1g75500
  misc_feature (1)..(323): NCBI GI NO: 9294076 NR Description: nodulin-like protein [Arabidopsis thaliana]
  misc_feature (1)..(323): NCBI GI NO: 15229596 NR Description: integral membrane protein, putative
  misc_feature (1)..(305): NCBI GI NO: 18409794 NR Description: putative protein; protein id: At3g53210
  misc_feature (103)..(293): NCBI GI NO: 25404978 NR Description: protein F10A5.28 [imported] - Arabidopsis thaliana
  misc_feature (1)..(42): NCBI GI NO: 25404978 NR Description: protein F10A5.28 [imported] - Arabidopsis thaliana
  misc_feature (1)..(305): NCBI GI NO: 21593130 NR Description: nodulin-like protein [Arabidopsis thaliana]
  misc_feature (1)..(329): NCBI GI NO: 15240683 NR Description: MtN21 nodulin protein-like; protein id: At5g07050
  misc_feature (1)..(319): NCBI GI NO: 38605909 NR Description: OSJNBb0088C09.3
MVYRNLISLALLAPFAYFLEKKDRPPLTFSLLVEFFLLALCGITANQGFYLLGLYHLSPTYASAIQNTVPAITFAMAAVLRLEQVDLSRRHGLAKVVGTVVSIGGATVITLYKGLPLLHHSDVHVKSSPVTLSSSSGSPILNWTLGCVFILGHCLSWSGWMVLQVPVLKRYPARLSVLSLTCIFGLLQFLAIAAFTEEDLSRWKVRSGGELFTILYAGLVASGVAFALQIWCIDRGGPLFTAVFQPVQTVAVAVMASAILGDQLYTGGIIGAVLIVIGLYFVLWGKSAEKKGARNLLQDQLAQGADVTRHLLGGEASAKDEEAAPAMLA

SEQ ID NO: 25622 - DNA, 1592 bp, Zea mays subsp. mays
  misc_feature (1)..(1592): Ceres Seq. ID no. 12345312
gtcgctgcctgctctgcttgctgcgccactccaaacccaacccaaaacccccacacgagatctgcgcagcaatggcgacgcggtgccacgtcctgctcctcctcgccgccgccttcgcgtccctcctcgcgctcgtggccgcggaagggggcgaagaggggccccgcgggcgccggctgctcgtcctcctggacgacctggccgtgcggtcgtcgcactcggccttcttcggctcgctccaggcgcgtgggttcgatctcgacttccgcctcgctgacgatccaaagctctcgctccaccgctacggccagtacctctacgacggcctcgtgctcttcgccccctccacaccacgttttggtggatcagtggaccagaacgcagtcctcgaatttattgatgctgggcatgacatgatcctggcggcagattcctctgcctctgatctcattcgtggcattgcaacagagtgtggggttgattttgatgaggatccagaggcaatggttattgaccatatgaactatgccgtcacagatgttgaaggtgatcacaccttgattgctggtgacgatcttatccattcggatgtgatactagggtctgaaaagattgaggctcctgtattgtttcgaggaattggacacatggctaatccatcaaacagtttggttctgaaggttctatcagcctctccatcagcatattcagctaatccaaagactaagttagcgtctcctccatcgctcactgggtcagctatatcattggtttcggttatgcaggcaagaaataatgctcgggtgctgttatctggatcactcgatctgtttagcaaccggttcctgaagtctggtgttcaaaaggctgatagcaaaacaagatatgagagagctggaaacgagcaatttgtggcagagataagcaaatgggttttccatgagaggggacatctaaaggctgttaatgttaggcatcacaaggttggggagaccaatgaaccaggcatgtaccgcattaatgatgacctggaatactctgttgagatctatgaatggtccggaacaagctggaagccgtatgttgctgatgatgtgcagcttcaatttttcatgatgagcccttacgttctgaaaactatgtcgactgacaacaagggtttgtattcaacaaccttcaaagttccagatgtttatggagttttccagttcaaagttgagtaccaaagactgggatatactggtctgtcttttacaaagcagattccagtacgtccttacagacataatgagtatgagagattcataacatcagcgtacccatactacaccgcctcattttcaacaatgggtgctttcttcgtattctcgtttgtgtacctgtaccacaaataaaggactcatgggagcgcacaagtctctggaggctgacgtgaccaagatctgtgggcactgaatgttgtgctataagccaagagttacccggcgccaattttatggaaccatgtttttgtactgccaacttagataacatttgacgaccgtgaccgcactcatgggaaatttactcgtgctaggatgttcgatctgccg

SEQ ID NO: 25623 - protein, 463 aa, Zea mays subsp. mays
  peptide (1)..(463): Ceres Seq. ID no. 12345313
  misc_feature (41)..(463): Pfam Name: Pfam Description:  Dolichyl-diphosphooligosaccharide- proteinglycosyltransferase 48kD subunit
  misc_feature (24)..(463): NCBI GI NO: 38175467 NR Description: putative dolichyl-di-phosphooligosaccharide-protein
  misc_feature (41)..(463): NCBI GI NO: 18425101 NR Description: dolichyl-di-phosphooligosaccharide- proteinglycotransferase
  misc_feature (41)..(463): NCBI GI NO: 21553942 NR Description: dolichyl-di-phosphooligosaccharide- proteinglycotransferase
  misc_feature (41)..(463): NCBI GI NO: 14334506 NR Description: putative dolichyl-di-phosphooligosaccharide-proteinglycotransferase
  misc_feature (41)..(463): NCBI GI NO: 8843726 NR Description: dolichyl-di-phosphooligosaccharide- proteinglycotransferase
  misc_feature (36)..(463): NCBI GI NO: 20070197 NR Description: dolichyl-diphosphooligosaccharide- proteinglycosyltransferase
  misc_feature (36)..(463): NCBI GI NO: 21104416 NR Description: dolichyl-diphosphooligosaccharide- proteinglycosyltransferase
  misc_feature (36)..(463): NCBI GI NO: 30584753 NR Description: Homo sapiens dolichyl-diphosphooligosaccharide- protein glycosyltransferase
  misc_feature (56)..(463): NCBI GI NO: 1581615 NR Description: oligosaccharyltransferase
  misc_feature (56)..(463): NCBI GI NO: 627424 NR Description: dolichyl-diphosphooligosaccharide- proteinglycotransferase
RCLLCLLRHSKPNPKPPHEICAAMATRCHVLLLLAAAFASLLALVAAEGGEEGPRGRRLLVLLDDLAVRSSHSAFFGSLQARGFDLDFRLADDPKLSLHRYGQYLYDGLVLFAPSTPRFGGSVDQNAVLEFIDAGHDMILAADSSASDLIRGIATECGVDFDEDPEAMVIDHMNYAVTDVEGDHTLIAGDDLIHSDVILGSEKIEAPVLFRGIGHMANPSNSLVLKVLSASPSAYSANPKTKLASPPSLTGSAISLVSVMQARNNARVLLSGSLDLFSNRFLKSGVQKADSKTRYERAGNEQFVAEISKWVFHERGHLKAVNVRHHKVGETNEPGMYRINDDLEYSVEIYEWSGTSWKPYVADDVQLQFFMMSPYVLKTMSTDNKGLYSTTFKVPDVYGVFQFKVEYQRLGYTGLSFTKQIPVRPYRHNEYERFITSAYPYYTASFSTMGAFFVFSFVYLYHK

SEQ ID NO: 25624 - protein, 440 aa, Zea mays subsp. mays
  peptide (1)..(440): Ceres Seq. ID no. 12345314
  misc_feature (18)..(440): Pfam Name: Pfam Description:  Dolichyl-diphosphooligosaccharide- proteinglycosyltransferase 48kD subunit
  misc_feature (1)..(440): NCBI GI NO: 38175467 NR Description: putative dolichyl-di-phosphooligosaccharide-protein
  misc_feature (18)..(440): NCBI GI NO: 18425101 NR Description: dolichyl-di-phosphooligosaccharide- proteinglycotransferase
  misc_feature (18)..(440): NCBI GI NO: 21553942 NR Description: dolichyl-di-phosphooligosaccharide- proteinglycotransferase
  misc_feature (18)..(440): NCBI GI NO: 14334506 NR Description: putative dolichyl-di-phosphooligosaccharide-proteinglycotransferase
  misc_feature (18)..(440): NCBI GI NO: 8843726 NR Description: dolichyl-di-phosphooligosaccharide- proteinglycotransferase
  misc_feature (13)..(440): NCBI GI NO: 20070197 NR Description: dolichyl-diphosphooligosaccharide- proteinglycosyltransferase
  misc_feature (13)..(440): NCBI GI NO: 21104416 NR Description: dolichyl-diphosphooligosaccharide- proteinglycosyltransferase
  misc_feature (13)..(440): NCBI GI NO: 30584753 NR Description: Homo sapiens dolichyl-diphosphooligosaccharide- protein glycosyltransferase
  misc_feature (33)..(440): NCBI GI NO: 1581615 NR Description: oligosaccharyltransferase
  misc_feature (33)..(440): NCBI GI NO: 627424 NR Description: dolichyl-diphosphooligosaccharide- proteinglycotransferase
MATRCHVLLLLAAAFASLLALVAAEGGEEGPRGRRLLVLLDDLAVRSSHSAFFGSLQARGFDLDFRLADDPKLSLHRYGQYLYDGLVLFAPSTPRFGGSVDQNAVLEFIDAGHDMILAADSSASDLIRGIATECGVDFDEDPEAMVIDHMNYAVTDVEGDHTLIAGDDLIHSDVILGSEKIEAPVLFRGIGHMANPSNSLVLKVLSASPSAYSANPKTKLASPPSLTGSAISLVSVMQARNNARVLLSGSLDLFSNRFLKSGVQKADSKTRYERAGNEQFVAEISKWVFHERGHLKAVNVRHHKVGETNEPGMYRINDDLEYSVEIYEWSGTSWKPYVADDVQLQFFMMSPYVLKTMSTDNKGLYSTTFKVPDVYGVFQFKVEYQRLGYTGLSFTKQIPVRPYRHNEYERFITSAYPYYTASFSTMGAFFVFSFVYLYHK

SEQ ID NO: 25625 - protein, 326 aa, Zea mays subsp. mays
  peptide (1)..(326): Ceres Seq. ID no. 12345315
  misc_feature (1)..(326): Pfam Name: Pfam Description:  Dolichyl-diphosphooligosaccharide- proteinglycosyltransferase 48kD subunit
  misc_feature (1)..(326): NCBI GI NO: 38175467 NR Description: putative dolichyl-di-phosphooligosaccharide-protein
  misc_feature (1)..(326): NCBI GI NO: 18425101 NR Description: dolichyl-di-phosphooligosaccharide- proteinglycotransferase
  misc_feature (1)..(326): NCBI GI NO: 21553942 NR Description: dolichyl-di-phosphooligosaccharide- proteinglycotransferase
  misc_feature (1)..(326): NCBI GI NO: 14334506 NR Description: putative dolichyl-di-phosphooligosaccharide-proteinglycotransferase
  misc_feature (1)..(326): NCBI GI NO: 8843726 NR Description: dolichyl-di-phosphooligosaccharide- proteinglycotransferase
  misc_feature (1)..(326): NCBI GI NO: 20070197 NR Description: dolichyl-diphosphooligosaccharide- proteinglycosyltransferase
  misc_feature (1)..(326): NCBI GI NO: 21104416 NR Description: dolichyl-diphosphooligosaccharide- proteinglycosyltransferase
  misc_feature (1)..(326): NCBI GI NO: 30584753 NR Description: Homo sapiens dolichyl-diphosphooligosaccharide- protein glycosyltransferase
  misc_feature (1)..(326): NCBI GI NO: 1581615 NR Description: oligosaccharyltransferase
  misc_feature (1)..(326): NCBI GI NO: 627424 NR Description: dolichyl-diphosphooligosaccharide- proteinglycotransferase
MILAADSSASDLIRGIATECGVDFDEDPEAMVIDHMNYAVTDVEGDHTLIAGDDLIHSDVILGSEKIEAPVLFRGIGHMANPSNSLVLKVLSASPSAYSANPKTKLASPPSLTGSAISLVSVMQARNNARVLLSGSLDLFSNRFLKSGVQKADSKTRYERAGNEQFVAEISKWVFHERGHLKAVNVRHHKVGETNEPGMYRINDDLEYSVEIYEWSGTSWKPYVADDVQLQFFMMSPYVLKTMSTDNKGLYSTTFKVPDVYGVFQFKVEYQRLGYTGLSFTKQIPVRPYRHNEYERFITSAYPYYTASFSTMGAFFVFSFVYLYHK

SEQ ID NO: 25626 - DNA, 1252 bp, Zea mays subsp. mays
  misc_feature (1)..(1252): Ceres Seq. ID no. 12577727
gcacgagaccattacctagaacatcctaatcgaaaaatcgaattcctcgtcaccaacacgcacgcggcctctgcctccgcgatccgcgtctccatcctgaggctccgaatcgatctcccttcctcaccaaaccggagcacttcggaggccggacccggcgagaagcgaccgaccgcagccagctcacgtctccctcttcatccaccatgctgagggtcgcgggcaggcgcctctcgtccgctctcgcctggcgccccgccgccgccgcctcaggctcccggggccctctcgccggtacactacccggccgcgacgacgacgacacacgcgactgcagggcgcgtttcgccatcgaatctcccttcttcgccgctgccagagggttttctgcagagactcttgctccaagaaaccaggatgtgggcttatccgagctcccagcaactgtggcagctgtgaagaatccaagtggaaaaatcgtgtatgatgagtataaccatgagcgctacccgcctggagaccccagcaagcgtgcatttgcctactttgtgctgagtggtgggaggttcatttacgcatctttgctgcgacttctcgtcttaaaatttgtcctgagcatgtcagcaagtaaggatgttctcgcgcttgcctcacttgaggttgacctctcaagcattgagcctggaaccacggtgacggtgaagtggcgtggcaagccggtcttcataaggcggaggacagaggatgatatcaagttggccaacagtgttgacgtcgcatccctccgccacccagagcaggatgcagagcgtgtcaagaaccccgaatggctggtcgtcattggggtctgcactcacctgggctgcatcccgctccctaatgcaggagactttggtggctggttctgcccgtgccacggctcgcactacgacatttctggtaggatccgcaagggcccggcacccttcaacctggaagtgccgacatacagcttcttggaagagaacaagcttctcatcggctgagattgctgttagtgttgttcgtgtggccctgtcgtttttgtttgatcaacaacttcaccttttctcttgcctgggttagggcatacctttgtgggttgtttctgagtgcagtgttgttgctagcacctgacagtaatgaataacctgctgctacataaaggatactgttaattgttgtcaaatttggttctgtttttttcctgacagcaatgaacaaacttctgctg

SEQ ID NO: 25627 - protein, 272 aa, Zea mays subsp. mays; identical to SEQ ID NO: 24816
  peptide (1)..(272): Ceres Seq. ID no. 12577728
  misc_feature (172)..(268): Pfam Name: Pfam Description:  Rieske [2Fe-2S] domain
  misc_feature (1)..(272): NCBI GI NO: 1717957 NR Description: Ubiquinol-cytochrome C reductase iron-sulfur subunit
  misc_feature (1)..(272): NCBI GI NO: 38347166 NR Description: OSJNBa0039C07.12
  misc_feature (1)..(272): NCBI GI NO: 1717951 NR Description: Ubiquinol-cytochrome C reductase iron-sulfur subunit 3
  misc_feature (1)..(272): NCBI GI NO: 1717953 NR Description: Ubiquinol-cytochrome C reductase iron-sulfur subunit 5
  misc_feature (1)..(272): NCBI GI NO: 1717950 NR Description: Ubiquinol-cytochrome C reductase iron-sulfur subunit 2
  misc_feature (1)..(272): NCBI GI NO: 1076675 NR Description: ubiquinol-cytochrome-c reductase (EC 1
  misc_feature (1)..(272): NCBI GI NO: 586145 NR Description: Ubiquinol-cytochrome C reductase iron-sulfur subunit
  misc_feature (15)..(272): NCBI GI NO: 1717949 NR Description: Ubiquinol-cytochrome C reductase iron-sulfur subunit 1
  misc_feature (1)..(272): NCBI GI NO: 18417067 NR Description: ubiquinol--cytochrome-c reductase - like protein
  misc_feature (1)..(272): NCBI GI NO: 21553507 NR Description: ubiquinol--cytochrome-c reductase-like protein

SEQ ID NO: 25628 - DNA, 909 bp, Zea mays subsp. mays
  misc_feature (1)..(909): Ceres Seq. ID no. 12403151
ctccgctccgcagctcatggcttcctcggtctccctccgtggcgccatcctccagcgcccccacctcaggccccgccccgacgcccgccgcgcgcccacgacgaggcgccgcgccgtgcctgcaaagatctgctgcatcggatgggaaccccgagggcatcctgggcgcgccgcagggcggccacatcgcgcgcctcgagttccgccgccgcctcgagagggactccgaggcgcgcgaggacttcgagcgccaggtgcgcgaggagaaggagcggcggcgcagcgagcgcgaggcgcgggtgatcccggacacggacgccggcctcgtcgagttcttcctcgacaccgacgcgcgcgagatcgagatcgagatcggcaggctgcggcccaggctcagccaggacttcttcggccacgtctcgcgcgagatagcgcagatcaaatttgcagtcaccaggacagcggagatggaagacagactgatcgagctggaggcgatgcagaaggttcttctcgagggagttgaggcgtacgacaagttgcagaacgaccttgttacagcgaaagaacggctcatgaagattctgcagtcaagtgacagaaaatcgacactgctggaaatggtggagcggaacgagctcaatatatccatactaacacttctcgatgagaacattgcgagcgcgaagacgagtaatcaggatgaggcggccgctttcatggaggacgtgagatcatctcttgtgaaatatataacaatatagatctgggacgcttttacataccaatggttcgttcattgcttgggcatggtttgatcgtttttagaagtgtggttgctgttcgttcattgtgaaatatataacaatataaatctggattatttccgcctgtttgtagttgggctgc

SEQ ID NO: 25629 - protein, 253 aa, Zea mays subsp. mays
  peptide (1)..(253): Ceres Seq. ID no. 12403152
  misc_feature (17)..(253): NCBI GI NO: 29368099 NR Description: unknown [Oryza sativa (japonica cultivar-group)]
  misc_feature (49)..(253): NCBI GI NO: 15221583 NR Description: unknown protein; protein id: At1g62780
  misc_feature (98)..(253): NCBI GI NO: 25373192 NR Description: protein F23N19.15
PLRSSWLPRSPSVAPSSSAPTSGPAPTPAARPRRGAAPCLQRSAASDGNPEGILGAPQGGHIARLEFRRRLERDSEAREDFERQVREEKERRRSEREARVIPDTDAGLVEFFLDTDAREIEIEIGRLRPRLSQDFFGHVSREIAQIKFAVTRTAEMEDRLIELEAMQKVLLEGVEAYDKLQNDLVTAKERLMKILQSSDRKSTLLEMVERNELNISILTLLDENIASAKTSNQDEAAAFMEDVRSSLVKYITI

SEQ ID NO: 25630 - protein, 174 aa, Zea mays subsp. mays
  peptide (1)..(174): Ceres Seq. ID no. 12403153
SAPQLMASSVSLRGAILQRPHLRPRPDARRAPTTRRRAVPAKICCIGWEPRGHPGRAAGRPHRAPRVPPPPREGLRGARGLRAPGARGEGAAAQRARGAGDPGHGRRPRRVLPRHRRARDRDRDRQAAAQAQPGLLRPRLARDSADQICSHQDSGDGRQTDRAGGDAEGSSRGS

SEQ ID NO: 25631 - protein, 169 aa, Zea mays subsp. mays
  peptide (1)..(169): Ceres Seq. ID no. 12403154
MASSVSLRGAILQRPHLRPRPDARRAPTTRRRAVPAKICCIGWEPRGHPGRAAGRPHRAPRVPPPPREGLRGARGLRAPGARGEGAAAQRARGAGDPGHGRRPRRVLPRHRRARDRDRDRQAAAQAQPGLLRPRLARDSADQICSHQDSGDGRQTDRAGGDAEGSSRGS

SEQ ID NO: 25632 - DNA, 1104 bp, Zea mays subsp. mays
  misc_feature (1)..(1104): Ceres Seq. ID no. 12379137
tcatgcagttcacacactctcctctgacctctcctctcctctcctctcgacctctcccttctatctagccaccgaagccaagaccaaggaacggcatggctcagctgctgcacctgccggacctcgcggcggcgcggccgccggcgcggaggaggaggggtgtggcggtggcggtggcgggggggcgcgtcaagcagggggaggcggggcgggtgatcagggtcgccgaccccgtgcgggagggccggatgccgcctcctcttcttgccgcgccggccacgccgtcggagtctccgccggtcgcggggaggcgcggggacgaggacgacgaggtgaggcagaggtactacctcaacatggggtacgcgatccggacgctcagggaggagctccccgatgtgctctacaaggagcccagctttgacatctacagagatgacattgtcttcacagaccctttgaatacattcaagggcctggaaaattacaagacgatattctgggcgcttcgttttactggccggatcttcttcaaggcattgtgggttgatgtagttagtatatggcagcctgctgagaacattatcatgattcgctggatcgcccacggcattcctcgagtaccttgggatgggcatggccgcttcgatggtgcttctgtgtataaactcgacaaggatggtaagatctacgagcataaggtccacaatgttgctatgaatccaccaacgaagttcaaggtcctaccagtccatgagctaatcagatcacttggttgcccctctactgcaaaaccaacttattttgaagcttcatcacaatatctgtgcgctgggccatcttatttgagattagcttggataagatgctacatctcattgtgccgcatgctttcgctcgcaaatctgggagaaggatagcctgggtttagtgatacctccaaattttgtattttcagtatgacagcacacatgttactaagtactattgagtcatgacagttgtatatatgaacactgatagtttatagaataagacctcttagttaaggtgtacaacacttgttattgattgttataagcatcagtcagcaaactagtcaag

SEQ ID NO: 25633 - protein, 274 aa, Zea mays subsp. mays
  peptide (1)..(274): Ceres Seq. ID no. 12379138
  misc_feature (1)..(203): NCBI GI NO: 34904098 NR Description: unnamed protein product
  misc_feature (61)..(238): NCBI GI NO: 18407008 NR Description: Expressed protein; protein id: At2g46220
  misc_feature (61)..(202): NCBI GI NO: 25408977 NR Description: hypothetical protein At2g46220
  misc_feature (53)..(243): NCBI GI NO: 18412399 NR Description: expressed protein; protein id: At1g79510
  misc_feature (1)..(238): NCBI GI NO: 38347356 NR Description: OSJNBa0070C17.17
  misc_feature (47)..(237): NCBI GI NO: 15219209 NR Description: unknown protein; protein id: At1g16320
  misc_feature (80)..(201): NCBI GI NO: 23126421 NR Description: hypothetical protein [Nostoc punctiforme]
  misc_feature (92)..(201): NCBI GI NO: 23040676 NR Description: hypothetical protein
  misc_feature (92)..(201): NCBI GI NO: 17228448 NR Description: hypothetical protein [Nostoc sp. PCC 7120]
  misc_feature (105)..(204): NCBI GI NO: 37522054 NR Description: hypothetical protein glr2485
MAQLLHLPDLAAARPPARRRRGVAVAVAGGRVKQGEAGRVIRVADPVREGRMPPPLLAAPATPSESPPVAGRRGDEDDEVRQRYYLNMGYAIRTLREELPDVLYKEPSFDIYRDDIVFTDPLNTFKGLENYKTIFWALRFTGRIFFKALWVDVVSIWQPAENIIMIRWIAHGIPRVPWDGHGRFDGASVYKLDKDGKIYEHKVHNVAMNPPTKFKVLPVHELIRSLGCPSTAKPTYFEASSQYLCAGPSYLRLAWIRCYISLCRMLSLANLGEG

SEQ ID NO: 25634 - protein, 223 aa, Zea mays subsp. mays
  peptide (1)..(223): Ceres Seq. ID no. 12379139
  misc_feature (1)..(152): NCBI GI NO: 34904098 NR Description: unnamed protein product
  misc_feature (10)..(187): NCBI GI NO: 18407008 NR Description: Expressed protein; protein id: At2g46220
  misc_feature (10)..(151): NCBI GI NO: 25408977 NR Description: hypothetical protein At2g46220
  misc_feature (2)..(192): NCBI GI NO: 18412399 NR Description: expressed protein; protein id: At1g79510
  misc_feature (1)..(187): NCBI GI NO: 38347356 NR Description: OSJNBa0070C17.17
  misc_feature (1)..(186): NCBI GI NO: 15219209 NR Description: unknown protein; protein id: At1g16320
  misc_feature (29)..(150): NCBI GI NO: 23126421 NR Description: hypothetical protein [Nostoc punctiforme]
  misc_feature (41)..(150): NCBI GI NO: 23040676 NR Description: hypothetical protein
  misc_feature (41)..(150): NCBI GI NO: 17228448 NR Description: hypothetical protein [Nostoc sp. PCC 7120]
  misc_feature (54)..(153): NCBI GI NO: 37522054 NR Description: hypothetical protein glr2485
MPPPLLAAPATPSESPPVAGRRGDEDDEVRQRYYLNMGYAIRTLREELPDVLYKEPSFDIYRDDIVFTDPLNTFKGLENYKTIFWALRFTGRIFFKALWVDVVSIWQPAENIIMIRWIAHGIPRVPWDGHGRFDGASVYKLDKDGKIYEHKVHNVAMNPPTKFKVLPVHELIRSLGCPSTAKPTYFEASSQYLCAGPSYLRLAWIRCYISLCRMLSLANLGEG

SEQ ID NO: 25635 - protein, 187 aa, Zea mays subsp. mays
  peptide (1)..(187): Ceres Seq. ID no. 12379140
  misc_feature (1)..(116): NCBI GI NO: 34904098 NR Description: unnamed protein product
  misc_feature (1)..(151): NCBI GI NO: 18407008 NR Description: Expressed protein; protein id: At2g46220
  misc_feature (1)..(115): NCBI GI NO: 25408977 NR Description: hypothetical protein At2g46220
  misc_feature (1)..(156): NCBI GI NO: 18412399 NR Description: expressed protein; protein id: At1g79510
  misc_feature (1)..(151): NCBI GI NO: 38347356 NR Description: OSJNBa0070C17.17
  misc_feature (1)..(150): NCBI GI NO: 15219209 NR Description: unknown protein; protein id: At1g16320
  misc_feature (1)..(114): NCBI GI NO: 23126421 NR Description: hypothetical protein [Nostoc punctiforme]
  misc_feature (5)..(114): NCBI GI NO: 23040676 NR Description: hypothetical protein
  misc_feature (5)..(114): NCBI GI NO: 17228448 NR Description: hypothetical protein [Nostoc sp. PCC 7120]
  misc_feature (18)..(117): NCBI GI NO: 37522054 NR Description: hypothetical protein glr2485
MGYAIRTLREELPDVLYKEPSFDIYRDDIVFTDPLNTFKGLENYKTIFWALRFTGRIFFKALWVDVVSIWQPAENIIMIRWIAHGIPRVPWDGHGRFDGASVYKLDKDGKIYEHKVHNVAMNPPTKFKVLPVHELIRSLGCPSTAKPTYFEASSQYLCAGPSYLRLAWIRCYISLCRMLSLANLGEG

SEQ ID NO: 25636 - DNA, 964 bp, Zea mays subsp. mays
  misc_feature (1)..(964): Ceres Seq. ID no. 12403052
aaattctccctttccacaagaacatcacacggcgatagcaaaaccttccgtcggaggatggcttccgccggcgctggagaaggcaaggagacggggacggctgccgggagcagcctccacagcaagactctcctcaagagccaaccactgtaccagtacatactggaatccaccgtcttcccacgcgagccggactgcctgcgggagctccgcgtcgccaccgccacccaccccatggcgggcatggctgcgtcgccggacgaggtgcagctgctgcagctcctgatcgagattcttggcgtcaagaacgccatcgaggttggcgtcttcaccgggtactcgctgctcgccaccgccctcgccctccccgacgacggcaagattgtggccatcgacgttacccgcgagagctacgaccagattgggtcgccggtgatcgagaaggccggcgtggcgcacaagatcgacttccgcgtcgggctcgcgctgcccgtgctggaccagatggtttccgaggaggggaacaagggcaagttcgacttcgcgttcgtggacgcggacaaggtgaacttcctcaactaccacgagcggctgctgcagctgctcagggtcgggggcctcatcgcctacgacaacacgctgtggggcgggtccgtggccgcgccccacgacgagccgctctccgagcgggaccgcgcgctcgctgcggccaccagggagttcaacgcggccgtggccgccgatccccgcgttcacgtctgccaggtcgccatcgccgacgggctcacgctgtgccgccgcgtcgcctgatccgtatccggttatccgcctcgaaatgcagcagagctgtgggctgtcgctgacactgctgtgagctctgtgcttgaaatggccatggtctgtaatagcgaactgggcttgagtgaaaataaatccaccagcgcgctagcgtgtgtcagcgacc

SEQ ID NO: 25637 - protein, 269 aa, Zea mays subsp. mays
  peptide (1)..(269): Ceres Seq. ID no. 12403053
  misc_feature (55)..(268): Pfam Name: Pfam Description:  O-methyltransferase
  misc_feature (21)..(268): NCBI GI NO: 5091498 NR Description: ESTs AU058067
  misc_feature (41)..(268): NCBI GI NO: 5257275 NR Description: ESTs AU030740
  misc_feature (23)..(269): NCBI GI NO: 3023419 NR Description: Caffeoyl-CoA O-methyltransferase
  misc_feature (23)..(269): NCBI GI NO: 30580381 NR Description: Caffeoyl-CoA O-methyltransferase 2
  misc_feature (23)..(269): NCBI GI NO: 30580336 NR Description: Caffeoyl-CoA O-methyltransferase 1
  misc_feature (20)..(269): NCBI GI NO: 30580349 NR Description: Caffeoyl-CoA O-methyltransferase
  misc_feature (25)..(268): NCBI GI NO: 3023436 NR Description: Caffeoyl-CoA O-methyltransferase
  misc_feature (20)..(269): NCBI GI NO: 30580332 NR Description: Caffeoyl-CoA O-methyltransferase
  misc_feature (25)..(268): NCBI GI NO: 30580333 NR Description: Caffeoyl-CoA O-methyltransferase 1
  misc_feature (19)..(269): NCBI GI NO: 15235213 NR Description: caffeoyl-CoA 3-O-methyltransferase
KFSLSTRTSHGDSKTFRRRMASAGAGEGKETGTAAGSSLHSKTLLKSQPLYQYILESTVFPREPDCLRELRVATATHPMAGMAASPDEVQLLQLLIEILGVKNAIEVGVFTGYSLLATALALPDDGKIVAIDVTRESYDQIGSPVIEKAGVAHKIDFRVGLALPVLDQMVSEEGNKGKFDFAFVDADKVNFLNYHERLLQLLRVGGLIAYDNTLWGGSVAAPHDEPLSERDRALAAATREFNAAVAADPRVHVCQVAIADGLTLCRRVA

SEQ ID NO: 25638 - protein, 250 aa, Zea mays subsp. mays
  peptide (1)..(250): Ceres Seq. ID no. 12403054
  misc_feature (36)..(249): Pfam Name: Pfam Description:  O-methyltransferase
  misc_feature (2)..(249): NCBI GI NO: 5091498 NR Description: ESTs AU058067
  misc_feature (22)..(249): NCBI GI NO: 5257275 NR Description: ESTs AU030740
  misc_feature (4)..(250): NCBI GI NO: 3023419 NR Description: Caffeoyl-CoA O-methyltransferase
  misc_feature (4)..(250): NCBI GI NO: 30580381 NR Description: Caffeoyl-CoA O-methyltransferase 2
  misc_feature (4)..(250): NCBI GI NO: 30580336 NR Description: Caffeoyl-CoA O-methyltransferase 1
  misc_feature (1)..(250): NCBI GI NO: 30580349 NR Description: Caffeoyl-CoA O-methyltransferase
  misc_feature (6)..(249): NCBI GI NO: 3023436 NR Description: Caffeoyl-CoA O-methyltransferase
  misc_feature (1)..(250): NCBI GI NO: 30580332 NR Description: Caffeoyl-CoA O-methyltransferase
  misc_feature (6)..(249): NCBI GI NO: 30580333 NR Description: Caffeoyl-CoA O-methyltransferase 1
  misc_feature (1)..(250): NCBI GI NO: 15235213 NR Description: caffeoyl-CoA 3-O-methyltransferase
MASAGAGEGKETGTAAGSSLHSKTLLKSQPLYQYILESTVFPREPDCLRELRVATATHPMAGMAASPDEVQLLQLLIEILGVKNAIEVGVFTGYSLLATALALPDDGKIVAIDVTRESYDQIGSPVIEKAGVAHKIDFRVGLALPVLDQMVSEEGNKGKFDFAFVDADKVNFLNYHERLLQLLRVGGLIAYDNTLWGGSVAAPHDEPLSERDRALAAATREFNAAVAADPRVHVCQVAIADGLTLCRRVA

SEQ ID NO: 25639 - protein, 191 aa, Zea mays subsp. mays
  peptide (1)..(191): Ceres Seq. ID no. 12403055
  misc_feature (1)..(190): Pfam Name: Pfam Description:  O-methyltransferase
  misc_feature (1)..(190): NCBI GI NO: 5091498 NR Description: ESTs AU058067
  misc_feature (1)..(190): NCBI GI NO: 5257275 NR Description: ESTs AU030740
  misc_feature (1)..(191): NCBI GI NO: 3023419 NR Description: Caffeoyl-CoA O-methyltransferase
  misc_feature (1)..(191): NCBI GI NO: 30580381 NR Description: Caffeoyl-CoA O-methyltransferase 2
  misc_feature (1)..(191): NCBI GI NO: 30580336 NR Description: Caffeoyl-CoA O-methyltransferase 1
  misc_feature (1)..(191): NCBI GI NO: 30580349 NR Description: Caffeoyl-CoA O-methyltransferase
  misc_feature (1)..(190): NCBI GI NO: 3023436 NR Description: Caffeoyl-CoA O-methyltransferase
  misc_feature (1)..(191): NCBI GI NO: 30580332 NR Description: Caffeoyl-CoA O-methyltransferase
  misc_feature (1)..(190): NCBI GI NO: 30580333 NR Description: Caffeoyl-CoA O-methyltransferase 1
  misc_feature (1)..(191): NCBI GI NO: 15235213 NR Description: caffeoyl-CoA 3-O-methyltransferase
MAGMAASPDEVQLLQLLIEILGVKNAIEVGVFTGYSLLATALALPDDGKIVAIDVTRESYDQIGSPVIEKAGVAHKIDFRVGLALPVLDQMVSEEGNKGKFDFAFVDADKVNFLNYHERLLQLLRVGGLIAYDNTLWGGSVAAPHDEPLSERDRALAAATREFNAAVAADPRVHVCQVAIADGLTLCRRVA

SEQ ID NO: 25640 - DNA, 868 bp, Zea mays subsp. mays
  misc_feature (1)..(868): Ceres Seq. ID no. 12365359
tctgccctctgctcaaaatttcccccaaaacttctcctcttgaggaaggcagcccgagcgagcgcgctgcaatggcggactcgtcggcgccgacgagagtgatgatggcggtgaacgagtcgtcgctcaaggggtacccgcacccctccatcagctgtcgcaccgccttcgactggacgctctccaagctcgtccgctccaaccctgggggcttccacttcctcttcgtccacgttcatgtccccgacgaggacggatttgatgacatggatagcatctatgcttcgccggaggactttcaccaaatgaagcagagagacaagataagagggcttcatttgctcgagtactttgtaaaccaatgccatcagttagggataaaatgcgaggcatggatcagacatggagatccaaaggaggttatctgcagcgaagtgaagagagtccagcctgaccttctagttgtgggaagtaggggtcttgggccatttcagagggttttcgtgggcacggtgagcgagttctgcgttaagcatgccgaatgccccgtcatcaccataaaacggaacgctaccgaagctcctcaggaccctgtcgacgattgatgcttccaagccaagccatgccatgtcactggagaatgagatgttcttcttcactgcttttataatgggttgatgtacaaaatacgatatggaagtggtgcctggaactagttctcggagggttccaactcttgcacactgcgcccccaaaaactagagttgaagatgtaaaacgccgtcgtccgccgagggacgacgagagattgtacgtgatacatcgatcgagtctcgtgaacctaaaaagctgccgctacattattgtt

SEQ ID NO: 25641 - protein, 200 aa, Zea mays subsp. mays
  peptide (1)..(200): Ceres Seq. ID no. 12365360
  misc_feature (30)..(187): Pfam Name: Pfam Description:  Universal stress protein family
  misc_feature (24)..(200): NCBI GI NO: 19387249 NR Description: putative ethylene-responsive protein
  misc_feature (28)..(200): NCBI GI NO: 15241464 NR Description: putative protein; protein id: At5g14680.1
  misc_feature (28)..(200): NCBI GI NO: 6016711 NR Description: unknown protein [Arabidopsis thaliana]
  misc_feature (28)..(200): NCBI GI NO: 18395845 NR Description: expressed protein; protein id: At3g01520
  misc_feature (34)..(200): NCBI GI NO: 21536534 NR Description: putative ethylene-responsive protein
  misc_feature (9)..(187): NCBI GI NO: 30681955 NR Description: ethylene-responsive protein -related
  misc_feature (24)..(188): NCBI GI NO: 34914610 NR Description: P0520B06.18
  misc_feature (91)..(187): NCBI GI NO: 18399413 NR Description: ethylene-responsive protein, putative
  misc_feature (91)..(187): NCBI GI NO: 21594903 NR Description: ethylene-responsive protein, putative
  misc_feature (13)..(187): NCBI GI NO: 40539010 NR Description: putative stress-related protein
CPLLKISPKTSPLEEGSPSERAAMADSSAPTRVMMAVNESSLKGYPHPSISCRTAFDWTLSKLVRSNPGGFHFLFVHVHVPDEDGFDDMDSIYASPEDFHQMKQRDKIRGLHLLEYFVNQCHQLGIKCEAWIRHGDPKEVICSEVKRVQPDLLVVGSRGLGPFQRVFVGTVSEFCVKHAECPVITIKRNATEAPQDPVDD

SEQ ID NO: 25642 - protein, 177 aa, Zea mays subsp. mays
  peptide (1)..(177): Ceres Seq. ID no. 12365361
  misc_feature (7)..(164): Pfam Name: Pfam Description:  Universal stress protein family
  misc_feature (1)..(177): NCBI GI NO: 19387249 NR Description: putative ethylene-responsive protein
  misc_feature (5)..(177): NCBI GI NO: 15241464 NR Description: putative protein; protein id: At5g14680.1
  misc_feature (5)..(177): NCBI GI NO: 6016711 NR Description: unknown protein [Arabidopsis thaliana]
  misc_feature (5)..(177): NCBI GI NO: 18395845 NR Description: expressed protein; protein id: At3g01520
  misc_feature (11)..(177): NCBI GI NO: 21536534 NR Description: putative ethylene-responsive protein
  misc_feature (1)..(164): NCBI GI NO: 30681955 NR Description: ethylene-responsive protein -related
  misc_feature (1)..(165): NCBI GI NO: 34914610 NR Description: P0520B06.18
  misc_feature (68)..(164): NCBI GI NO: 18399413 NR Description: ethylene-responsive protein, putative
  misc_feature (68)..(164): NCBI GI NO: 21594903 NR Description: ethylene-responsive protein, putative
  misc_feature (1)..(164): NCBI GI NO: 40539010 NR Description: putative stress-related protein
MADSSAPTRVMMAVNESSLKGYPHPSISCRTAFDWTLSKLVRSNPGGFHFLFVHVHVPDEDGFDDMDSIYASPEDFHQMKQRDKIRGLHLLEYFVNQCHQLGIKCEAWIRHGDPKEVICSEVKRVQPDLLVVGSRGLGPFQRVFVGTVSEFCVKHAECPVITIKRNATEAPQDPVDD

SEQ ID NO: 25643 - protein, 167 aa, Zea mays subsp. mays
  peptide (1)..(167): Ceres Seq. ID no. 12365362
  misc_feature (1)..(154): Pfam Name: Pfam Description:  Universal stress protein family
  misc_feature (1)..(167): NCBI GI NO: 19387249 NR Description: putative ethylene-responsive protein
  misc_feature (1)..(167): NCBI GI NO: 15241464 NR Description: putative protein; protein id: At5g14680.1
  misc_feature (1)..(167): NCBI GI NO: 6016711 NR Description: unknown protein [Arabidopsis thaliana]
  misc_feature (1)..(167): NCBI GI NO: 18395845 NR Description: expressed protein; protein id: At3g01520
  misc_feature (1)..(167): NCBI GI NO: 21536534 NR Description: putative ethylene-responsive protein
  misc_feature (1)..(154): NCBI GI NO: 30681955 NR Description: ethylene-responsive protein -related
  misc_feature (1)..(155): NCBI GI NO: 34914610 NR Description: P0520B06.18
  misc_feature (58)..(154): NCBI GI NO: 18399413 NR Description: ethylene-responsive protein, putative
  misc_feature (58)..(154): NCBI GI NO: 21594903 NR Description: ethylene-responsive protein, putative
  misc_feature (1)..(154): NCBI GI NO: 40539010 NR Description: putative stress-related protein
MMAVNESSLKGYPHPSISCRTAFDWTLSKLVRSNPGGFHFLFVHVHVPDEDGFDDMDSIYASPEDFHQMKQRDKIRGLHLLEYFVNQCHQLGIKCEAWIRHGDPKEVICSEVKRVQPDLLVVGSRGLGPFQRVFVGTVSEFCVKHAECPVITIKRNATEAPQDPVDD

SEQ ID NO: 25644 - DNA, 937 bp, Zea mays subsp. mays
  misc_feature (1)..(937): Ceres Seq. ID no. 12403587
tttttcttccgttgctccatgtccatggcttcccgtccgcctcttcgtcgtcgacgtcgtcttcccctcgtcccgctcctcgttctgctctgcctctccccggcatgcgccgccgggagagtcccggtttcggtctactacgaagcgctgtgcccgttctgctccgcgtttgtcgtgaacgacctctccagggtcttccgcgacgggatctcctccatcgctgagctgcggctcgtccctttcggcaatgggcgtgtctcggccgacggaaccgtcacttgccagcatggagaggacgagtgccaactcaacgctatagaagcttgcgtgatcagaatatggcctgacgcggagcagcattttcctttcattcaatgcgttgagcatttagcactgactcggaaatgggacgcctggcagtcttgctttcatgaaactggtctcgcttatcaacctgctattgactgctacatctcagggtatggaaggcagctcgtactccagtatgctgccgagacaaatgctctgcagcctcctcatcggtttgtaccttgggtggtcgtcaacggcaaaccgctcggtgatgattacatgaactttgaggcatacatctgcagcgcttatgacggcaatcttccaaaggcatgcaaggggaagcacctagcaattgctcaggagacgaaagccagccgaggagacaaggtgtgcccagctagcaaaactatcagctaactcgcgtgcgaaaatttattttttttggaatttggataaaactgagtactactttgagtttggttctaagaggttctgcgtttctgctgtcttgttgggtctccgtctattttgaagttagttgaaataacagtgctgtcaaacctttgacagaaaaacatcaaatgcaaacatttcatgttgatattcactagcattttcaggc

SEQ ID NO: 25645 - protein, 243 aa, Zea mays subsp. mays
  peptide (1)..(243): Ceres Seq. ID no. 12403588
  misc_feature (41)..(149): Pfam Name: GILT Pfam Description: Gamma interferon inducible lysosomal thiol reductase
  misc_feature (19)..(217): NCBI GI NO: 15241015 NR Description: putative protein; protein id: At5g01580.1
  misc_feature (40)..(216): NCBI GI NO: 18390723 NR Description: expressed protein; protein id: At1g07080
  misc_feature (40)..(216): NCBI GI NO: 25406953 NR Description: hypothetical protein
  misc_feature (40)..(217): NCBI GI NO: 30793446 NR Description: 27K protein [Triticum aestivum]
  misc_feature (38)..(231): NCBI GI NO: 21593076 NR Description: unknown [Arabidopsis thaliana]
  misc_feature (38)..(231): NCBI GI NO: 18413888 NR Description: putative protein; protein id: At4g12890
  misc_feature (38)..(216): NCBI GI NO: 15235540 NR Description: putative protein; protein id: At4g12960
  misc_feature (38)..(216): NCBI GI NO: 21593852 NR Description: unknown [Arabidopsis thaliana]
  misc_feature (9)..(216): NCBI GI NO: 15235523 NR Description: putative protein; protein id: At4g12900.1
  misc_feature (38)..(198): NCBI GI NO: 7487272 NR Description: hypothetical protein T20K18
FFFRCSMSMASRPPLRRRRRLPLVPLLVLLCLSPACAAGRVPVSVYYEALCPFCSAFVVNDLSRVFRDGISSIAELRLVPFGNGRVSADGTVTCQHGEDECQLNAIEACVIRIWPDAEQHFPFIQCVEHLALTRKWDAWQSCFHETGLAYQPAIDCYISGYGRQLVLQYAAETNALQPPHRFVPWVVVNGKPLGDDYMNFEAYICSAYDGNLPKACKGKHLAIAQETKASRGDKVCPASKTIS

SEQ ID NO: 25646 - protein, 237 aa, Zea mays subsp. mays
  peptide (1)..(237): Ceres Seq. ID no. 12403589
  misc_feature (35)..(143): Pfam Name: GILT Pfam Description: Gamma interferon inducible lysosomal thiol reductase
  misc_feature (13)..(211): NCBI GI NO: 15241015 NR Description: putative protein; protein id: At5g01580.1
  misc_feature (34)..(210): NCBI GI NO: 18390723 NR Description: expressed protein; protein id: At1g07080
  misc_feature (34)..(210): NCBI GI NO: 25406953 NR Description: hypothetical protein
  misc_feature (34)..(211): NCBI GI NO: 30793446 NR Description: 27K protein [Triticum aestivum]
  misc_feature (32)..(225): NCBI GI NO: 21593076 NR Description: unknown [Arabidopsis thaliana]
  misc_feature (32)..(225): NCBI GI NO: 18413888 NR Description: putative protein; protein id: At4g12890
  misc_feature (32)..(210): NCBI GI NO: 15235540 NR Description: putative protein; protein id: At4g12960
  misc_feature (32)..(210): NCBI GI NO: 21593852 NR Description: unknown [Arabidopsis thaliana]
  misc_feature (3)..(210): NCBI GI NO: 15235523 NR Description: putative protein; protein id: At4g12900.1
  misc_feature (32)..(192): NCBI GI NO: 7487272 NR Description: hypothetical protein T20K18
MSMASRPPLRRRRRLPLVPLLVLLCLSPACAAGRVPVSVYYEALCPFCSAFVVNDLSRVFRDGISSIAELRLVPFGNGRVSADGTVTCQHGEDECQLNAIEACVIRIWPDAEQHFPFIQCVEHLALTRKWDAWQSCFHETGLAYQPAIDCYISGYGRQLVLQYAAETNALQPPHRFVPWVVVNGKPLGDDYMNFEAYICSAYDGNLPKACKGKHLAIAQETKASRGDKVCPASKTIS

SEQ ID NO: 25647 - protein, 235 aa, Zea mays subsp. mays
  peptide (1)..(235): Ceres Seq. ID no. 12403590
  misc_feature (33)..(141): Pfam Name: GILT Pfam Description: Gamma interferon inducible lysosomal thiol reductase
  misc_feature (11)..(209): NCBI GI NO: 15241015 NR Description: putative protein; protein id: At5g01580.1
  misc_feature (32)..(208): NCBI GI NO: 18390723 NR Description: expressed protein; protein id: At1g07080
  misc_feature (32)..(208): NCBI GI NO: 25406953 NR Description: hypothetical protein
  misc_feature (32)..(209): NCBI GI NO: 30793446 NR Description: 27K protein [Triticum aestivum]
  misc_feature (30)..(223): NCBI GI NO: 21593076 NR Description: unknown [Arabidopsis thaliana]
  misc_feature (30)..(223): NCBI GI NO: 18413888 NR Description: putative protein; protein id: At4g12890
  misc_feature (30)..(208): NCBI GI NO: 15235540 NR Description: putative protein; protein id: At4g12960
  misc_feature (30)..(208): NCBI GI NO: 21593852 NR Description: unknown [Arabidopsis thaliana]
  misc_feature (1)..(208): NCBI GI NO: 15235523 NR Description: putative protein; protein id: At4g12900.1
  misc_feature (30)..(190): NCBI GI NO: 7487272 NR Description: hypothetical protein T20K18
MASRPPLRRRRRLPLVPLLVLLCLSPACAAGRVPVSVYYEALCPFCSAFVVNDLSRVFRDGISSIAELRLVPFGNGRVSADGTVTCQHGEDECQLNAIEACVIRIWPDAEQHFPFIQCVEHLALTRKWDAWQSCFHETGLAYQPAIDCYISGYGRQLVLQYAAETNALQPPHRFVPWVVVNGKPLGDDYMNFEAYICSAYDGNLPKACKGKHLAIAQETKASRGDKVCPASKTIS

SEQ ID NO: 25648 - DNA, 2365 bp, Zea mays subsp. mays
  misc_feature (1)..(2365): Ceres Seq. ID no. 13635021
cgagcaagcagttcgaaacaaggatcgatccaggagcttccagaaggcgaggaggaagagggagaagggcgcgcgcgcgcgcagcgttcaagtggtgctggtgtcggccatggatcgggttcgtggatccgcgttcctgctcggcgtcctgctcgcaggatccctgttcgcgttttcagttgctaaggaggagaccaagaagctcggcactgtgattggtatcgatctcggaaccacctactcctgtgtgggtgtgtacaagaacggtcatgtcgagatcatcgccaatgaccagggtaaccgtatcacaccctcatgggttgccttcaccgatagcgagaggctcatcggtgaggctgccaagaaccaggcagctgtcaaccctgagaggaccatctttgacgtcaagcgtctcatcggaagaaagtttcaggataaggaagtccagagggacatgaaacttgtcccctacaagattattaacaaggatggcaagccatacattcaggtcaagatcaaggatggggagaacaaggtcttcagccccgaggagatcagtgccatgattcttggcaagatgaaggatactgctgaggcgtaccttggcaagaagatcaacgatgccgtcgtcactgtccctgcatacttcaatgatgcgcagaggcaggcaaccaaggatgctggtgtcattgccggcctcaatgttgctaggatcatcaatgagccaactgctgctgctattgcctatggtttggacaagaagggtggcgagaagaacatccttgtctttgaccttggtggtggtacttttgatgtcagtatcttgaccattgataacggtgtgtttgaggtgctggccaccaatggtgacacccatcttggaggtgaggattttgaccagaggatcatggaatacttcatcaagttgatcaagaagaagtacagcaaggacatcagcaaggacaaccgtgctcttggaaagctgaggagggaagctgagcgtgccaagagagcccttagcaaccagcaccaggtccgagttgagatcgagtccctctttgacgggaccgacttctcggagccgctgacccgtgccaggtttgaggagctgaacaacgatctgttccgcaagactatgggtcctgtcaagaaggccatggaggacgctggccttgagaagagccagatccacgagatcgtcctggttggtggaagcaccaggattcccaaggtccagcagctcctgaaggactacttcaatggcaaggagcccaacaagggtgtgaaccctgatgaggctgttgcctttggtgccgcggtgcagggaagcatcttgagcggcgagggtggtgacgagacaaaagatatcctcctccttgacgtggctcctctcaccctgggtattgagaccgtcggtggagtcatgaccaagttgatcccgaggaacactgtcatcccgaccaagaaatcgcaggtgttcaccacctaccaggaccagcagaccactgtctccatccaggtctttgagggtgagcgcagcatgaccaaggactgccgtcttctgggcaagttcgacctcaatggcattccgtcagctccgaggggcacaccccagatcgaggtgaccttcgaggtggacgccaacggtatcctgaacgtgaaggcggaggacaagggcacgggcaagtcggagaagatcacgatcacgaacgagaaggggcggctgagccaggaggagatcgaccgcatggtgcgggaggcggaggagttcgcggaggaggacaagaaggtgaaggagcggatcgacgcccgcaaccagctggagacgtacgtgtacaacatgaagaacacggtgggcgacaaggacaagctcgcggacaagctggaggcggaggagaaggagaaggtggaggaggccctcaaggaggcgctcgagtggctggacgacaaccagtccgccgagaaggaggactacgaggagaagctcaaggaggtggaggccgtgtgcaaccccatcgtgtcggccgtgtaccagcggtcgggcggcgcccccggtggcgatgccgacggcggcgtcgacgacgaccacgacgagctgtagatggtggtggggagcggtgacgtggagtgccgggaaccaagccaaattttgtaatgatgtttaggagggagggtggtggacaaaaaaactaatcttggtgctgctctgccaatagacgggctgagcatagaactttttttcccttctacttccttgtgattgttctttttatagaggattcgcattgcagtgtaatgtaaaaaaaagaagacgcgcttctgaaacttgttactacaagttaataatgaaatggtgcattgcatc

SEQ ID NO: 25649 - protein, 699 aa, Zea mays subsp. mays
  peptide (1)..(699): Ceres Seq. ID no. 13635022
  misc_feature (41)..(699): NCBI GI NO: 11277127 NR Description: dnaK-type molecular chaperone BiP precursor
  misc_feature (34)..(699): NCBI GI NO: 1346172 NR Description: Luminal binding protein precursor
  misc_feature (39)..(699): NCBI GI NO: 10944737 NR Description: putative luminal binding protein
  misc_feature (43)..(699): NCBI GI NO: 30693962 NR Description: luminal binding protein 2 precursor
  misc_feature (233)..(699): NCBI GI NO: 168424 NR Description: polypeptide chain-binding protein
  misc_feature (47)..(689): NCBI GI NO: 31419302 NR Description: Unknown (protein for MGC:55994) [Danio rerio]
  misc_feature (49)..(695): NCBI GI NO: 31981722 NR Description: heat shock 70kD protein 5
  misc_feature (36)..(695): NCBI GI NO: 31208237 NR Description: ENSANGP00000012893 [Anopheles gambiae]
  misc_feature (49)..(695): NCBI GI NO: 1304157 NR Description: 78 kDa glucose-regulated protein [Mus musculus]
  misc_feature (46)..(699): NCBI GI NO: 32405376 NR Description: 78 KDA GLUCOSE-REGULATED PROTEIN HOMOLOG PRECURSOR
EQAVRNKDRSRSFQKARRKREKGARARSVQVVLVSAMDRVRGSAFLLGVLLAGSLFAFSVAKEETKKLGTVIGIDLGTTYSCVGVYKNGHVEIIANDQGNRITPSWVAFTDSERLIGEAAKNQAAVNPERTIFDVKRLIGRKFQDKEVQRDMKLVPYKIINKDGKPYIQVKIKDGENKVFSPEEISAMILGKMKDTAEAYLGKKINDAVVTVPAYFNDAQRQATKDAGVIAGLNVARIINEPTAAAIAYGLDKKGGEKNILVFDLGGGTFDVSILTIDNGVFEVLATNGDTHLGGEDFDQRIMEYFIKLIKKKYSKDISKDNRALGKLRREAERAKRALSNQHQVRVEIESLFDGTDFSEPLTRARFEELNNDLFRKTMGPVKKAMEDAGLEKSQIHEIVLVGGSTRIPKVQQLLKDYFNGKEPNKGVNPDEAVAFGAAVQGSILSGEGGDETKDILLLDVAPLTLGIETVGGVMTKLIPRNTVIPTKKSQVFTTYQDQQTTVSIQVFEGERSMTKDCRLLGKFDLNGIPSAPRGTPQIEVTFEVDANGILNVKAEDKGTGKSEKITITNEKGRLSQEEIDRMVREAEEFAEEDKKVKERIDARNQLETYVYNMKNTVGDKDKLADKLEAEEKEKVEEALKEALEWLDDNQSAEKEDYEEKLKEVEAVCNPIVSAVYQRSGGAPGGDADGGVDDDHDEL

SEQ ID NO: 25650 - protein, 663 aa, Zea mays subsp. mays
  peptide (1)..(663): Ceres Seq. ID no. 13635023
  misc_feature (5)..(663): NCBI GI NO: 11277127 NR Description: dnaK-type molecular chaperone BiP precursor
  misc_feature (1)..(663): NCBI GI NO: 1346172 NR Description: Luminal binding protein precursor
  misc_feature (3)..(663): NCBI GI NO: 10944737 NR Description: putative luminal binding protein
  misc_feature (7)..(663): NCBI GI NO: 30693962 NR Description: luminal binding protein 2 precursor
  misc_feature (197)..(663): NCBI GI NO: 168424 NR Description: polypeptide chain-binding protein
  misc_feature (11)..(653): NCBI GI NO: 31419302 NR Description: Unknown (protein for MGC:55994) [Danio rerio]
  misc_feature (13)..(659): NCBI GI NO: 31981722 NR Description: heat shock 70kD protein 5
  misc_feature (1)..(659): NCBI GI NO: 31208237 NR Description: ENSANGP00000012893 [Anopheles gambiae]
  misc_feature (13)..(659): NCBI GI NO: 1304157 NR Description: 78 kDa glucose-regulated protein [Mus musculus]
  misc_feature (10)..(663): NCBI GI NO: 32405376 NR Description: 78 KDA GLUCOSE-REGULATED PROTEIN HOMOLOG PRECURSOR
MDRVRGSAFLLGVLLAGSLFAFSVAKEETKKLGTVIGIDLGTTYSCVGVYKNGHVEIIANDQGNRITPSWVAFTDSERLIGEAAKNQAAVNPERTIFDVKRLIGRKFQDKEVQRDMKLVPYKIINKDGKPYIQVKIKDGENKVFSPEEISAMILGKMKDTAEAYLGKKINDAVVTVPAYFNDAQRQATKDAGVIAGLNVARIINEPTAAAIAYGLDKKGGEKNILVFDLGGGTFDVSILTIDNGVFEVLATNGDTHLGGEDFDQRIMEYFIKLIKKKYSKDISKDNRALGKLRREAERAKRALSNQHQVRVEIESLFDGTDFSEPLTRARFEELNNDLFRKTMGPVKKAMEDAGLEKSQIHEIVLVGGSTRIPKVQQLLKDYFNGKEPNKGVNPDEAVAFGAAVQGSILSGEGGDETKDILLLDVAPLTLGIETVGGVMTKLIPRNTVIPTKKSQVFTTYQDQQTTVSIQVFEGERSMTKDCRLLGKFDLNGIPSAPRGTPQIEVTFEVDANGILNVKAEDKGTGKSEKITITNEKGRLSQEEIDRMVREAEEFAEEDKKVKERIDARNQLETYVYNMKNTVGDKDKLADKLEAEEKEKVEEALKEALEWLDDNQSAEKEDYEEKLKEVEAVCNPIVSAVYQRSGGAPGGDADGGVDDDHDEL

SEQ ID NO: 25651 - protein, 548 aa, Zea mays subsp. mays
  peptide (1)..(548): Ceres Seq. ID no. 13635024
  misc_feature (1)..(548): NCBI GI NO: 11277127 NR Description: dnaK-type molecular chaperone BiP precursor
  misc_feature (1)..(548): NCBI GI NO: 1346172 NR Description: Luminal binding protein precursor
  misc_feature (1)..(548): NCBI GI NO: 10944737 NR Description: putative luminal binding protein
  misc_feature (1)..(548): NCBI GI NO: 30693962 NR Description: luminal binding protein 2 precursor
  misc_feature (82)..(548): NCBI GI NO: 168424 NR Description: polypeptide chain-binding protein
  misc_feature (1)..(538): NCBI GI NO: 31419302 NR Description: Unknown (protein for MGC:55994) [Danio rerio]
  misc_feature (1)..(544): NCBI GI NO: 31981722 NR Description: heat shock 70kD protein 5
  misc_feature (1)..(544): NCBI GI NO: 31208237 NR Description: ENSANGP00000012893 [Anopheles gambiae]
  misc_feature (1)..(544): NCBI GI NO: 1304157 NR Description: 78 kDa glucose-regulated protein [Mus musculus]
  misc_feature (1)..(548): NCBI GI NO: 32405376 NR Description: 78 KDA GLUCOSE-REGULATED PROTEIN HOMOLOG PRECURSOR
MKLVPYKIINKDGKPYIQVKIKDGENKVFSPEEISAMILGKMKDTAEAYLGKKINDAVVTVPAYFNDAQRQATKDAGVIAGLNVARIINEPTAAAIAYGLDKKGGEKNILVFDLGGGTFDVSILTIDNGVFEVLATNGDTHLGGEDFDQRIMEYFIKLIKKKYSKDISKDNRALGKLRREAERAKRALSNQHQVRVEIESLFDGTDFSEPLTRARFEELNNDLFRKTMGPVKKAMEDAGLEKSQIHEIVLVGGSTRIPKVQQLLKDYFNGKEPNKGVNPDEAVAFGAAVQGSILSGEGGDETKDILLLDVAPLTLGIETVGGVMTKLIPRNTVIPTKKSQVFTTYQDQQTTVSIQVFEGERSMTKDCRLLGKFDLNGIPSAPRGTPQIEVTFEVDANGILNVKAEDKGTGKSEKITITNEKGRLSQEEIDRMVREAEEFAEEDKKVKERIDARNQLETYVYNMKNTVGDKDKLADKLEAEEKEKVEEALKEALEWLDDNQSAEKEDYEEKLKEVEAVCNPIVSAVYQRSGGAPGGDADGGVDDDHDEL

SEQ ID NO: 25652 - DNA, 2187 bp, Zea mays subsp. mays
  misc_feature (1)..(2187): Ceres Seq. ID no. 12362634
gcacgagaccattacctagaacatcctaatcgaaaactgcctctgacgaaaactctcctctgactccgctccacccccttctctcacttgtctatcggcggccgtcacctccgctgggctgctggcctcctcactttgcagttgctgcacaggcaagacacggaggcaggcaccacgagtccacgacgctcgctcgcgcgctccgtgaatcccctcgtgactcgtgagggctcgaggcccgacgggaggacgaggaggcaagaaccctagcgccggcgccggcggcccgtaaggctgctgagtgaaaatgggagtggcaggtcacaacgatccattgttaggtgaaacgacatgtgggtctttgctgcagcaacttcagctgatatgggatgaggttggcgaaagtgatgaagatcgtgacaagatgttacttcagctagagcaagagtgcttagatgtttataggagaaaggttgatcaggcttctagcctccaggtcatgtctcctccaacagctttccaactccaaatcggaactgactagactcctttctgcattaggagagtcatctatttctggtgctcctgacaagacatctggtacaatcaaggagcaactagcagctatatcaccatctttagagacactccgcaggaaaaaagagagtagggtgaaagagtttgctcatgtacaacttcagattcagatacttcgtgatgaaattgctggggatctacatattggtgaacagttggaaacaccccatgttaatgcggatgatctttcagtgaggagattaaatgaatatctttctgaactacaagccctgcaaaaggaaaagagtactaggctctcaaggattcttgaatccgtgagttcagtgcacgatctctgttctgtacttggcatggattttgtgggcactgttactaaagttcatccaagtcttgatgactctgttggtgtccaatccaagagcattagtggcgaaacaatatccaagctgtctaaaatggtgattgtacttgaagaagaaaaatcgaagaggtttgcaaagattcaagctctagcttcccagctatctgatctttggaacttaatggattctcctgtggaggaacagcaaccttttcgtcacgtaacatgcataatgtcctcagcattggatgatgtgatagttccaggagctctggctcttgatgtaattcagcaggcggaactcgaagttgaaaggcttgatcagctaaaagctagtaggatgaaggatattgcattcaagaaacagactgaacttgaagatatatatgcccgggctcatgttgcagtagattctagtgctgcaagagataggataatgtctattattgagtccagtagtttcgagccttcagaactactggctgatatggagaaccagatacttaaagcaaatgaggagtccttaagcagaaaggacatattggagagggttgataggtggatgtcagcatgtgaagaagaaagctggcttgaagactacagccgggacgataacaggtacagtgcaactcggggtgcacatctgaatctgaagcgtgcagaaaaggcccgtgttttggtcaataaaattccggctattgttgacacactgcttgcaaagacccgggcatgggaacaagagcatggcgtggccttcacctacgacggcgtccctcttcttgcgatgctggacgaatacaaaatcctgaggcaggagaaggaagacgagaagcgacgaatgagggaccagaaaaagatgaacgaacagctagccgccgaacaggagaagctgttcgggtcaaaaccgagccccgcgcggccgcagtcgtcctcgaggaaggtggctggcgcacggaccaacggcggtggcacgccagctcgcaggctgtcggccctccagagcggcggcaggaccgctagccgggatgggaggagggatgcgagcaggcccgtggcccccgtgaactacgtcgccatcgccaaggaggacgtggcctcgcaggcgtccagcaaccacactgggccgtccaccccctgaccgggccgtgccagcagtaactgaactgttgtggcggtgcttagatatatatataccagtgcagtgcagtagtcagagctgattgtagatcggataatggaaaaaaacaaacgaagctggatatggtatc

SEQ ID NO: 25653 - protein, 533 aa, Zea mays subsp. mays
  peptide (1)..(533): Ceres Seq. ID no. 12362635
  misc_feature (13)..(531): Pfam Name: MAP65/ASE1 family Pfam Description: Microtubule associated protein
  misc_feature (13)..(533): NCBI GI NO: 11558252 NR Description: microtubule-associated protein MAP65-1a
  misc_feature (13)..(533): NCBI GI NO: 11558256 NR Description: microtubule-associated protein MAP65-1c
  misc_feature (13)..(533): NCBI GI NO: 15240485 NR Description: putative protein; protein id: At5g55230.1
  misc_feature (13)..(533): NCBI GI NO: 11558254 NR Description: microtubule-associated protein MAP65-1b
  misc_feature (13)..(533): NCBI GI NO: 28200790 NR Description: 65kD microtubule associated protein
  misc_feature (5)..(524): NCBI GI NO: 18416818 NR Description: putative protein; protein id: At4g26760
  misc_feature (5)..(385): NCBI GI NO: 7485328 NR Description: hypothetical protein F10M23
  misc_feature (12)..(533): NCBI GI NO: 27357984 NR Description: Unknown protein
  misc_feature (14)..(485): NCBI GI NO: 15242132 NR Description: putative protein; protein id: At5g51600.1
  misc_feature (13)..(491): NCBI GI NO: 15217774 NR Description: hypothetical protein; protein id: At1g27920.1
MFIGERLIRLLASRSCLLQQLSNSKSELTRLLSALGESSISGAPDKTSGTIKEQLAAISPSLETLRRKKESRVKEFAHVQLQIQILRDEIAGDLHIGEQLETPHVNADDLSVRRLNEYLSELQALQKEKSTRLSRILESVSSVHDLCSVLGMDFVGTVTKVHPSLDDSVGVQSKSISGETISKLSKMVIVLEEEKSKRFAKIQALASQLSDLWNLMDSPVEEQQPFRHVTCIMSSALDDVIVPGALALDVIQQAELEVERLDQLKASRMKDIAFKKQTELEDIYARAHVAVDSSAARDRIMSIIESSSFEPSELLADMENQILKANEESLSRKDILERVDRWMSACEEESWLEDYSRDDNRYSATRGAHLNLKRAEKARVLVNKIPAIVDTLLAKTRAWEQEHGVAFTYDGVPLLAMLDEYKILRQEKEDEKRRMRDQKKMNEQLAAEQEKLFGSKPSPARPQSSSRKVAGARTNGGGTPARRLSALQSGGRTASRDGRRDASRPVAPVNYVAIAKEDVASQASSNHTGPSTP

SEQ ID NO: 25654 - protein, 382 aa, Zea mays subsp. mays
  peptide (1)..(382): Ceres Seq. ID no. 12362636
  misc_feature (1)..(380): Pfam Name: MAP65/ASE1 family Pfam Description: Microtubule associated protein
  misc_feature (1)..(382): NCBI GI NO: 11558252 NR Description: microtubule-associated protein MAP65-1a
  misc_feature (1)..(382): NCBI GI NO: 11558256 NR Description: microtubule-associated protein MAP65-1c
  misc_feature (1)..(382): NCBI GI NO: 15240485 NR Description: putative protein; protein id: At5g55230.1
  misc_feature (1)..(382): NCBI GI NO: 11558254 NR Description: microtubule-associated protein MAP65-1b
  misc_feature (1)..(382): NCBI GI NO: 28200790 NR Description: 65kD microtubule associated protein
  misc_feature (1)..(373): NCBI GI NO: 18416818 NR Description: putative protein; protein id: At4g26760
  misc_feature (1)..(234): NCBI GI NO: 7485328 NR Description: hypothetical protein F10M23
  misc_feature (1)..(382): NCBI GI NO: 27357984 NR Description: Unknown protein
  misc_feature (1)..(334): NCBI GI NO: 15242132 NR Description: putative protein; protein id: At5g51600.1
  misc_feature (1)..(340): NCBI GI NO: 15217774 NR Description: hypothetical protein; protein id: At1g27920.1
MDFVGTVTKVHPSLDDSVGVQSKSISGETISKLSKMVIVLEEEKSKRFAKIQALASQLSDLWNLMDSPVEEQQPFRHVTCIMSSALDDVIVPGALALDVIQQAELEVERLDQLKASRMKDIAFKKQTELEDIYARAHVAVDSSAARDRIMSIIESSSFEPSELLADMENQILKANEESLSRKDILERVDRWMSACEEESWLEDYSRDDNRYSATRGAHLNLKRAEKARVLVNKIPAIVDTLLAKTRAWEQEHGVAFTYDGVPLLAMLDEYKILRQEKEDEKRRMRDQKKMNEQLAAEQEKLFGSKPSPARPQSSSRKVAGARTNGGGTPARRLSALQSGGRTASRDGRRDASRPVAPVNYVAIAKEDVASQASSNHTGPSTP

SEQ ID NO: 25655 - protein, 347 aa, Zea mays subsp. mays
  peptide (1)..(347): Ceres Seq. ID no. 12362637
  misc_feature (1)..(345): Pfam Name: MAP65/ASE1 family Pfam Description: Microtubule associated protein
  misc_feature (1)..(347): NCBI GI NO: 11558252 NR Description: microtubule-associated protein MAP65-1a
  misc_feature (1)..(347): NCBI GI NO: 11558256 NR Description: microtubule-associated protein MAP65-1c
  misc_feature (1)..(347): NCBI GI NO: 15240485 NR Description: putative protein; protein id: At5g55230.1
  misc_feature (1)..(347): NCBI GI NO: 11558254 NR Description: microtubule-associated protein MAP65-1b
  misc_feature (1)..(347): NCBI GI NO: 28200790 NR Description: 65kD microtubule associated protein
  misc_feature (1)..(338): NCBI GI NO: 18416818 NR Description: putative protein; protein id: At4g26760
  misc_feature (1)..(199): NCBI GI NO: 7485328 NR Description: hypothetical protein F10M23
  misc_feature (1)..(347): NCBI GI NO: 27357984 NR Description: Unknown protein
  misc_feature (1)..(299): NCBI GI NO: 15242132 NR Description: putative protein; protein id: At5g51600.1
  misc_feature (1)..(305): NCBI GI NO: 15217774 NR Description: hypothetical protein; protein id: At1g27920.1
MVIVLEEEKSKRFAKIQALASQLSDLWNLMDSPVEEQQPFRHVTCIMSSALDDVIVPGALALDVIQQAELEVERLDQLKASRMKDIAFKKQTELEDIYARAHVAVDSSAARDRIMSIIESSSFEPSELLADMENQILKANEESLSRKDILERVDRWMSACEEESWLEDYSRDDNRYSATRGAHLNLKRAEKARVLVNKIPAIVDTLLAKTRAWEQEHGVAFTYDGVPLLAMLDEYKILRQEKEDEKRRMRDQKKMNEQLAAEQEKLFGSKPSPARPQSSSRKVAGARTNGGGTPARRLSALQSGGRTASRDGRRDASRPVAPVNYVAIAKEDVASQASSNHTGPSTP

SEQ ID NO: 25656 - DNA, 945 bp, Zea mays subsp. mays
  misc_feature (1)..(945): Ceres Seq. ID no. 13636168
atatagaacgctagctgccggccggtgcagaccacgggaggcgcgggcgcgcgctataaaagccgagccagtgggcgcggccagtgtcacaactcacaattcacatcgaggtctcagcttcaggaaagggaaggaagcatgttcgggcaccaccaccaccacggccacggcgggcaccaccaggccccgccgccgcacgagcagacgctgttcaggatcttctgccgcgccgacgaggcgtactgcctcaccgtgcgccacgacgccgtcgtcctcgcgcccaccaacccccgcgacgagtaccagcactggtacaaggacatgaggcacagcacgaaggtgagggacgcggagggcccagccggcgttcgcgctcatcaacagggccaccggcctcgccatcaagcactcgctcggccagtcccatcccgtgaagctagtgccctacaacgcggagtacctggacgagtcggtgctgtggacggagagccgcgacgtcgggcacggcttccgctgcgtgcgcatggtgaacaacatctacctcaacatggacgccttccacggcgacaaggaccacggcggcgtccacgacggcaccaccgtcgtcctctgggagtgggccaagggcgacaaccagcgctggaagatcctgccctggtgaacgtgaacagagacgagctagatgaatccaaggaaccttacctagctgctgccgccgccgcctaattcgtcctcctccgctctagctgttatctgtctgtgtcttcgcgtcctcggttcctgaatggacgaataatatatagcatgcatgtacggctagcgaccatgtctgaatgacatcttcgttgctgctgctgctgctactgctacctgtccgtttggtgttctaaaagactctgatgagtggttctgaatgtctgcatttcaagtttgctgtgtgatgtc

SEQ ID NO: 25657 - protein, 195 aa, Zea mays subsp. mays
  peptide (1)..(195): Ceres Seq. ID no. 13636169
  misc_feature (1)..(75): NCBI GI NO: 34394517 NR Description: r40g2 protein
  misc_feature (1)..(75): NCBI GI NO: 7489571 NR Description: r40c1 protein - rice
  misc_feature (1)..(75): NCBI GI NO: 7489572 NR Description: r40g2 protein - rice (fragment)
  misc_feature (1)..(75): NCBI GI NO: 34902150 NR Description: Putative r40c1 protein - rice
  misc_feature (26)..(75): NCBI GI NO: 34394517 NR Description: r40g2 protein
  misc_feature (26)..(75): NCBI GI NO: 34394518 NR Description: putative r40c2 protein
  misc_feature (26)..(75): NCBI GI NO: 7489572 NR Description: r40g2 protein - rice (fragment)
  misc_feature (7)..(75): NCBI GI NO: 34894060 NR Description: putative r40c1 protein
  misc_feature (26)..(73): NCBI GI NO: 18404934 NR Description: lectin repeat protein family
  misc_feature (26)..(73): NCBI GI NO: 25408635 NR Description: hypothetical protein At2g39050
MFGHHHHHGHGGHHQAPPPHEQTLFRIFCRADEAYCLTVRHDAVVLAPTNPRDEYQHWYKDMRHSTKVRDAEGPAGVRAHQQGHRPRHQALARPVPSREASALQRGVPGRVGAVDGEPRRRARLPLRAHGEQHLPQHGRLPRRQGPRRRPRRHHRRPLGVGQGRQPALEDPALVNVNRDELDESKEPYLAAAAAA

SEQ ID NO: 25658 - protein, 134 aa, Zea mays subsp. mays
  peptide (1)..(134): Ceres Seq. ID no. 13636170
  misc_feature (1)..(14): NCBI GI NO: 34394517 NR Description: r40g2 protein
  misc_feature (1)..(14): NCBI GI NO: 7489571 NR Description: r40c1 protein - rice
  misc_feature (1)..(14): NCBI GI NO: 7489572 NR Description: r40g2 protein - rice (fragment)
  misc_feature (1)..(14): NCBI GI NO: 34902150 NR Description: Putative r40c1 protein - rice
  misc_feature (1)..(14): NCBI GI NO: 34394517 NR Description: r40g2 protein
  misc_feature (1)..(14): NCBI GI NO: 34394518 NR Description: putative r40c2 protein
  misc_feature (1)..(14): NCBI GI NO: 7489572 NR Description: r40g2 protein - rice (fragment)
  misc_feature (1)..(14): NCBI GI NO: 34894060 NR Description: putative r40c1 protein
  misc_feature (1)..(12): NCBI GI NO: 18404934 NR Description: lectin repeat protein family
  misc_feature (1)..(12): NCBI GI NO: 25408635 NR Description: hypothetical protein At2g39050
MRHSTKVRDAEGPAGVRAHQQGHRPRHQALARPVPSREASALQRGVPGRVGAVDGEPRRRARLPLRAHGEQHLPQHGRLPRRQGPRRRPRRHHRRPLGVGQGRQPALEDPALVNVNRDELDESKEPYLAAAAAA

SEQ ID NO: 25659 - protein, 107 aa, Zea mays subsp. mays
  peptide (1)..(107): Ceres Seq. ID no. 13636171
  misc_feature (50)..(107): Pfam Name: Pfam Description:  Equine herpesvirus glycoprotein gp2
  misc_feature (54)..(107): NCBI GI NO: 34394516 NR Description: putative r40c1 protein
  misc_feature (50)..(107): NCBI GI NO: 17221108 NR Description: glycoprotein gp2 [Equine herpesvirus 1]
  misc_feature (50)..(107): NCBI GI NO: 17221104 NR Description: glycoprotein gp2 [Equine herpesvirus 1]
  misc_feature (50)..(107): NCBI GI NO: 17221110 NR Description: glycoprotein gp2 [Equine herpesvirus 1]
  misc_feature (50)..(107): NCBI GI NO: 17221100 NR Description: glycoprotein gp2 [Equine herpesvirus 1]
  misc_feature (18)..(107): NCBI GI NO: 17221108 NR Description: glycoprotein gp2 [Equine herpesvirus 1]
  misc_feature (18)..(107): NCBI GI NO: 17221104 NR Description: glycoprotein gp2 [Equine herpesvirus 1]
  misc_feature (18)..(107): NCBI GI NO: 17221110 NR Description: glycoprotein gp2 [Equine herpesvirus 1]
  misc_feature (18)..(107): NCBI GI NO: 17221100 NR Description: glycoprotein gp2 [Equine herpesvirus 1]
  misc_feature (50)..(107): NCBI GI NO: 17221114 NR Description: glycoprotein gp2 [Equine herpesvirus 1]
YRTLAAGRCRPREARARAIKAEPVGAASVTTHNSHRGLSFRKGKEACSGTTTTTATAGTTRPRRRTSRRCSGSSAAPTRRTASPCATTPSSSRPPTPATSTSTGTRT

SEQ ID NO: 25660 - DNA, 1510 bp, Zea mays subsp. mays
  misc_feature (1)..(1510): Ceres Seq. ID no. 12345944
acacgacgccgcgccccgcggaatccatcttctccatctccaactgtgctactgtaggagctgctgcaatcggggagagaaacgcgaccagtttgccggcaccaacacggcctgctgccacatctccggcatcttcttccgggttggggactgaaaactgtcgctgttagttggggttggggactctttcagtggtaagtccacatgcaggctgcagcaagcaactggacgatggtggcttccaggcagtcagagaacaatgcacaagaagaagcatcaccattgacgactcctaacgccaacatagccaggatcatcccttcgctgcccctcgagaccaggtggccaccgttccctctccgacggtacgccaatttttggctgcctgaggtaacattgaaggaaggcgtccccggcgttcattcctgcttcgagccgagacccaccgacgtgttcctcgcaagcttccccaagtctggcaccacctggctcaaggccctcgccttcgcgacgctgaagcgttccacgcatccgccgttcgacgacgaccatccgctgcgccattgcaaccctcatgactgtgtcaggttcctcgaacttgatttcaaccagcagaaggatgagctcgaggcgctcccgtccccgcgtgtgctggccacgcacctcccctactccctgctgcccggcagcatcaccggcgacggagagcgctcggggtgccggatcgtgtacgtttgccgggaacccaaggacgtgctggtctcctcctggctgttcacgagaaaggcagcgccggcttgtggggttgacgcccggtcgttcacgatccaggaggccttggagctgttctgtgatggccgctgtctcggcggcccacagtggaaccacgtcctccactactggaaggagagcgtgaggaggcctgacatggtgttgttccttcgttacgaggaggtgctgattgagcccgaggcgcacgtcagaaagctggccaatttcatgggctgtggattctccgaggaggaggaggagcgcggggtggtgagcgccatcgtggagctgtgtagcttggggaagctgaaagacatggaggtgaatagaaatgggagcactatgttggggatcaagaacgaaagcttcttcaggaagggtgttgttggggactggagcaagcatatgacgcaggagatggcgcagaggctagacaaggtcgtagaggatgcattgcaagggactggattcacctttgcgagcacagcatgatgaggcagtgcgctcatagtagttgcgaactgcagaataatgccaagatcaactcgttttatcggtgttgctggttggagatcatgccagtcatggtgagcattcttctttggtgatgaagggggaaatatggacatcatcttatcatttaacgaaaattgatttgtgtacaattcatttgtataactttgttacaaaccatatgttgtggcaccttggcacgccaaaaccatatgcattactgtgc

SEQ ID NO: 25661 - protein, 352 aa, Zea mays subsp. mays
  peptide (1)..(352): Ceres Seq. ID no. 12345945
  misc_feature (81)..(345): Pfam Name: Pfam Description:  Sulfotransferase domain
  misc_feature (36)..(351): NCBI GI NO: 38346451 NR Description: OSJNBa0018J19.12
  misc_feature (20)..(347): NCBI GI NO: 40253317 NR Description: putative flavonol 3-sulfotransferase
  misc_feature (23)..(347): NCBI GI NO: 40253319 NR Description: putative flavonol 3-sulfotransferase
  misc_feature (53)..(345): NCBI GI NO: 35215145 NR Description: putative flavonol 3'-sulfotransferase
  misc_feature (38)..(351): NCBI GI NO: 38344441 NR Description: OSJNBa0038O10.13
  misc_feature (26)..(348): NCBI GI NO: 37531912 NR Description: putative flavonol 3-sulfotransferase
  misc_feature (38)..(332): NCBI GI NO: 34393650 NR Description: putative flavonol 3-sulfotransferase
  misc_feature (10)..(347): NCBI GI NO: 34905060 NR Description: putative flavonol 4'-sulfotransferase
  misc_feature (18)..(348): NCBI GI NO: 30683286 NR Description: sulfotransferase family [Arabidopsis thaliana]
  misc_feature (18)..(345): NCBI GI NO: 15222843 NR Description: steroid sulfotransferase, putative
MQAAASNWTMVASRQSENNAQEEASPLTTPNANIARIIPSLPLETRWPPFPLRRYANFWLPEVTLKEGVPGVHSCFEPRPTDVFLASFPKSGTTWLKALAFATLKRSTHPPFDDDHPLRHCNPHDCVRFLELDFNQQKDELEALPSPRVLATHLPYSLLPGSITGDGERSGCRIVYVCREPKDVLVSSWLFTRKAAPACGVDARSFTIQEALELFCDGRCLGGPQWNHVLHYWKESVRRPDMVLFLRYEEVLIEPEAHVRKLANFMGCGFSEEEEERGVVSAIVELCSLGKLKDMEVNRNGSTMLGIKNESFFRKGVVGDWSKHMTQEMAQRLDKVVEDALQGTGFTFASTA

SEQ ID NO: 25662 - protein, 343 aa, Zea mays subsp. mays
  peptide (1)..(343): Ceres Seq. ID no. 12345946
  misc_feature (72)..(336): Pfam Name: Pfam Description:  Sulfotransferase domain
  misc_feature (27)..(342): NCBI GI NO: 38346451 NR Description: OSJNBa0018J19.12
  misc_feature (11)..(338): NCBI GI NO: 40253317 NR Description: putative flavonol 3-sulfotransferase
  misc_feature (14)..(338): NCBI GI NO: 40253319 NR Description: putative flavonol 3-sulfotransferase
  misc_feature (44)..(336): NCBI GI NO: 35215145 NR Description: putative flavonol 3'-sulfotransferase
  misc_feature (29)..(342): NCBI GI NO: 38344441 NR Description: OSJNBa0038O10.13
  misc_feature (17)..(339): NCBI GI NO: 37531912 NR Description: putative flavonol 3-sulfotransferase
  misc_feature (29)..(323): NCBI GI NO: 34393650 NR Description: putative flavonol 3-sulfotransferase
  misc_feature (1)..(338): NCBI GI NO: 34905060 NR Description: putative flavonol 4'-sulfotransferase
  misc_feature (9)..(339): NCBI GI NO: 30683286 NR Description: sulfotransferase family [Arabidopsis thaliana]
  misc_feature (9)..(336): NCBI GI NO: 15222843 NR Description: steroid sulfotransferase, putative
MVASRQSENNAQEEASPLTTPNANIARIIPSLPLETRWPPFPLRRYANFWLPEVTLKEGVPGVHSCFEPRPTDVFLASFPKSGTTWLKALAFATLKRSTHPPFDDDHPLRHCNPHDCVRFLELDFNQQKDELEALPSPRVLATHLPYSLLPGSITGDGERSGCRIVYVCREPKDVLVSSWLFTRKAAPACGVDARSFTIQEALELFCDGRCLGGPQWNHVLHYWKESVRRPDMVLFLRYEEVLIEPEAHVRKLANFMGCGFSEEEEERGVVSAIVELCSLGKLKDMEVNRNGSTMLGIKNESFFRKGVVGDWSKHMTQEMAQRLDKVVEDALQGTGFTFASTA

SEQ ID NO: 25663 - DNA, 1446 bp, Zea mays subsp. mays
  misc_feature (1)..(1446): Ceres Seq. ID no. 12410025
  misc_feature (1028)..(1028): n is a, c, t, g, unknown, or other
  misc_feature (1024)..(1024): n is a, c, t, g, unknown, or other
  misc_feature (347)..(347): n is a, c, t, g, unknown, or other
  misc_feature (346)..(346): n is a, c, t, g, unknown, or other
  misc_feature (1170)..(1170): n is a, c, t, g, unknown, or other
  misc_feature (257)..(257): n is a, c, t, g, unknown, or other
  misc_feature (1168)..(1168): n is a, c, t, g, unknown, or other
  misc_feature (256)..(256): n is a, c, t, g, unknown, or other
  misc_feature (1044)..(1044): n is a, c, t, g, unknown, or other
ttggataaaaattctagctaaaccgaggaataaagagcgataagcccggtgtctgtcaacactccagaagagccgcagcgcaaaggagactcctttgtggcgtgcgcgaccagcatgaagccacgtccaccggcgggggcgtcgtccgcttccgccgcgccgcccaggctgcggccgcacctggcgcggctcgcctccttcctgatcgtcttcgccgtgggctactcgctgggcctcctgtcgtcgtccacccggnngccgccaccgagaccgtcccagtcccagtcccagtcccaggcgacgacgatcgcgcggccgcacgccgacgctttattcccggcgtcgnngaactcgaacgggaccgccgcgtcgagctacccgcggtcgcctccgcacgacctgttccggttcagggagcggtgcggggagccggtgccgagcgacgccgtggtgcggacgctgctcgacaggctcttcggcggcgagagcccctacgcggggttcccgcccgagcgcacggcggcgctgctgcgcccggccgcggcgcgcccgcgcgggtgggggtcgacgggggcggtgttcgcggagctcatggaggcggtgcgcccggcggtggtcgtggagctgggcgcgttcctgggcgcgtcggcgctgcacatggcggccgtggccaggaacctgtccctgtccccggccatcctctgcgtcgacgacttccgcggctggccggcgttccgggaccgcttccgccgcgacgtgccgccgccgcggcacggcgacgcgctgctgctgccgcagttcatggccaacgtcgtggcggcggagggggcgcgcgtcgtcctgccgctgcccttctccacggcgtccgcgctcgccgcgctctgcgactggggcgtctacgccgacctcatcgaggtggacgccggccacgacttccactcggcgtgggccgacatcaacctggcctgggccgtgctccgccccggcggcgtcatgttcggccacgactacttcacgtccgccnacgngcgcggcgtgcgccgngccgtcacgctcttcgccaaggtcaaggggctcaccgtccgcccgcacggccagcactgggtgctctccccgaagccgcgagggcgcgccgacgacgcccggcgacggtgagggctcgtcgctngntgctgtcgccgtcgccgcggggccgtgcactcgatcgcccggcaccgaacctgacgtgtcccgtactcccgttgcaccagcggccgtagcacgcacccacccgcctcgatcgaaagctgatcgacgaaaaaggttgcgccgcccccgccactgttctctgaagcgctcgtctcaaccaccatttgcttttgctgtaacactcttctctaactacgccgggatcatacaagaacgatacaatattgtattccaacaatacgagacgtttacgtgtag

SEQ ID NO: 25664 - protein, 346 aa, Zea mays subsp. mays
  peptide (1)..(346): Ceres Seq. ID no. 12410026
  misc_feature (95)..(332): NCBI GI NO: 15223338 NR Description: hypothetical protein; protein id: At1g01180.1
  misc_feature (48)..(48): Xaa is any aa, unknown or other
  misc_feature (78)..(78): Xaa is any aa, unknown or other
  misc_feature (304)..(304): Xaa is any aa, unknown or other
  misc_feature (305)..(305): Xaa is any aa, unknown or other
  misc_feature (310)..(310): Xaa is any aa, unknown or other
MKPRPPAGASSASAAPPRLRPHLARLASFLIVFAVGYSLGLLSSSTRXPPPRPSQSQSQSQATTIARPHADALFPASXNSNGTAASSYPRSPPHDLFRFRERCGEPVPSDAVVRTLLDRLFGGESPYAGFPPERTAALLRPAAARPRGWGSTGAVFAELMEAVRPAVVVELGAFLGASALHMAAVARNLSLSPAILCVDDFRGWPAFRDRFRRDVPPPRHGDALLLPQFMANVVAAEGARVVLPLPFSTASALAALCDWGVYADLIEVDAGHDFHSAWADINLAWAVLRPGGVMFGHDYFTSAXXRGVRXAVTLFAKVKGLTVRPHGQHWVLSPKPRGRADDARRR

SEQ ID NO: 25665 - protein, 187 aa, Zea mays subsp. mays
  peptide (1)..(187): Ceres Seq. ID no. 12410027
  misc_feature (1)..(173): NCBI GI NO: 15223338 NR Description: hypothetical protein; protein id: At1g01180.1
  misc_feature (145)..(145): Xaa is any aa, unknown or other
  misc_feature (146)..(146): Xaa is any aa, unknown or other
  misc_feature (151)..(151): Xaa is any aa, unknown or other
MEAVRPAVVVELGAFLGASALHMAAVARNLSLSPAILCVDDFRGWPAFRDRFRRDVPPPRHGDALLLPQFMANVVAAEGARVVLPLPFSTASALAALCDWGVYADLIEVDAGHDFHSAWADINLAWAVLRPGGVMFGHDYFTSAXXRGVRXAVTLFAKVKGLTVRPHGQHWVLSPKPRGRADDARRR

SEQ ID NO: 25666 - DNA, 1062 bp, Zea mays subsp. mays
  misc_feature (1)..(1062): Ceres Seq. ID no. 12410021
aattcttctcgtctcgctcggctcctctgggcccacagcggccagcaaactgcctccgtcctcccctgcgggctgtgccgcctcttcttcgcgtcggcgccgccctccttccttctcttctgctgctgatggaactggatcctcgcctctacgagaacgtctctgtcagcgacaacgatgtccgaaacatagttctatcttatcttatgcacaactgttttaaagagacggcagaggcattcctatctagcaccgggttgaatttacctgtcgactatagtgtggatgtggataagcgtaaagcaatttttaattttgtgctagaagggaatgcccttaaagccatagagctgacagaagaaatggcacctaacttgctagagaatgatatggatctacattttgatcttcttagtctccacttcattgagctagttcgctccaaaaaattcacagaagctcttgactttggccagaaaaaattgacatcatttcagaaggttaccaagtatattgagaaactagaggactttatggccctcctggcttatgaagagcctgagaagtcacctatgtttcatctactaagcccagagcacaggcagaatgttgcagagggcttgaatcgggctgtccttgcacatgctaatcttccggcatattcatcgttggagagggtggtccagcaagcgactgtggttagacaatacctacagcaggaagttggcaaggattcttacccaccattttctttgaaggcctttctgagcaagtaaatgtgcaaatggtcactcttcttcagaacagggtaaccacctctccaggccatcatgtacatgtacccttgtggagtgcatacacgatgaagtagtttatacagttcaggtgttgttgacaccacttatacagttgcaatggtgttgtactttaaaaaggagggtgctgtatgctgtctgtttccttgatttacattctgttttacttgtctctctgccttagacatggtgatagcatgtatgtatgacctgttgagctattctgtgcgttcgtttcggtgaactc

SEQ ID NO: 25667 - protein, 257 aa, Zea mays subsp. mays
  peptide (1)..(257): Ceres Seq. ID no. 12410022
  misc_feature (45)..(252): NCBI GI NO: 18390607 NR Description: expressed protein; protein id: At1g06060
  misc_feature (17)..(225): NCBI GI NO: 34910006 NR Description: P0413G02.3
  misc_feature (176)..(256): NCBI GI NO: 34910006 NR Description: P0413G02.3
  misc_feature (52)..(247): NCBI GI NO: 8923557 NR Description: chromosome 20 open reading frame 11
  misc_feature (52)..(247): NCBI GI NO: 20863687 NR Description: RIKEN cDNA 2310003C23 [Mus musculus]
  misc_feature (52)..(245): NCBI GI NO: 37748055 NR Description: Unknown (protein for MGC:73100) [Danio rerio]
  misc_feature (52)..(247): NCBI GI NO: 21594655 NR Description: chromosome 20 open reading frame 11 [Homo sapiens]
  misc_feature (59)..(212): NCBI GI NO: 24643081 NR Description: CG6617-PA [Drosophila melanogaster]
  misc_feature (53)..(227): NCBI GI NO: 15219873 NR Description: hypothetical protein; protein id: At1g61150.1
  misc_feature (53)..(227): NCBI GI NO: 25404311 NR Description: hypothetical protein F11P17.12
FFSSRSAPLGPQRPANCLRPPLRAVPPLLRVGAALLPSLLLLMELDPRLYENVSVSDNDVRNIVLSYLMHNCFKETAEAFLSSTGLNLPVDYSVDVDKRKAIFNFVLEGNALKAIELTEEMAPNLLENDMDLHFDLLSLHFIELVRSKKFTEALDFGQKKLTSFQKVTKYIEKLEDFMALLAYEEPEKSPMFHLLSPEHRQNVAEGLNRAVLAHANLPAYSSLERVVQQATVVRQYLQQEVGKDSYPPFSLKAFLSK

SEQ ID NO: 25668 - protein, 215 aa, Zea mays subsp. mays
  peptide (1)..(215): Ceres Seq. ID no. 12410023
  misc_feature (3)..(210): NCBI GI NO: 18390607 NR Description: expressed protein; protein id: At1g06060
  misc_feature (1)..(183): NCBI GI NO: 34910006 NR Description: P0413G02.3
  misc_feature (134)..(214): NCBI GI NO: 34910006 NR Description: P0413G02.3
  misc_feature (10)..(205): NCBI GI NO: 8923557 NR Description: chromosome 20 open reading frame 11
  misc_feature (10)..(205): NCBI GI NO: 20863687 NR Description: RIKEN cDNA 2310003C23 [Mus musculus]
  misc_feature (10)..(203): NCBI GI NO: 37748055 NR Description: Unknown (protein for MGC:73100) [Danio rerio]
  misc_feature (10)..(205): NCBI GI NO: 21594655 NR Description: chromosome 20 open reading frame 11 [Homo sapiens]
  misc_feature (17)..(170): NCBI GI NO: 24643081 NR Description: CG6617-PA [Drosophila melanogaster]
  misc_feature (11)..(185): NCBI GI NO: 15219873 NR Description: hypothetical protein; protein id: At1g61150.1
  misc_feature (11)..(185): NCBI GI NO: 25404311 NR Description: hypothetical protein F11P17.12
MELDPRLYENVSVSDNDVRNIVLSYLMHNCFKETAEAFLSSTGLNLPVDYSVDVDKRKAIFNFVLEGNALKAIELTEEMAPNLLENDMDLHFDLLSLHFIELVRSKKFTEALDFGQKKLTSFQKVTKYIEKLEDFMALLAYEEPEKSPMFHLLSPEHRQNVAEGLNRAVLAHANLPAYSSLERVVQQATVVRQYLQQEVGKDSYPPFSLKAFLSK

SEQ ID NO: 25669 - protein, 189 aa, Zea mays subsp. mays
  peptide (1)..(189): Ceres Seq. ID no. 12410024
  misc_feature (1)..(184): NCBI GI NO: 18390607 NR Description: expressed protein; protein id: At1g06060
  misc_feature (1)..(157): NCBI GI NO: 34910006 NR Description: P0413G02.3
  misc_feature (108)..(188): NCBI GI NO: 34910006 NR Description: P0413G02.3
  misc_feature (1)..(179): NCBI GI NO: 8923557 NR Description: chromosome 20 open reading frame 11
  misc_feature (1)..(179): NCBI GI NO: 20863687 NR Description: RIKEN cDNA 2310003C23 [Mus musculus]
  misc_feature (1)..(177): NCBI GI NO: 37748055 NR Description: Unknown (protein for MGC:73100) [Danio rerio]
  misc_feature (1)..(179): NCBI GI NO: 21594655 NR Description: chromosome 20 open reading frame 11 [Homo sapiens]
  misc_feature (1)..(144): NCBI GI NO: 24643081 NR Description: CG6617-PA [Drosophila melanogaster]
  misc_feature (1)..(159): NCBI GI NO: 15219873 NR Description: hypothetical protein; protein id: At1g61150.1
  misc_feature (1)..(159): NCBI GI NO: 25404311 NR Description: hypothetical protein F11P17.12
MHNCFKETAEAFLSSTGLNLPVDYSVDVDKRKAIFNFVLEGNALKAIELTEEMAPNLLENDMDLHFDLLSLHFIELVRSKKFTEALDFGQKKLTSFQKVTKYIEKLEDFMALLAYEEPEKSPMFHLLSPEHRQNVAEGLNRAVLAHANLPAYSSLERVVQQATVVRQYLQQEVGKDSYPPFSLKAFLSK

SEQ ID NO: 25670 - DNA, 1631 bp, Zea mays subsp. mays
  misc_feature (1)..(1631): Ceres Seq. ID no. 12406794
  misc_feature (665)..(665): n is a, c, t, g, unknown, or other
acctgtagttttctccactcgtcctcgtcctttgtccctgtccttcggggacaaaaacaaccaaggcgcaagcggtaatcttccgtggtgggggcgttctctgctgcaagcagtggtgacgccgcttggagggagggcgggcgggaaaggatggaggcggtggtggacctcaagtacctgccggttttcccgaacggcggcgtggccgcggccaagaagaagacgaggctcgggaccactgcggttgccggcggccagacgggggtgtactaccgggaatgcctcaagaaccacgcggcgagcctgggtggccacgcgctggacgggtgcggcgagttcatgccgtcgccggaggccgacccggcggacccgagttcgctcaggtgcgccgcgtgcggatgccaccgcaacttccaccgccggctaccggagctgtccccgccgccgcctctcctcgctttgccgccgcctccaccgccactggcgccggcgccggctgtcgcgccgcatgccatgcgtgacagccgcacgatgcgcggcgaggaggcgccagacgaccgcctgccggccgccttcgacgacgacaccgaggagtcggacgagggctcagatttcgaagaggaccggtcccctaacgccgctgccggcgccgggcatggtgccgntgccgcccggctaccgccaggtcgcgccacacatgctcctcgcgctgagcaccagcgcgccgggcgcccaaactcccgcggcggggcccaggccgcccgcctccctggtcccgatgccggcgcccgggtgctgctgctgctgcggcggcggcggccggcggcgaggaagcggttccgcaccaagttcagcccggaacagaagcagaggatgcaggctctgtcggagcggttgggttggcggctgcagaagcgcgacgaggcccgtggtcgacgagtgctgccaggagatcggcgtcaccaagggcgtcttcaaggtttggatgcacaacaacaagcacaacttcgtcggcggccacagccgcgcgccgcagcgcctcagcgtctgctgccacggccatccaccatccgttcgacgctgcccccgtctgcgcttcctcccacgccgccccagcaccagccgccgctgtgcacctttccgcccacgccgccccagcgccagccgcctccccggccacgcctgtcctcgctgactccaacatcaacggcaacgctgccgactacttccgtgtccaaccgtcgacggcgagtggcggctcgccgcagtcgtcctagtcaagttagtgctaatcagccatggttatttgtagagcctcgtgtctaattaaccaaccctaatggagcgagcaatggtgggatgcatgggactatcgaatatgggagcgctagtgagaaggctgctgctggtctttgttaatggtggagcccaaagaaggatcgtggggttttgggatctgatgatgtaatgattcaggattagcgcttatggtactagtagactgttagaccaactccactgaactgtactttgtcttcgtctaggatatcatgttgttccatataaaaatgcgatctgtccactgttgggttggctttaatacatatcgatttttacttttactgtttttt

SEQ ID NO: 25671 - protein, 397 aa, Zea mays subsp. mays
  peptide (1)..(397): Ceres Seq. ID no. 12406795
  misc_feature (207)..(348): NCBI GI NO: 13277220 NR Description: ZF-HD homeobox protein [Flaveria bidentis]
  misc_feature (296)..(336): NCBI GI NO: 18421904 NR Description: putative protein; protein id: At5g39760
  misc_feature (296)..(336): NCBI GI NO: 21592512 NR Description: unknown [Arabidopsis thaliana]
  misc_feature (221)..(344): NCBI GI NO: 15238445 NR Description: hypothetical protein common family
  misc_feature (296)..(343): NCBI GI NO: 15242243 NR Description: putative protein; protein id: At5g15210.1
  misc_feature (315)..(335): NCBI GI NO: 18410804 NR Description: expressed protein; protein id: At1g75240
  misc_feature (296)..(342): NCBI GI NO: 9757750 NR Description: gb|AAF24606
  misc_feature (296)..(342): NCBI GI NO: 15239341 NR Description: putative protein; protein id: At5g60480.1
  misc_feature (189)..(343): NCBI GI NO: 32480091 NR Description: OSJNBb0086G13.8
  misc_feature (310)..(336): NCBI GI NO: 15223757 NR Description: hypothetical protein; protein id: At1g14440
  misc_feature (222)..(222): Xaa is any aa, unknown or other
PVVFSTRPRPLSLSFGDKNNQGASGNLPWWGRSLLQAVVTPLGGRAGGKGWRRWWTSSTCRFSRTAAWPRPRRRRGSGPLRLPAARRGCTTGNASRTTRRAWVATRWTGAASSCRRRRPTRRTRVRSGAPRADATATSTAGYRSCPRRRLSSLCRRLHRHWRRRRLSRRMPCVTAARCAARRRQTTACRPPSTTTPRSRTRAQISKRTGPLTPLPAPGMVPXPPGYRQVAPHMLLALSTSAPGAQTPAAGPRPPASLVPMPAPGCCCCCGGGGRRRGSGSAPSSARNRSRGCRLCRSGWVGGCRSATRPVVDECCQEIGVTKGVFKVWMHNNKHNFVGGHSRAPQRLSVCCHGHPPSVRRCPRLRFLPRRPSTSRRCAPFRPRRPSASRLPGHACPR

SEQ ID NO: 25672 - protein, 391 aa, Zea mays subsp. mays
  peptide (1)..(391): Ceres Seq. ID no. 12406796
  misc_feature (36)..(93): Pfam Name: Pfam Description:  ZF-HD protein dimerisation region
  misc_feature (39)..(115): NCBI GI NO: 13277220 NR Description: ZF-HD homeobox protein [Flaveria bidentis]
  misc_feature (41)..(121): NCBI GI NO: 18421904 NR Description: putative protein; protein id: At5g39760
  misc_feature (226)..(258): NCBI GI NO: 18421904 NR Description: putative protein; protein id: At5g39760
  misc_feature (41)..(121): NCBI GI NO: 21592512 NR Description: unknown [Arabidopsis thaliana]
  misc_feature (226)..(258): NCBI GI NO: 21592512 NR Description: unknown [Arabidopsis thaliana]
  misc_feature (41)..(110): NCBI GI NO: 15242243 NR Description: putative protein; protein id: At5g15210.1
  misc_feature (224)..(258): NCBI GI NO: 15242243 NR Description: putative protein; protein id: At5g15210.1
  misc_feature (34)..(115): NCBI GI NO: 15238445 NR Description: hypothetical protein common family
  misc_feature (37)..(122): NCBI GI NO: 13277216 NR Description: ZF-HD homeobox protein [Flaveria trinervia]
  misc_feature (225)..(258): NCBI GI NO: 13277216 NR Description: ZF-HD homeobox protein [Flaveria trinervia]
  misc_feature (172)..(172): Xaa is any aa, unknown or other
MEAVVDLKYLPVFPNGGVAAAKKKTRLGTTAVAGGQTGVYYRECLKNHAASLGGHALDGCGEFMPSPEADPADPSSLRCAACGCHRNFHRRLPELSPPPPLLALPPPPPPLAPAPAVAPHAMRDSRTMRGEEAPDDRLPAAFDDDTEESDEGSDFEEDRSPNAAAGAGHGAXAARLPPGRATHAPRAEHQRAGRPNSRGGAQAARLPGPDAGARVLLLLRRRRPAARKRFRTKFSPEQKQRMQALSERLGWRLQKRDEARGRRVLPGDRRHQGRLQGLDAQQQAQLRRRPQPRAAAPQRLLPRPSTIRSTLPPSALPPTPPQHQPPLCTFPPTPPQRQPPPRPRLSSLTPTSTATLPTTSVSNRRRRVAARRSRPSQVSANQPWLFVEPRV

SEQ ID NO: 25673 - protein, 328 aa, Zea mays subsp. mays
  peptide (1)..(328): Ceres Seq. ID no. 12406797
  misc_feature (225)..(280): Pfam Name: Pfam Description:  Extensin-like region
  misc_feature (1)..(52): NCBI GI NO: 13277220 NR Description: ZF-HD homeobox protein [Flaveria bidentis]
  misc_feature (1)..(58): NCBI GI NO: 18421904 NR Description: putative protein; protein id: At5g39760
  misc_feature (163)..(195): NCBI GI NO: 18421904 NR Description: putative protein; protein id: At5g39760
  misc_feature (1)..(58): NCBI GI NO: 21592512 NR Description: unknown [Arabidopsis thaliana]
  misc_feature (163)..(195): NCBI GI NO: 21592512 NR Description: unknown [Arabidopsis thaliana]
  misc_feature (1)..(47): NCBI GI NO: 15242243 NR Description: putative protein; protein id: At5g15210.1
  misc_feature (161)..(195): NCBI GI NO: 15242243 NR Description: putative protein; protein id: At5g15210.1
  misc_feature (1)..(52): NCBI GI NO: 15238445 NR Description: hypothetical protein common family
  misc_feature (1)..(59): NCBI GI NO: 13277216 NR Description: ZF-HD homeobox protein [Flaveria trinervia]
  misc_feature (162)..(195): NCBI GI NO: 13277216 NR Description: ZF-HD homeobox protein [Flaveria trinervia]
  misc_feature (109)..(109): Xaa is any aa, unknown or other
MPSPEADPADPSSLRCAACGCHRNFHRRLPELSPPPPLLALPPPPPPLAPAPAVAPHAMRDSRTMRGEEAPDDRLPAAFDDDTEESDEGSDFEEDRSPNAAAGAGHGAXAARLPPGRATHAPRAEHQRAGRPNSRGGAQAARLPGPDAGARVLLLLRRRRPAARKRFRTKFSPEQKQRMQALSERLGWRLQKRDEARGRRVLPGDRRHQGRLQGLDAQQQAQLRRRPQPRAAAPQRLLPRPSTIRSTLPPSALPPTPPQHQPPLCTFPPTPPQRQPPPRPRLSSLTPTSTATLPTTSVSNRRRRVAARRSRPSQVSANQPWLFVEPRV

SEQ ID NO: 25674 - DNA, 1670 bp, Zea mays subsp. mays
  misc_feature (1)..(1670): Ceres Seq. ID no. 12343352
acacgtttcaccatcaataggacaaaagcagcaccagccaccaggcagactccctcgactccgactctacgcgacacacgagcgcaggggctcaaacgcgaaaaaaaagaggccccaacgcccactccaccggccaatcacccgccggcgcgccatggcggccgccgccgggggactccgtcaagcagccgctcctccaccgcgcgtacccgtcccacgccgcgtcggcctcctcgccggccctcccgtccgttcccccggggggcgggggccgccgcttcccagggggcctcgacgtgcccaacctgaagaagcgcggcggcggcacgcgcagctggatccgcgtcgaggccgccacggcctccgtgcagacgctggagatcgacaaggccaccatgatgcggcgctgcgagctccccgcgcgcgacctccgcctgctcgacccgctcttcgtgtacccgtccacggtcctgggccgcgagcgcgcaatcgtcgtcaacctcgagcagatcaggtgcgtcatcaccgccgacgaggtgctcctgctcaactccctcgacagctacgtcctccagtatgccgccgagctccagcgccgcctgctccagcgcgcggagggcgacgagctacccttcgaattccgagcgctcgagctcgccctcgaggccgcatgctccttcctcgatgcacaggctgcggaattggagattgaagcatatccattactggatgaactgacatccaaaatcagtactctcaatttggaacgtgcccggcgattaaaaagtagactagttgcattgaccagaagagttcaaaaagtcagagatgaaatagaacaactaatggatgatgatggtgatatggctgagatgtatctcaccgaaaaaaagatgaggatggaatcatctgtctttggtgaccagtctttgttgggctacaattcagcaggcgctgttggggcttcagtttcagctcctgtatctccagtctcatcgcctacagaatcacgaaaactggagaaatctttcagtttgtgtagaagtaggcatgacagtacgaagggctcagataacacaatgacagagcatatccaggagctggagatgttactggaagcttattttgttgttatcgacagcactctgaacaagctgacatcgcttaaagagtacatcgatgacactgaagacttcatcaacattcagctggacaatgtgcggaaccagctgatccagtttgaattgctgctaacgaccgcaacatttgttgtggccattttcggagtggttgctgggatattcgggatgaactttgagacatcagttttcgaaatagagaatgcattccagtgggtccttgtaattacttcagtgaccggcgttttcatcttctgctcctttctttggttcttcaagtacaagagattgatgcctttgtagagaatgtatatgccctcctcccataggaccgatgaatcaatttcaaccctgttaagaggcacttgatcagaagcctgaacctctgccgatgtaaattaccattcttttagaggtttacggcatgagtaccgagaatccgggtgaaaattgtaaccttcttgacatgatccctgtgctgtataagagaaaatcatattacagtttatacaaataataccgaccaattct

SEQ ID NO: 25675 - protein, 348 aa, Zea mays subsp. mays
  peptide (1)..(348): Ceres Seq. ID no. 12343353
  misc_feature (1)..(348): NCBI GI NO: 38345033 NR Description: OSJNBa0029H02.17
  misc_feature (39)..(348): NCBI GI NO: 18394312 NR Description: expressed protein; protein id: At1g16010
  misc_feature (4)..(348): NCBI GI NO: 18412911 NR Description: expressed protein; protein id: At1g80900
  misc_feature (4)..(348): NCBI GI NO: 21553824 NR Description: unknown [Arabidopsis thaliana]
  misc_feature (1)..(348): NCBI GI NO: 15227679 NR Description: hypothetical protein; protein id: At2g03620
  misc_feature (1)..(348): NCBI GI NO: 25360882 NR Description: MRS2-5 [Arabidopsis thaliana]
  misc_feature (216)..(346): NCBI GI NO: 30685422 NR Description: expressed protein [Arabidopsis thaliana]
  misc_feature (1)..(70): NCBI GI NO: 30685422 NR Description: expressed protein [Arabidopsis thaliana]
  misc_feature (67)..(172): NCBI GI NO: 30685422 NR Description: expressed protein [Arabidopsis thaliana]
  misc_feature (1)..(79): NCBI GI NO: 32488076 NR Description: OSJNBa0084A10.4
MMRRCELPARDLRLLDPLFVYPSTVLGRERAIVVNLEQIRCVITADEVLLLNSLDSYVLQYAAELQRRLLQRAEGDELPFEFRALELALEAACSFLDAQAAELEIEAYPLLDELTSKISTLNLERARRLKSRLVALTRRVQKVRDEIEQLMDDDGDMAEMYLTEKKMRMESSVFGDQSLLGYNSAGAVGASVSAPVSPVSSPTESRKLEKSFSLCRSRHDSTKGSDNTMTEHIQELEMLLEAYFVVIDSTLNKLTSLKEYIDDTEDFINIQLDNVRNQLIQFELLLTTATFVVAIFGVVAGIFGMNFETSVFEIENAFQWVLVITSVTGVFIFCSFLWFFKYKRLMPL

SEQ ID NO: 25676 - protein, 347 aa, Zea mays subsp. mays
  peptide (1)..(347): Ceres Seq. ID no. 12343354
  misc_feature (1)..(347): NCBI GI NO: 38345033 NR Description: OSJNBa0029H02.17
  misc_feature (38)..(347): NCBI GI NO: 18394312 NR Description: expressed protein; protein id: At1g16010
  misc_feature (3)..(347): NCBI GI NO: 18412911 NR Description: expressed protein; protein id: At1g80900
  misc_feature (3)..(347): NCBI GI NO: 21553824 NR Description: unknown [Arabidopsis thaliana]
  misc_feature (1)..(347): NCBI GI NO: 15227679 NR Description: hypothetical protein; protein id: At2g03620
  misc_feature (1)..(347): NCBI GI NO: 25360882 NR Description: MRS2-5 [Arabidopsis thaliana]
  misc_feature (215)..(345): NCBI GI NO: 30685422 NR Description: expressed protein [Arabidopsis thaliana]
  misc_feature (1)..(69): NCBI GI NO: 30685422 NR Description: expressed protein [Arabidopsis thaliana]
  misc_feature (66)..(171): NCBI GI NO: 30685422 NR Description: expressed protein [Arabidopsis thaliana]
  misc_feature (1)..(78): NCBI GI NO: 32488076 NR Description: OSJNBa0084A10.4
MRRCELPARDLRLLDPLFVYPSTVLGRERAIVVNLEQIRCVITADEVLLLNSLDSYVLQYAAELQRRLLQRAEGDELPFEFRALELALEAACSFLDAQAAELEIEAYPLLDELTSKISTLNLERARRLKSRLVALTRRVQKVRDEIEQLMDDDGDMAEMYLTEKKMRMESSVFGDQSLLGYNSAGAVGASVSAPVSPVSSPTESRKLEKSFSLCRSRHDSTKGSDNTMTEHIQELEMLLEAYFVVIDSTLNKLTSLKEYIDDTEDFINIQLDNVRNQLIQFELLLTTATFVVAIFGVVAGIFGMNFETSVFEIENAFQWVLVITSVTGVFIFCSFLWFFKYKRLMPL

SEQ ID NO: 25677 - protein, 236 aa, Zea mays subsp. mays
  peptide (1)..(236): Ceres Seq. ID no. 12343355
  misc_feature (13)..(228): NCBI GI NO: 29247944 NR Description: GLP_26_54603_52153 [Giardia lamblia ATCC 50803]
  misc_feature (3)..(227): NCBI GI NO: 39596044 NR Description: Hypothetical protein CBG15933
  misc_feature (61)..(222): NCBI GI NO: 23018788 NR Description: hypothetical protein [Thermobifida fusca]
HVSPSIGQKQHQPPGRLPRLRLYATHERRGSNAKKKRPQRPLHRPITRRRAMAAAAGGLRQAAAPPPRVPVPRRVGLLAGPPVRSPGGRGPPLPRGPRRAQPEEARRRHAQLDPRRGRHGLRADAGDRQGHHDAALRAPRARPPPARPALRVPVHGPGPRARNRRQPRADQVRHHRRRGAPAQLPRQLRPPVCRRAPAPPAPARGGRRATLRIPSARARPRGRMLLPRCTGCGIGD

SEQ ID NO: 25678 - DNA, 727 bp, Zea mays subsp. mays
  misc_feature (1)..(727): Ceres Seq. ID no. 12356137
aatcgcctccccaccccattcttatctcctcgccaccgcttgctatccgtcgcctcgccgcgcgcgcgtacgttcggttctcggccactgctcagctctcgctgcagcgatggccctgcaggccccgtcactcatgcgcgcgccggcggcacagcggtccgcgccgccacggccctccttctccgccccgtggtcgctgcggctgccggcgcctgcgcggcgccgggtggccactgccgcgcggatcaccatgcgggtcgcgtccaagcaggcctacatctgccgtgactgcgggtacatctacaacgacaggacgccgttcgacaagctggctgacaactacttctgccctgtttgtggagctccgaagagaaggttcagaccctacgagccagcagtctccaagaacgcgaacgccaccgatgccagaaaggcgaggaaggaggagctgaagaaggaggagagcatggggaaagccttgcctattgccatcgtcgtcgggatcattgccttggctggcctgtacttctacctcaacaatgtctacagctaaacgacgaatagatccgtttggtgcggcgaacaggattcatgccgttttgcagtctttttccctttgttaatcgttgcaatgtgctgtcttggtgcatgtactactagggctccaagactgtatacaagttttgctgttcatcttgaaataccacacattacataaccagcagtc

SEQ ID NO: 25679 - protein, 183 aa, Zea mays subsp. mays
  peptide (1)..(183): Ceres Seq. ID no. 12356138
  misc_feature (89)..(126): Pfam Name: Pfam Description:  Rubredoxin
  misc_feature (37)..(180): NCBI GI NO: 18423226 NR Description: expressed protein; protein id: At5g51010
IASPPHSYLLATACYPSPRRARVRSVLGHCSALAAAMALQAPSLMRAPAAQRSAPPRPSFSAPWSLRLPAPARRRVATAARITMRVASKQAYICRDCGYIYNDRTPFDKLADNYFCPVCGAPKRRFRPYEPAVSKNANATDARKARKEELKKEESMGKALPIAIVVGIIALAGLYFYLNNVYS

SEQ ID NO: 25680 - protein, 149 aa, Zea mays subsp. mays
  peptide (1)..(149): Ceres Seq. ID no. 12356139
SPPHPILISSPPLAIRRLAARAYVRFSATAQLSLQRWPCRPRHSCARRRHSGPRRHGPPSPPRGRCGCRRLRGAGWPLPRGSPCGSRPSRPTSAVTAGTSTTTGRRSTSWLTTTSALFVELRREGSDPTSQQSPRTRTPPMPERRGRRS

SEQ ID NO: 25681 - protein, 147 aa, Zea mays subsp. mays
  peptide (1)..(147): Ceres Seq. ID no. 12356140
  misc_feature (53)..(90): Pfam Name: Pfam Description:  Rubredoxin
  misc_feature (1)..(144): NCBI GI NO: 18423226 NR Description: expressed protein; protein id: At5g51010
MALQAPSLMRAPAAQRSAPPRPSFSAPWSLRLPAPARRRVATAARITMRVASKQAYICRDCGYIYNDRTPFDKLADNYFCPVCGAPKRRFRPYEPAVSKNANATDARKARKEELKKEESMGKALPIAIVVGIIALAGLYFYLNNVYS

SEQ ID NO: 25682 - DNA, 1435 bp, Zea mays subsp. mays
  misc_feature (1)..(1435): Ceres Seq. ID no. 12373758
aagaagactatgggcttctagcaattcacgtggttgaagacgtcttgtcccgttccagaacactcgcgctctcgcacgacggcacgagcgcgctactgccatagtgccatggcgagcggcggcggtgctgcggcgcggatggacccggaggtagcaacagagctggtgcggaagggtgccaccctcctcctcctcgatgtcccccagcgcaccctcttcggaatcgatacccagatgttctctgttggacccaagttcaaagggatgaagatggtgccaccgggagcccatttcgtctactactgctccccaaacaggcatgggaatgagtttgcacctactgtcgggttctttcttactacacaccaatctgaggtgattgttcgaaagtgggatgtgcaagaggaacgattaatcaaattatcagaagaagaggatatcagatactcagaagctgtaagacattttgaatttgatgatcaacttggaccatacaatttagattcttatggagattggaaacaactttcggactacttgtcaccgaatgtcattgagcgtcttgaaccaattggaggagaaatcacaattgcgtgggagtcatcatggatggataaagctccccaaagtgacatggagagacgtttggtggaacaactaagagaaggaaagtttgcaaagaatgctcctgtacagtctgggcggagaggatgctactacacaagtatccctgcttcagttaagcataaggacatctctgggggtgacttgacagccctaaacttggacaaaacaagtttgctggagactattttggccaaaaattatgaaggtcaagaagatctattcttgggggagcttcagtttgctttcatagcttttatgatgggtcaatcactagaggcttttatgcagtggaaagcactagtcagccttcttttgagctgcagtgatgctccccttcatacaaggactaacatgtttataaagtttataaggacattatactatcaactcaagcatggttttcaacatacccaagattccaaaagtggggatatgggcaattctctgtgtttggatgaaacatggttttcaagagacatattcctgtaccgtctttcaaaggatttctttacagttgtatttgaagccccagtcgtggatggagaccttctgtcatgggctaggaaactaaaatcgcttctggagactacgtttgggtgggatcttgaggacgacgcagtgaaccttattgatgaagatgacgagtttgctcctgtcgttgtggagatggatggatcataagctaatgaagccagattccatgcagagaagtcagcagttgttcagcgtttctaccttttggtacagtggtgcgctgacttgtatgaagttttactgcttgtgctgacattgaatatacgtgctaatt

SEQ ID NO: 25683 - protein, 399 aa, Zea mays subsp. mays
  peptide (1)..(399): Ceres Seq. ID no. 12373759
  misc_feature (11)..(376): Pfam Name: Pfam Description:  AAR2 protein
  misc_feature (1)..(399): NCBI GI NO: 38346780 NR Description: OSJNBa0095H06.5
  misc_feature (11)..(399): NCBI GI NO: 18408532 NR Description: expressed protein; protein id: At1g66510
  misc_feature (55)..(399): NCBI GI NO: 30697362 NR Description: expressed protein [Arabidopsis thaliana]
  misc_feature (11)..(378): NCBI GI NO: 7657874 NR Description: CePP protein [Brassica napus var. napus]
  misc_feature (11)..(281): NCBI GI NO: 15864559 NR Description: CePP putative protein [Brassica napus]
  misc_feature (161)..(399): NCBI GI NO: 6069471 NR Description: S-locus protein 3 [Brassica rapa]
  misc_feature (7)..(396): NCBI GI NO: 34860266 NR Description: similar to RIKEN cDNA 0610011L14 gene
  misc_feature (7)..(396): NCBI GI NO: 18034690 NR Description: chromosome 20 open reading frame 4 [Homo sapiens]
  misc_feature (7)..(396): NCBI GI NO: 4680685 NR Description: CGI-23 protein [Homo sapiens]
  misc_feature (7)..(396): NCBI GI NO: 24211598 NR Description: Protein c20orf4 homolog
MASGGGAAARMDPEVATELVRKGATLLLLDVPQRTLFGIDTQMFSVGPKFKGMKMVPPGAHFVYYCSPNRHGNEFAPTVGFFLTTHQSEVIVRKWDVQEERLIKLSEEEDIRYSEAVRHFEFDDQLGPYNLDSYGDWKQLSDYLSPNVIERLEPIGGEITIAWESSWMDKAPQSDMERRLVEQLREGKFAKNAPVQSGRRGCYYTSIPASVKHKDISGGDLTALNLDKTSLLETILAKNYEGQEDLFLGELQFAFIAFMMGQSLEAFMQWKALVSLLLSCSDAPLHTRTNMFIKFIRTLYYQLKHGFQHTQDSKSGDMGNSLCLDETWFSRDIFLYRLSKDFFTVVFEAPVVDGDLLSWARKLKSLLETTFGWDLEDDAVNLIDEDDEFAPVVVEMDGS

SEQ ID NO: 25684 - protein, 389 aa, Zea mays subsp. mays
  peptide (1)..(389): Ceres Seq. ID no. 12373760
  misc_feature (1)..(366): Pfam Name: Pfam Description:  AAR2 protein
  misc_feature (1)..(389): NCBI GI NO: 38346780 NR Description: OSJNBa0095H06.5
  misc_feature (1)..(389): NCBI GI NO: 18408532 NR Description: expressed protein; protein id: At1g66510
  misc_feature (45)..(389): NCBI GI NO: 30697362 NR Description: expressed protein [Arabidopsis thaliana]
  misc_feature (1)..(368): NCBI GI NO: 7657874 NR Description: CePP protein [Brassica napus var. napus]
  misc_feature (1)..(271): NCBI GI NO: 15864559 NR Description: CePP putative protein [Brassica napus]
  misc_feature (151)..(389): NCBI GI NO: 6069471 NR Description: S-locus protein 3 [Brassica rapa]
  misc_feature (1)..(386): NCBI GI NO: 34860266 NR Description: similar to RIKEN cDNA 0610011L14 gene
  misc_feature (1)..(386): NCBI GI NO: 18034690 NR Description: chromosome 20 open reading frame 4 [Homo sapiens]
  misc_feature (1)..(386): NCBI GI NO: 4680685 NR Description: CGI-23 protein [Homo sapiens]
  misc_feature (1)..(386): NCBI GI NO: 24211598 NR Description: Protein c20orf4 homolog
MDPEVATELVRKGATLLLLDVPQRTLFGIDTQMFSVGPKFKGMKMVPPGAHFVYYCSPNRHGNEFAPTVGFFLTTHQSEVIVRKWDVQEERLIKLSEEEDIRYSEAVRHFEFDDQLGPYNLDSYGDWKQLSDYLSPNVIERLEPIGGEITIAWESSWMDKAPQSDMERRLVEQLREGKFAKNAPVQSGRRGCYYTSIPASVKHKDISGGDLTALNLDKTSLLETILAKNYEGQEDLFLGELQFAFIAFMMGQSLEAFMQWKALVSLLLSCSDAPLHTRTNMFIKFIRTLYYQLKHGFQHTQDSKSGDMGNSLCLDETWFSRDIFLYRLSKDFFTVVFEAPVVDGDLLSWARKLKSLLETTFGWDLEDDAVNLIDEDDEFAPVVVEMDGS

SEQ ID NO: 25685 - protein, 357 aa, Zea mays subsp. mays
  peptide (1)..(357): Ceres Seq. ID no. 12373761
  misc_feature (1)..(334): Pfam Name: Pfam Description:  AAR2 protein
  misc_feature (1)..(357): NCBI GI NO: 38346780 NR Description: OSJNBa0095H06.5
  misc_feature (1)..(357): NCBI GI NO: 18408532 NR Description: expressed protein; protein id: At1g66510
  misc_feature (13)..(357): NCBI GI NO: 30697362 NR Description: expressed protein [Arabidopsis thaliana]
  misc_feature (1)..(336): NCBI GI NO: 7657874 NR Description: CePP protein [Brassica napus var. napus]
  misc_feature (1)..(239): NCBI GI NO: 15864559 NR Description: CePP putative protein [Brassica napus]
  misc_feature (119)..(357): NCBI GI NO: 6069471 NR Description: S-locus protein 3 [Brassica rapa]
  misc_feature (1)..(354): NCBI GI NO: 34860266 NR Description: similar to RIKEN cDNA 0610011L14 gene
  misc_feature (1)..(354): NCBI GI NO: 18034690 NR Description: chromosome 20 open reading frame 4 [Homo sapiens]
  misc_feature (1)..(354): NCBI GI NO: 4680685 NR Description: CGI-23 protein [Homo sapiens]
  misc_feature (1)..(354): NCBI GI NO: 24211598 NR Description: Protein c20orf4 homolog
MFSVGPKFKGMKMVPPGAHFVYYCSPNRHGNEFAPTVGFFLTTHQSEVIVRKWDVQEERLIKLSEEEDIRYSEAVRHFEFDDQLGPYNLDSYGDWKQLSDYLSPNVIERLEPIGGEITIAWESSWMDKAPQSDMERRLVEQLREGKFAKNAPVQSGRRGCYYTSIPASVKHKDISGGDLTALNLDKTSLLETILAKNYEGQEDLFLGELQFAFIAFMMGQSLEAFMQWKALVSLLLSCSDAPLHTRTNMFIKFIRTLYYQLKHGFQHTQDSKSGDMGNSLCLDETWFSRDIFLYRLSKDFFTVVFEAPVVDGDLLSWARKLKSLLETTFGWDLEDDAVNLIDEDDEFAPVVVEMDGS

SEQ ID NO: 25686 - DNA, 1377 bp, Zea mays subsp. mays
  misc_feature (1)..(1377): Ceres Seq. ID no. 12353719
gtgctccccccaggctcctcttcctcgctttccctccaccccgggcgcaaaccctaaccctaccgtcgctcgccccgcggcgtctgccaatggcgcgccccgtgtgagtgtgcgcgagagaggggtagaccttgaggccgctacccggggaggagagcgagagatgtataaacaggggggagcggggggaggggctgggctggaccggaagcggatcaacgacgcgctggataagcatctcgagaaggcggtcgcgtcgccgtccacgtcgagggggtcggcgggcggcgggcgcgaccaccaccgcctcgtcgtgccgtcctccgtgtcgtccatccccaagggccgctgctccgaaggggagtctgattctgatagtgaagcatcggatgttagcggctctgatggagaagacacctcatggatttcatggtattgcaacttaagagggaatgagttcttctgtgaagtcgacgatgattatattcaagacgacttcaacctttgtggtctcagcagccaagttccttattatgattatgctctcgatctcattttagatatcgagtcatctcatggtgatatgttcactgaggaacaaaatgagctcgtagaatcagctgcagagatgctttatgggctgatccatgcacgatacattctgaccagtaaagggctggctgcaatgctggagaagtataggaactatgactttgggcggtgcccgcgtgtttactgctgtggtcaaccatgcctgccagttggacaatcagacatccatcgatctagtaccgtgaagatatactgccccaagtgtgaagacatctactacccacggtccaagtaccaaggcaacatcgacggcgcatactttgggacaacgttccctcatctgttcctgatgacatacgagcacctcaagccacagaagctctcgcagcgctatgttcctcgtgtctttggcttcaagctccacaagccatgaacctcatgtatttgtcttttaaactcctcaagacgtggcactgggggcatgcgggagttttgcaatccttgaagacttgcatataagagcgccattggcaggtcagtggattggtaaaattctatcatgctgcagcgtgcttgtaccttagctggctggcacctatccaacatttgaatgtagctctaaggatatcaatgttgtaacctaactgctattgttctttgattagtaaaccaggagccccccctacaatgtagaatatggcaattatttatggctttgcagaaaataacaacccttcatctgcttggttctcgtaagatggccctttaattttgtagtttgcgaacttctattttgaaatgtgatttgcaaaggtgcgtcatctc

SEQ ID NO: 25687 - protein, 327 aa, Zea mays subsp. mays
  peptide (1)..(327): Ceres Seq. ID no. 12353720
  misc_feature (137)..(315): Pfam Name: Pfam Description:  Casein kinase II regulatory subunit
  misc_feature (55)..(327): NCBI GI NO: 11527004 NR Description: protein kinase CK2 regulatory subunit CK2B3
  misc_feature (55)..(327): NCBI GI NO: 34901776 NR Description: OJ1058_B11.17
  misc_feature (86)..(327): NCBI GI NO: 29367573 NR Description: possible protein kinase CK2 regulatory subunit
  misc_feature (55)..(326): NCBI GI NO: 21261784 NR Description: protein kinase Ck2 regulatory subunit 2
  misc_feature (56)..(326): NCBI GI NO: 37536920 NR Description: putative casein kinase II beta subunit
  misc_feature (67)..(327): NCBI GI NO: 11527002 NR Description: protein kinase CK2 regulatory subunit CK2B2
  misc_feature (63)..(325): NCBI GI NO: 15224934 NR Description: putative casein kinase II beta subunit
  misc_feature (55)..(327): NCBI GI NO: 15236597 NR Description: casein kinase II beta chain CKB2
  misc_feature (63)..(325): NCBI GI NO: 30689795 NR Description: casein kinase II beta chain, putative
  misc_feature (55)..(327): NCBI GI NO: 15238013 NR Description: casein kinase II beta chain; protein id:At5g47080
CSPQAPLPRFPSTPGANPNPTVARPAASANGAPRVSVRERGVDLEAATRGGEREMYKQGGAGGGAGLDRKRINDALDKHLEKAVASPSTSRGSAGGGRDHHRLVVPSSVSSIPKGRCSEGESDSDSEASDVSGSDGEDTSWISWYCNLRGNEFFCEVDDDYIQDDFNLCGLSSQVPYYDYALDLILDIESSHGDMFTEEQNELVESAAEMLYGLIHARYILTSKGLAAMLEKYRNYDFGRCPRVYCCGQPCLPVGQSDIHRSSTVKIYCPKCEDIYYPRSKYQGNIDGAYFGTTFPHLFLMTYEHLKPQKLSQRYVPRVFGFKLHKP

SEQ ID NO: 25688 - protein, 273 aa, Zea mays subsp. mays
  peptide (1)..(273): Ceres Seq. ID no. 12353721
  misc_feature (83)..(261): Pfam Name: Pfam Description:  Casein kinase II regulatory subunit
  misc_feature (1)..(273): NCBI GI NO: 11527004 NR Description: protein kinase CK2 regulatory subunit CK2B3
  misc_feature (1)..(273): NCBI GI NO: 34901776 NR Description: OJ1058_B11.17
  misc_feature (32)..(273): NCBI GI NO: 29367573 NR Description: possible protein kinase CK2 regulatory subunit
  misc_feature (1)..(272): NCBI GI NO: 21261784 NR Description: protein kinase Ck2 regulatory subunit 2
  misc_feature (2)..(272): NCBI GI NO: 37536920 NR Description: putative casein kinase II beta subunit
  misc_feature (13)..(273): NCBI GI NO: 11527002 NR Description: protein kinase CK2 regulatory subunit CK2B2
  misc_feature (9)..(271): NCBI GI NO: 15224934 NR Description: putative casein kinase II beta subunit
  misc_feature (1)..(273): NCBI GI NO: 15236597 NR Description: casein kinase II beta chain CKB2
  misc_feature (9)..(271): NCBI GI NO: 30689795 NR Description: casein kinase II beta chain, putative
  misc_feature (1)..(273): NCBI GI NO: 15238013 NR Description: casein kinase II beta chain; protein id:At5g47080
MYKQGGAGGGAGLDRKRINDALDKHLEKAVASPSTSRGSAGGGRDHHRLVVPSSVSSIPKGRCSEGESDSDSEASDVSGSDGEDTSWISWYCNLRGNEFFCEVDDDYIQDDFNLCGLSSQVPYYDYALDLILDIESSHGDMFTEEQNELVESAAEMLYGLIHARYILTSKGLAAMLEKYRNYDFGRCPRVYCCGQPCLPVGQSDIHRSSTVKIYCPKCEDIYYPRSKYQGNIDGAYFGTTFPHLFLMTYEHLKPQKLSQRYVPRVFGFKLHKP

SEQ ID NO: 25689 - DNA, 808 bp, Zea mays subsp. mays
  misc_feature (1)..(808): Ceres Seq. ID no. 12566346
aattaatccaacgtagccatgcacaacacgtcaacacacacgcacgcaggctgctgctgggcgttctcggcggtggcggcggtggaagggctgaacaagatccggacggggcggctggtgtcgctgtcggagcaggagctggtggactgcgacgtcagcggcgtggaccagggctgcgacggcggcctcatggacaacgccttccagttcgtcgcgcgccgcggcgggctggcctcggagtcgggctacccgtaccagggccgggacgggccctgccgctcgtcggccgccgccgccgccgcgtccatccggggccacgaggacgtgccgcgcaacaacgaggccgcgctcgcggccgccgtggcccaccagcccgtgtccgtggccatcaacggcgaggacatggcgttccgcttctacgacagcggcgtgctgggcggggcctgcggcacggacctcaaccacgccatcacggccgtcgggtacggcacggcggccgacggcacaaggtactggctgatgaagaactcctggggcgcgtcgtggggcgagggcggatacgtccggatccgccgcggcgtccgcggggagggcgtctgcggtctcgccaagttgccgtcttaccccgtctagagccaggcttattcccgtcggttttaggccgacgagaattaagtgttttcctgtagtaataactatgtccaaaaatatgttaaacaaacaataattgcaactgctgtctggtgtaattgcaacttctgatctggtgtgattgcaacttctatataactatgtccaaaaatctgtt

SEQ ID NO: 25690 - protein, 228 aa, Zea mays subsp. mays
  peptide (1)..(228): Ceres Seq. ID no. 12566347
LIQRSHAQHVNTHARRLLLGVLGGGGGGRAEQDPDGAAGVAVGAGAGGLRRQRRGPGLRRRPHGQRLPVRRAPRRAGLGVGLPVPGPGRALPLVGRRRRRVHPGPRGRAAQQRGRARGRRGPPARVRGHQRRGHGVPLLRQRRAGRGLRHGPQPRHHGRRVRHGGRRHKVLADEELLGRVVGRGRIRPDPPRRPRGGRLRSRQVAVLPRLEPGLFPSVLGRRELSVFL

SEQ ID NO: 25691 - protein, 204 aa, Zea mays subsp. mays
  peptide (1)..(204): Ceres Seq. ID no. 12566348
  misc_feature (11)..(204): Pfam Name: Pfam Description:  Papain family cysteine protease
  misc_feature (11)..(204): NCBI GI NO: 7435799 NR Description: cysteine proteinase (EC 3.4.22.-) - barley
  misc_feature (11)..(204): NCBI GI NO: 21070926 NR Description: putative cysteine proteinase
  misc_feature (11)..(203): NCBI GI NO: 38346007 NR Description: OSJNBa0035O13.9
  misc_feature (11)..(203): NCBI GI NO: 38345008 NR Description: OSJNBa0052O21.11
  misc_feature (11)..(203): NCBI GI NO: 37780045 NR Description: cysteine protease 5 [Trifolium repens]
  misc_feature (11)..(203): NCBI GI NO: 37780051 NR Description: cysteine protease 12 [Trifolium repens]
  misc_feature (11)..(203): NCBI GI NO: 38346003 NR Description: OSJNBa0035O13.5
  misc_feature (11)..(203): NCBI GI NO: 535454 NR Description: cysteine proteinase
  misc_feature (11)..(203): NCBI GI NO: 24285904 NR Description: cysteine proteinase precursor [Ipomoea batatas]
  misc_feature (11)..(204): NCBI GI NO: 10336513 NR Description: cysteine proteinase [Astragalus sinicus]
MHNTSTHTHAGCCWAFSAVAAVEGLNKIRTGRLVSLSEQELVDCDVSGVDQGCDGGLMDNAFQFVARRGGLASESGYPYQGRDGPCRSSAAAAAASIRGHEDVPRNNEAALAAAVAHQPVSVAINGEDMAFRFYDSGVLGGACGTDLNHAITAVGYGTAADGTRYWLMKNSWGASWGEGGYVRIRRGVRGEGVCGLAKLPSYPV

SEQ ID NO: 25692 - protein, 147 aa, Zea mays subsp. mays
  peptide (1)..(147): Ceres Seq. ID no. 12566349
  misc_feature (1)..(147): Pfam Name: Pfam Description:  Papain family cysteine protease
  misc_feature (1)..(147): NCBI GI NO: 7435799 NR Description: cysteine proteinase (EC 3.4.22.-) - barley
  misc_feature (1)..(147): NCBI GI NO: 21070926 NR Description: putative cysteine proteinase
  misc_feature (1)..(146): NCBI GI NO: 38346007 NR Description: OSJNBa0035O13.9
  misc_feature (1)..(146): NCBI GI NO: 38345008 NR Description: OSJNBa0052O21.11
  misc_feature (1)..(146): NCBI GI NO: 37780045 NR Description: cysteine protease 5 [Trifolium repens]
  misc_feature (1)..(146): NCBI GI NO: 37780051 NR Description: cysteine protease 12 [Trifolium repens]
  misc_feature (1)..(146): NCBI GI NO: 38346003 NR Description: OSJNBa0035O13.5
  misc_feature (1)..(146): NCBI GI NO: 535454 NR Description: cysteine proteinase
  misc_feature (1)..(146): NCBI GI NO: 24285904 NR Description: cysteine proteinase precursor [Ipomoea batatas]
  misc_feature (1)..(147): NCBI GI NO: 10336513 NR Description: cysteine proteinase [Astragalus sinicus]
MDNAFQFVARRGGLASESGYPYQGRDGPCRSSAAAAAASIRGHEDVPRNNEAALAAAVAHQPVSVAINGEDMAFRFYDSGVLGGACGTDLNHAITAVGYGTAADGTRYWLMKNSWGASWGEGGYVRIRRGVRGEGVCGLAKLPSYPV

SEQ ID NO: 25693 - DNA, 1262 bp, Zea mays subsp. mays
  misc_feature (1)..(1262): Ceres Seq. ID no. 12353722
agcaacgcaagcaagcaattgtcaaccgactctatcttagctctctttgcaagccagtaggtcaccactcaaaagcttgtgaagcaggtgagatgggcaaggaggtggatgtgtccactctagaggccggcggcgtccgtgaccgtgactacgcggaccctccgccggcaccgctgatcgacatcgacgagctcggcaagtggtccctgtaccgcgccgtgatcgccgagttcgtggccacgctgctgttcctgtacatcacggttgccacggtgatcgggtacaagcaccagacggacgcgtcggcgtcggggcccgacgcggcgtgcagcggcgtgggcatcctgggcatcgcgtgggcgttcggcggcatgatcttcatcctcgtctactgcaccgccggcatctcgggcggccacatcaacccggccgtcacgttcggcctcttcctggcgcgcaaggtctccctggtgcgcgctctgctgtacatggccgcgcagagcctcggtgctatctgcggcgtcgcgctcgtcaagggcttccagagcgggttctacgcgcgctacggcggcggcgccaatgaggtcagcgccgggtactccaccggcacggggctcgccgccgagatcatcggtaccttcgtgctcgtctacaccgtcttctccgccaccgaccccaagcgcaacgctcgcgactcccacgttccggtgctggcgccgcttccgatcgggttcgctgtgttcatggtgcacctggcgacgatcccgatcactggcaccggtatcaacccggcgaggagcctcggcgccgccgtcgtgtacaacaacagcaaagcctggagcgaccagtggatcttctgggtgggcccgttcatcggagcggcgatcgcagcgctataccaccagatcgtcctccgcgccagcgccagggggtacggctccttccggagcaacgcctaggaccatctcgtcggcgggctattcagctcttcctcctccgcagtttaaggtgaacggagaaggagagcgcaagggggtacggagcaacgtctaggctcacctcgcctttgcccccgcccatccacagcagcagtagctttcattcaggtcaagtgttgcagctgccggcaacggtagctagcgcaggcgtttgtgagtttgtgtgcggtgtggaaagcaagtgtgacttggtcagcgtctgtgtgtcctgttgggttgcagtcaatctaacttaataaagatggacgaatgcaagtgattatt

SEQ ID NO: 25694 - protein, 318 aa, Zea mays subsp. mays
  peptide (1)..(318): Ceres Seq. ID no. 12353723
  misc_feature (63)..(300): Pfam Name: Pfam Description:  Major intrinsic protein
  misc_feature (31)..(318): NCBI GI NO: 13447809 NR Description: plasma membrane integral protein ZmPIP2-6
  misc_feature (31)..(318): NCBI GI NO: 34901248 NR Description: putative plasma membrane intrinsic protein
  misc_feature (31)..(318): NCBI GI NO: 34901254 NR Description: putative plasma membrane intrinsic protein
  misc_feature (31)..(318): NCBI GI NO: 34901250 NR Description: putative plasma membrane intrinsic protein
  misc_feature (31)..(318): NCBI GI NO: 13447807 NR Description: plasma membrane integral protein ZmPIP2-4
  misc_feature (33)..(318): NCBI GI NO: 13447805 NR Description: plasma membrane integral protein ZmPIP2-3
  misc_feature (31)..(316): NCBI GI NO: 4741931 NR Description: plasma membrane intrinsic protein [Zea mays]
  misc_feature (31)..(318): NCBI GI NO: 34901270 NR Description: putative plasma membrane intrinsic protein
  misc_feature (31)..(317): NCBI GI NO: 7441245 NR Description: plasma membrane intrinsic protein BPW1 - barley
  misc_feature (31)..(318): NCBI GI NO: 13447801 NR Description: plasma membrane integral protein ZmPIP2-1
QRKQAIVNRLYLSSLCKPVGHHSKACEAGEMGKEVDVSTLEAGGVRDRDYADPPPAPLIDIDELGKWSLYRAVIAEFVATLLFLYITVATVIGYKHQTDASASGPDAACSGVGILGIAWAFGGMIFILVYCTAGISGGHINPAVTFGLFLARKVSLVRALLYMAAQSLGAICGVALVKGFQSGFYARYGGGANEVSAGYSTGTGLAAEIIGTFVLVYTVFSATDPKRNARDSHVPVLAPLPIGFAVFMVHLATIPITGTGINPARSLGAAVVYNNSKAWSDQWIFWVGPFIGAAIAALYHQIVLRASARGYGSFRSNA

SEQ ID NO: 25695 - protein, 288 aa, Zea mays subsp. mays
  peptide (1)..(288): Ceres Seq. ID no. 12353724
  misc_feature (33)..(270): Pfam Name: Pfam Description:  Major intrinsic protein
  misc_feature (1)..(288): NCBI GI NO: 13447809 NR Description: plasma membrane integral protein ZmPIP2-6
  misc_feature (1)..(288): NCBI GI NO: 34901248 NR Description: putative plasma membrane intrinsic protein
  misc_feature (1)..(288): NCBI GI NO: 34901254 NR Description: putative plasma membrane intrinsic protein
  misc_feature (1)..(288): NCBI GI NO: 34901250 NR Description: putative plasma membrane intrinsic protein
  misc_feature (1)..(288): NCBI GI NO: 13447807 NR Description: plasma membrane integral protein ZmPIP2-4
  misc_feature (3)..(288): NCBI GI NO: 13447805 NR Description: plasma membrane integral protein ZmPIP2-3
  misc_feature (1)..(286): NCBI GI NO: 4741931 NR Description: plasma membrane intrinsic protein [Zea mays]
  misc_feature (1)..(288): NCBI GI NO: 34901270 NR Description: putative plasma membrane intrinsic protein
  misc_feature (1)..(287): NCBI GI NO: 7441245 NR Description: plasma membrane intrinsic protein BPW1 - barley
  misc_feature (1)..(288): NCBI GI NO: 13447801 NR Description: plasma membrane integral protein ZmPIP2-1
MGKEVDVSTLEAGGVRDRDYADPPPAPLIDIDELGKWSLYRAVIAEFVATLLFLYITVATVIGYKHQTDASASGPDAACSGVGILGIAWAFGGMIFILVYCTAGISGGHINPAVTFGLFLARKVSLVRALLYMAAQSLGAICGVALVKGFQSGFYARYGGGANEVSAGYSTGTGLAAEIIGTFVLVYTVFSATDPKRNARDSHVPVLAPLPIGFAVFMVHLATIPITGTGINPARSLGAAVVYNNSKAWSDQWIFWVGPFIGAAIAALYHQIVLRASARGYGSFRSNA

SEQ ID NO: 25696 - protein, 195 aa, Zea mays subsp. mays
  peptide (1)..(195): Ceres Seq. ID no. 12353725
  misc_feature (1)..(177): Pfam Name: Pfam Description:  Major intrinsic protein
  misc_feature (1)..(195): NCBI GI NO: 13447809 NR Description: plasma membrane integral protein ZmPIP2-6
  misc_feature (1)..(195): NCBI GI NO: 34901248 NR Description: putative plasma membrane intrinsic protein
  misc_feature (1)..(195): NCBI GI NO: 34901254 NR Description: putative plasma membrane intrinsic protein
  misc_feature (1)..(195): NCBI GI NO: 34901250 NR Description: putative plasma membrane intrinsic protein
  misc_feature (1)..(195): NCBI GI NO: 13447807 NR Description: plasma membrane integral protein ZmPIP2-4
  misc_feature (1)..(195): NCBI GI NO: 13447805 NR Description: plasma membrane integral protein ZmPIP2-3
  misc_feature (1)..(193): NCBI GI NO: 4741931 NR Description: plasma membrane intrinsic protein [Zea mays]
  misc_feature (1)..(195): NCBI GI NO: 34901270 NR Description: putative plasma membrane intrinsic protein
  misc_feature (1)..(194): NCBI GI NO: 7441245 NR Description: plasma membrane intrinsic protein BPW1 - barley
  misc_feature (1)..(195): NCBI GI NO: 13447801 NR Description: plasma membrane integral protein ZmPIP2-1
MIFILVYCTAGISGGHINPAVTFGLFLARKVSLVRALLYMAAQSLGAICGVALVKGFQSGFYARYGGGANEVSAGYSTGTGLAAEIIGTFVLVYTVFSATDPKRNARDSHVPVLAPLPIGFAVFMVHLATIPITGTGINPARSLGAAVVYNNSKAWSDQWIFWVGPFIGAAIAALYHQIVLRASARGYGSFRSNA

SEQ ID NO: 25697 - DNA, 972 bp, Zea mays subsp. mays
  misc_feature (1)..(972): Ceres Seq. ID no. 12365343
aatacatgcgttataacagcagagcagaggtcaacaagacgagacaagagaatgcctgtgagcaggatcgccgtgggtgctccgggcgagctgtcccaccccgacaccgccaaggccgccgtcgccgagttcatctccacgctcatcttcgtcttcgccggctcaggatcggggatggccttcagtaagctcacggacggtggcgccgccactcctgccggcctcatcgccgcgtctctggcgcacgccctcgccctcttcgtggccgtctccgtgggtgccaacatctccggcggccacgtgaaccctgccgtgaccttcggcgcctttgtgggcggcaacatcagcctcctcaaggccctggtctactgggtggcccagctcctgggctccgtcgtcgcctgcctcctcctcaagatcgccacgggcggcgcggcccttggcgccttctcgctgtcggcgggcgtcggcgccatgaacgccgtggtgctggagatggtcatgaccttcggcctcgtgtacacggtgtacgccacggccgtggaccccaagaagggcgacctcggcgtcatcgcgcccatcgccatcggcttcatcgtcggcgccaacatcctggcggggggcgccttcgacggcgcctccatgaaccccgccgtctccttcggcccggccgtcgtcaccggcgtctgggagaaccactgggtgtactgggtcggcccactcgcgggcgcggccatcgcggcgctcgtctacgacatcatcttcatcgggcagcgcccacaccagcagctgccaaccacggcagcagactactgatgaccatcatcatcatgcactgaataattaagaccagaccactcaatatatatacatatgaagaataacatgccaaatctcatctcctagagctagcaacttgattctccatatatttcttaaatacaaactaaactcgattgagtatagcttggt

SEQ ID NO: 25698 - protein, 271 aa, Zea mays subsp. mays
  peptide (1)..(271): Ceres Seq. ID no. 12365344
  misc_feature (30)..(251): Pfam Name: Pfam Description:  Major intrinsic protein
  misc_feature (18)..(271): NCBI GI NO: 13447819 NR Description: tonoplast membrane integral protein ZmTIP1-2
  misc_feature (18)..(271): NCBI GI NO: 34906078 NR Description: putative tonoplast membrane integral protein
  misc_feature (18)..(271): NCBI GI NO: 8699604 NR Description: putative aquaporin TIP3
  misc_feature (18)..(267): NCBI GI NO: 541951 NR Description: SPCP2 protein - soybean
  misc_feature (18)..(266): NCBI GI NO: 15234189 NR Description: putative water channel protein
  misc_feature (18)..(271): NCBI GI NO: 21284370 NR Description: tonoplast intrinsic protein bobTIP26-1
  misc_feature (18)..(271): NCBI GI NO: 475048 NR Description: tonoplast intrinsic protein gamma (gamma-TIP)
  misc_feature (18)..(271): NCBI GI NO: 21593151 NR Description: putative aquaporin
  misc_feature (18)..(271): NCBI GI NO: 15228041 NR Description: putative aquaporin
  misc_feature (18)..(271): NCBI GI NO: 1514977 NR Description: VM23 [Raphanus sativus]
NTCVITAEQRSTRRDKRMPVSRIAVGAPGELSHPDTAKAAVAEFISTLIFVFAGSGSGMAFSKLTDGGAATPAGLIAASLAHALALFVAVSVGANISGGHVNPAVTFGAFVGGNISLLKALVYWVAQLLGSVVACLLLKIATGGAALGAFSLSAGVGAMNAVVLEMVMTFGLVYTVYATAVDPKKGDLGVIAPIAIGFIVGANILAGGAFDGASMNPAVSFGPAVVTGVWENHWVYWVGPLAGAAIAALVYDIIFIGQRPHQQLPTTAADY

SEQ ID NO: 25699 - protein, 254 aa, Zea mays subsp. mays; identical to SEQ ID NO: 25377
  peptide (1)..(254): Ceres Seq. ID no. 12365345
  misc_feature (13)..(234): Pfam Name: Pfam Description:  Major intrinsic protein
  misc_feature (1)..(254): NCBI GI NO: 13447819 NR Description: tonoplast membrane integral protein ZmTIP1-2
  misc_feature (1)..(254): NCBI GI NO: 34906078 NR Description: putative tonoplast membrane integral protein
  misc_feature (1)..(254): NCBI GI NO: 8699604 NR Description: putative aquaporin TIP3
  misc_feature (1)..(250): NCBI GI NO: 541951 NR Description: SPCP2 protein - soybean
  misc_feature (1)..(249): NCBI GI NO: 15234189 NR Description: putative water channel protein
  misc_feature (1)..(254): NCBI GI NO: 21284370 NR Description: tonoplast intrinsic protein bobTIP26-1
  misc_feature (1)..(254): NCBI GI NO: 475048 NR Description: tonoplast intrinsic protein gamma (gamma-TIP)
  misc_feature (1)..(254): NCBI GI NO: 21593151 NR Description: putative aquaporin
  misc_feature (1)..(254): NCBI GI NO: 15228041 NR Description: putative aquaporin
  misc_feature (1)..(254): NCBI GI NO: 1514977 NR Description: VM23 [Raphanus sativus]

SEQ ID NO: 25700 - protein, 213 aa, Zea mays subsp. mays; identical to SEQ ID NO: 25378
  peptide (1)..(213): Ceres Seq. ID no. 12365346
  misc_feature (1)..(193): Pfam Name: Pfam Description:  Major intrinsic protein
  misc_feature (1)..(213): NCBI GI NO: 13447819 NR Description: tonoplast membrane integral protein ZmTIP1-2
  misc_feature (1)..(213): NCBI GI NO: 34906078 NR Description: putative tonoplast membrane integral protein
  misc_feature (1)..(213): NCBI GI NO: 8699604 NR Description: putative aquaporin TIP3
  misc_feature (1)..(209): NCBI GI NO: 541951 NR Description: SPCP2 protein - soybean
  misc_feature (1)..(208): NCBI GI NO: 15234189 NR Description: putative water channel protein
  misc_feature (1)..(213): NCBI GI NO: 21284370 NR Description: tonoplast intrinsic protein bobTIP26-1
  misc_feature (1)..(213): NCBI GI NO: 475048 NR Description: tonoplast intrinsic protein gamma (gamma-TIP)
  misc_feature (1)..(213): NCBI GI NO: 21593151 NR Description: putative aquaporin
  misc_feature (1)..(213): NCBI GI NO: 15228041 NR Description: putative aquaporin
  misc_feature (1)..(213): NCBI GI NO: 1514977 NR Description: VM23 [Raphanus sativus]

SEQ ID NO: 25701 - DNA, 1203 bp, Zea mays subsp. mays
  misc_feature (1)..(1203): Ceres Seq. ID no. 12566771
aggattcacaagtgctcgtagcaaatctacaaaatccccaaccgcctctcaacaaagtctccccacgggaggtacacagctacgcgcaaacccgcgtctcgcgcgaagaatccgcatttccccttccccgcaccgcaccgcacccaacccccgtcggagagagagatggcatcggtggcggagatgcagcccctcgcgccggcggggtaccgccgcgcgccggagatgaaggagaaggtggaggcgtcggtggtggacctggaggccgggaccggggagacgctgtacccggggatctcgcgcggggagagcgccctccgatggggcttcgtccgcaaggtctacggcatcctccgctgcgcagctgctcctcaccaccgccgtctccgccctcaccgttctccaccccaccctcaacgccacgctctccgactccccgggcctcgcgctcgtgctcgccgtcctgcccttcatcctgatgatcccattgtatcattatcagcacaagcacccacacaattccgttttcctgggtctgttcacgttgtgcttgagcttcagcatcggcgtggcttgtgctaacacccaagggaaaatcgttctggaggctttagtgctgacggctggcgtggtggtttcgctgactgcgtatgctttctgggcgtcaaagaagggcaaggaattcgggtacctggggcctatcctgtcttccgcgcttactatcctcgtcctaactagctttcttcaggttttcttcccactgggacccgtgtcggtgggcttgttcggtgggctaggggctctggtcttctcaggcttcatcctgtacgacaccgagaacctgattaggcgccacacctacgacgagtacatctgggcgtcggttgggctgtacctcgacatcctgaacctgttcctctccatcctgaacatgctcaggagcatgcaatccgacaactagccggtcaaagcaccgcaccgcggcctcttgatatcgaacacggtatacccccgcggtcctgtgctctggttgttaagaagacgggatcgaagtgcgacatatgtattgtctattgtatgagcccactcgtgtcaacactgcaaacaattgtggtcatgtcaccttgtatgttcttcgtcactttgcaaacaactgtaagtacctgatatcgttttgcgctcgtgctattcgcgctaaaaatc

SEQ ID NO: 25702 - protein, 160 aa, Zea mays subsp. mays
  peptide (1)..(160): Ceres Seq. ID no. 12566772
  misc_feature (1)..(154): Pfam Name: Pfam Description:  Uncharacterised protein family UPF0005
  misc_feature (1)..(160): NCBI GI NO: 18414455 NR Description: Expressed protein; protein id: At4g15470
  misc_feature (1)..(118): NCBI GI NO: 15810201 NR Description: AT4g15470/dl3775w [Arabidopsis thaliana]
  misc_feature (1)..(158): NCBI GI NO: 14626300 NR Description: putative receptor-associated protein
  misc_feature (1)..(155): NCBI GI NO: 34393841 NR Description: putative z-protein
  misc_feature (1)..(158): NCBI GI NO: 15229411 NR Description: putative protein; protein id: At3g63310.1
  misc_feature (1)..(157): NCBI GI NO: 15235466 NR Description: putative glutamate-/aspartate-binding peptide
  misc_feature (1)..(157): NCBI GI NO: 15218701 NR Description: putative glutamate/aspartate-binding peptide
  misc_feature (38)..(109): NCBI GI NO: 7485070 NR Description: hypothetical protein - Arabidopsis thaliana
  misc_feature (1)..(38): NCBI GI NO: 7485070 NR Description: hypothetical protein - Arabidopsis thaliana
  misc_feature (1)..(158): NCBI GI NO: 34393840 NR Description: putative z-protein
MIPLYHYQHKHPHNSVFLGLFTLCLSFSIGVACANTQGKIVLEALVLTAGVVVSLTAYAFWASKKGKEFGYLGPILSSALTILVLTSFLQVFFPLGPVSVGLFGGLGALVFSGFILYDTENLIRRHTYDEYIWASVGLYLDILNLFLSILNMLRSMQSDN

SEQ ID NO: 25703 - protein, 158 aa, Zea mays subsp. mays
  peptide (1)..(158): Ceres Seq. ID no. 12566773
DSQVLVANLQNPQPPLNKVSPREVHSYAQTRVSREESAFPLPRTAPHPTPVGERDGIGGGDAAPRAGGVPPRAGDEGEGGGVGGGPGGRDRGDAVPGDLARGERPPMGLRPQGLRHPPLRSCSSPPPSPPSPFSTPPSTPRSPTPRASRSCSPSCPSS

SEQ ID NO: 25704 - protein, 138 aa, Zea mays subsp. mays
  peptide (1)..(138): Ceres Seq. ID no. 12566774
  misc_feature (30)..(63): NCBI GI NO: 18414455 NR Description: Expressed protein; protein id: At4g15470
  misc_feature (30)..(63): NCBI GI NO: 15810201 NR Description: AT4g15470/dl3775w [Arabidopsis thaliana]
  misc_feature (30)..(63): NCBI GI NO: 7485070 NR Description: hypothetical protein - Arabidopsis thaliana
MASVAEMQPLAPAGYRRAPEMKEKVEASVVDLEAGTGETLYPGISRGESALRWGFVRKVYGILRCAAAPHHRRLRPHRSPPHPQRHALRLPGPRARARRPALHPDDPIVSLSAQAPTQFRFPGSVHVVLELQHRRGLC

SEQ ID NO: 25705 - DNA, 832 bp, Zea mays subsp. mays
  misc_feature (1)..(832): Ceres Seq. ID no. 12366950
gatataagaaaccctagcggagccactaacacagtcgcctccttcctgcgccgccgccgccgccgccgctaccaccgcctcgcggccgcctgcggctccgcgtttccgcacggaagttggtgaaggtttcttgaggctgagaacatggtgctgaagacggaactttgccgcttcagcggccagaagatttatcctgggaaaggcattagatttatccgtgctgattctcaggtcttcctttttgccaactcgaaatgcaagcgctacttccacaaccgcctgaagcctgcaaagcttacctggacagcaatgtacaggaagcagcacaagaaggatatccatgctgaagcggtaaagaagaggcgccgcgccaccaagaagccatactccaggtcaattgtgggtgcttccttggaagtaatccagaagaagagagctgagaagccagaggtccgcgatgctgctagagaagctgctcttcgtgagatcaaggagcgcatcaagaagaccaaggatgagaagaaagcgaagaaggcggaggtgagcaagtcccagaagacgcagacaaagggtgcggtccagaagggttccaagggccccaagttgggcggcggtggtgggaagcgctgaaagaacttagtgtcgtttctcgacattgcagtcgttccttagccaaagccactttcgtagaacctgtgttgaatttgcaagacttattcaagcgttgcttgtgcgtgctaaataccatggcaagagaacggatttatatttatgcctgaaaaaaaatgaccgttcatattcttaactcatcttggataagggcttgttttgc

SEQ ID NO: 25706 - protein, 161 aa, Zea mays subsp. mays; identical to SEQ ID NO: 23397
  peptide (1)..(161): Ceres Seq. ID no. 12366951
  misc_feature (3)..(73): Pfam Name: Pfam Description:  Ribosomal protein L24e
  misc_feature (1)..(161): NCBI GI NO: 1710521 NR Description: 60S RIBOSOMAL PROTEIN L24
  misc_feature (4)..(161): NCBI GI NO: 34900364 NR Description: putative 60S ribosomal protein L24
  misc_feature (1)..(160): NCBI GI NO: 6094040 NR Description: 60S ribosomal protein L24
  misc_feature (1)..(156): NCBI GI NO: 10180025 NR Description: 60S ribosomal protein L24 [Prunus avium]
  misc_feature (1)..(161): NCBI GI NO: 18404176 NR Description: 60S ribosomal protein L24; protein id: At2g36620
  misc_feature (1)..(161): NCBI GI NO: 15231730 NR Description: 60S ribosomal protein - like; protein id:At3g53020
  misc_feature (5)..(161): NCBI GI NO: 25295112 NR Description: 60S ribosomal protein L24
  misc_feature (3)..(150): NCBI GI NO: 19075214 NR Description: 60s ribosomal protein L24
  misc_feature (3)..(150): NCBI GI NO: 19115030 NR Description: 60S ribosomal protein L24
  misc_feature (10)..(154): NCBI GI NO: 40741063 NR Description: conserved hypothetical protein

SEQ ID NO: 25707 - protein, 106 aa, Zea mays subsp. mays; identical to SEQ ID NO: 23398
  peptide (1)..(106): Ceres Seq. ID no. 12366952
  misc_feature (1)..(106): NCBI GI NO: 1710521 NR Description: 60S RIBOSOMAL PROTEIN L24
  misc_feature (1)..(106): NCBI GI NO: 34900364 NR Description: putative 60S ribosomal protein L24
  misc_feature (1)..(105): NCBI GI NO: 6094040 NR Description: 60S ribosomal protein L24
  misc_feature (1)..(101): NCBI GI NO: 10180025 NR Description: 60S ribosomal protein L24 [Prunus avium]
  misc_feature (1)..(106): NCBI GI NO: 18404176 NR Description: 60S ribosomal protein L24; protein id: At2g36620
  misc_feature (1)..(106): NCBI GI NO: 15231730 NR Description: 60S ribosomal protein - like; protein id:At3g53020
  misc_feature (1)..(106): NCBI GI NO: 25295112 NR Description: 60S ribosomal protein L24
  misc_feature (1)..(95): NCBI GI NO: 19075214 NR Description: 60s ribosomal protein L24
  misc_feature (1)..(95): NCBI GI NO: 19115030 NR Description: 60S ribosomal protein L24
  misc_feature (1)..(99): NCBI GI NO: 40741063 NR Description: conserved hypothetical protein

SEQ ID NO: 25708 - DNA, 745 bp, Zea mays subsp. mays
  misc_feature (1)..(745): Ceres Seq. ID no. 13492365
tcgggaagaggagcaaaacaaaccctatctaaaccgcggcggactcttcgtccagcaaggtttcccatccaaatccggccacgccacttgttctttttttccgcaacaccgatggtgtacgtggattcttgggaggagttcgtggagcgttccgtgcagctcttccgcggcgaccccaacgccacccgctacgtgatgaagtaccggcactgcgaggggaagctcgtgctcaaggtcaccgacgaccgcgagtgcttgaagttcaagacagatcaagctcaagacgcaaagaagatggagaagctcaacaacatcttttttgctctcatgacacgtgggcctgatgttgatatcagtgaagtttcagggaaggaacaggcagagcaacagcaagcgaagaaaggtcggggaaggaggcaataatgcggtctgatccttatttgttacagaaaattcacaactggaatgatggattaacatttcatggactttattgtaattctgaagaaagtttttccagtacagaaccgagaacaaactaaatgcactctatcatgaatgaatgcatgattgagaaacgcccaaggcttcaaccctgcttcgtttttctgcacgggaagcgttttcatccatgttttctggtagaggaatgtagcttgatactctgcctgatcttatattgcgcactgcctgttggggttgggccatacgattttaggctattctcaatgggaatgaatttcct

SEQ ID NO: 25709 - protein, 140 aa, Zea mays subsp. mays
  peptide (1)..(140): Ceres Seq. ID no. 13492366
  misc_feature (39)..(115): Pfam Name: SRP9 Pfam Description: Signal recognition particle 9 kDa protein
  misc_feature (38)..(140): NCBI GI NO: 12230624 NR Description: Signal recognition particle 9 kDa protein (SRP9)
  misc_feature (38)..(140): NCBI GI NO: 15229083 NR Description: signal recognition particle subunit 9 - like
  misc_feature (38)..(110): NCBI GI NO: 29436534 NR Description: Similar to signal recognition particle 9kDa
  misc_feature (34)..(110): NCBI GI NO: 5107800 NR Description: Signal Recognition Particle Alu Rna BindingHeterodimer
  misc_feature (38)..(110): NCBI GI NO: 134890 NR Description: SIGNAL RECOGNITION PARTICLE 9 KD PROTEIN (SRP9)
  misc_feature (38)..(110): NCBI GI NO: 4507217 NR Description: signal recognition particle 9kDa
  misc_feature (43)..(110): NCBI GI NO: 11513832 NR Description: Chain A
  misc_feature (38)..(110): NCBI GI NO: 6755662 NR Description: signal recognition particle 9
  misc_feature (38)..(104): NCBI GI NO: 17556953 NR Description: Signal recognition particle (8.8 kD)
  misc_feature (38)..(104): NCBI GI NO: 39585011 NR Description: Hypothetical protein CBG06800
SGRGAKQTLSKPRRTLRPARFPIQIRPRHLFFFSATPMVYVDSWEEFVERSVQLFRGDPNATRYVMKYRHCEGKLVLKVTDDRECLKFKTDQAQDAKKMEKLNNIFFALMTRGPDVDISEVSGKEQAEQQQAKKGRGRRQ

SEQ ID NO: 25710 - protein, 103 aa, Zea mays subsp. mays
  peptide (1)..(103): Ceres Seq. ID no. 13492367
  misc_feature (2)..(78): Pfam Name: SRP9 Pfam Description: Signal recognition particle 9 kDa protein
  misc_feature (1)..(103): NCBI GI NO: 12230624 NR Description: Signal recognition particle 9 kDa protein (SRP9)
  misc_feature (1)..(103): NCBI GI NO: 15229083 NR Description: signal recognition particle subunit 9 - like
  misc_feature (1)..(73): NCBI GI NO: 29436534 NR Description: Similar to signal recognition particle 9kDa
  misc_feature (1)..(73): NCBI GI NO: 5107800 NR Description: Signal Recognition Particle Alu Rna BindingHeterodimer
  misc_feature (1)..(73): NCBI GI NO: 134890 NR Description: SIGNAL RECOGNITION PARTICLE 9 KD PROTEIN (SRP9)
  misc_feature (1)..(73): NCBI GI NO: 4507217 NR Description: signal recognition particle 9kDa
  misc_feature (6)..(73): NCBI GI NO: 11513832 NR Description: Chain A
  misc_feature (1)..(73): NCBI GI NO: 6755662 NR Description: signal recognition particle 9
  misc_feature (1)..(67): NCBI GI NO: 17556953 NR Description: Signal recognition particle (8.8 kD)
  misc_feature (1)..(67): NCBI GI NO: 39585011 NR Description: Hypothetical protein CBG06800
MVYVDSWEEFVERSVQLFRGDPNATRYVMKYRHCEGKLVLKVTDDRECLKFKTDQAQDAKKMEKLNNIFFALMTRGPDVDISEVSGKEQAEQQQAKKGRGRRQ

SEQ ID NO: 25711 - protein, 75 aa, Zea mays subsp. mays
  peptide (1)..(75): Ceres Seq. ID no. 13492368
  misc_feature (1)..(75): NCBI GI NO: 12230624 NR Description: Signal recognition particle 9 kDa protein (SRP9)
  misc_feature (1)..(75): NCBI GI NO: 15229083 NR Description: signal recognition particle subunit 9 - like
  misc_feature (1)..(45): NCBI GI NO: 29436534 NR Description: Similar to signal recognition particle 9kDa
  misc_feature (1)..(45): NCBI GI NO: 5107800 NR Description: Signal Recognition Particle Alu Rna BindingHeterodimer
  misc_feature (1)..(45): NCBI GI NO: 134890 NR Description: SIGNAL RECOGNITION PARTICLE 9 KD PROTEIN (SRP9)
  misc_feature (1)..(45): NCBI GI NO: 4507217 NR Description: signal recognition particle 9kDa
  misc_feature (1)..(45): NCBI GI NO: 11513832 NR Description: Chain A
  misc_feature (1)..(45): NCBI GI NO: 6755662 NR Description: signal recognition particle 9
  misc_feature (1)..(39): NCBI GI NO: 17556953 NR Description: Signal recognition particle (8.8 kD)
  misc_feature (1)..(39): NCBI GI NO: 39585011 NR Description: Hypothetical protein CBG06800
MKYRHCEGKLVLKVTDDRECLKFKTDQAQDAKKMEKLNNIFFALMTRGPDVDISEVSGKEQAEQQQAKKGRGRRQ

SEQ ID NO: 25712 - DNA, 718 bp, Zea mays subsp. mays
  misc_feature (1)..(718): Ceres Seq. ID no. 12403024
accttcgctaccattgcttcaccatcaccaccaccccgcggctgcagctcagcagctccagacctcaccagaggcacctaccacaccgcccgccgccgatcccgtcacccgtctcctccccgctgcggagcgtctccagccctgcccggtgcccgcccagatggcaaacgcggcgtcagggatggccgtggacgacgactgcaagcgccggttcctggagctcaaggccaagaggacgcaccgcttcatcatctacaggatcgacgagaagaagaagatggtggtggtggagcaggtgggcaagcccgtgctcggctacgacgacttcgccgccagcctccccgccaacgagtgcaggtacgccatcttcgactacgacttcgtcaccgaggagaactgccagaagagcaagatcttcttcatcgcctggtctcctgacacggcgcgcgtgaggagcaagatgatctacgccagctccaaggagaggttcaagcgggagctggacggcattcaggtggatctccaggccaccgactccgccgaggttggccttgacgtcatccagggccgtgcaagctgaggatgcccagcgatgaactgcccatgccagaggatgtatgagcatcatcagttcagatgagaacttgactgggcgggctatgtaaaaactgcatccaccgcagtgataaatcaatctaatcaatctaccaccccctcc

SEQ ID NO: 25713 - protein, 192 aa, Zea mays subsp. mays
  peptide (1)..(192): Ceres Seq. ID no. 12403025
  misc_feature (65)..(192): Pfam Name: Pfam Description:  Cofilin/tropomyosin-type actin-binding protein
  misc_feature (54)..(192): NCBI GI NO: 17366768 NR Description: Actin-depolymerizing factor 1 (ADF 1)
  misc_feature (54)..(192): NCBI GI NO: 30697300 NR Description: actin depolymerizing factor 4 - like protein
  misc_feature (54)..(192): NCBI GI NO: 4185511 NR Description: actin depolymerizing factor 4
  misc_feature (54)..(192): NCBI GI NO: 15231309 NR Description: actin depolymerizing factor 1
  misc_feature (54)..(192): NCBI GI NO: 38564721 NR Description: putative actin-depolymerizing factor 2
  misc_feature (54)..(191): NCBI GI NO: 17366765 NR Description: Actin-depolymerizing factor 2 (ADF 2)
  misc_feature (61)..(192): NCBI GI NO: 30697303 NR Description: actin depolymerizing factor 4 - like protein
  misc_feature (54)..(192): NCBI GI NO: 18408116 NR Description: actin depolymerizing factor 2
  misc_feature (54)..(191): NCBI GI NO: 231509 NR Description: Actin-depolymerizing factor (ADF)
  misc_feature (54)..(190): NCBI GI NO: 18411410 NR Description: putative actin-depolymerizing factor
PSLPLLHHHHHPAAAAQQLQTSPEAPTTPPAADPVTRLLPAAERLQPCPVPAQMANAASGMAVDDDCKRRFLELKAKRTHRFIIYRIDEKKKMVVVEQVGKPVLGYDDFAASLPANECRYAIFDYDFVTEENCQKSKIFFIAWSPDTARVRSKMIYASSKERFKRELDGIQVDLQATDSAEVGLDVIQGRAS

SEQ ID NO: 25714 - protein, 149 aa, Zea mays subsp. mays
  peptide (1)..(149): Ceres Seq. ID no. 12403026
LRYHCFTITTTPRLQLSSSRPHQRHLPHRPPPIPSPVSSPLRSVSSPARCPPRWQTRRQGWPWTTTASAGSWSSRPRGRTASSSTGSTRRRRWWWWSRWASPCSATTTSPPASPPTSAGTPSSTTTSSPRRTARRARSSSSPGLLTRRA

SEQ ID NO: 25715 - protein, 145 aa, Zea mays subsp. mays
  peptide (1)..(145): Ceres Seq. ID no. 12403027
TFATIASPSPPPRGCSSAAPDLTRGTYHTARRRSRHPSPPRCGASPALPGARPDGKRGVRDGRGRRLQAPVPGAQGQEDAPLHHLQDRREEEDGGGGAGGQARARLRRLRRQPPRQRVQVRHLRLRLRHRGELPEEQDLLHRLVS

SEQ ID NO: 25716 - protein, 139 aa, Zea mays subsp. mays
  peptide (1)..(139): Ceres Seq. ID no. 12403028
  misc_feature (12)..(139): Pfam Name: Pfam Description:  Cofilin/tropomyosin-type actin-binding protein
  misc_feature (1)..(139): NCBI GI NO: 17366768 NR Description: Actin-depolymerizing factor 1 (ADF 1)
  misc_feature (1)..(139): NCBI GI NO: 30697300 NR Description: actin depolymerizing factor 4 - like protein
  misc_feature (1)..(139): NCBI GI NO: 4185511 NR Description: actin depolymerizing factor 4
  misc_feature (1)..(139): NCBI GI NO: 15231309 NR Description: actin depolymerizing factor 1
  misc_feature (1)..(139): NCBI GI NO: 38564721 NR Description: putative actin-depolymerizing factor 2
  misc_feature (1)..(138): NCBI GI NO: 17366765 NR Description: Actin-depolymerizing factor 2 (ADF 2)
  misc_feature (8)..(139): NCBI GI NO: 30697303 NR Description: actin depolymerizing factor 4 - like protein
  misc_feature (1)..(139): NCBI GI NO: 18408116 NR Description: actin depolymerizing factor 2
  misc_feature (1)..(138): NCBI GI NO: 231509 NR Description: Actin-depolymerizing factor (ADF)
  misc_feature (1)..(137): NCBI GI NO: 18411410 NR Description: putative actin-depolymerizing factor
MANAASGMAVDDDCKRRFLELKAKRTHRFIIYRIDEKKKMVVVEQVGKPVLGYDDFAASLPANECRYAIFDYDFVTEENCQKSKIFFIAWSPDTARVRSKMIYASSKERFKRELDGIQVDLQATDSAEVGLDVIQGRAS

SEQ ID NO: 25717 - DNA, 942 bp, Zea mays subsp. mays
  misc_feature (1)..(942): Ceres Seq. ID no. 12343221
attacctggcgcggagaggagagggagtgagtcgagatccattcccaactgcacctgcgcgcctcgactggtagcccgaaccctagctagcaggtcggaggcgagagagcagccatggcgcggtgcctcgcgctcgtctccctccttctcctcggcctcgcctccgccgcctccgctgccgatgcgccctttgtcgtcgcgcacaagaaggtttcgctctcccgccccaagccgggcgtcgagcgcgtcgccgtctccctcgacctctacaaccagggatccgcgactgcctatgatgtgtcacttaatgacgactcttggccaacacaagcatttgagcttgtcactggagagaaatcgaagacattggaaaggcttgaccctggtgccactgctacacacacatatgtcctggagaccaaaacacagggcaggttccagggttcaccagctattattacgtaccgtgttcccacaaagactgctcttcaggaggcctactcaactcccatcttcccactggatattctcgctgagagacttcctgagaagaagtttgaatgggctaagaggcttgtggcgaaatatgggtcacttgtgtctgttgtctcatttgttggattgtttatctacctcgttgcgagcccgtcgaagagcagctcaaaaggaagcaagaagagacgttgatctacttatagttcggcgcagttgaagttgtagctggtggtttttgcctggaggaactcttggtagtttgagctgagcgaaagctttaaattttacatttactcaccacaccatgaactgcaacgaagtgagcatctgttagaaaagtggaccagtaattttggttggttatttatttcctgtttctctgtcagactcttaactcggaggacctgtaactaggaaagttacttttgcttgaaagaacattttggc

SEQ ID NO: 25718 - protein, 236 aa, Zea mays subsp. mays
  peptide (1)..(236): Ceres Seq. ID no. 12343222
LPGAERRGSESRSIPNCTCAPRLVARTLASRSEAREQPWRGASRSSPSFSSASPPPPPLPMRPLSSRTRRFRSPAPSRASSASPSPSTSTTRDPRLPMMCHLMTTLGQHKHLSLSLERNRRHWKGLTLVPLLHTHMSWRPKHRAGSRVHQLLLRTVFPQRLLFRRPTQLPSSHWIFSLRDFLRRSLNGLRGLWRNMGHLCLLSHLLDCLSTSLRARRRAAQKEARRDVDLLIVRRS

SEQ ID NO: 25719 - protein, 190 aa, Zea mays subsp. mays
  peptide (1)..(190): Ceres Seq. ID no. 12343223
  misc_feature (10)..(186): Pfam Name: TRAPB Pfam Description: Translocon-associated protein beta
  misc_feature (1)..(190): NCBI GI NO: 34894034 NR Description: P0672D08.29
  misc_feature (3)..(190): NCBI GI NO: 9945068 NR Description: rice EST BE041002 corresponds to a region of thepredicated gene
  misc_feature (1)..(190): NCBI GI NO: 18417271 NR Description: expressed protein; protein id: At5g14030
  misc_feature (1)..(190): NCBI GI NO: 9757784 NR Description: gene_id:MUA22
  misc_feature (5)..(188): NCBI GI NO: 134931 NR Description: TRANSLOCON-ASSOCIATED PROTEIN
  misc_feature (5)..(148): NCBI GI NO: 12860639 NR Description: unnamed protein product [Mus musculus]
  misc_feature (1)..(117): NCBI GI NO: 34366445 NR Description: hypothetical protein [Homo sapiens]
  misc_feature (5)..(117): NCBI GI NO: 4507239 NR Description: signal sequence receptor, beta precursor
  misc_feature (5)..(117): NCBI GI NO: 12653147 NR Description: signal sequence receptor, beta
  misc_feature (5)..(117): NCBI GI NO: 13384850 NR Description: RIKEN cDNA 1500032E05 [Mus musculus]
MARCLALVSLLLLGLASAASAADAPFVVAHKKVSLSRPKPGVERVAVSLDLYNQGSATAYDVSLNDDSWPTQAFELVTGEKSKTLERLDPGATATHTYVLETKTQGRFQGSPAIITYRVPTKTALQEAYSTPIFPLDILAERLPEKKFEWAKRLVAKYGSLVSVVSFVGLFIYLVASPSKSSSKGSKKRR

SEQ ID NO: 25720 - protein, 176 aa, Zea mays subsp. mays
  peptide (1)..(176): Ceres Seq. ID no. 12343224
MRPLSSRTRRFRSPAPSRASSASPSPSTSTTRDPRLPMMCHLMTTLGQHKHLSLSLERNRRHWKGLTLVPLLHTHMSWRPKHRAGSRVHQLLLRTVFPQRLLFRRPTQLPSSHWIFSLRDFLRRSLNGLRGLWRNMGHLCLLSHLLDCLSTSLRARRRAAQKEARRDVDLLIVRRS

SEQ ID NO: 25721 - DNA, 1063 bp, Zea mays subsp. mays
  misc_feature (1)..(1063): Ceres Seq. ID no. 12343133
acgtctgtctccctctccctgcgctcgctctctccctccctcggtcaaagccagcacgacaacacagcagtctcggtagctgtccccctcgccctcatccctcctcggcgccgctgccggcccgcgcccgccccgcccgcctcccccctcgtgccgctctgccgcggcgcattccgcgcccgcctcgccaccgaatcgggcggaatctcagcgggaccaaaatggggtcgccgggtgcggggagcagcggcggccacgagtgctccttcaagatcctgctcatcggggactcgggcgtcggcaagagcagcctcctcgtcagcttcgtcgccgcctcccacctcgacggcgacatcgcccccaccatcggtgtggattttaaaatcaagttccttacagttggtggaaagaaactaaagttgacaatatgggatactgctggccaggagaggtttaggacaataactagttcttactacagaggtgctcagggaattattttagtatatgatgtcacaaagagagagagtttctcaaatttggctgatgtttggactaaggaaatagaagcaaactcaacaaacaaagactgcataaaaatgcttgttggaaacaaagttgacaaggatgatgaaagaatggtcacagaagaagaaggtcttgcttttgctgaagaatctggttgtctgtttcttgagagcagtgcaaaaacacgagaaaatgttgagaaatgttttgaagaacttgcattgaagatccttgaggtccctagtctcctggaggaagggtcttcttcggttgtcaagaggaaaatcctgaaacagaagcaggaaagtcatgcaaagaacggcagtggatgctgtcaatagatgtgctgatccacgcgacaaggttggctgttttcgtgtgagctgccctgacgttctgctgtacatgagttgtatctacatggtcttgtgagtaaaacagggttaaagaatcagcttgtttggcggggagggggagtgagcataattgatttgtacaaaggacatggcagtttggtgtcattgattttctctct

SEQ ID NO: 25722 - protein, 288 aa, Zea mays subsp. mays
  peptide (1)..(288): Ceres Seq. ID no. 12343134
  misc_feature (90)..(254): Pfam Name: Pfam Description:  Ras family
  misc_feature (74)..(288): NCBI GI NO: 37534998 NR Description: putative GTP-binding protein
  misc_feature (82)..(288): NCBI GI NO: 15451614 NR Description: Putative GTP-binding protein [Oryza sativa]
  misc_feature (79)..(287): NCBI GI NO: 1370172 NR Description: RAB1X [Lotus japonicus]
  misc_feature (74)..(287): NCBI GI NO: 18414255 NR Description: putative protein; protein id: At5g03530
  misc_feature (74)..(287): NCBI GI NO: 15232785 NR Description: GTP-binding protein, putative
  misc_feature (80)..(287): NCBI GI NO: 15218575 NR Description: GTP-binding protein
  misc_feature (89)..(287): NCBI GI NO: 1370174 NR Description: RAB1Y [Lotus japonicus]
  misc_feature (146)..(287): NCBI GI NO: 25294118 NR Description: protein F9C16.3 [imported] - Arabidopsis thaliana
  misc_feature (80)..(145): NCBI GI NO: 25294118 NR Description: protein F9C16.3 [imported] - Arabidopsis thaliana
  misc_feature (88)..(285): NCBI GI NO: 40807131 NR Description: Unknown (protein for MGC:77145) [Danio rerio]
VCLPLPALALSLPRSKPARQHSSLGSCPPRPHPSSAPLPARARPARLPPRAALPRRIPRPPRHRIGRNLSGTKMGSPGAGSSGGHECSFKILLIGDSGVGKSSLLVSFVAASHLDGDIAPTIGVDFKIKFLTVGGKKLKLTIWDTAGQERFRTITSSYYRGAQGIILVYDVTKRESFSNLADVWTKEIEANSTNKDCIKMLVGNKVDKDDERMVTEEEGLAFAEESGCLFLESSAKTRENVEKCFEELALKILEVPSLLEEGSSSVVKRKILKQKQESHAKNGSGCCQ

SEQ ID NO: 25723 - protein, 215 aa, Zea mays subsp. mays
  peptide (1)..(215): Ceres Seq. ID no. 12343135
  misc_feature (17)..(181): Pfam Name: Pfam Description:  Ras family
  misc_feature (1)..(215): NCBI GI NO: 37534998 NR Description: putative GTP-binding protein
  misc_feature (9)..(215): NCBI GI NO: 15451614 NR Description: Putative GTP-binding protein [Oryza sativa]
  misc_feature (6)..(214): NCBI GI NO: 1370172 NR Description: RAB1X [Lotus japonicus]
  misc_feature (1)..(214): NCBI GI NO: 18414255 NR Description: putative protein; protein id: At5g03530
  misc_feature (1)..(214): NCBI GI NO: 15232785 NR Description: GTP-binding protein, putative
  misc_feature (7)..(214): NCBI GI NO: 15218575 NR Description: GTP-binding protein
  misc_feature (16)..(214): NCBI GI NO: 1370174 NR Description: RAB1Y [Lotus japonicus]
  misc_feature (73)..(214): NCBI GI NO: 25294118 NR Description: protein F9C16.3 [imported] - Arabidopsis thaliana
  misc_feature (7)..(72): NCBI GI NO: 25294118 NR Description: protein F9C16.3 [imported] - Arabidopsis thaliana
  misc_feature (15)..(212): NCBI GI NO: 40807131 NR Description: Unknown (protein for MGC:77145) [Danio rerio]
MGSPGAGSSGGHECSFKILLIGDSGVGKSSLLVSFVAASHLDGDIAPTIGVDFKIKFLTVGGKKLKLTIWDTAGQERFRTITSSYYRGAQGIILVYDVTKRESFSNLADVWTKEIEANSTNKDCIKMLVGNKVDKDDERMVTEEEGLAFAEESGCLFLESSAKTRENVEKCFEELALKILEVPSLLEEGSSSVVKRKILKQKQESHAKNGSGCCQ

SEQ ID NO: 25724 - DNA, 1452 bp, Zea mays subsp. mays
  misc_feature (1)..(1452): Ceres Seq. ID no. 12404819
  misc_feature (1035)..(1035): n is a, c, t, g, unknown, or other
  misc_feature (1038)..(1038): n is a, c, t, g, unknown, or other
  misc_feature (1041)..(1041): n is a, c, t, g, unknown, or other
  misc_feature (1187)..(1187): n is a, c, t, g, unknown, or other
  misc_feature (417)..(417): n is a, c, t, g, unknown, or other
  misc_feature (243)..(243): n is a, c, t, g, unknown, or other
  misc_feature (1381)..(1381): n is a, c, t, g, unknown, or other
  misc_feature (1032)..(1032): n is a, c, t, g, unknown, or other
  misc_feature (1044)..(1044): n is a, c, t, g, unknown, or other
  misc_feature (1029)..(1029): n is a, c, t, g, unknown, or other
ataacctcgcgcacacagcccagcacaagcacgcagcagccctccagctccagccaagcaaagcacaggggtccattgcactgcattgtattgcagcatttctctgcttcgcttcgcttgcttcaggaaagcttgagctagctcgaagtagaaggacaagacagcaaagtcacgcaccatgagaaccatcggggcgaggaacacgcacgactcgctctccttctccaggcgccacttcaagtngcccgtcctcggcaagagcaagagccacggcgccgcgacgttcggggacgaggagtacatgaagagctcggaggcggaggacgacgacgagacgaccatggccttctcctccgcctgcccgtccttccactccgatggcttcgtgtcccctccgctgaagccggcgccgtcggnccagcagcagcaggtggcggcggcggcggcggggcagaggaggaggatgaaggtccggactgccgtgtcgcgcctgcgctcggcgctggccaacgccgtggccgggcggcaccgacaggtgggcatgggcgcgcggctcaccggcacgctctacggccaccggcgcggccacgtgcacctggcgttccaggtggacccgcgcgcgtgcccggcgctgctgctggagctggcggcgcccacggcggcgctggtgcgggagatggcctcgggcctggtgcgcatcgcgctggagtgcgaccgcgccagggccagggggtcgcccgccgccgcgctgccgtccccgtccccgggcgccggcaagaggctggtggaggagacggtgtggcgcgcctactgcaacggcaagagctgcgggtacgcggtgcggcgcgagtgcggcgccgcggactggcgcgtgctccgcgcgctcgagcccgtgtccatgggcgccggagtcatccccgccgccagctgcggcggcggcgagggcgacgtcatgtacatgcgcgcgcggttcgagcgcgtcgtggggtctcgcgactcggaggccttctacatgatgaatccggacgncancgncgncgnagncggtcatgtcgggcccgagctcagcgtctacctcctcagagtctgatcggctcggccgccatggcagtggcagtgacatctgcacctcggccctgatcgtttttttctgtgcatgccaagctgtgaaaatggattagtaggcncctaggtgtagctgttagcacttctagggggtgtttgataaagtggctaagtccctaggttcacatcgaatgtttgatgctagattaaagtattaaatatattttaagtataaaaaataattaaatagataagaactgaacggcaacacaaacctattagcctaattagttcgtgatctgcctatacgatggtncaataaacatctgctaatcacgaattaattaggtttaataaattatgtcgctgtttagtcatcatctttgt

SEQ ID NO: 25725 - protein, 303 aa, Zea mays subsp. mays
  peptide (1)..(303): Ceres Seq. ID no. 12404820
  misc_feature (125)..(303): Pfam Name: Pfam Description:  Protein of unknown function, DUF617
  misc_feature (1)..(303): NCBI GI NO: 34911646 NR Description: P0039G05.26
  misc_feature (78)..(303): NCBI GI NO: 15237221 NR Description: putative protein; protein id: At5g23100.1
  misc_feature (121)..(303): NCBI GI NO: 11994755 NR Description: gb|AAB84348
  misc_feature (121)..(303): NCBI GI NO: 15230862 NR Description: hypothetical protein; protein id: At3g25640.1
  misc_feature (103)..(303): NCBI GI NO: 18405770 NR Description: expressed protein; protein id: At2g41660
  misc_feature (103)..(303): NCBI GI NO: 21593037 NR Description: unknown [Arabidopsis thaliana]
  misc_feature (125)..(302): NCBI GI NO: 34903148 NR Description: unnamed protein product
  misc_feature (53)..(303): NCBI GI NO: 15240220 NR Description: putative protein; protein id: At5g06990.1
  misc_feature (77)..(303): NCBI GI NO: 34909066 NR Description: P0702B09.30
  misc_feature (124)..(303): NCBI GI NO: 15235158 NR Description: putative protein; protein id: At4g39610
  misc_feature (22)..(22): Xaa is any aa, unknown or other
  misc_feature (80)..(80): Xaa is any aa, unknown or other
  misc_feature (284)..(284): Xaa is any aa, unknown or other
  misc_feature (285)..(285): Xaa is any aa, unknown or other
  misc_feature (286)..(286): Xaa is any aa, unknown or other
  misc_feature (287)..(287): Xaa is any aa, unknown or other
  misc_feature (288)..(288): Xaa is any aa, unknown or other
  misc_feature (289)..(289): Xaa is any aa, unknown or other
MRTIGARNTHDSLSFSRRHFKXPVLGKSKSHGAATFGDEEYMKSSEAEDDDETTMAFSSACPSFHSDGFVSPPLKPAPSXQQQQVAAAAAGQRRRMKVRTAVSRLRSALANAVAGRHRQVGMGARLTGTLYGHRRGHVHLAFQVDPRACPALLLELAAPTAALVREMASGLVRIALECDRARARGSPAAALPSPSPGAGKRLVEETVWRAYCNGKSCGYAVRRECGAADWRVLRALEPVSMGAGVIPAASCGGGEGDVMYMRARFERVVGSRDSEAFYMMNPDXXXXXXGHVGPELSVYLLRV

SEQ ID NO: 25726 - protein, 262 aa, Zea mays subsp. mays
  peptide (1)..(262): Ceres Seq. ID no. 12404821
  misc_feature (84)..(262): Pfam Name: Pfam Description:  Protein of unknown function, DUF617
  misc_feature (1)..(262): NCBI GI NO: 34911646 NR Description: P0039G05.26
  misc_feature (37)..(262): NCBI GI NO: 15237221 NR Description: putative protein; protein id: At5g23100.1
  misc_feature (80)..(262): NCBI GI NO: 11994755 NR Description: gb|AAB84348
  misc_feature (80)..(262): NCBI GI NO: 15230862 NR Description: hypothetical protein; protein id: At3g25640.1
  misc_feature (62)..(262): NCBI GI NO: 18405770 NR Description: expressed protein; protein id: At2g41660
  misc_feature (62)..(262): NCBI GI NO: 21593037 NR Description: unknown [Arabidopsis thaliana]
  misc_feature (84)..(261): NCBI GI NO: 34903148 NR Description: unnamed protein product
  misc_feature (12)..(262): NCBI GI NO: 15240220 NR Description: putative protein; protein id: At5g06990.1
  misc_feature (36)..(262): NCBI GI NO: 34909066 NR Description: P0702B09.30
  misc_feature (83)..(262): NCBI GI NO: 15235158 NR Description: putative protein; protein id: At4g39610
  misc_feature (39)..(39): Xaa is any aa, unknown or other
  misc_feature (243)..(243): Xaa is any aa, unknown or other
  misc_feature (244)..(244): Xaa is any aa, unknown or other
  misc_feature (245)..(245): Xaa is any aa, unknown or other
  misc_feature (246)..(246): Xaa is any aa, unknown or other
  misc_feature (247)..(247): Xaa is any aa, unknown or other
  misc_feature (248)..(248): Xaa is any aa, unknown or other
MKSSEAEDDDETTMAFSSACPSFHSDGFVSPPLKPAPSXQQQQVAAAAAGQRRRMKVRTAVSRLRSALANAVAGRHRQVGMGARLTGTLYGHRRGHVHLAFQVDPRACPALLLELAAPTAALVREMASGLVRIALECDRARARGSPAAALPSPSPGAGKRLVEETVWRAYCNGKSCGYAVRRECGAADWRVLRALEPVSMGAGVIPAASCGGGEGDVMYMRARFERVVGSRDSEAFYMMNPDXXXXXXGHVGPELSVYLLRV

SEQ ID NO: 25727 - protein, 249 aa, Zea mays subsp. mays
  peptide (1)..(249): Ceres Seq. ID no. 12404822
  misc_feature (71)..(249): Pfam Name: Pfam Description:  Protein of unknown function, DUF617
  misc_feature (1)..(249): NCBI GI NO: 34911646 NR Description: P0039G05.26
  misc_feature (24)..(249): NCBI GI NO: 15237221 NR Description: putative protein; protein id: At5g23100.1
  misc_feature (67)..(249): NCBI GI NO: 11994755 NR Description: gb|AAB84348
  misc_feature (67)..(249): NCBI GI NO: 15230862 NR Description: hypothetical protein; protein id: At3g25640.1
  misc_feature (49)..(249): NCBI GI NO: 18405770 NR Description: expressed protein; protein id: At2g41660
  misc_feature (49)..(249): NCBI GI NO: 21593037 NR Description: unknown [Arabidopsis thaliana]
  misc_feature (71)..(248): NCBI GI NO: 34903148 NR Description: unnamed protein product
  misc_feature (1)..(249): NCBI GI NO: 15240220 NR Description: putative protein; protein id: At5g06990.1
  misc_feature (23)..(249): NCBI GI NO: 34909066 NR Description: P0702B09.30
  misc_feature (70)..(249): NCBI GI NO: 15235158 NR Description: putative protein; protein id: At4g39610
  misc_feature (26)..(26): Xaa is any aa, unknown or other
  misc_feature (230)..(230): Xaa is any aa, unknown or other
  misc_feature (231)..(231): Xaa is any aa, unknown or other
  misc_feature (232)..(232): Xaa is any aa, unknown or other
  misc_feature (233)..(233): Xaa is any aa, unknown or other
  misc_feature (234)..(234): Xaa is any aa, unknown or other
  misc_feature (235)..(235): Xaa is any aa, unknown or other
MAFSSACPSFHSDGFVSPPLKPAPSXQQQQVAAAAAGQRRRMKVRTAVSRLRSALANAVAGRHRQVGMGARLTGTLYGHRRGHVHLAFQVDPRACPALLLELAAPTAALVREMASGLVRIALECDRARARGSPAAALPSPSPGAGKRLVEETVWRAYCNGKSCGYAVRRECGAADWRVLRALEPVSMGAGVIPAASCGGGEGDVMYMRARFERVVGSRDSEAFYMMNPDXXXXXXGHVGPELSVYLLRV

SEQ ID NO: 25728 - DNA, 1133 bp, Zea mays subsp. mays
  misc_feature (1)..(1133): Ceres Seq. ID no. 12409997
acacggcgtctttgggtgagcacaccgcgcagcaacgagaggggcaaacaagcttgctactgtgatttctcgtccgagcagcggcggaggagagagagagagcatggccgaccacaaggaggagcctgtgccggagtctgtgatggacaagatcaccgagaagttccacggcggggactcgtcgtcgtcgtcgtctgactcggacgacgagaagaaggggtcctcgttggcgtcggcggcggaagccatgaaggccaagatctaccgccttttcggccgggagaggcccgtccactccgtcctcggcggcggcaagcctgccgatcttatcctatggaggaacaggaagatctctggcggggtacttgctggtgccacggccatctggctcctattcgaggtcatggagtaccatctcctcaccttggtgtgccactgtctcatcctctcgctggccatcctcttcctgtggtccaatgcctccactttcatcaacaagtccccaccgaacattcctgaggtcaaaatccctgaggatgtggctgttaatgttgccctgtcactgagatatgagatcaacaggggctttgctaccttaagggagattgggcatggccgtgatctgaagaaattcctaattgttattgcaggtctctggcttctttcagttctcgggagctgctgcaacttcctgacactgttctatattgtctttgtggcactgtacactgtaccagttctgtatgagaaatatgaggacaaggttgatgcttttggtgagaaggctatgactgaactgaagaagtattatgccattttcgatgagaagtgcctatcgaagattccaaagggcccccttaaggataagaagcactagattggtagtaaggtatttgctatgaatcaacatctacattatgtcactagctgtcacctctttctctgaaggatggtgcttggtcctggtctctagttgatagtatataatctgtatgggcaactttggtgtgactgacagtctgctgaaaactgttgatcttgtttttgggtttcagctttcaccatagttgcctggaagcttgaaatatattatgcgctctatcaatgtcatgtgaactttgtcatgtaccttc

SEQ ID NO: 25729 - protein, 257 aa, Zea mays subsp. mays
  peptide (1)..(257): Ceres Seq. ID no. 12409998
  misc_feature (1)..(257): NCBI GI NO: 34909318 NR Description: OSJNBb0021A09.5
  misc_feature (11)..(256): NCBI GI NO: 15236556 NR Description: putative protein; protein id: At4g23630
  misc_feature (1)..(257): NCBI GI NO: 34904202 NR Description: P0492F05.25
  misc_feature (11)..(256): NCBI GI NO: 15237093 NR Description: putative protein; protein id: At4g11220
  misc_feature (3)..(256): NCBI GI NO: 15238125 NR Description: putative protein; protein id: At5g41600
  misc_feature (3)..(250): NCBI GI NO: 15222616 NR Description: hypothetical protein; protein id: At1g64090
  misc_feature (1)..(255): NCBI GI NO: 18406991 NR Description: expressed protein; protein id: At2g46170
  misc_feature (8)..(248): NCBI GI NO: 15234108 NR Description: hypothetical protein; protein id: At4g01230.1
  misc_feature (15)..(256): NCBI GI NO: 34897094 NR Description: unknown protein
  misc_feature (24)..(256): NCBI GI NO: 18398810 NR Description: expressed protein; protein id: At3g10260
MADHKEEPVPESVMDKITEKFHGGDSSSSSSDSDDEKKGSSLASAAEAMKAKIYRLFGRERPVHSVLGGGKPADLILWRNRKISGGVLAGATAIWLLFEVMEYHLLTLVCHCLILSLAILFLWSNASTFINKSPPNIPEVKIPEDVAVNVALSLRYEINRGFATLREIGHGRDLKKFLIVIAGLWLLSVLGSCCNFLTLFYIVFVALYTVPVLYEKYEDKVDAFGEKAMTELKKYYAIFDEKCLSKIPKGPLKDKKH

SEQ ID NO: 25730 - protein, 244 aa, Zea mays subsp. mays
  peptide (1)..(244): Ceres Seq. ID no. 12409999
  misc_feature (1)..(244): NCBI GI NO: 34909318 NR Description: OSJNBb0021A09.5
  misc_feature (1)..(243): NCBI GI NO: 15236556 NR Description: putative protein; protein id: At4g23630
  misc_feature (1)..(244): NCBI GI NO: 34904202 NR Description: P0492F05.25
  misc_feature (1)..(243): NCBI GI NO: 15237093 NR Description: putative protein; protein id: At4g11220
  misc_feature (1)..(243): NCBI GI NO: 15238125 NR Description: putative protein; protein id: At5g41600
  misc_feature (1)..(237): NCBI GI NO: 15222616 NR Description: hypothetical protein; protein id: At1g64090
  misc_feature (1)..(242): NCBI GI NO: 18406991 NR Description: expressed protein; protein id: At2g46170
  misc_feature (1)..(235): NCBI GI NO: 15234108 NR Description: hypothetical protein; protein id: At4g01230.1
  misc_feature (2)..(243): NCBI GI NO: 34897094 NR Description: unknown protein
  misc_feature (11)..(243): NCBI GI NO: 18398810 NR Description: expressed protein; protein id: At3g10260
MDKITEKFHGGDSSSSSSDSDDEKKGSSLASAAEAMKAKIYRLFGRERPVHSVLGGGKPADLILWRNRKISGGVLAGATAIWLLFEVMEYHLLTLVCHCLILSLAILFLWSNASTFINKSPPNIPEVKIPEDVAVNVALSLRYEINRGFATLREIGHGRDLKKFLIVIAGLWLLSVLGSCCNFLTLFYIVFVALYTVPVLYEKYEDKVDAFGEKAMTELKKYYAIFDEKCLSKIPKGPLKDKKH

SEQ ID NO: 25731 - protein, 209 aa, Zea mays subsp. mays
  peptide (1)..(209): Ceres Seq. ID no. 12410000
  misc_feature (1)..(209): NCBI GI NO: 34909318 NR Description: OSJNBb0021A09.5
  misc_feature (1)..(208): NCBI GI NO: 15236556 NR Description: putative protein; protein id: At4g23630
  misc_feature (1)..(209): NCBI GI NO: 34904202 NR Description: P0492F05.25
  misc_feature (1)..(208): NCBI GI NO: 15237093 NR Description: putative protein; protein id: At4g11220
  misc_feature (1)..(208): NCBI GI NO: 15238125 NR Description: putative protein; protein id: At5g41600
  misc_feature (1)..(202): NCBI GI NO: 15222616 NR Description: hypothetical protein; protein id: At1g64090
  misc_feature (1)..(207): NCBI GI NO: 18406991 NR Description: expressed protein; protein id: At2g46170
  misc_feature (1)..(200): NCBI GI NO: 15234108 NR Description: hypothetical protein; protein id: At4g01230.1
  misc_feature (1)..(208): NCBI GI NO: 34897094 NR Description: unknown protein
  misc_feature (1)..(208): NCBI GI NO: 18398810 NR Description: expressed protein; protein id: At3g10260
MKAKIYRLFGRERPVHSVLGGGKPADLILWRNRKISGGVLAGATAIWLLFEVMEYHLLTLVCHCLILSLAILFLWSNASTFINKSPPNIPEVKIPEDVAVNVALSLRYEINRGFATLREIGHGRDLKKFLIVIAGLWLLSVLGSCCNFLTLFYIVFVALYTVPVLYEKYEDKVDAFGEKAMTELKKYYAIFDEKCLSKIPKGPLKDKKH

SEQ ID NO: 25732 - DNA, 1811 bp, Zea mays subsp. mays
  misc_feature (1)..(1811): Ceres Seq. ID no. 12423991
gcacgagaccattacctagaacatcctaatcgaaaaaatgacacgcgggcaccatatgccacctgccgtccctcgcccccaccggcaccgacccccgccttcttcaaaaactttattcgccgaaaccccttgccacctcgccgccaccgcccaacaaacaggcgcgacgacctctactctagcctcgtcgccaccgccgtcaccggtcaccgccgccatataagtaaacgctcgcctcgtcctcctcccagactcgccaccctccgcctccgacacatggcccagccgcacctcgtgctcccctcgccgaggcccctcctccccgccgccgccactccatcgcgccgcgccgtcgccgtccgcgcggcgctctccaccgcttcgccgcccgccaaggccgcggcgggagcggaggcggtgcggtcgatccgcgcgcgccagatcgtggacagccgcgggaaccccaccgtcgaggtcgacctcgtcgccggggacggacgcctccaccgctccgcggtgcccagcggggcgtccacggggatctacgaggcgctcgagctccgcgatggtgacaaggccgtgtacggcggcaagggcgttctccaagctgtgcgcaacatcaacgaggttatcgcgcctaagctcgtgggcgtcgatgtgaggaaccaaagtgatgttgatgcaatcatgctagacattgatggaactcagaacaaatccaagttgggtgccaatgctattctcggagtctccttgagtgtgtgtagggcaggcgctggcgcaaagggggttcctctgtataaacatattcaggagcttgcaggaattaaggagcctgtcatgcctgttcctgctttcaatgtaataaatggaggtagccatgctggcaacaatttggccatgcaggagttcatgcttttacctgttggagcagctacatttgctgaagctcttcgtatgggcagcgaagtttaccatgtcctgaagggcatcattaaggcaaaatatggtcaagatgcatgcaatgtcggagatgaaggaggttttgctcctaatgttcaagacaacagagagggtcttgtcttgcttatggatgccattgagaaggcaggctacactggaatgatcaaaattggaatggatgttgcggcatcagagttccttacaaaggatgggaactatgatctaaactttaagaatcagcctaatgatggagtccatgttctttcagcccagcatctgggtgatctgtacagagattttgtcaaggatttccctattgtatcaattgaggacccttttgatcaggatgactggagttcatgggcatcattgcagtcctcagttggtatccaaattgtgggtgatgatttacttgtcacaaacccaaaacgaattgcagacgctattgacaggaaggcttgcaatgctcttttactaaaggtcaaccagattggtactgtcactgaatcaattcaagctgccctggattcaaaagctgctggttggggtgtgatggtcagccacagaagtggtgaaaccgaagacaacttcatcgcagatttggctgttggcttagcaagtgggcagattaaaactggggctccatgccgcagcgagaggctggccaaatacaatcagcttctgcggattgaagaggggcttggcaacgtgcgctatgcaggggaggcattcaggtctccataagaaatagactttaaatcaccgcgcgtgtgtgagaaagtgccagctttatatggacaagactattcagagaggataatgaatgagagctaataatttttttacac

SEQ ID NO: 25733 - protein, 568 aa, Zea mays subsp. mays
  peptide (1)..(568): Ceres Seq. ID no. 12423992
  misc_feature (278)..(568): Pfam Name: Pfam Description:  Enolase, C-terminal TIM barrel domain
  misc_feature (140)..(568): NCBI GI NO: 15221107 NR Description: putative enolase; protein id: At1g74030
  misc_feature (139)..(568): NCBI GI NO: 1169533 NR Description: Enolase
  misc_feature (140)..(568): NCBI GI NO: 119354 NR Description: Enolase
  misc_feature (140)..(568): NCBI GI NO: 17536383 NR Description: Enolase (46.6 kD) [Caenorhabditis elegans]
  misc_feature (140)..(568): NCBI GI NO: 21392248 NR Description: SD23356p [Drosophila melanogaster]
  misc_feature (140)..(568): NCBI GI NO: 24580914 NR Description: Enolase CG17654-PB
  misc_feature (140)..(568): NCBI GI NO: 8919731 NR Description: enolase [Spinacia oleracea]
  misc_feature (140)..(568): NCBI GI NO: 119351 NR Description: Enolase
  misc_feature (139)..(568): NCBI GI NO: 105934 NR Description: phosphopyruvate hydratase (EC 4
  misc_feature (137)..(568): NCBI GI NO: 1169534 NR Description: Enolase
ARDHYLEHPNRKNDTRAPYATCRPSPPPAPTPAFFKNFIRRNPLPPRRHRPTNRRDDLYSSLVATAVTGHRRHISKRSPRPPPRLATLRLRHMAQPHLVLPSPRPLLPAAATPSRRAVAVRAALSTASPPAKAAAGAEAVRSIRARQIVDSRGNPTVEVDLVAGDGRLHRSAVPSGASTGIYEALELRDGDKAVYGGKGVLQAVRNINEVIAPKLVGVDVRNQSDVDAIMLDIDGTQNKSKLGANAILGVSLSVCRAGAGAKGVPLYKHIQELAGIKEPVMPVPAFNVINGGSHAGNNLAMQEFMLLPVGAATFAEALRMGSEVYHVLKGIIKAKYGQDACNVGDEGGFAPNVQDNREGLVLLMDAIEKAGYTGMIKIGMDVAASEFLTKDGNYDLNFKNQPNDGVHVLSAQHLGDLYRDFVKDFPIVSIEDPFDQDDWSSWASLQSSVGIQIVGDDLLVTNPKRIADAIDRKACNALLLKVNQIGTVTESIQAALDSKAAGWGVMVSHRSGETEDNFIADLAVGLASGQIKTGAPCRSERLAKYNQLLRIEEGLGNVRYAGEAFRSP

SEQ ID NO: 25734 - protein, 476 aa, Zea mays subsp. mays
  peptide (1)..(476): Ceres Seq. ID no. 12423993
  misc_feature (186)..(476): Pfam Name: Pfam Description:  Enolase, C-terminal TIM barrel domain
  misc_feature (48)..(476): NCBI GI NO: 15221107 NR Description: putative enolase; protein id: At1g74030
  misc_feature (47)..(476): NCBI GI NO: 1169533 NR Description: Enolase
  misc_feature (48)..(476): NCBI GI NO: 119354 NR Description: Enolase
  misc_feature (48)..(476): NCBI GI NO: 17536383 NR Description: Enolase (46.6 kD) [Caenorhabditis elegans]
  misc_feature (48)..(476): NCBI GI NO: 21392248 NR Description: SD23356p [Drosophila melanogaster]
  misc_feature (48)..(476): NCBI GI NO: 24580914 NR Description: Enolase CG17654-PB
  misc_feature (48)..(476): NCBI GI NO: 8919731 NR Description: enolase [Spinacia oleracea]
  misc_feature (48)..(476): NCBI GI NO: 119351 NR Description: Enolase
  misc_feature (47)..(476): NCBI GI NO: 105934 NR Description: phosphopyruvate hydratase (EC 4
  misc_feature (45)..(476): NCBI GI NO: 1169534 NR Description: Enolase
MAQPHLVLPSPRPLLPAAATPSRRAVAVRAALSTASPPAKAAAGAEAVRSIRARQIVDSRGNPTVEVDLVAGDGRLHRSAVPSGASTGIYEALELRDGDKAVYGGKGVLQAVRNINEVIAPKLVGVDVRNQSDVDAIMLDIDGTQNKSKLGANAILGVSLSVCRAGAGAKGVPLYKHIQELAGIKEPVMPVPAFNVINGGSHAGNNLAMQEFMLLPVGAATFAEALRMGSEVYHVLKGIIKAKYGQDACNVGDEGGFAPNVQDNREGLVLLMDAIEKAGYTGMIKIGMDVAASEFLTKDGNYDLNFKNQPNDGVHVLSAQHLGDLYRDFVKDFPIVSIEDPFDQDDWSSWASLQSSVGIQIVGDDLLVTNPKRIADAIDRKACNALLLKVNQIGTVTESIQAALDSKAAGWGVMVSHRSGETEDNFIADLAVGLASGQIKTGAPCRSERLAKYNQLLRIEEGLGNVRYAGEAFRSP

SEQ ID NO: 25735 - protein, 339 aa, Zea mays subsp. mays
  peptide (1)..(339): Ceres Seq. ID no. 12423994
  misc_feature (49)..(339): Pfam Name: Pfam Description:  Enolase, C-terminal TIM barrel domain
  misc_feature (1)..(339): NCBI GI NO: 15221107 NR Description: putative enolase; protein id: At1g74030
  misc_feature (1)..(339): NCBI GI NO: 1169533 NR Description: Enolase
  misc_feature (1)..(339): NCBI GI NO: 119354 NR Description: Enolase
  misc_feature (1)..(339): NCBI GI NO: 17536383 NR Description: Enolase (46.6 kD) [Caenorhabditis elegans]
  misc_feature (1)..(339): NCBI GI NO: 21392248 NR Description: SD23356p [Drosophila melanogaster]
  misc_feature (1)..(339): NCBI GI NO: 24580914 NR Description: Enolase CG17654-PB
  misc_feature (1)..(339): NCBI GI NO: 8919731 NR Description: enolase [Spinacia oleracea]
  misc_feature (1)..(339): NCBI GI NO: 119351 NR Description: Enolase
  misc_feature (1)..(339): NCBI GI NO: 105934 NR Description: phosphopyruvate hydratase (EC 4
  misc_feature (1)..(339): NCBI GI NO: 1169534 NR Description: Enolase
MLDIDGTQNKSKLGANAILGVSLSVCRAGAGAKGVPLYKHIQELAGIKEPVMPVPAFNVINGGSHAGNNLAMQEFMLLPVGAATFAEALRMGSEVYHVLKGIIKAKYGQDACNVGDEGGFAPNVQDNREGLVLLMDAIEKAGYTGMIKIGMDVAASEFLTKDGNYDLNFKNQPNDGVHVLSAQHLGDLYRDFVKDFPIVSIEDPFDQDDWSSWASLQSSVGIQIVGDDLLVTNPKRIADAIDRKACNALLLKVNQIGTVTESIQAALDSKAAGWGVMVSHRSGETEDNFIADLAVGLASGQIKTGAPCRSERLAKYNQLLRIEEGLGNVRYAGEAFRSP

SEQ ID NO: 25736 - DNA, 1191 bp, Zea mays subsp. mays
  misc_feature (1)..(1191): Ceres Seq. ID no. 12409992
attcattttttttcttttttggtattttccggacagtggagtggagggcgatagatagggcagcatggcggcaaccttctgcgctggacccgccgcatccgcgggcagtaaaccctagctccgccggctgccgaccccagaacctaactcgggctgccgtgctgtctgcttgctggcggcccagcaggccgactcccgctttcgtctccctccggcgccccaatgccgagctgcggccgctgcgcgtggccgccggctccggcgttgacccgaaggttgtcaacggggaagattttcctcccatgaaggacctaattcagctatacaggacagcttttctagaaggaaatgaggaggttcttggtgtagttgagaaggcaatcactgctgtggaaaaagagaagagtacgatagcttcccaatttgaaagtattacaaccgaaataacttctgggaaggaaaagtttattcgcttaaatgccgacctggagaatttccggaaacagactgaaaaggaccgtgcaaagttaacatcaaatatacgggtggaagttgttcagagtctgttacctctagttgatagttttgagaaaacgaatctagagaacaccccagagactgagaaggagcaaaagatcagcgcaagctatcaaggcatatacaagcagttagttgaaacactaagatatttgggtgtgggagttgtggaaacagttggcaagccatttgatccttcggtccatgaggccatctcacgagaagcatccatgcaattcaaggcagggattgtcatgcatgaagtccgcagagggttccatttgaaggagaggctgctaaggcctgctactgtgaaggtctctactggctctggcaaacaaagtgcaagctcataggcgggggacaaagatgctgctttgtgaatctgatcaaacgaccaacaggaactgataggcacacatttttctgttcataacatgccgaatgtgtttgatctcaaatgagacgggatcagctatgtatggtgttgacagggagcaccagcttgaagttttgctgttgcttgtaatctgctagaattttgtccaccagaagagagagaatgaaacattggacattcataccggatttatattgagttccttgctcacttcattggacatccataccggatttatattgacttccttgccc

SEQ ID NO: 25737 - protein, 296 aa, Zea mays subsp. mays
  peptide (1)..(296): Ceres Seq. ID no. 12409993
  misc_feature (132)..(286): Pfam Name: Pfam Description:  GrpE
  misc_feature (35)..(296): NCBI GI NO: 18400095 NR Description: putative heat shock protein; protein id:At1g36390
  misc_feature (35)..(296): NCBI GI NO: 21593629 NR Description: putative heat shock protein [Arabidopsis thaliana]
  misc_feature (104)..(296): NCBI GI NO: 18418410 NR Description: chloroplast GrpE protein; protein id: At5g17710
  misc_feature (104)..(296): NCBI GI NO: 30686476 NR Description: chloroplast GrpE protein [Arabidopsis thaliana]
  misc_feature (45)..(296): NCBI GI NO: 15384277 NR Description: co-chaperone CGE1 precursor isoform a
  misc_feature (120)..(296): NCBI GI NO: 15384279 NR Description: co-chaperone CGE1 precursor isoform b
  misc_feature (143)..(296): NCBI GI NO: 22298857 NR Description: heat shock protein
  misc_feature (116)..(296): NCBI GI NO: 33860576 NR Description: Heat shock protein GrpE
  misc_feature (124)..(296): NCBI GI NO: 33862294 NR Description: Heat shock protein GrpE
  misc_feature (110)..(286): NCBI GI NO: 17229937 NR Description: heat shock protein [Nostoc sp. PCC 7120]
SFFFFFGIFRTVEWRAIDRAAWRQPSALDPPHPRAVNPSSAGCRPQNLTRAAVLSACWRPSRPTPAFVSLRRPNAELRPLRVAAGSGVDPKVVNGEDFPPMKDLIQLYRTAFLEGNEEVLGVVEKAITAVEKEKSTIASQFESITTEITSGKEKFIRLNADLENFRKQTEKDRAKLTSNIRVEVVQSLLPLVDSFEKTNLENTPETEKEQKISASYQGIYKQLVETLRYLGVGVVETVGKPFDPSVHEAISREASMQFKAGIVMHEVRRGFHLKERLLRPATVKVSTGSGKQSASS

SEQ ID NO: 25738 - protein, 196 aa, Zea mays subsp. mays
  peptide (1)..(196): Ceres Seq. ID no. 12409994
  misc_feature (32)..(186): Pfam Name: Pfam Description:  GrpE
  misc_feature (1)..(196): NCBI GI NO: 18400095 NR Description: putative heat shock protein; protein id:At1g36390
  misc_feature (1)..(196): NCBI GI NO: 21593629 NR Description: putative heat shock protein [Arabidopsis thaliana]
  misc_feature (4)..(196): NCBI GI NO: 18418410 NR Description: chloroplast GrpE protein; protein id: At5g17710
  misc_feature (4)..(196): NCBI GI NO: 30686476 NR Description: chloroplast GrpE protein [Arabidopsis thaliana]
  misc_feature (1)..(196): NCBI GI NO: 15384277 NR Description: co-chaperone CGE1 precursor isoform a
  misc_feature (20)..(196): NCBI GI NO: 15384279 NR Description: co-chaperone CGE1 precursor isoform b
  misc_feature (43)..(196): NCBI GI NO: 22298857 NR Description: heat shock protein
  misc_feature (16)..(196): NCBI GI NO: 33860576 NR Description: Heat shock protein GrpE
  misc_feature (24)..(196): NCBI GI NO: 33862294 NR Description: Heat shock protein GrpE
  misc_feature (10)..(186): NCBI GI NO: 17229937 NR Description: heat shock protein [Nostoc sp. PCC 7120]
MKDLIQLYRTAFLEGNEEVLGVVEKAITAVEKEKSTIASQFESITTEITSGKEKFIRLNADLENFRKQTEKDRAKLTSNIRVEVVQSLLPLVDSFEKTNLENTPETEKEQKISASYQGIYKQLVETLRYLGVGVVETVGKPFDPSVHEAISREASMQFKAGIVMHEVRRGFHLKERLLRPATVKVSTGSGKQSASS

SEQ ID NO: 25739 - DNA, 1864 bp, Zea mays subsp. mays
  misc_feature (1)..(1864): Ceres Seq. ID no. 12405693
aaccacgcctcgaaatataaccccccgccacaccgtacgagacgagggcagatatggaagctgatgctgctgctgccagtggcggcctggccctgctgcccgccgtgctgctcctcgtggcgctctccaccctcgtcttctccacatggagcaaccgcaacagcaggctgcccccgaggcccgatggccctcccgctgatcggacacctgcacctcatccgcccgccgccgcacagggccttcgaccgcatcctggcacgctacgggccgctcgtctacctccgcctcgggccctccacgcactgcgtcgtcgcgggcaccgcggacgcgcgcgggacctcctcaagcacgaggccagcatcccggagcggccgctcacggccgtcacgcgccacctcgcctacgacgacgccggcttcgccttcgcgccctacggcccgcactggcgcttcatgaagcgcctctgcatgtcggagctgctgggcccgcggaccgtggaccagctgcgccccgtgcgggaggccgagctggcggccgtgctggaggcggcgcgccaggcggccgccgctcgggagcccatcgacgtcagccgccacctcatcagcatgtccaacaacgccatcatgcgcatggtggccagcgcgctgccgggccacatgacggaggcggccagggactgcgccaagcacgtcgccgagctcgtgggggccttcaacgtcgaggactacgtcggcctctgccgcggctgggacctgcaggggctcacgcggaggacgcgcgaggtgcgtgacaagttcgacgcgctgctggagatcatgatcacgggcaaggaggagagtcgccgtcgtcgccacgccaccaccgacaccggcggcggcaccaaggacctgctggacatcctcatggacgcggcggaggacgccaacgccgaggtcaggctcaccagggagaacatcaaggcgttcgtcctcgacatcttcacggccggctccgacaccaccgccaccagcgtggagtggatgctggcgctgctcatcaaccacccggcctgcatggacaagctgcgcgcggagctggacgccgtggtgggcgcgtcgcgcctggtcggggagcaggacgtcccgcgccttccctacctgcaggccgtcttcaaggagacgctgcggctgcagccccccgcggtgttcgctcagcgggagaccatcgagccggtccacgtccgcggctacgtcatcccgcccaagacctccgtcttcttcaacatcttctccatcggccgcgacccggggctgctgggaggacccgctccagttccggcccgagcgcttcatgcccggcggcgccggcgccggccgtggaccccaaggggcagcacatgcagctcatgccgtttggaagcggccgccgcgcctgccccggcatgggcctagccatgcaggccgtgccggccttcctcgccgcgctggtgcagtgcttccactgggaggtgcccatcccgccgggccaatccactgcgccgcccttgtacatggaggaggcagcggggctcgtcaccgcccggaagaaccatctcctcctcatccccacaccgcgcctcaatccgctaccggcaagagcggctacgtagttagtacctgcgaatccagtctcagttcatcggtccatccaaattcagacgtgtcctccattattgcaagccgcgcactaagatcatatttctgtttgtttatatttctcggtcacacatacgtttgcaatcaccttcaggaaaagtgacctttgtacccgttcgatgttggtacatccagatccgtgtgctcaggaattacgtattactactatatatatactggtccgtttgagt

SEQ ID NO: 25740 - protein, 458 aa, Zea mays subsp. mays
  peptide (1)..(458): Ceres Seq. ID no. 12405694
  misc_feature (93)..(411): Pfam Name: Pfam Description:  Cytochrome P450
  misc_feature (10)..(425): NCBI GI NO: 38344759 NR Description: OSJNBa0068L06.2
  misc_feature (93)..(425): NCBI GI NO: 5832707 NR Description: cytochrome P450 [Antirrhinum majus]
  misc_feature (93)..(411): NCBI GI NO: 5081817 NR Description: flavone synthase II [Gerbera hybrida]
  misc_feature (93)..(428): NCBI GI NO: 6118407 NR Description: flavone synthase II [Callistephus chinensis]
  misc_feature (18)..(411): NCBI GI NO: 3913192 NR Description: Cytochrome P450 93A1
  misc_feature (93)..(429): NCBI GI NO: 5832709 NR Description: cytochrome P450 [Torenia hybrida]
  misc_feature (93)..(425): NCBI GI NO: 4200046 NR Description: cytochrome P450 [Glycyrrhiza echinata]
  misc_feature (18)..(411): NCBI GI NO: 5915853 NR Description: Cytochrome P450 93A3 (P450 CP5)
  misc_feature (93)..(425): NCBI GI NO: 5915860 NR Description: Cytochrome P450 93B1
  misc_feature (18)..(411): NCBI GI NO: 5915852 NR Description: Cytochrome P450 93A2
MEADAAAASGGLALLPAVLLLVALSTLVFSTWSNRNSRLPPRPDGPPADRTPAPHPPAAAQGLRPHPGTLRAARLPPPRALHALRRRGHRGRARDLLKHEASIPERPLTAVTRHLAYDDAGFAFAPYGPHWRFMKRLCMSELLGPRTVDQLRPVREAELAAVLEAARQAAAAREPIDVSRHLISMSNNAIMRMVASALPGHMTEAARDCAKHVAELVGAFNVEDYVGLCRGWDLQGLTRRTREVRDKFDALLEIMITGKEESRRRRHATTDTGGGTKDLLDILMDAAEDANAEVRLTRENIKAFVLDIFTAGSDTTATSVEWMLALLINHPACMDKLRAELDAVVGASRLVGEQDVPRLPYLQAVFKETLRLQPPAVFAQRETIEPVHVRGYVIPPKTSVFFNIFSIGRDPGLLGGPAPVPARALHARRRRRRPWTPRGSTCSSCRLEAAAAPAPAWA

SEQ ID NO: 25741 - protein, 325 aa, Zea mays subsp. mays
  peptide (1)..(325): Ceres Seq. ID no. 12405695
  misc_feature (1)..(278): Pfam Name: Pfam Description:  Cytochrome P450
  misc_feature (1)..(292): NCBI GI NO: 38344759 NR Description: OSJNBa0068L06.2
  misc_feature (1)..(292): NCBI GI NO: 5832707 NR Description: cytochrome P450 [Antirrhinum majus]
  misc_feature (1)..(278): NCBI GI NO: 5081817 NR Description: flavone synthase II [Gerbera hybrida]
  misc_feature (1)..(295): NCBI GI NO: 6118407 NR Description: flavone synthase II [Callistephus chinensis]
  misc_feature (1)..(278): NCBI GI NO: 3913192 NR Description: Cytochrome P450 93A1
  misc_feature (1)..(296): NCBI GI NO: 5832709 NR Description: cytochrome P450 [Torenia hybrida]
  misc_feature (1)..(292): NCBI GI NO: 4200046 NR Description: cytochrome P450 [Glycyrrhiza echinata]
  misc_feature (1)..(278): NCBI GI NO: 5915853 NR Description: Cytochrome P450 93A3 (P450 CP5)
  misc_feature (1)..(292): NCBI GI NO: 5915860 NR Description: Cytochrome P450 93B1
  misc_feature (1)..(278): NCBI GI NO: 5915852 NR Description: Cytochrome P450 93A2
MKRLCMSELLGPRTVDQLRPVREAELAAVLEAARQAAAAREPIDVSRHLISMSNNAIMRMVASALPGHMTEAARDCAKHVAELVGAFNVEDYVGLCRGWDLQGLTRRTREVRDKFDALLEIMITGKEESRRRRHATTDTGGGTKDLLDILMDAAEDANAEVRLTRENIKAFVLDIFTAGSDTTATSVEWMLALLINHPACMDKLRAELDAVVGASRLVGEQDVPRLPYLQAVFKETLRLQPPAVFAQRETIEPVHVRGYVIPPKTSVFFNIFSIGRDPGLLGGPAPVPARALHARRRRRRPWTPRGSTCSSCRLEAAAAPAPAWA

SEQ ID NO: 25742 - protein, 320 aa, Zea mays subsp. mays
  peptide (1)..(320): Ceres Seq. ID no. 12405696
  misc_feature (1)..(273): Pfam Name: Pfam Description:  Cytochrome P450
  misc_feature (1)..(287): NCBI GI NO: 38344759 NR Description: OSJNBa0068L06.2
  misc_feature (1)..(287): NCBI GI NO: 5832707 NR Description: cytochrome P450 [Antirrhinum majus]
  misc_feature (1)..(273): NCBI GI NO: 5081817 NR Description: flavone synthase II [Gerbera hybrida]
  misc_feature (1)..(290): NCBI GI NO: 6118407 NR Description: flavone synthase II [Callistephus chinensis]
  misc_feature (1)..(273): NCBI GI NO: 3913192 NR Description: Cytochrome P450 93A1
  misc_feature (1)..(291): NCBI GI NO: 5832709 NR Description: cytochrome P450 [Torenia hybrida]
  misc_feature (1)..(287): NCBI GI NO: 4200046 NR Description: cytochrome P450 [Glycyrrhiza echinata]
  misc_feature (1)..(273): NCBI GI NO: 5915853 NR Description: Cytochrome P450 93A3 (P450 CP5)
  misc_feature (1)..(287): NCBI GI NO: 5915860 NR Description: Cytochrome P450 93B1
  misc_feature (1)..(273): NCBI GI NO: 5915852 NR Description: Cytochrome P450 93A2
MSELLGPRTVDQLRPVREAELAAVLEAARQAAAAREPIDVSRHLISMSNNAIMRMVASALPGHMTEAARDCAKHVAELVGAFNVEDYVGLCRGWDLQGLTRRTREVRDKFDALLEIMITGKEESRRRRHATTDTGGGTKDLLDILMDAAEDANAEVRLTRENIKAFVLDIFTAGSDTTATSVEWMLALLINHPACMDKLRAELDAVVGASRLVGEQDVPRLPYLQAVFKETLRLQPPAVFAQRETIEPVHVRGYVIPPKTSVFFNIFSIGRDPGLLGGPAPVPARALHARRRRRRPWTPRGSTCSSCRLEAAAAPAPAWA

SEQ ID NO: 25743 - DNA, 1723 bp, Zea mays subsp. mays
  misc_feature (1)..(1723): Ceres Seq. ID no. 12376740
gcacgagaccattacctagaacatcctaatcgaaaaatcgtctgcaactgcatcgctcgctctctcctttcactgggaacatctatcagctcgcgctcattggccatctttggcttccatggagaggctcattgccggcctacttggcttcctattggttgcatcggtaggaagccatgcagctcgtgctccggatcagtactggaagtctgctcttcccaacactcccatgccgacctccctctcccaactcctcgacgccgctccagccggcggcggcacgaccgtcaacgtcggctggggcggtgtttcacgtcgatgctgggcacggtaagcccgggggtacgacggttgacgtaggcaagggcggcgtcggcgtcaacgttaaccctggcaggagcggcaagcccggcggcacgacggttggcgtcgggaagggcggagtcggcgttaacgtcaacccgggatacggaaagcccggcggcaccaccgttggcgtcggaaagggtggcgttggcgttaacgtcaaccccggcaagcccggtggcacaacggtcggcgtcggcaagggcggagtgggcgtcaacgtcaatcccggcaaaccggccggtggtgccggtacaaccgttggcgttggcaaaggcggcgtgggcgtgggcgtcaatcccgggcacggcaagccgggcggcaccacggtcggcgttggcaagggcggggttggcgttcacgtgaacccgggaaagaagcccgtccacgtcaacgtctcccctttcatctacacgtacgccgcgtcggagacgcagctgcacgacgaccccagcgtggcgctcttcttccaggagacggacctccggcccggtaagaagatgaccgtccagttcgccagcaccgggacgaccggcaccaagttcctcccgcggagcgaggccgaggccatcccgttctcctcacagaaggtgcccgagatcctcgcccgcctctcggtggacccggactccgtcgaggcggcggagatggcgcagacgctgcgcgactgcgaggcgcccgcggccaagggcgagaagaaggcgtgcgccacgtcgctggagtccatggtggacttcgccaccgccagcctcgggaccaggcacgtgagggccgtgtcgaccgtcgtggcgaaggagggatcgccgaagcaggagtacacggtgaccggcgtggagcgcgctgccggcggcaccgacgacgacggccgggtcgtggcctgccacgcggagccgtacgcgtacgccgtgttcgcgtgccacctgacgccgcagacgcgggcgtactctgtgtcgatgctcggcagggacggcacggccgtggacgctgtcgcggtgtgccacgccgacacgtccggctggaaccccaagcacgtcgccttccaggtgctcaacgtgaagcccggcaccgtgccggtctgccacttcctgccgcaggaccacgtcgtctggacccgcagcggctgagtctgctggatggccgccgtttgctcgcgtcgcgccgcctggagtgatttgttatgttccagtggcctctaggcatactgtcatattattattataccgaggtatcacgagtttgcttatgtttccagtacttgatgcttgtatggatatggtgtagccagctcagcaagtatcaacccacctgcttaattctgttgtatagttttaaataaacagacaacctctttatgggc

SEQ ID NO: 25744 - protein, 437 aa, Zea mays subsp. mays
  peptide (1)..(437): Ceres Seq. ID no. 12376741
  misc_feature (48)..(183): Pfam Name: Pfam Description:  Dehydrin
  misc_feature (55)..(437): NCBI GI NO: 34910186 NR Description: putative dehydration-responsive protein RD22precursor
  misc_feature (124)..(433): NCBI GI NO: 14422444 NR Description: BURP domain-containing protein
  misc_feature (104)..(433): NCBI GI NO: 15239478 NR Description: dehydration-induced protein RD22
  misc_feature (124)..(433): NCBI GI NO: 16588826 NR Description: dehydration-responsive protein RD22
  misc_feature (149)..(433): NCBI GI NO: 18447761 NR Description: dehydration-induced protein RD22-like protein
  misc_feature (149)..(433): NCBI GI NO: 33578034 NR Description: BURP domain-containing protein
  misc_feature (148)..(433): NCBI GI NO: 14422446 NR Description: BURP domain-containing protein
  misc_feature (171)..(433): NCBI GI NO: 14422448 NR Description: BURP domain-containing protein
  misc_feature (165)..(437): NCBI GI NO: 38344535 NR Description: OSJNBa0036B17.11
  misc_feature (182)..(433): NCBI GI NO: 14422442 NR Description: BURP domain-containing protein
MQLVLRISTGSLLFPTLPCRPPSPNSSTPLQPAAARPSTSAGAVFHVDAGHGKPGGTTVDVGKGGVGVNVNPGRSGKPGGTTVGVGKGGVGVNVNPGYGKPGGTTVGVGKGGVGVNVNPGKPGGTTVGVGKGGVGVNVNPGKPAGGAGTTVGVGKGGVGVGVNPGHGKPGGTTVGVGKGGVGVHVNPGKKPVHVNVSPFIYTYAASETQLHDDPSVALFFQETDLRPGKKMTVQFASTGTTGTKFLPRSEAEAIPFSSQKVPEILARLSVDPDSVEAAEMAQTLRDCEAPAAKGEKKACATSLESMVDFATASLGTRHVRAVSTVVAKEGSPKQEYTVTGVERAAGGTDDDGRVVACHAEPYAYAVFACHLTPQTRAYSVSMLGRDGTAVDAVAVCHADTSGWNPKHVAFQVLNVKPGTVPVCHFLPQDHVVWTRSG

SEQ ID NO: 25745 - DNA, 1384 bp, Zea mays subsp. mays
  misc_feature (1)..(1384): Ceres Seq. ID no. 15180114
caaagatgtctctgtaaacaaaccagataaccttgcttcagcatcaaacaacattcatcccaagcttgtgatcctccacatgaacatggccctctatgtatatgatgatataatgaggatgactgaaaatttgagcgaaaaatacattattggttatggagcctcaagtacagtctacagatgcgacctgaagaactgcaagccaattgcgattaaaaagctgtatgctcactaccctcagagcttgaaggaattcgagactgaacttgagactgttggaagcatcaaacaccggaatcttgtaagccttcaggggtactccctgtcaccatctgggaatctcctcttctatgattacatggaaaatggcagcctctgggacattttacatgcagcttcatcgaagaaaaagaaactcgattgggaggctcgtctcaagattgctctcggtgctgctcaaggcctggcttatcttcaccatgagtgcagtccacgaataatccacagggatgtgaaatcaaagaatatcctcctagacaaagactacgaggctcatcttgctgactttggtattgccaagagtttgtgtgtgtcgaagacgcacacatcaacgtacgtgatgggcaccattggctacattgaccctgagtatgcacggacatcccggatcaacgagaaatcggatgtgtacagctacggcattgtcttgctggagttgcttaccggcaaaaagcctgtcgacgacgagtgcaaccttcaccacttgatcctatccaaagccgcagagaacacggtcatggagacggtcgaccaggacatcaccgacacgtgcaaggacctcggcgaggtcaagaaggtgttccagctggcgctcctttgcagcaagaggcagccgtcggatcgaccgaccatgcacgaggtcgcgcgcgtcctggacagcctcgtctgcccagcaggcccgccgccgaagcaggcgcaggcacaggcacaggcacaggcgtcggataagccgtccaccacggcgccgagctatgtcagcgagtacgtcggcctacgaggcggcggcggcggcagcgccctctcctgcaccaactcgtcgagcgcgtccgacgccgagctcttcatgaagtttggcgaggtgatctcgcggagcacggaatagtccaatagatcgacgatcattttgtgttacagtttacaataggtgtctggccggcgccctgtgatgtgactcgctgtaaatatgccgctgccttctcgttgggactccactaggcactagtagctatttttctccgttatgcacgtctctctctctctttttttgctgggaaactcgaactgtaactaaaggaacggatttatgtgcaggctgtgtttactc

SEQ ID NO: 25746 - protein, 386 aa, Zea mays subsp. mays
  peptide (1)..(386): Ceres Seq. ID no. 15180115
  misc_feature (1)..(386): NCBI GI NO: 18390097 NR Description: putative receptor protein kinase [Sorghum bicolor]
  misc_feature (20)..(386): NCBI GI NO: 15225286 NR Description: receptor-related protein kinase, ERECTA
  misc_feature (6)..(385): NCBI GI NO: 34898088 NR Description: ESTs C22657
  misc_feature (21)..(315): NCBI GI NO: 15241760 NR Description: expressed protein [Arabidopsis thaliana]
  misc_feature (21)..(348): NCBI GI NO: 15240720 NR Description: receptor-related protein kinase
  misc_feature (21)..(315): NCBI GI NO: 8809636 NR Description: receptor-like protein kinase
  misc_feature (6)..(315): NCBI GI NO: 28140043 NR Description: receptor-like protein kinase [Elaeis guineensis]
  misc_feature (38)..(315): NCBI GI NO: 26451159 NR Description: unknown protein [Arabidopsis thaliana]
  misc_feature (21)..(315): NCBI GI NO: 10177448 NR Description: receptor-like protein kinase
  misc_feature (21)..(315): NCBI GI NO: 30697726 NR Description: leucine rich repeat protein family
KDVSVNKPDNLASASNNIHPKLVILHMNMALYVYDDIMRMTENLSEKYIIGYGASSTVYRCDLKNCKPIAIKKLYAHYPQSLKEFETELETVGSIKHRNLVSLQGYSLSPSGNLLFYDYMENGSLWDILHAASSKKKKLDWEARLKIALGAAQGLAYLHHECSPRIIHRDVKSKNILLDKDYEAHLADFGIAKSLCVSKTHTSTYVMGTIGYIDPEYARTSRINEKSDVYSYGIVLLELLTGKKPVDDECNLHHLILSKAAENTVMETVDQDITDTCKDLGEVKKVFQLALLCSKRQPSDRPTMHEVARVLDSLVCPAGPPPKQAQAQAQAQASDKPSTTAPSYVSEYVGLRGGGGGSALSCTNSSSASDAELFMKFGEVISRSTE

SEQ ID NO: 25747 - protein, 360 aa, Zea mays subsp. mays
  peptide (1)..(360): Ceres Seq. ID no. 15180116
  misc_feature (1)..(360): NCBI GI NO: 18390097 NR Description: putative receptor protein kinase [Sorghum bicolor]
  misc_feature (1)..(360): NCBI GI NO: 15225286 NR Description: receptor-related protein kinase, ERECTA
  misc_feature (1)..(359): NCBI GI NO: 34898088 NR Description: ESTs C22657
  misc_feature (1)..(289): NCBI GI NO: 15241760 NR Description: expressed protein [Arabidopsis thaliana]
  misc_feature (1)..(322): NCBI GI NO: 15240720 NR Description: receptor-related protein kinase
  misc_feature (1)..(289): NCBI GI NO: 8809636 NR Description: receptor-like protein kinase
  misc_feature (1)..(289): NCBI GI NO: 28140043 NR Description: receptor-like protein kinase [Elaeis guineensis]
  misc_feature (12)..(289): NCBI GI NO: 26451159 NR Description: unknown protein [Arabidopsis thaliana]
  misc_feature (1)..(289): NCBI GI NO: 10177448 NR Description: receptor-like protein kinase
  misc_feature (1)..(289): NCBI GI NO: 30697726 NR Description: leucine rich repeat protein family
MNMALYVYDDIMRMTENLSEKYIIGYGASSTVYRCDLKNCKPIAIKKLYAHYPQSLKEFETELETVGSIKHRNLVSLQGYSLSPSGNLLFYDYMENGSLWDILHAASSKKKKLDWEARLKIALGAAQGLAYLHHECSPRIIHRDVKSKNILLDKDYEAHLADFGIAKSLCVSKTHTSTYVMGTIGYIDPEYARTSRINEKSDVYSYGIVLLELLTGKKPVDDECNLHHLILSKAAENTVMETVDQDITDTCKDLGEVKKVFQLALLCSKRQPSDRPTMHEVARVLDSLVCPAGPPPKQAQAQAQAQASDKPSTTAPSYVSEYVGLRGGGGGSALSCTNSSSASDAELFMKFGEVISRSTE

SEQ ID NO: 25748 - protein, 358 aa, Zea mays subsp. mays
  peptide (1)..(358): Ceres Seq. ID no. 15180117
  misc_feature (1)..(358): NCBI GI NO: 18390097 NR Description: putative receptor protein kinase [Sorghum bicolor]
  misc_feature (1)..(358): NCBI GI NO: 15225286 NR Description: receptor-related protein kinase, ERECTA
  misc_feature (1)..(357): NCBI GI NO: 34898088 NR Description: ESTs C22657
  misc_feature (1)..(287): NCBI GI NO: 15241760 NR Description: expressed protein [Arabidopsis thaliana]
  misc_feature (1)..(320): NCBI GI NO: 15240720 NR Description: receptor-related protein kinase
  misc_feature (1)..(287): NCBI GI NO: 8809636 NR Description: receptor-like protein kinase
  misc_feature (1)..(287): NCBI GI NO: 28140043 NR Description: receptor-like protein kinase [Elaeis guineensis]
  misc_feature (10)..(287): NCBI GI NO: 26451159 NR Description: unknown protein [Arabidopsis thaliana]
  misc_feature (1)..(287): NCBI GI NO: 10177448 NR Description: receptor-like protein kinase
  misc_feature (1)..(287): NCBI GI NO: 30697726 NR Description: leucine rich repeat protein family
MALYVYDDIMRMTENLSEKYIIGYGASSTVYRCDLKNCKPIAIKKLYAHYPQSLKEFETELETVGSIKHRNLVSLQGYSLSPSGNLLFYDYMENGSLWDILHAASSKKKKLDWEARLKIALGAAQGLAYLHHECSPRIIHRDVKSKNILLDKDYEAHLADFGIAKSLCVSKTHTSTYVMGTIGYIDPEYARTSRINEKSDVYSYGIVLLELLTGKKPVDDECNLHHLILSKAAENTVMETVDQDITDTCKDLGEVKKVFQLALLCSKRQPSDRPTMHEVARVLDSLVCPAGPPPKQAQAQAQAQASDKPSTTAPSYVSEYVGLRGGGGGSALSCTNSSSASDAELFMKFGEVISRSTE

SEQ ID NO: 25749 - DNA, 1856 bp, Zea mays subsp. mays
  misc_feature (1)..(1856): Ceres Seq. ID no. 13635560
  misc_feature (1488)..(1488): n is a, c, t, g, unknown, or other
gatgatgggagggcgcgctctgctgctgctcctggtctcggcgctgctcgttcagatccgcgcctctgacccgctgctgtacgagccgtttgatgaggacttcgagggtagatggatcgtctccaagaaggatgaataccaaggtgtatggaagcatgccaagagtgatgggcatgaggactatggcctccttgttagtgacaaggcaaggaaatacgccataatcaaggagcttgatgagccagttaccttaaatgatgggacagtggtcctgcagtttgaagtgagacttcagaatggccttgaatgtggaggtgcctacattaagtacatccgccctcaggatgctggatgggatgccaaggagtttgataatgagactccatacactattatgtttggtccagataaatgtgggtcaaccaacaaggttcatttcatccttaagcacaagaatcctaagactggaaagtatgttgagcatcacctcaaattcccaccttctgtcccatacgacaagctctctcatgtctacacagctatcttgaagccagacaatgaggtcagaattttgatcgatggggaagaaaagaagaaggcaaacttcctttctgctgatgactttgagccagcacttatcccatccaagaccattcctgaccctgatgacaagaagccggaggactgggatgagagagctaaaatccctgatccagatgcagtgaagcctgatgattgggatgaggatgcccccatggaaattgtggatgaggaagccaccaagcctgagggatggttggatgatgaacccgaggagattgatgatcctgaggcagccaagcccgaggactgggacgatgaagaggatggtgaatgggaggcaccaaagattgacaaccccaagtgtgaagaggcacctggatgtggcgagtggaagaggccgatgaagcagaatcctgcttacaaaggcaagtggcatgcacctatgattgacaaccccaactacaagggaatctggaagcctcaggagatacccaaccctgagtactttgagcttgacaggcctgattttgatccaattgctgctattgggattgagatctggacaatgcaggatggcatcctgttcgacaatatcttgattgctgatgatgagaaagttgccacctccattctggagaagacatggaagcccaagtatgatgttgagaaggaaaaggagaaggctgaggaggctgctgctggtgcagatggtctttctgacttccagaagaagatttttgacgtcctgtacaagattgctgatattccgttcttggcaccctacaagaccaagattattgatgttatcgagaagggagagaagcagcccaacatcactattggcattttggtctccgttgtcatcgtgttcgttaccgttctcttcaagatcctttttggtggcaagaaaccagtggcacctgtgaaacctgcagctgagggcgnaagtaagcccaaggccgcggagacggacggtgctggaagcagtggtgacaaggatgagaaagaggatgaaaaggacgagacaggcccacgtcggaggacccgaagaggagacatagacctgtttttgacgtgttttagctcttctggcgtctgcttattttgagaactcttaatatttgtgagtgtataataggagcttatgtcacctctgcggcttcccccgctgctgatttgtttttaatggttagaccaggacccttcacgagcgtagaatttagttcttgttggtcatttatgtgctgtgcctgacggtgttcaatcagatagaggtgatggtttttttggtagatcaaatcaaggaatatttc

SEQ ID NO: 25750 - protein, 549 aa, Zea mays subsp. mays
  peptide (1)..(549): Ceres Seq. ID no. 13635561
  misc_feature (25)..(381): Pfam Name: Pfam Description:  Calreticulin family
  misc_feature (1)..(531): NCBI GI NO: 21740628 NR Description: OSJNBb0012E08.10
  misc_feature (107)..(482): NCBI GI NO: 7441503 NR Description: calnexin - maize (fragment)
  misc_feature (2)..(531): NCBI GI NO: 3334138 NR Description: CALNEXIN HOMOLOG PRECURSOR
  misc_feature (7)..(533): NCBI GI NO: 15240353 NR Description: calnexin 1 (CNX1) [Arabidopsis thaliana]
  misc_feature (6)..(533): NCBI GI NO: 31321896 NR Description: putative papillar cell-specific calnexin
  misc_feature (2)..(531): NCBI GI NO: 11131469 NR Description: Calnexin homolog precursor
  misc_feature (7)..(531): NCBI GI NO: 15240773 NR Description: calnexin, putative [Arabidopsis thaliana]
  misc_feature (7)..(531): NCBI GI NO: 473878 NR Description: calnexin homolog
  misc_feature (10)..(531): NCBI GI NO: 11131766 NR Description: Calnexin homolog precursor
  misc_feature (24)..(535): NCBI GI NO: 18564808 NR Description: calnexin [Aspergillus niger]
  misc_feature (496)..(496): Xaa is any aa, unknown or other
MMGGRALLLLLVSALLVQIRASDPLLYEPFDEDFEGRWIVSKKDEYQGVWKHAKSDGHEDYGLLVSDKARKYAIIKELDEPVTLNDGTVVLQFEVRLQNGLECGGAYIKYIRPQDAGWDAKEFDNETPYTIMFGPDKCGSTNKVHFILKHKNPKTGKYVEHHLKFPPSVPYDKLSHVYTAILKPDNEVRILIDGEEKKKANFLSADDFEPALIPSKTIPDPDDKKPEDWDERAKIPDPDAVKPDDWDEDAPMEIVDEEATKPEGWLDDEPEEIDDPEAAKPEDWDDEEDGEWEAPKIDNPKCEEAPGCGEWKRPMKQNPAYKGKWHAPMIDNPNYKGIWKPQEIPNPEYFELDRPDFDPIAAIGIEIWTMQDGILFDNILIADDEKVATSILEKTWKPKYDVEKEKEKAEEAAAGADGLSDFQKKIFDVLYKIADIPFLAPYKTKIIDVIEKGEKQPNITIGILVSVVIVFVTVLFKILFGGKKPVAPVKPAAEGXSKPKAAETDGAGSSGDKDEKEDEKDETGPRRRTRRGDIDLFLTCFSSSGVCLF

SEQ ID NO: 25751 - protein, 548 aa, Zea mays subsp. mays
  peptide (1)..(548): Ceres Seq. ID no. 13635562
  misc_feature (24)..(380): Pfam Name: Pfam Description:  Calreticulin family
  misc_feature (1)..(530): NCBI GI NO: 21740628 NR Description: OSJNBb0012E08.10
  misc_feature (106)..(481): NCBI GI NO: 7441503 NR Description: calnexin - maize (fragment)
  misc_feature (1)..(530): NCBI GI NO: 3334138 NR Description: CALNEXIN HOMOLOG PRECURSOR
  misc_feature (6)..(532): NCBI GI NO: 15240353 NR Description: calnexin 1 (CNX1) [Arabidopsis thaliana]
  misc_feature (5)..(532): NCBI GI NO: 31321896 NR Description: putative papillar cell-specific calnexin
  misc_feature (1)..(530): NCBI GI NO: 11131469 NR Description: Calnexin homolog precursor
  misc_feature (6)..(530): NCBI GI NO: 15240773 NR Description: calnexin, putative [Arabidopsis thaliana]
  misc_feature (6)..(530): NCBI GI NO: 473878 NR Description: calnexin homolog
  misc_feature (9)..(530): NCBI GI NO: 11131766 NR Description: Calnexin homolog precursor
  misc_feature (23)..(534): NCBI GI NO: 18564808 NR Description: calnexin [Aspergillus niger]
  misc_feature (495)..(495): Xaa is any aa, unknown or other
MGGRALLLLLVSALLVQIRASDPLLYEPFDEDFEGRWIVSKKDEYQGVWKHAKSDGHEDYGLLVSDKARKYAIIKELDEPVTLNDGTVVLQFEVRLQNGLECGGAYIKYIRPQDAGWDAKEFDNETPYTIMFGPDKCGSTNKVHFILKHKNPKTGKYVEHHLKFPPSVPYDKLSHVYTAILKPDNEVRILIDGEEKKKANFLSADDFEPALIPSKTIPDPDDKKPEDWDERAKIPDPDAVKPDDWDEDAPMEIVDEEATKPEGWLDDEPEEIDDPEAAKPEDWDDEEDGEWEAPKIDNPKCEEAPGCGEWKRPMKQNPAYKGKWHAPMIDNPNYKGIWKPQEIPNPEYFELDRPDFDPIAAIGIEIWTMQDGILFDNILIADDEKVATSILEKTWKPKYDVEKEKEKAEEAAAGADGLSDFQKKIFDVLYKIADIPFLAPYKTKIIDVIEKGEKQPNITIGILVSVVIVFVTVLFKILFGGKKPVAPVKPAAEGXSKPKAAETDGAGSSGDKDEKEDEKDETGPRRRTRRGDIDLFLTCFSSSGVCLF

SEQ ID NO: 25752 - protein, 418 aa, Zea mays subsp. mays
  peptide (1)..(418): Ceres Seq. ID no. 13635563
  misc_feature (1)..(250): Pfam Name: Pfam Description:  Calreticulin family
  misc_feature (1)..(400): NCBI GI NO: 21740628 NR Description: OSJNBb0012E08.10
  misc_feature (1)..(351): NCBI GI NO: 7441503 NR Description: calnexin - maize (fragment)
  misc_feature (1)..(400): NCBI GI NO: 3334138 NR Description: CALNEXIN HOMOLOG PRECURSOR
  misc_feature (1)..(402): NCBI GI NO: 15240353 NR Description: calnexin 1 (CNX1) [Arabidopsis thaliana]
  misc_feature (1)..(402): NCBI GI NO: 31321896 NR Description: putative papillar cell-specific calnexin
  misc_feature (1)..(400): NCBI GI NO: 11131469 NR Description: Calnexin homolog precursor
  misc_feature (1)..(400): NCBI GI NO: 15240773 NR Description: calnexin, putative [Arabidopsis thaliana]
  misc_feature (1)..(400): NCBI GI NO: 473878 NR Description: calnexin homolog
  misc_feature (1)..(400): NCBI GI NO: 11131766 NR Description: Calnexin homolog precursor
  misc_feature (1)..(404): NCBI GI NO: 18564808 NR Description: calnexin [Aspergillus niger]
  misc_feature (365)..(365): Xaa is any aa, unknown or other
MFGPDKCGSTNKVHFILKHKNPKTGKYVEHHLKFPPSVPYDKLSHVYTAILKPDNEVRILIDGEEKKKANFLSADDFEPALIPSKTIPDPDDKKPEDWDERAKIPDPDAVKPDDWDEDAPMEIVDEEATKPEGWLDDEPEEIDDPEAAKPEDWDDEEDGEWEAPKIDNPKCEEAPGCGEWKRPMKQNPAYKGKWHAPMIDNPNYKGIWKPQEIPNPEYFELDRPDFDPIAAIGIEIWTMQDGILFDNILIADDEKVATSILEKTWKPKYDVEKEKEKAEEAAAGADGLSDFQKKIFDVLYKIADIPFLAPYKTKIIDVIEKGEKQPNITIGILVSVVIVFVTVLFKILFGGKKPVAPVKPAAEGXSKPKAAETDGAGSSGDKDEKEDEKDETGPRRRTRRGDIDLFLTCFSSSGVCLF

SEQ ID NO: 25753 - DNA, 1845 bp, Zea mays subsp. mays
  misc_feature (1)..(1845): Ceres Seq. ID no. 13492086
atctgctctgctccggtccgttccgctccttcctccccctatctagctagccttcccgttcctgcatcgcggcggagatgggcgcctccaccacgccgctcgcgtcggcggcggcgctgcttctgctgctgctcgcgccgctcgccgcggcggcggacagcatgtcgatcgtctcctacggcgagcggagcgaggaggaggcgcggcggatgtacgccgagtggatggcggcgcacggccggacctacaacgccgtcggcgaggaggagcgcaggttcgaggtgttcagggacaacctccgctacgtcgacgcccacaacgccgccgccgacgcgggcgtccactccttccgcctcgggctcaaccgcttcgccgacctcaccaacgacgagtaccgcgccacctacctcggcgtcaggagcaggccgcagagggagaggaggctcggtgacaggtacctggccggcgacaacgaggacctgccggagtccgtcgactggcgggccaagggcgccgtcgcggagatcaaggaccagggcagctgcgggagttgctgggctttctcaacaatagcggctgtggaaggcatcaaccagattgttactggcgacatgatctccttgtctgagcaggagcttgttgactgtgacacttcatacaaccaggggtgcaatggaggtctgatggactatgcgtttgagttcatcatcaacaatggcggaatcgacaccgaggaggattacccttacaagggcacggacggacggtgtgatgtcaacaggaaaaacgccaaggttgttactatcgacagctatgaagatgtaccagcgaacagtgagaaaagtctgcagaaggcagttgcgaaccagcccatcagtgttgcaattgaggctggtggcagagcatttcagctctacaactcgggtatcttcacaggaacctgtggaacagcgttggaccatggtgtcacggccgtcggctacggcacagagaacggcaaggactactggatcgtgaagaactcttggggcagcagctggggcgagtccggctacgtcaggatggagcgcaacatcaaggcgtccagcggcaagtgtggtatcgccgttgagccgtcgtaccctctgaagaagggcgccaaccccccgaaccctgggccgaccccgccttcccccaccccgccgcccaccgtctgcgacaactactactcgtgccccgacagcaccacctgctgctgcatctacgagtacggcaagtactgcttcgcctggggctgctgcccgctcgagggcgccacctgctgcgacgaccactacagctgctgcccccatgactaccccgtctgcaacgtcaagcagggaacctgcctcatgggcaaggacagcccactgtcactgtcagtgaaggctacgaagcgcaccctggccaagccgcactgggctttctctggcaacacagctgctgatggcatgaagagcagcgcatgagaaaaacgcagcatggcattaggccgtcaacagccagcatgattagagcccccctgcatgcagaatgatcacccggtcccgtagttcacgacgaaagcatggctgggcggccgctgtttacggatttacttatatcactatagtaggtactcctcctgtacataagcctgaaaaaaaaatgggttcagttgtttatggaactctgccaaatttgcttttgcatgccatgtaaaaatccagctagctcttgccaagcttcacctgcgcagttcaacaggactgcgattgatattcggtgtaatggaagtatttatcggaacaatcagcaatgttatgctatattcatttcttggacgtg

SEQ ID NO: 25754 - protein, 469 aa, Zea mays subsp. mays
  peptide (1)..(469): Ceres Seq. ID no. 13492087
  misc_feature (135)..(350): Pfam Name: Pfam Description:  Papain family cysteine protease
  misc_feature (1)..(469): NCBI GI NO: 6682829 NR Description: cysteine protease component of protease-inhibitorcomplex
  misc_feature (1)..(469): NCBI GI NO: 7435806 NR Description: cysteine proteinase mir3 (EC 3.4.22.-) - maize
  misc_feature (8)..(469): NCBI GI NO: 129231 NR Description: Oryzain alpha chain precursor
  misc_feature (8)..(469): NCBI GI NO: 38345906 NR Description: OSJNBb0059K02.8
  misc_feature (8)..(432): NCBI GI NO: 10241433 NR Description: putative oryzain alpha precursor
  misc_feature (8)..(455): NCBI GI NO: 14517542 NR Description: F2G19.31/F2G19.31 [Arabidopsis thaliana]
  misc_feature (8)..(455): NCBI GI NO: 18401614 NR Description: cysteine proteinase RD21A [Arabidopsis thaliana]
  misc_feature (8)..(434): NCBI GI NO: 18141285 NR Description: senescence-associated cysteine protease
  misc_feature (15)..(457): NCBI GI NO: 18422289 NR Description: cysteine proteinase RD21A [Arabidopsis thaliana]
  misc_feature (14)..(463): NCBI GI NO: 7435791 NR Description: cysteine proteinase (EC 3
MGASTTPLASAAALLLLLLAPLAAAADSMSIVSYGERSEEEARRMYAEWMAAHGRTYNAVGEEERRFEVFRDNLRYVDAHNAAADAGVHSFRLGLNRFADLTNDEYRATYLGVRSRPQRERRLGDRYLAGDNEDLPESVDWRAKGAVAEIKDQGSCGSCWAFSTIAAVEGINQIVTGDMISLSEQELVDCDTSYNQGCNGGLMDYAFEFIINNGGIDTEEDYPYKGTDGRCDVNRKNAKVVTIDSYEDVPANSEKSLQKAVANQPISVAIEAGGRAFQLYNSGIFTGTCGTALDHGVTAVGYGTENGKDYWIVKNSWGSSWGESGYVRMERNIKASSGKCGIAVEPSYPLKKGANPPNPGPTPPSPTPPPTVCDNYYSCPDSTTCCCIYEYGKYCFAWGCCPLEGATCCDDHYSCCPHDYPVCNVKQGTCLMGKDSPLSLSVKATKRTLAKPHWAFSGNTAADGMKSSA

SEQ ID NO: 25755 - protein, 441 aa, Zea mays subsp. mays
  peptide (1)..(441): Ceres Seq. ID no. 13492088
  misc_feature (107)..(322): Pfam Name: Pfam Description:  Papain family cysteine protease
  misc_feature (1)..(441): NCBI GI NO: 6682829 NR Description: cysteine protease component of protease-inhibitorcomplex
  misc_feature (1)..(441): NCBI GI NO: 7435806 NR Description: cysteine proteinase mir3 (EC 3.4.22.-) - maize
  misc_feature (1)..(441): NCBI GI NO: 129231 NR Description: Oryzain alpha chain precursor
  misc_feature (1)..(441): NCBI GI NO: 38345906 NR Description: OSJNBb0059K02.8
  misc_feature (1)..(404): NCBI GI NO: 10241433 NR Description: putative oryzain alpha precursor
  misc_feature (1)..(427): NCBI GI NO: 14517542 NR Description: F2G19.31/F2G19.31 [Arabidopsis thaliana]
  misc_feature (1)..(427): NCBI GI NO: 18401614 NR Description: cysteine proteinase RD21A [Arabidopsis thaliana]
  misc_feature (1)..(406): NCBI GI NO: 18141285 NR Description: senescence-associated cysteine protease
  misc_feature (1)..(429): NCBI GI NO: 18422289 NR Description: cysteine proteinase RD21A [Arabidopsis thaliana]
  misc_feature (1)..(435): NCBI GI NO: 7435791 NR Description: cysteine proteinase (EC 3
MSIVSYGERSEEEARRMYAEWMAAHGRTYNAVGEEERRFEVFRDNLRYVDAHNAAADAGVHSFRLGLNRFADLTNDEYRATYLGVRSRPQRERRLGDRYLAGDNEDLPESVDWRAKGAVAEIKDQGSCGSCWAFSTIAAVEGINQIVTGDMISLSEQELVDCDTSYNQGCNGGLMDYAFEFIINNGGIDTEEDYPYKGTDGRCDVNRKNAKVVTIDSYEDVPANSEKSLQKAVANQPISVAIEAGGRAFQLYNSGIFTGTCGTALDHGVTAVGYGTENGKDYWIVKNSWGSSWGESGYVRMERNIKASSGKCGIAVEPSYPLKKGANPPNPGPTPPSPTPPPTVCDNYYSCPDSTTCCCIYEYGKYCFAWGCCPLEGATCCDDHYSCCPHDYPVCNVKQGTCLMGKDSPLSLSVKATKRTLAKPHWAFSGNTAADGMKSSA

SEQ ID NO: 25756 - protein, 425 aa, Zea mays subsp. mays
  peptide (1)..(425): Ceres Seq. ID no. 13492089
  misc_feature (91)..(306): Pfam Name: Pfam Description:  Papain family cysteine protease
  misc_feature (1)..(425): NCBI GI NO: 6682829 NR Description: cysteine protease component of protease-inhibitorcomplex
  misc_feature (1)..(425): NCBI GI NO: 7435806 NR Description: cysteine proteinase mir3 (EC 3.4.22.-) - maize
  misc_feature (1)..(425): NCBI GI NO: 129231 NR Description: Oryzain alpha chain precursor
  misc_feature (1)..(425): NCBI GI NO: 38345906 NR Description: OSJNBb0059K02.8
  misc_feature (1)..(388): NCBI GI NO: 10241433 NR Description: putative oryzain alpha precursor
  misc_feature (1)..(411): NCBI GI NO: 14517542 NR Description: F2G19.31/F2G19.31 [Arabidopsis thaliana]
  misc_feature (1)..(411): NCBI GI NO: 18401614 NR Description: cysteine proteinase RD21A [Arabidopsis thaliana]
  misc_feature (1)..(390): NCBI GI NO: 18141285 NR Description: senescence-associated cysteine protease
  misc_feature (1)..(413): NCBI GI NO: 18422289 NR Description: cysteine proteinase RD21A [Arabidopsis thaliana]
  misc_feature (1)..(419): NCBI GI NO: 7435791 NR Description: cysteine proteinase (EC 3
MYAEWMAAHGRTYNAVGEEERRFEVFRDNLRYVDAHNAAADAGVHSFRLGLNRFADLTNDEYRATYLGVRSRPQRERRLGDRYLAGDNEDLPESVDWRAKGAVAEIKDQGSCGSCWAFSTIAAVEGINQIVTGDMISLSEQELVDCDTSYNQGCNGGLMDYAFEFIINNGGIDTEEDYPYKGTDGRCDVNRKNAKVVTIDSYEDVPANSEKSLQKAVANQPISVAIEAGGRAFQLYNSGIFTGTCGTALDHGVTAVGYGTENGKDYWIVKNSWGSSWGESGYVRMERNIKASSGKCGIAVEPSYPLKKGANPPNPGPTPPSPTPPPTVCDNYYSCPDSTTCCCIYEYGKYCFAWGCCPLEGATCCDDHYSCCPHDYPVCNVKQGTCLMGKDSPLSLSVKATKRTLAKPHWAFSGNTAADGMKSSA

SEQ ID NO: 25757 - DNA, 1434 bp, Zea mays subsp. mays
  misc_feature (1)..(1434): Ceres Seq. ID no. 12345959
gacacacgaaattctcaggtcccggtcccgggtccaggcacccttctcgctcggttgctcgggagctttccccttcctgttcctgaagcttccgacatccgaccgcctcctcctcctcgttctactcgccgccccttctaggatcatccagaggcgtgccggtgaaacgcgagagcggtgaggcatggcgatgcagacgggggtcgcgacctccaaggtcctcatcctcgtcggtgcagggatgacgggctcgatcctgctgcggaatggccgcttatctgatgtgttgggagaactccaggagattatgaagggtgtaaatcaaggaactgcttcgggtccctatgacattgcacttattcaagctcagattcggaatttagcccaagaagtcagagatttgacattgtcaaagcccattaccatactgaatggcaaatctgactcgggaggcagtttatcatcctacatactgccagcagcagcagttggagcaatgggttattgctacatgtggtggaaggggttgtctctctcagatgtcatgtttgtcacaaaacacaacatggcaaatgctgttcagagcatgtcaaagcagttggagcaagtttcatcagcactagctgcaacaaaaagacatctaactcaacggcttgagaatttggatggcaaaatggatgaacaagtagaggtctccaaagctattagaaatgaggtcaatgatgttaaagatgacctgtctcaaattggatttgatgtcgaatcaattcagaaaatggttgctggattggagggaaagatcgagttacttgagaacaaacaggacgtggctaatactggtatctggtacctctgccaagtagcaggcggtttaaaagatggaataaacaccaggtttttccaggaaaccagtgagaagctgaagctctcacattcagctcaacctgaaaacaagccagtgaaggggcttgaatttttttcggaaagcgccatggaacagaaagtagctgactccaaaccaattgcggtgacagtcgacgctgagaagcctgagaaaaccgctgctgtaatgggcaccacagtgcacaggtctatcaggttctcatatcggaaggcaggccttgctttgtgatcaaatcctctccgcttgagatgcacgtggccttcctggttgcttttcttttttggcaacaaccttcctggttgctttgtctgatggtcagaaaacatggaagaataacctgcaactggagtgacagaatttcttttccccgcagtagacaggtgtgcgttatttggtctgatttgaaactatcttcagtccgctatcaatttttttccttggattttgattcattttatgtttcgacttgttgccttgtatactgtaaaggcattggaaagaatacataaaacacgaatgttttttttgcc

SEQ ID NO: 25758 - protein, 315 aa, Zea mays subsp. mays
  peptide (1)..(315): Ceres Seq. ID no. 12345960
  misc_feature (1)..(303): NCBI GI NO: 18390460 NR Description: expressed protein; protein id: At1g04960
  misc_feature (1)..(229): NCBI GI NO: 18396143 NR Description: bZIP family transcription factor
  misc_feature (1)..(229): NCBI GI NO: 21537323 NR Description: unknown [Arabidopsis thaliana]
  misc_feature (1)..(229): NCBI GI NO: 25361065 NR Description: protein T7N9.6 [imported] - Arabidopsis thaliana
  misc_feature (1)..(249): NCBI GI NO: 15227027 NR Description: expressed protein; protein id: At2g02730
  misc_feature (1)..(249): NCBI GI NO: 7487252 NR Description: hypothetical protein At2g02730
  misc_feature (1)..(225): NCBI GI NO: 34906300 NR Description: unnamed protein product
  misc_feature (12)..(213): NCBI GI NO: 34894218 NR Description: P0439B06.30
  misc_feature (7)..(220): NCBI GI NO: 30688826 NR Description: expressed protein [Arabidopsis thaliana]
  misc_feature (11)..(225): NCBI GI NO: 22329773 NR Description: Expressed protein; protein id: At1g24265
MAMQTGVATSKVLILVGAGMTGSILLRNGRLSDVLGELQEIMKGVNQGTASGPYDIALIQAQIRNLAQEVRDLTLSKPITILNGKSDSGGSLSSYILPAAAVGAMGYCYMWWKGLSLSDVMFVTKHNMANAVQSMSKQLEQVSSALAATKRHLTQRLENLDGKMDEQVEVSKAIRNEVNDVKDDLSQIGFDVESIQKMVAGLEGKIELLENKQDVANTGIWYLCQVAGGLKDGINTRFFQETSEKLKLSHSAQPENKPVKGLEFFSESAMEQKVADSKPIAVTVDAEKPEKTAAVMGTTVHRSIRFSYRKAGLAL

SEQ ID NO: 25759 - protein, 313 aa, Zea mays subsp. mays
  peptide (1)..(313): Ceres Seq. ID no. 12345961
  misc_feature (1)..(301): NCBI GI NO: 18390460 NR Description: expressed protein; protein id: At1g04960
  misc_feature (1)..(227): NCBI GI NO: 18396143 NR Description: bZIP family transcription factor
  misc_feature (1)..(227): NCBI GI NO: 21537323 NR Description: unknown [Arabidopsis thaliana]
  misc_feature (1)..(227): NCBI GI NO: 25361065 NR Description: protein T7N9.6 [imported] - Arabidopsis thaliana
  misc_feature (1)..(247): NCBI GI NO: 15227027 NR Description: expressed protein; protein id: At2g02730
  misc_feature (1)..(247): NCBI GI NO: 7487252 NR Description: hypothetical protein At2g02730
  misc_feature (1)..(223): NCBI GI NO: 34906300 NR Description: unnamed protein product
  misc_feature (10)..(211): NCBI GI NO: 34894218 NR Description: P0439B06.30
  misc_feature (5)..(218): NCBI GI NO: 30688826 NR Description: expressed protein [Arabidopsis thaliana]
  misc_feature (9)..(223): NCBI GI NO: 22329773 NR Description: Expressed protein; protein id: At1g24265
MQTGVATSKVLILVGAGMTGSILLRNGRLSDVLGELQEIMKGVNQGTASGPYDIALIQAQIRNLAQEVRDLTLSKPITILNGKSDSGGSLSSYILPAAAVGAMGYCYMWWKGLSLSDVMFVTKHNMANAVQSMSKQLEQVSSALAATKRHLTQRLENLDGKMDEQVEVSKAIRNEVNDVKDDLSQIGFDVESIQKMVAGLEGKIELLENKQDVANTGIWYLCQVAGGLKDGINTRFFQETSEKLKLSHSAQPENKPVKGLEFFSESAMEQKVADSKPIAVTVDAEKPEKTAAVMGTTVHRSIRFSYRKAGLAL

SEQ ID NO: 25760 - protein, 296 aa, Zea mays subsp. mays
  peptide (1)..(296): Ceres Seq. ID no. 12345962
  misc_feature (1)..(284): NCBI GI NO: 18390460 NR Description: expressed protein; protein id: At1g04960
  misc_feature (1)..(210): NCBI GI NO: 18396143 NR Description: bZIP family transcription factor
  misc_feature (1)..(210): NCBI GI NO: 21537323 NR Description: unknown [Arabidopsis thaliana]
  misc_feature (1)..(210): NCBI GI NO: 25361065 NR Description: protein T7N9.6 [imported] - Arabidopsis thaliana
  misc_feature (1)..(230): NCBI GI NO: 15227027 NR Description: expressed protein; protein id: At2g02730
  misc_feature (1)..(230): NCBI GI NO: 7487252 NR Description: hypothetical protein At2g02730
  misc_feature (1)..(206): NCBI GI NO: 34906300 NR Description: unnamed protein product
  misc_feature (1)..(194): NCBI GI NO: 34894218 NR Description: P0439B06.30
  misc_feature (1)..(201): NCBI GI NO: 30688826 NR Description: expressed protein [Arabidopsis thaliana]
  misc_feature (1)..(206): NCBI GI NO: 22329773 NR Description: Expressed protein; protein id: At1g24265
MTGSILLRNGRLSDVLGELQEIMKGVNQGTASGPYDIALIQAQIRNLAQEVRDLTLSKPITILNGKSDSGGSLSSYILPAAAVGAMGYCYMWWKGLSLSDVMFVTKHNMANAVQSMSKQLEQVSSALAATKRHLTQRLENLDGKMDEQVEVSKAIRNEVNDVKDDLSQIGFDVESIQKMVAGLEGKIELLENKQDVANTGIWYLCQVAGGLKDGINTRFFQETSEKLKLSHSAQPENKPVKGLEFFSESAMEQKVADSKPIAVTVDAEKPEKTAAVMGTTVHRSIRFSYRKAGLAL

SEQ ID NO: 25761 - DNA, 1050 bp, Zea mays subsp. mays
  misc_feature (1)..(1050): Ceres Seq. ID no. 12361487
gcacgagaccattacctagaacatcctaatcgaaaaatccaaactcacagcacgctagctcttcagaacttgcggacgaaagactgaccgtgcaccgctagcagatcgatcgaccatggcgtcgtcctctcttctcctcctcgccgccgtcgccctcttcgccgcctccgcagacgcggccaccttcaacgtcatcaaccgctgcaagaacacgctgtggccggccgccctccccggcggcggcgcgcgcctggaccctggcaagacgtggaccgtgcaggtgccggcgggcacggcgcacgcgcgggtgtgggcgcgcacggggtgcagcttcgacggcagcggccgcgggacgtgccagacgggggactgcggcggcgcgctggcgtgcaccgtgtccgggagaacccccgcgacgctgggctgagtacacgctcaacaggaacggcccggactacatcgacatctccctcgtggatggcttcaacgtgcccatgtccttccagtgccgcggcaggggccccagctgcaaggccgacatcaacgcccagtgccccgccgcgctcaaggtgcccggcggctgcgccagcgcctgcgagaagctcggcggcgacacctactgctgccggggccagtacaaggacaagtgcccgcccacggactactccaggttcttcaagaggctgtgcccggacgcctacagctacgccaaggacgaccagaccagcaccttcacctgcccacagggctccaactacgatgtcgtgctctgcccgtgagccacatgttcgagagatcaacgaccatgcattcgcagctcgcaacaagtgcacactagtacaactatacacaagaaataagagtcgcgatatttattattatcgcgcgtggagtagttggtaaataaatcgcttattgcgagtattttggcccatgaataaggccttacttactggccatcatttccgacatatatacgtttgttcatgaataaagaaactttgcaaaacagcacaatatataatttagcacaatatataattttggagc

SEQ ID NO: 25762 - protein, 141 aa, Zea mays subsp. mays
  peptide (1)..(141): Ceres Seq. ID no. 12361488
  misc_feature (1)..(99): Pfam Name: Pfam Description:  Equine herpesvirus glycoprotein gp2
MASTCPCPSSAAAGAPAARPTSTPSAPPRSRCPAAAPAPARSSAATPTAAGASTRTSARPRTTPGSSRGCARTPTATPRTTRPAPSPAHRAPTTMSCSAREPHVREINDHAFAARNKCTLVQLYTRNKSRDIYYYRAWSSW

SEQ ID NO: 25763 - protein, 103 aa, Zea mays subsp. mays
  peptide (1)..(103): Ceres Seq. ID no. 12361489
  misc_feature (28)..(102): Pfam Name: Pfam Description:  Thaumatin family
  misc_feature (1)..(102): NCBI GI NO: 2062389 NR Description: pathogenesis-related thaumatin-like protein
  misc_feature (1)..(102): NCBI GI NO: 7442171 NR Description: thaumatin-like protein - rice
  misc_feature (22)..(102): NCBI GI NO: 129320 NR Description: P21 PROTEIN
  misc_feature (6)..(102): NCBI GI NO: 34894240 NR Description: putative receptor serine/threonine kinase
  misc_feature (22)..(102): NCBI GI NO: 444321 NR Description: protein P21
  misc_feature (2)..(102): NCBI GI NO: 135780 NR Description: Thaumatin II precursor
  misc_feature (8)..(102): NCBI GI NO: 1709496 NR Description: OSMOTIN-LIKE PROTEIN OSML15 PRECURSOR (PA15)
  misc_feature (8)..(102): NCBI GI NO: 31095603 NR Description: PR5-like protein [Lycopersicon esculentum]
  misc_feature (37)..(102): NCBI GI NO: 7406714 NR Description: putative thaumatin-like protein [Vitis vinifera]
  misc_feature (8)..(102): NCBI GI NO: 1389554 NR Description: neutral PR-5 (osmotin-like protein, PR-5d)
MASSSLLLLAAVALFAASADAATFNVINRCKNTLWPAALPGGGARLDPGKTWTVQVPAGTAHARVWARTGCSFDGSGRGTCQTGDCGGALACTVSGRTPATLG

SEQ ID NO: 25764 - protein, 94 aa, Zea mays subsp. mays
  peptide (1)..(94): Ceres Seq. ID no. 12361490
  misc_feature (1)..(94): Pfam Name: Pfam Description:  Thaumatin family
  misc_feature (1)..(94): NCBI GI NO: 2062389 NR Description: pathogenesis-related thaumatin-like protein
  misc_feature (1)..(94): NCBI GI NO: 7442171 NR Description: thaumatin-like protein - rice
  misc_feature (1)..(94): NCBI GI NO: 129320 NR Description: P21 PROTEIN
  misc_feature (1)..(94): NCBI GI NO: 34894240 NR Description: putative receptor serine/threonine kinase
  misc_feature (1)..(94): NCBI GI NO: 444321 NR Description: protein P21
  misc_feature (1)..(94): NCBI GI NO: 135780 NR Description: Thaumatin II precursor
  misc_feature (1)..(94): NCBI GI NO: 1709496 NR Description: OSMOTIN-LIKE PROTEIN OSML15 PRECURSOR (PA15)
  misc_feature (1)..(94): NCBI GI NO: 31095603 NR Description: PR5-like protein [Lycopersicon esculentum]
  misc_feature (1)..(94): NCBI GI NO: 7406714 NR Description: putative thaumatin-like protein [Vitis vinifera]
  misc_feature (1)..(94): NCBI GI NO: 1389554 NR Description: neutral PR-5 (osmotin-like protein, PR-5d)
MSFQCRGRGPSCKADINAQCPAALKVPGGCASACEKLGGDTYCCRGQYKDKCPPTDYSRFFKRLCPDAYSYAKDDQTSTFTCPQGSNYDVVLCP

SEQ ID NO: 25765 - DNA, 900 bp, Zea mays subsp. mays
  misc_feature (1)..(900): Ceres Seq. ID no. 12565933
aaaggcaccaccaccagctagctctctgtctgctgctcctctcaaaagagtcgcagttcactttgttgtactagagcgctgagcagatctttccttgtttctccattccggtacgaaggggtggggtccaagtgaagggaagggaagggaagagaaggcctgctgcgagcgatgggcatcgtcgacgtcgtctccgagttctgctccttgccgaggactcgccggcatctcaagaagaggaagcagttccagacggtggagatgaaggtgcgcatcgactgcgaagggtgcgagcgcaaggtgaagaaggcgatggagggcatgaagggcgtgagctccgtggaggtggcggccaagcagaacaaggtgacggtcacgggctacgtggacgccgccaaggtcatgcgccgcgtcgcctacaagacgggcaagcgggtggagccctggccctacgtgccctacgagatggtgcagcacccctacgcgccgggcgcctacgacaagaaggcgcccgccggctacgtccgcaacgtcgtcgccgaccccaccgccgcgccgctcgccagggcctcctccaccgaggtccgctacaccgccgccttcagcgacgagaaccccaacgcctgctccgtcatgtagacgtagacccacccacacaccgaccgacccacttgttttctagctattagttactagtagtatagtaggtgcttgcttgggagagttgctcttggaggaggttttgctcttcctgaccctttttctttttctttttttcgttttccggtttcatgtagatgtagtgtgcgttttgatttttgtgaaaaaaaataaactagtttgtaacggtagaccacttgtgcaaactatgatcagaaaaaaaaatcagttcgtccttgc

SEQ ID NO: 25766 - protein, 155 aa, Zea mays subsp. mays
  peptide (1)..(155): Ceres Seq. ID no. 12565934
  misc_feature (1)..(155): NCBI GI NO: 38346843 NR Description: OSJNBa0091C12.3
  misc_feature (1)..(155): NCBI GI NO: 23304411 NR Description: farnesylated protein 1
  misc_feature (1)..(155): NCBI GI NO: 21397273 NR Description: Putative atfp6-like protein
  misc_feature (1)..(155): NCBI GI NO: 15233937 NR Description: copper chaperone
  misc_feature (1)..(155): NCBI GI NO: 21536547 NR Description: farnesylated protein (ATFP6)
  misc_feature (21)..(155): NCBI GI NO: 4097573 NR Description: GMFP7 [Glycine max]
  misc_feature (35)..(155): NCBI GI NO: 15239266 NR Description: expressed protein; protein id: At5g66110.1
  misc_feature (1)..(155): NCBI GI NO: 18418567 NR Description: copper chaperone
  misc_feature (1)..(155): NCBI GI NO: 34914538 NR Description: OSJNBa0094H06.16
  misc_feature (39)..(155): NCBI GI NO: 4097553 NR Description: ATFP6 [Arabidopsis thaliana]
MGIVDVVSEFCSLPRTRRHLKKRKQFQTVEMKVRIDCEGCERKVKKAMEGMKGVSSVEVAAKQNKVTVTGYVDAAKVMRRVAYKTGKRVEPWPYVPYEMVQHPYAPGAYDKKAPAGYVRNVVADPTAAPLARASSTEVRYTAAFSDENPNACSVM

SEQ ID NO: 25767 - protein, 125 aa, Zea mays subsp. mays
  peptide (1)..(125): Ceres Seq. ID no. 12565935
  misc_feature (1)..(125): NCBI GI NO: 38346843 NR Description: OSJNBa0091C12.3
  misc_feature (1)..(125): NCBI GI NO: 23304411 NR Description: farnesylated protein 1
  misc_feature (1)..(125): NCBI GI NO: 21397273 NR Description: Putative atfp6-like protein
  misc_feature (1)..(125): NCBI GI NO: 15233937 NR Description: copper chaperone
  misc_feature (1)..(125): NCBI GI NO: 21536547 NR Description: farnesylated protein (ATFP6)
  misc_feature (1)..(125): NCBI GI NO: 4097573 NR Description: GMFP7 [Glycine max]
  misc_feature (5)..(125): NCBI GI NO: 15239266 NR Description: expressed protein; protein id: At5g66110.1
  misc_feature (1)..(125): NCBI GI NO: 18418567 NR Description: copper chaperone
  misc_feature (1)..(125): NCBI GI NO: 34914538 NR Description: OSJNBa0094H06.16
  misc_feature (9)..(125): NCBI GI NO: 4097553 NR Description: ATFP6 [Arabidopsis thaliana]
MKVRIDCEGCERKVKKAMEGMKGVSSVEVAAKQNKVTVTGYVDAAKVMRRVAYKTGKRVEPWPYVPYEMVQHPYAPGAYDKKAPAGYVRNVVADPTAAPLARASSTEVRYTAAFSDENPNACSVM

SEQ ID NO: 25768 - protein, 108 aa, Zea mays subsp. mays
  peptide (1)..(108): Ceres Seq. ID no. 12565936
  misc_feature (1)..(108): NCBI GI NO: 38346843 NR Description: OSJNBa0091C12.3
  misc_feature (1)..(108): NCBI GI NO: 23304411 NR Description: farnesylated protein 1
  misc_feature (1)..(108): NCBI GI NO: 21397273 NR Description: Putative atfp6-like protein
  misc_feature (1)..(108): NCBI GI NO: 15233937 NR Description: copper chaperone
  misc_feature (1)..(108): NCBI GI NO: 21536547 NR Description: farnesylated protein (ATFP6)
  misc_feature (1)..(108): NCBI GI NO: 4097573 NR Description: GMFP7 [Glycine max]
  misc_feature (1)..(108): NCBI GI NO: 15239266 NR Description: expressed protein; protein id: At5g66110.1
  misc_feature (1)..(108): NCBI GI NO: 18418567 NR Description: copper chaperone
  misc_feature (1)..(108): NCBI GI NO: 34914538 NR Description: OSJNBa0094H06.16
  misc_feature (1)..(108): NCBI GI NO: 4097553 NR Description: ATFP6 [Arabidopsis thaliana]
MEGMKGVSSVEVAAKQNKVTVTGYVDAAKVMRRVAYKTGKRVEPWPYVPYEMVQHPYAPGAYDKKAPAGYVRNVVADPTAAPLARASSTEVRYTAAFSDENPNACSVM

SEQ ID NO: 25769 - DNA, 661 bp, Zea mays subsp. mays
  misc_feature (1)..(661): Ceres Seq. ID no. 12358602
ctagactgcacccccatcccgcagcagccaaaacctacctagccgccgccgcaggcggccccccatcgccgccaagatgcagatctttgtgaagactctgacggggaagaccatcactttggaggtggagtcctcggacaccattgacaatgtgaaggccaagatccaggacaaggagggcatccccccggaccagcagcggctcatcttcgccggcaagcagctcgaggacggtcgcaccctcgccgactacaacattcagaaggagtccaccctccacctggtgctccgcctccgcggtggcgccaagaagcgtaagaagaagacgtacaccaagcccaagaagatcaagcacaagcacaagaaggtgaagctctccgtgctgcagttctataaggtggacgacgccactggcaaggtgacccgcctccgcaaggagtgccccaacacagagtgcggcgcgggcgtcttcatggccaaccacttcgaccgccactactgcggcaagtgcggcctcacctatgtctacaaccagaaggcgtaattgcttgccccgatttgctttatccgccaacctatcaagcattcagatgttggttactcaaattgtatctcatttagatctgtctgaggttgaaacttaaatggagcagtagtatct

SEQ ID NO: 25770 - protein, 155 aa, Zea mays subsp. mays
  peptide (1)..(155): Ceres Seq. ID no. 12358603
  misc_feature (1)..(74): Pfam Name: Pfam Description:  Ubiquitin family
  misc_feature (1)..(155): NCBI GI NO: 82733 NR Description: ubiquitin / ribosomal protein S27a - maize
  misc_feature (1)..(155): NCBI GI NO: 902525 NR Description: ubiquitin fusion protein
  misc_feature (1)..(155): NCBI GI NO: 100598 NR Description: ubiquitin / ribosomal protein S27a.1 - barley
  misc_feature (1)..(155): NCBI GI NO: 34894792 NR Description: ubiquitin / ribosomal protein S27a
  misc_feature (1)..(155): NCBI GI NO: 100599 NR Description: ubiquitin / ribosomal protein S27a.2 - barley
  misc_feature (1)..(155): NCBI GI NO: 1044940 NR Description: fusion gene [Zea mays]
  misc_feature (1)..(153): NCBI GI NO: 34581769 NR Description: ubiquitin extension protein [Cucumis sativus]
  misc_feature (1)..(155): NCBI GI NO: 541953 NR Description: ubiquitin/ribosomal protein S27a fusion protein -white lupine
  misc_feature (1)..(153): NCBI GI NO: 279636 NR Description: ubiquitin / ribosomal protein S27a - tomato
  misc_feature (1)..(155): NCBI GI NO: 541954 NR Description: ubiquitin/ribosomal protein S27a fusion protein -white lupine
MQIFVKTLTGKTITLEVESSDTIDNVKAKIQDKEGIPPDQQRLIFAGKQLEDGRTLADYNIQKESTLHLVLRLRGGAKKRKKKTYTKPKKIKHKHKKVKLSVLQFYKVDDATGKVTRLRKECPNTECGAGVFMANHFDRHYCGKCGLTYVYNQKA

SEQ ID NO: 25771 - DNA, 984 bp, Zea mays subsp. mays
  misc_feature (1)..(984): Ceres Seq. ID no. 12347902
  misc_feature (478)..(478): n is a, c, t, g, unknown, or other
aactcccgcaggccgcagcccagcaccggccgctctacgcctccacgccggcacgtcctcgtttctgtccgaggtcatcgcctccgcaacttcgtggccggtgaggtcgcaccaccatggcgtcgctcctagcccggcaggcagcgcaggcgctccgcgcgaggcaaacggcgcagctcgggccggccgcgtcggcgatgcaagggcacctccgtacctacatgaacgcggggattcccaagcggttcaaagaggatgaggagaaagaacagcttgcaaaagatgtcgcaaaagattggaatgctgttttgaaaggagcatcaatacattgtttttgactgaaatggtccgtggcttgatgctaactctcaagtacttctttgatagaaatgtcacaattaactatccgtttgagaagggtcctctgagcccccgcttccgtggtgagcatgctctcagacgttatgaatctggggangagcgctgcattgcttgtaaactatgcgaagctatatgcccagcgcaggcaattacaattgaggctgaagaacgtgaagatggcagtcgccgaaccacaagatatgatattgacatgaccaaatgcatttactgtgggttctgtcaagaggcttgcccagtcgatgctattgttgaggggcctaactttgagtttgccactgagacacacgaggaactactgtacgacaaggagaaattgcttgaaaatggtgatcgctgggagactgagattgctgagaacttgagatctgagagcctctatcgctgaatctgtcttccattatggttgataaactgggttcttccattttccatattttgctcaactagctgatgaataagcaaacgatgtatcataacttaggtacgatgtttttgtaccttggcaccatctgtgtgttttgttcattgccttgctaaaggtggcaccagatgttctttgatgggaaaattccttctgtagct

SEQ ID NO: 25772 - protein, 147 aa, Zea mays subsp. mays
  peptide (1)..(147): Ceres Seq. ID no. 12347903
  misc_feature (80)..(103): Pfam Name: Pfam Description:  4Fe-4S binding domain
  misc_feature (1)..(147): NCBI GI NO: 34915206 NR Description: putative  NADH dehydrogenase
  misc_feature (1)..(147): NCBI GI NO: 6226880 NR Description: NADH-ubiquinone oxidoreductase 23 kDa subunit
  misc_feature (1)..(147): NCBI GI NO: 1076669 NR Description: NADH2 dehydrogenase (ubiquinone) (EC 1
  misc_feature (1)..(147): NCBI GI NO: 15219265 NR Description: NADH dehydrogenase, putative; protein id:At1g79010
  misc_feature (1)..(147): NCBI GI NO: 15219311 NR Description: NADH:ubiquinone oxidoreductase, putative
  misc_feature (1)..(147): NCBI GI NO: 3929358 NR Description: NADH-ubiquinone oxidoreductase 23 kDa subunit
  misc_feature (1)..(147): NCBI GI NO: 11466496 NR Description: NADH dehydrogenase, subunit 8
  misc_feature (1)..(147): NCBI GI NO: 34328786 NR Description: NADH:ubiquinone oxidoreductase subunit 8
  misc_feature (1)..(147): NCBI GI NO: 27807359 NR Description: NADH dehydrogenase
  misc_feature (1)..(147): NCBI GI NO: 17864306 NR Description: NADH:ubiquinone reductase 23kD subunit precursorCG3944-PA
  misc_feature (45)..(45): Xaa is any aa, unknown or other
MVRGLMLTLKYFFDRNVTINYPFEKGPLSPRFRGEHALRRYESGXERCIACKLCEAICPAQAITIEAEEREDGSRRTTRYDIDMTKCIYCGFCQEACPVDAIVEGPNFEFATETHEELLYDKEKLLENGDRWETEIAENLRSESLYR

SEQ ID NO: 25773 - protein, 142 aa, Zea mays subsp. mays
  peptide (1)..(142): Ceres Seq. ID no. 12347904
  misc_feature (75)..(98): Pfam Name: Pfam Description:  4Fe-4S binding domain
  misc_feature (1)..(142): NCBI GI NO: 34915206 NR Description: putative  NADH dehydrogenase
  misc_feature (1)..(142): NCBI GI NO: 6226880 NR Description: NADH-ubiquinone oxidoreductase 23 kDa subunit
  misc_feature (1)..(142): NCBI GI NO: 1076669 NR Description: NADH2 dehydrogenase (ubiquinone) (EC 1
  misc_feature (1)..(142): NCBI GI NO: 15219265 NR Description: NADH dehydrogenase, putative; protein id:At1g79010
  misc_feature (1)..(142): NCBI GI NO: 15219311 NR Description: NADH:ubiquinone oxidoreductase, putative
  misc_feature (1)..(142): NCBI GI NO: 3929358 NR Description: NADH-ubiquinone oxidoreductase 23 kDa subunit
  misc_feature (1)..(142): NCBI GI NO: 11466496 NR Description: NADH dehydrogenase, subunit 8
  misc_feature (1)..(142): NCBI GI NO: 34328786 NR Description: NADH:ubiquinone oxidoreductase subunit 8
  misc_feature (1)..(142): NCBI GI NO: 27807359 NR Description: NADH dehydrogenase
  misc_feature (1)..(142): NCBI GI NO: 17864306 NR Description: NADH:ubiquinone reductase 23kD subunit precursorCG3944-PA
  misc_feature (40)..(40): Xaa is any aa, unknown or other
MLTLKYFFDRNVTINYPFEKGPLSPRFRGEHALRRYESGXERCIACKLCEAICPAQAITIEAEEREDGSRRTTRYDIDMTKCIYCGFCQEACPVDAIVEGPNFEFATETHEELLYDKEKLLENGDRWETEIAENLRSESLYR

SEQ ID NO: 25774 - protein, 85 aa, Zea mays subsp. mays
  peptide (1)..(85): Ceres Seq. ID no. 12347905
  misc_feature (73)..(85): NCBI GI NO: 15219265 NR Description: NADH dehydrogenase, putative; protein id:At1g79010
  misc_feature (67)..(85): NCBI GI NO: 15219311 NR Description: NADH:ubiquinone oxidoreductase, putative
TPAGRSPAPAALRLHAGTSSFLSEVIASATSWPVRSHHHGVAPSPAGSAGAPREANGAARAGRVGDARAPPYLHERGDSQAVQRG

SEQ ID NO: 25775 - DNA, 998 bp, Zea mays subsp. mays
  misc_feature (1)..(998): Ceres Seq. ID no. 12343213
aacagtgaaccaaacaaaagcctcgagccagtgtggtgtggggtcgcgtgctctcttctatcctgctctgctagtgtcaggattccgccctatccatcccatcaacctcagctaaggtccccagcggcggcgaggcgatggcggcgcctgtgacggtgtacggaccgatgctctcaccagctgtggcccgcgtggcggcctgcctcctggagaaggacgtgccgttccagatcgagccggtggacatgtccaagggcgagcacaagtcgccgtccttcctcaagctccagcccttcggacaggtccctgccttcaaggaccacctcacaaccgtctttgagtcaagggctatttgccgttacatatgcgaccagtatgcggactctggtaatcaggccctcttcggcaagaaagaagacggcgcggttggccgcgctgccattgaacagtggatagagtctgaaggccagagctttaacccaccgagcttggctattatcttccagctcgcatttgcaccgatgatgggccggaccactgacctggctgtggttgagcagaatgaagcgaagcttgcgaaggtgcttgatgtgtatgaccaacggctgggggagagccagtattttgctggtgatgatttctcccctggccgaccttgtgcacttgcccaatgcagatttccttgtgaacagaaccagcaaggctggcttgatcaccgagagaaagaatcttgctagatggtgggatgatgtctcgtcccgacctgcatggaaaaaggtcactgagatgcagagcacgccgaggccctcttagagcttttttttgggtttctttgagcagcttctgatggcaattagttgcattctccttgttttgtcatcaagtccttgtctgtaccgtttcctgttctcttatttatcggtcttaattcttgatctatgtatggtttggatctgttcttctggtcctttagtttatataagtacctacaattcttc

SEQ ID NO: 25776 - protein, 199 aa, Zea mays subsp. mays
  peptide (1)..(199): Ceres Seq. ID no. 12343214
  misc_feature (1)..(199): NCBI GI NO: 11385471 NR Description: glutathione S-transferase GST 10 [Zea mays]
  misc_feature (1)..(169): NCBI GI NO: 22758267 NR Description: Putative glutathione S-transferase
  misc_feature (1)..(169): NCBI GI NO: 11177845 NR Description: putative glutathione S-transferase OsGSTF3
  misc_feature (7)..(169): NCBI GI NO: 21217741 NR Description: putative glutathione S-transferase
  misc_feature (8)..(169): NCBI GI NO: 11385459 NR Description: glutathione S-transferase GST 22 [Glycine max]
  misc_feature (1)..(169): NCBI GI NO: 22758269 NR Description: Putative glutathione S-transferase
  misc_feature (1)..(169): NCBI GI NO: 11385469 NR Description: glutathione S-transferase GST 9 [Zea mays]
  misc_feature (5)..(169): NCBI GI NO: 11385463 NR Description: glutathione S-transferase GST 24 [Glycine max]
  misc_feature (5)..(169): NCBI GI NO: 15228488 NR Description: glutathione transferase, putative
  misc_feature (1)..(169): NCBI GI NO: 11385475 NR Description: glutathione S-transferase GST 12 [Zea mays]
MAAPVTVYGPMLSPAVARVAACLLEKDVPFQIEPVDMSKGEHKSPSFLKLQPFGQVPAFKDHLTTVFESRAICRYICDQYADSGNQALFGKKEDGAVGRAAIEQWIESEGQSFNPPSLAIIFQLAFAPMMGRTTDLAVVEQNEAKLAKVLDVYDQRLGESQYFAGDDFSPGRPCALAQCRFPCEQNQQGWLDHREKESC

SEQ ID NO: 25777 - protein, 189 aa, Zea mays subsp. mays
  peptide (1)..(189): Ceres Seq. ID no. 12343215
  misc_feature (1)..(189): NCBI GI NO: 11385471 NR Description: glutathione S-transferase GST 10 [Zea mays]
  misc_feature (1)..(159): NCBI GI NO: 22758267 NR Description: Putative glutathione S-transferase
  misc_feature (1)..(159): NCBI GI NO: 11177845 NR Description: putative glutathione S-transferase OsGSTF3
  misc_feature (1)..(159): NCBI GI NO: 21217741 NR Description: putative glutathione S-transferase
  misc_feature (1)..(159): NCBI GI NO: 11385459 NR Description: glutathione S-transferase GST 22 [Glycine max]
  misc_feature (1)..(159): NCBI GI NO: 22758269 NR Description: Putative glutathione S-transferase
  misc_feature (1)..(159): NCBI GI NO: 11385469 NR Description: glutathione S-transferase GST 9 [Zea mays]
  misc_feature (1)..(159): NCBI GI NO: 11385463 NR Description: glutathione S-transferase GST 24 [Glycine max]
  misc_feature (1)..(159): NCBI GI NO: 15228488 NR Description: glutathione transferase, putative
  misc_feature (1)..(159): NCBI GI NO: 11385475 NR Description: glutathione S-transferase GST 12 [Zea mays]
MLSPAVARVAACLLEKDVPFQIEPVDMSKGEHKSPSFLKLQPFGQVPAFKDHLTTVFESRAICRYICDQYADSGNQALFGKKEDGAVGRAAIEQWIESEGQSFNPPSLAIIFQLAFAPMMGRTTDLAVVEQNEAKLAKVLDVYDQRLGESQYFAGDDFSPGRPCALAQCRFPCEQNQQGWLDHREKESC

SEQ ID NO: 25778 - protein, 163 aa, Zea mays subsp. mays
  peptide (1)..(163): Ceres Seq. ID no. 12343216
  misc_feature (1)..(163): NCBI GI NO: 11385471 NR Description: glutathione S-transferase GST 10 [Zea mays]
  misc_feature (1)..(133): NCBI GI NO: 22758267 NR Description: Putative glutathione S-transferase
  misc_feature (1)..(133): NCBI GI NO: 11177845 NR Description: putative glutathione S-transferase OsGSTF3
  misc_feature (1)..(133): NCBI GI NO: 21217741 NR Description: putative glutathione S-transferase
  misc_feature (1)..(133): NCBI GI NO: 11385459 NR Description: glutathione S-transferase GST 22 [Glycine max]
  misc_feature (1)..(133): NCBI GI NO: 22758269 NR Description: Putative glutathione S-transferase
  misc_feature (1)..(133): NCBI GI NO: 11385469 NR Description: glutathione S-transferase GST 9 [Zea mays]
  misc_feature (1)..(133): NCBI GI NO: 11385463 NR Description: glutathione S-transferase GST 24 [Glycine max]
  misc_feature (1)..(133): NCBI GI NO: 15228488 NR Description: glutathione transferase, putative
  misc_feature (1)..(133): NCBI GI NO: 11385475 NR Description: glutathione S-transferase GST 12 [Zea mays]
MSKGEHKSPSFLKLQPFGQVPAFKDHLTTVFESRAICRYICDQYADSGNQALFGKKEDGAVGRAAIEQWIESEGQSFNPPSLAIIFQLAFAPMMGRTTDLAVVEQNEAKLAKVLDVYDQRLGESQYFAGDDFSPGRPCALAQCRFPCEQNQQGWLDHREKESC

SEQ ID NO: 25779 - DNA, 757 bp, Zea mays subsp. mays
  misc_feature (1)..(757): Ceres Seq. ID no. 12579198
aattccgtttgtttccgacggcacaaggaaaaaaaaagaccagactgagggctcctctcccgttccgatcgccaattcgccttccaccgcctgcaaccctttcttcccttctcggtcatcgtgacggcatcacgcgcgcgctctcctcttccacgagtccgtcagcctgctaagtcttaagatggcgtcaagcaatggtcagacagaagctccagcaccatctgtccccaaaaatcctgctatggcatcatgccggaagaagaaaacagatgatgctaccttccttgaagatctgaaagaccacatggatgagttcattcacgcctccatggatgagcacaagagctgctttaagaagacaattcagaagatgtttgggatgtcgaaggctgttgcagagagatccgcggcggaagcaaacaaagctgaagttgaaagtgctttgccacttcagaccagtgtctcgcagtagaatttcatgcagtagaatttcatgttggtagtttcttgctcgtgccaatagttttatataagggtttttgttgctgtgttttctgaaacgcataagcgtgtcagtagcatgttttcataaccggattgtagtgcttcattatctatagttttctgtacgtgtaaaatagaccagcgtaacagcgtagtttgcttcattctccgaagtattgtatggctgtacacccaggcatctgggcatcatgaacccaactgattggctaaatgaaataaatctcctccatcc

SEQ ID NO: 25780 - protein, 96 aa, Zea mays subsp. mays
  peptide (1)..(96): Ceres Seq. ID no. 12579199
  misc_feature (1)..(96): NCBI GI NO: 40253393 NR Description: hypothetical protein
  misc_feature (16)..(96): NCBI GI NO: 18420404 NR Description: Expressed protein; protein id: At4g39235
  misc_feature (19)..(96): NCBI GI NO: 21553485 NR Description: unknown [Arabidopsis thaliana]
  misc_feature (7)..(95): NCBI GI NO: 15230009 NR Description: unknown protein; protein id: At3g05570.1
  misc_feature (1)..(96): NCBI GI NO: 15226603 NR Description: unknown protein; protein id: At2g21640.1
  misc_feature (1)..(58): NCBI GI NO: 14626302 NR Description: hypothetical protein
MASSNGQTEAPAPSVPKNPAMASCRKKKTDDATFLEDLKDHMDEFIHASMDEHKSCFKKTIQKMFGMSKAVAERSAAEANKAEVESALPLQTSVSQ

SEQ ID NO: 25781 - protein, 76 aa, Zea mays subsp. mays
  peptide (1)..(76): Ceres Seq. ID no. 12579200
  misc_feature (1)..(76): NCBI GI NO: 40253393 NR Description: hypothetical protein
  misc_feature (1)..(76): NCBI GI NO: 18420404 NR Description: Expressed protein; protein id: At4g39235
  misc_feature (1)..(76): NCBI GI NO: 21553485 NR Description: unknown [Arabidopsis thaliana]
  misc_feature (1)..(75): NCBI GI NO: 15230009 NR Description: unknown protein; protein id: At3g05570.1
  misc_feature (1)..(76): NCBI GI NO: 15226603 NR Description: unknown protein; protein id: At2g21640.1
  misc_feature (1)..(38): NCBI GI NO: 14626302 NR Description: hypothetical protein
MASCRKKKTDDATFLEDLKDHMDEFIHASMDEHKSCFKKTIQKMFGMSKAVAERSAAEANKAEVESALPLQTSVSQ

SEQ ID NO: 25782 - protein, 64 aa, Zea mays subsp. mays
  peptide (1)..(64): Ceres Seq. ID no. 12579201
MSSFTPPWMSTRAALRRQFRRCLGCRRLLQRDPRRKQTKLKLKVLCHFRPVSRSRISCSRISCW

SEQ ID NO: 25783 - DNA, 980 bp, Zea mays subsp. mays
  misc_feature (1)..(980): Ceres Seq. ID no. 12348303
  misc_feature (672)..(672): n is a, c, t, g, unknown, or other
  misc_feature (671)..(671): n is a, c, t, g, unknown, or other
aaccccccaactccgttcattgcggcaggccggcagccaaatcgagatctcgcccgtgctgaatcccaccactctcgccgacccggccgcagcaagcgcagcgcatcgacaggagccgaagaaccgaagaggagatggcgtcggcgctgtcctccctgcgctacggcgacagcctctcggtggtgggcatctccgccgcgacggccgtgctctgcgaggccatgtcctggctcctcatctaccgcaccgccacctacaactccctccgcgcctccatcgagcgccactcccgcaagctagacgccatgaagtccggctccacctccgcctcctccggcaccgccgcctcctccgcgcagcccgcatcgtcgcgggctaagaagatggaccgcgtcgagaccagcctcaaggacgctgcgcgggagctctcgctcgccaagctcaagtcgggcgccgtcgtcgctgtcatgctcttcgtcgtcttcggcctgctcaactccctcttcgagggccgcaccgtcgccaagctgcccttcgcgcccatcccgctcgtccagcggatgagccaccgcggactgcccgggaacgatcccaccgactgctccatggttttcctctacttcctctgctccatgagcatccgaaccaacctgcagaaactgcttggcttnncgccgccacgcgcggctgctgcagccggcggtggcctcttccccatgcccgatccgaaagttaattgaggctgatttccaagacgagtgaatccgaaccaaagatagcaatagtcgcccgggaaagactctgtgcgactgcaccgatatccgtacccaattcattttccacagctcaccggtttgttgttgcgcaccggtgattgcaaacctgaaggttggcttatttattgcattgactgaaacaacgaacatgaattacctgctgggaggcagagaaatgtgcagcctaatttttttcggcctctg

SEQ ID NO: 25784 - protein, 201 aa, Zea mays subsp. mays
  peptide (1)..(201): Ceres Seq. ID no. 12348304
  misc_feature (6)..(201): NCBI GI NO: 18399454 NR Description: expressed protein; protein id: At3g12030
  misc_feature (1)..(201): NCBI GI NO: 21554161 NR Description: unknown [Arabidopsis thaliana]
  misc_feature (6)..(201): NCBI GI NO: 21553820 NR Description: unknown [Arabidopsis thaliana]
  misc_feature (1)..(201): NCBI GI NO: 15240119 NR Description: putative protein; protein id: At5g06660
  misc_feature (7)..(198): NCBI GI NO: 3283893 NR Description: unknown [Homo sapiens]
  misc_feature (7)..(198): NCBI GI NO: 23956188 NR Description: RIKEN cDNA 1190006A08 [Mus musculus]
  misc_feature (1)..(196): NCBI GI NO: 31238723 NR Description: ENSANGP00000016559 [Anopheles gambiae]
  misc_feature (16)..(198): NCBI GI NO: 33328806 NR Description: meg-2-like protein [Rattus norvegicus]
  misc_feature (10)..(196): NCBI GI NO: 24585112 NR Description: CG10470-PA [Drosophila melanogaster]
  misc_feature (10)..(196): NCBI GI NO: 3170241 NR Description: TU37B2 [Anopheles gambiae]
  misc_feature (179)..(179): Xaa is any aa, unknown or other
  misc_feature (180)..(180): Xaa is any aa, unknown or other
MASALSSLRYGDSLSVVGISAATAVLCEAMSWLLIYRTATYNSLRASIERHSRKLDAMKSGSTSASSGTAASSAQPASSRAKKMDRVETSLKDAARELSLAKLKSGAVVAVMLFVVFGLLNSLFEGRTVAKLPFAPIPLVQRMSHRGLPGNDPTDCSMVFLYFLCSMSIRTNLQKLLGXXPPRAAAAAGGGLFPMPDPKVN

SEQ ID NO: 25785 - protein, 172 aa, Zea mays subsp. mays
  peptide (1)..(172): Ceres Seq. ID no. 12348305
  misc_feature (1)..(172): NCBI GI NO: 18399454 NR Description: expressed protein; protein id: At3g12030
  misc_feature (1)..(172): NCBI GI NO: 21554161 NR Description: unknown [Arabidopsis thaliana]
  misc_feature (1)..(172): NCBI GI NO: 21553820 NR Description: unknown [Arabidopsis thaliana]
  misc_feature (1)..(172): NCBI GI NO: 15240119 NR Description: putative protein; protein id: At5g06660
  misc_feature (1)..(169): NCBI GI NO: 3283893 NR Description: unknown [Homo sapiens]
  misc_feature (1)..(169): NCBI GI NO: 23956188 NR Description: RIKEN cDNA 1190006A08 [Mus musculus]
  misc_feature (1)..(167): NCBI GI NO: 31238723 NR Description: ENSANGP00000016559 [Anopheles gambiae]
  misc_feature (1)..(169): NCBI GI NO: 33328806 NR Description: meg-2-like protein [Rattus norvegicus]
  misc_feature (1)..(167): NCBI GI NO: 24585112 NR Description: CG10470-PA [Drosophila melanogaster]
  misc_feature (1)..(167): NCBI GI NO: 3170241 NR Description: TU37B2 [Anopheles gambiae]
  misc_feature (150)..(150): Xaa is any aa, unknown or other
  misc_feature (151)..(151): Xaa is any aa, unknown or other
MSWLLIYRTATYNSLRASIERHSRKLDAMKSGSTSASSGTAASSAQPASSRAKKMDRVETSLKDAARELSLAKLKSGAVVAVMLFVVFGLLNSLFEGRTVAKLPFAPIPLVQRMSHRGLPGNDPTDCSMVFLYFLCSMSIRTNLQKLLGXXPPRAAAAAGGGLFPMPDPKVN

SEQ ID NO: 25786 - protein, 144 aa, Zea mays subsp. mays
  peptide (1)..(144): Ceres Seq. ID no. 12348306
  misc_feature (1)..(144): NCBI GI NO: 18399454 NR Description: expressed protein; protein id: At3g12030
  misc_feature (1)..(144): NCBI GI NO: 21554161 NR Description: unknown [Arabidopsis thaliana]
  misc_feature (1)..(144): NCBI GI NO: 21553820 NR Description: unknown [Arabidopsis thaliana]
  misc_feature (1)..(144): NCBI GI NO: 15240119 NR Description: putative protein; protein id: At5g06660
  misc_feature (1)..(141): NCBI GI NO: 3283893 NR Description: unknown [Homo sapiens]
  misc_feature (1)..(141): NCBI GI NO: 23956188 NR Description: RIKEN cDNA 1190006A08 [Mus musculus]
  misc_feature (1)..(139): NCBI GI NO: 31238723 NR Description: ENSANGP00000016559 [Anopheles gambiae]
  misc_feature (1)..(141): NCBI GI NO: 33328806 NR Description: meg-2-like protein [Rattus norvegicus]
  misc_feature (1)..(139): NCBI GI NO: 24585112 NR Description: CG10470-PA [Drosophila melanogaster]
  misc_feature (1)..(139): NCBI GI NO: 3170241 NR Description: TU37B2 [Anopheles gambiae]
  misc_feature (122)..(122): Xaa is any aa, unknown or other
  misc_feature (123)..(123): Xaa is any aa, unknown or other
MKSGSTSASSGTAASSAQPASSRAKKMDRVETSLKDAARELSLAKLKSGAVVAVMLFVVFGLLNSLFEGRTVAKLPFAPIPLVQRMSHRGLPGNDPTDCSMVFLYFLCSMSIRTNLQKLLGXXPPRAAAAAGGGLFPMPDPKVN

SEQ ID NO: 25787 - DNA, 1062 bp, Zea mays subsp. mays
  misc_feature (1)..(1062): Ceres Seq. ID no. 12340757
acacactactttccctcgtgcggccgccgccctacaacaggtgccccaggtcttcgctgcgccattcgccagcgacgagcacccaacaggctcagaaacatcgctgacatccacatgcaccacagtagttcagtagagtagctgttggaacccacacaccggcgatggcaactgctcctgtgacatcctccatggctacgaactccacctgtgtgcggctgcctagcatgcccctgaggcgtgcacccgccatcgtctcctttgcctctcgtccatggtcaaccgcaatgacctcatgtactggattgtcgcggcactctgatgtggttgccgccgcggggcaccagaagttgatggggtctttgaacaacaacgagggactcatgtttggggtggttgtggcacggttcaacgaggtcgtgacaaatttgttactacagggtgccctggaaactttcgagcgatactctgttaaagcagaaaatataacagttgttagtgttcctggaagctttgaagttcctataacggcacaaaagcttgggaaatctggaaaatttgatgcaattctgtgcattggagctgtgattagaggtgacacaacccactatgatgccgttgcaaactcagctgcatcaggtgtactcaatgctggattatctgctggtgttccttgtgtatttggtgttctaacctgtgaagacatggatcaggcactgaaccgtgctggtggcaaggctggaaacaaaggagctgaagctgctcttactgccattgagatggcctcgctgttccggcatcacttaggctgacaccttgtgtattctgattttctatacacgaggcgtcagcatttcctcctatcaagagttttggctaatagagagcttttctgccgcggctagtataatttatttccaagtttgttggttcggtgcggattggttgctttccttctgagacctgaaaagctcacaagacatgtctgtaaacctgacatcgtgaataattgtctccacgaacgaaatatggtcatgaataaagctgcacaagtgttttgtc

SEQ ID NO: 25788 - protein, 215 aa, Zea mays subsp. mays
  peptide (1)..(215): Ceres Seq. ID no. 12340758
  misc_feature (71)..(213): Pfam Name: Pfam Description:  6,7-dimethyl-8-ribityllumazine synthase
  misc_feature (2)..(214): NCBI GI NO: 38345388 NR Description: OSJNBa0067K08.17
  misc_feature (31)..(214): NCBI GI NO: 15224809 NR Description: 6,7-dimethyl-8-ribityllumazine synthase precursor
  misc_feature (1)..(214): NCBI GI NO: 20139859 NR Description: 6
  misc_feature (21)..(214): NCBI GI NO: 5532608 NR Description: 6,7-dimethyl-8-ribityllumazine synthase precursor
  misc_feature (62)..(214): NCBI GI NO: 9954974 NR Description: Chain A
  misc_feature (62)..(211): NCBI GI NO: 1710405 NR Description: 6,7-dimethyl-8-ribityllumazine synthase
  misc_feature (63)..(211): NCBI GI NO: 2497762 NR Description: 6,7-dimethyl-8-ribityllumazine synthase
  misc_feature (62)..(211): NCBI GI NO: 32034734 NR Description: hypothetical protein
  misc_feature (62)..(211): NCBI GI NO: 33152277 NR Description: 6,7-dimethyl-8-ribityllumazine synthase
  misc_feature (72)..(212): NCBI GI NO: 21402167 NR Description: DMRL_synthase
MATAPVTSSMATNSTCVRLPSMPLRRAPAIVSFASRPWSTAMTSCTGLSRHSDVVAAAGHQKLMGSLNNNEGLMFGVVVARFNEVVTNLLLQGALETFERYSVKAENITVVSVPGSFEVPITAQKLGKSGKFDAILCIGAVIRGDTTHYDAVANSAASGVLNAGLSAGVPCVFGVLTCEDMDQALNRAGGKAGNKGAEAALTAIEMASLFRHHLG

SEQ ID NO: 25789 - protein, 206 aa, Zea mays subsp. mays
  peptide (1)..(206): Ceres Seq. ID no. 12340759
  misc_feature (62)..(204): Pfam Name: Pfam Description:  6,7-dimethyl-8-ribityllumazine synthase
  misc_feature (1)..(205): NCBI GI NO: 38345388 NR Description: OSJNBa0067K08.17
  misc_feature (22)..(205): NCBI GI NO: 15224809 NR Description: 6,7-dimethyl-8-ribityllumazine synthase precursor
  misc_feature (1)..(205): NCBI GI NO: 20139859 NR Description: 6
  misc_feature (12)..(205): NCBI GI NO: 5532608 NR Description: 6,7-dimethyl-8-ribityllumazine synthase precursor
  misc_feature (53)..(205): NCBI GI NO: 9954974 NR Description: Chain A
  misc_feature (53)..(202): NCBI GI NO: 1710405 NR Description: 6,7-dimethyl-8-ribityllumazine synthase
  misc_feature (54)..(202): NCBI GI NO: 2497762 NR Description: 6,7-dimethyl-8-ribityllumazine synthase
  misc_feature (53)..(202): NCBI GI NO: 32034734 NR Description: hypothetical protein
  misc_feature (53)..(202): NCBI GI NO: 33152277 NR Description: 6,7-dimethyl-8-ribityllumazine synthase
  misc_feature (63)..(203): NCBI GI NO: 21402167 NR Description: DMRL_synthase
MATNSTCVRLPSMPLRRAPAIVSFASRPWSTAMTSCTGLSRHSDVVAAAGHQKLMGSLNNNEGLMFGVVVARFNEVVTNLLLQGALETFERYSVKAENITVVSVPGSFEVPITAQKLGKSGKFDAILCIGAVIRGDTTHYDAVANSAASGVLNAGLSAGVPCVFGVLTCEDMDQALNRAGGKAGNKGAEAALTAIEMASLFRHHLG

SEQ ID NO: 25790 - protein, 194 aa, Zea mays subsp. mays
  peptide (1)..(194): Ceres Seq. ID no. 12340760
  misc_feature (50)..(192): Pfam Name: Pfam Description:  6,7-dimethyl-8-ribityllumazine synthase
  misc_feature (1)..(193): NCBI GI NO: 38345388 NR Description: OSJNBa0067K08.17
  misc_feature (10)..(193): NCBI GI NO: 15224809 NR Description: 6,7-dimethyl-8-ribityllumazine synthase precursor
  misc_feature (1)..(193): NCBI GI NO: 20139859 NR Description: 6
  misc_feature (1)..(193): NCBI GI NO: 5532608 NR Description: 6,7-dimethyl-8-ribityllumazine synthase precursor
  misc_feature (41)..(193): NCBI GI NO: 9954974 NR Description: Chain A
  misc_feature (41)..(190): NCBI GI NO: 1710405 NR Description: 6,7-dimethyl-8-ribityllumazine synthase
  misc_feature (42)..(190): NCBI GI NO: 2497762 NR Description: 6,7-dimethyl-8-ribityllumazine synthase
  misc_feature (41)..(190): NCBI GI NO: 32034734 NR Description: hypothetical protein
  misc_feature (41)..(190): NCBI GI NO: 33152277 NR Description: 6,7-dimethyl-8-ribityllumazine synthase
  misc_feature (51)..(191): NCBI GI NO: 21402167 NR Description: DMRL_synthase
MPLRRAPAIVSFASRPWSTAMTSCTGLSRHSDVVAAAGHQKLMGSLNNNEGLMFGVVVARFNEVVTNLLLQGALETFERYSVKAENITVVSVPGSFEVPITAQKLGKSGKFDAILCIGAVIRGDTTHYDAVANSAASGVLNAGLSAGVPCVFGVLTCEDMDQALNRAGGKAGNKGAEAALTAIEMASLFRHHLG

SEQ ID NO: 25791 - DNA, 786 bp, Zea mays subsp. mays
  misc_feature (1)..(786): Ceres Seq. ID no. 12365367
gtcaactgatcaagccaaagccgaacaccaccacaaggcagcagccgaacaccaaggcagcagccgccaccacttcattgcgcgaatcggagcccgtggccgtcgcctccgccctcgcgattcgccgccgttgcccacgagcgaggcttcctcctcttcgtcgccgccgtcgcaggaggggaaagaggataaactgccatggcgggcaggctcctcgcgaatctaatcgtcatgggcggaaccgtggttggcagggccatgctccaggcctaccgccaggccatcgtcaatgcaaacaaaactggagctgcccaagaagctataaatggtattagacgggctagcaaggccatgactgagcaagaagcccggcaaattcttggtatcagtgaaaattcgacgtgggaagagattgtccagaagtacgacacaatgtttgagaggaataacaagaacggcagcttctatctccagtcaaaggttcatagagcgaaagaatgcctggaacctttatatcaaaagcctgatgtactgaactgagattttgcagacgccctagcttctgtttgaagcggtatgcctaattgatcgatttattagtgtgcccagagatcaacgttcagtttattgatcggtttgccaatgcgcccagagatcaacgttcagttttgagttatgtgttgggcgcatcaggttggttcgttgtaatgccagaataatgtttaacaaacatactgaattttggctgtttctcattggcaacgcctcagtcactggttttaattc

SEQ ID NO: 25792 - protein, 113 aa, Zea mays subsp. mays
  peptide (1)..(113): Ceres Seq. ID no. 12365368
  misc_feature (2)..(111): Pfam Name: UPF0108 Pfam Description: Uncharacterised protein family
  misc_feature (2)..(111): NCBI GI NO: 34905796 NR Description: P0401G10.24
  misc_feature (1)..(107): NCBI GI NO: 18411133 NR Description: putative protein; protein id: At3g59280
  misc_feature (2)..(107): NCBI GI NO: 11357639 NR Description: hypothetical protein F25L23
  misc_feature (12)..(108): NCBI GI NO: 37535410 NR Description: putative pol polyprotein
  misc_feature (1)..(108): NCBI GI NO: 18424521 NR Description: auxin-regulated protein; protein id: At5g61880
  misc_feature (12)..(108): NCBI GI NO: 10176880 NR Description: gene_id:MAC9.20~unknown protein
MAGRLLANLIVMGGTVVGRAMLQAYRQAIVNANKTGAAQEAINGIRRASKAMTEQEARQILGISENSTWEEIVQKYDTMFERNNKNGSFYLQSKVHRAKECLEPLYQKPDVLN

SEQ ID NO: 25793 - protein, 110 aa, Zea mays subsp. mays
  peptide (1)..(110): Ceres Seq. ID no. 12365369
QLIKPKPNTTTRQQPNTKAAAATTSLRESEPVAVASALAIRRRCPRARLPPLRRRRRRRGKRINCHGGQAPRESNRHGRNRGWQGHAPGLPPGHRQCKQNWSCPRSYKWY

SEQ ID NO: 25794 - protein, 102 aa, Zea mays subsp. mays
  peptide (1)..(102): Ceres Seq. ID no. 12365370
  misc_feature (1)..(100): Pfam Name: UPF0108 Pfam Description: Uncharacterised protein family
  misc_feature (1)..(100): NCBI GI NO: 34905796 NR Description: P0401G10.24
  misc_feature (1)..(96): NCBI GI NO: 18411133 NR Description: putative protein; protein id: At3g59280
  misc_feature (1)..(96): NCBI GI NO: 11357639 NR Description: hypothetical protein F25L23
  misc_feature (1)..(97): NCBI GI NO: 37535410 NR Description: putative pol polyprotein
  misc_feature (1)..(97): NCBI GI NO: 18424521 NR Description: auxin-regulated protein; protein id: At5g61880
  misc_feature (1)..(97): NCBI GI NO: 10176880 NR Description: gene_id:MAC9.20~unknown protein
MGGTVVGRAMLQAYRQAIVNANKTGAAQEAINGIRRASKAMTEQEARQILGISENSTWEEIVQKYDTMFERNNKNGSFYLQSKVHRAKECLEPLYQKPDVLN

SEQ ID NO: 25795 - DNA, 449 bp, Zea mays subsp. mays
  misc_feature (1)..(449): Ceres Seq. ID no. 12595631
  misc_feature (315)..(315): n is a, c, t, g, unknown, or other
  misc_feature (349)..(349): n is a, c, t, g, unknown, or other
  misc_feature (298)..(298): n is a, c, t, g, unknown, or other
aaaaagcggcgtgatgcagttcctccgaggcagcggcggcggggcgggggcggtgggttcccgggggtggcgtgggaggtgttgcggcggcacttctctaagaagcggtccgttgcacgtgaggcggatcaaccccaaggtgcccaaggaggaggccgtcgccatttccggccgactcctccagatcctctccgaccatgggcccctcaccgtcggcaacacctggaaccacgccaaggatgctggcatcgctggtctgaacagcaagacgcacatgaagatcctgctgaaatggatnacggggaaaatgtcgtnaagctgaccctgcgtgcacgtgggcaacgcgaanaagttcctctactccccgtccactgaaagcagcagcagcgccggcgcatcaccgtcatccacatcggcctcgcagtgacggtcaatcgccgttaagcctt

SEQ ID NO: 25796 - protein, 124 aa, Zea mays subsp. mays
  peptide (1)..(124): Ceres Seq. ID no. 12595632
  misc_feature (100)..(100): Xaa is any aa, unknown or other
  misc_feature (105)..(105): Xaa is any aa, unknown or other
  misc_feature (117)..(117): Xaa is any aa, unknown or other
KKRRDAVPPRQRRRGGGGGFPGVAWEVLRRHFSKKRSVAREADQPQGAQGGGRRHFRPTPPDPLRPWAPHRRQHLEPRQGCWHRWSEQQDAHEDPAEMDXGENVXKLTLRARGQREXVPLLPVH

SEQ ID NO: 25797 - protein, 106 aa, Zea mays subsp. mays
  peptide (1)..(106): Ceres Seq. ID no. 12595633
  misc_feature (5)..(106): NCBI GI NO: 27573361 NR Description: unknown protein
  misc_feature (34)..(106): NCBI GI NO: 18410491 NR Description: expressed protein; protein id: At1g73940
  misc_feature (40)..(106): NCBI GI NO: 15239880 NR Description: putative protein; protein id: At5g49410
  misc_feature (40)..(106): NCBI GI NO: 21594042 NR Description: unknown [Arabidopsis thaliana]
  misc_feature (34)..(106): NCBI GI NO: 38637563 NR Description: unknown protein
  misc_feature (99)..(99): Xaa is any aa, unknown or other
  misc_feature (105)..(105): Xaa is any aa, unknown or other
KSGVMQFLRGSGGGAGAVGSRGWRGRCCGGTSLRSGPLHVRRINPKVPKEEAVAISGRLLQILSDHGPLTVGNTWNHAKDAGIAGLNSKTHMKILLKWXTGKMSXS

SEQ ID NO: 25798 - protein, 102 aa, Zea mays subsp. mays
  peptide (1)..(102): Ceres Seq. ID no. 12595634
  misc_feature (1)..(102): NCBI GI NO: 27573361 NR Description: unknown protein
  misc_feature (30)..(102): NCBI GI NO: 18410491 NR Description: expressed protein; protein id: At1g73940
  misc_feature (36)..(102): NCBI GI NO: 15239880 NR Description: putative protein; protein id: At5g49410
  misc_feature (36)..(102): NCBI GI NO: 21594042 NR Description: unknown [Arabidopsis thaliana]
  misc_feature (30)..(102): NCBI GI NO: 38637563 NR Description: unknown protein
  misc_feature (95)..(95): Xaa is any aa, unknown or other
  misc_feature (101)..(101): Xaa is any aa, unknown or other
MQFLRGSGGGAGAVGSRGWRGRCCGGTSLRSGPLHVRRINPKVPKEEAVAISGRLLQILSDHGPLTVGNTWNHAKDAGIAGLNSKTHMKILLKWXTGKMSXS

SEQ ID NO: 25799 - DNA, 666 bp, Zea mays subsp. mays
  misc_feature (1)..(666): Ceres Seq. ID no. 12401661
cgggccacctcgagctgcgcaaccgcgaccccgacgacaacccgctggtgacgttcaactacttctcgcaccccgaggacctccgccgctgcgtggccggcttgtcggtcatcgagcgcgtcatccactcccaggccttcaagaacttcacgtaccccgacttctccatggagacgctgctcaacatgtcgacggggttccccgtcaacctgctgccccggcacgacaacgactccacgtcgcttgagatgttctgcaaggacaccgtcatgaccatctggcactaccacggtggctgccaggtcggcagggtcgtcgacgctgaataccgagtgctcggcatcgacgcgctgcgcgtcattgacggctccactttcaacgcctcgccaggaaccaacccgcaggcaaccgtcatgatgctcggcaggtatatgggagtcagaatcacaaacgaaaggttggcagctgaaggattagagggaacaaaaccgtgatgatcctataatccaagacagtaggcgaggcgtattaagaatctctattgaactatgtaatgctggattcaatattgttggtgtgattctgatattgataggttgcacatattgtcggagttgtatcatgttgtttgttgttactatgtggactattatgagtgaaatctgc

SEQ ID NO: 25800 - protein, 163 aa, Zea mays subsp. mays
  peptide (1)..(163): Ceres Seq. ID no. 12401662
  misc_feature (1)..(144): Pfam Name: Pfam Description:  GMC oxidoreductase
  misc_feature (1)..(158): NCBI GI NO: 38605946 NR Description: OSJNBa0019K04.7
  misc_feature (1)..(152): NCBI GI NO: 37536228 NR Description: putative mandelonitrile lyase
  misc_feature (1)..(152): NCBI GI NO: 11358959 NR Description: probable mandelonitrile lyase (EC 4.1.2.10)
  misc_feature (1)..(152): NCBI GI NO: 15242236 NR Description: mandelonitrile lyase-like protein
  misc_feature (1)..(159): NCBI GI NO: 18410417 NR Description: mandelonitrile lyase-like protein
  misc_feature (1)..(159): NCBI GI NO: 24417440 NR Description: unknown [Arabidopsis thaliana]
  misc_feature (1)..(153): NCBI GI NO: 8778640 NR Description: F5O11.31 [Arabidopsis thaliana]
  misc_feature (1)..(153): NCBI GI NO: 22329512 NR Description: hypothetical protein; protein id: At1g12570
  misc_feature (1)..(153): NCBI GI NO: 17978954 NR Description: At1g12570/T12C24_9 [Arabidopsis thaliana]
  misc_feature (1)..(153): NCBI GI NO: 9502391 NR Description: T12C24.11 [Arabidopsis thaliana]
GHLELRNRDPDDNPLVTFNYFSHPEDLRRCVAGLSVIERVIHSQAFKNFTYPDFSMETLLNMSTGFPVNLLPRHDNDSTSLEMFCKDTVMTIWHYHGGCQVGRVVDAEYRVLGIDALRVIDGSTFNASPGTNPQATVMMLGRYMGVRITNERLAAEGLEGTKP

SEQ ID NO: 25801 - protein, 108 aa, Zea mays subsp. mays
  peptide (1)..(108): Ceres Seq. ID no. 12401663
  misc_feature (1)..(89): Pfam Name: Pfam Description:  GMC oxidoreductase
  misc_feature (1)..(103): NCBI GI NO: 38605946 NR Description: OSJNBa0019K04.7
  misc_feature (1)..(97): NCBI GI NO: 37536228 NR Description: putative mandelonitrile lyase
  misc_feature (1)..(97): NCBI GI NO: 11358959 NR Description: probable mandelonitrile lyase (EC 4.1.2.10)
  misc_feature (1)..(97): NCBI GI NO: 15242236 NR Description: mandelonitrile lyase-like protein
  misc_feature (1)..(104): NCBI GI NO: 18410417 NR Description: mandelonitrile lyase-like protein
  misc_feature (1)..(104): NCBI GI NO: 24417440 NR Description: unknown [Arabidopsis thaliana]
  misc_feature (1)..(98): NCBI GI NO: 8778640 NR Description: F5O11.31 [Arabidopsis thaliana]
  misc_feature (1)..(98): NCBI GI NO: 9502391 NR Description: T12C24.11 [Arabidopsis thaliana]
  misc_feature (1)..(98): NCBI GI NO: 22329512 NR Description: hypothetical protein; protein id: At1g12570
  misc_feature (1)..(98): NCBI GI NO: 17978954 NR Description: At1g12570/T12C24_9 [Arabidopsis thaliana]
METLLNMSTGFPVNLLPRHDNDSTSLEMFCKDTVMTIWHYHGGCQVGRVVDAEYRVLGIDALRVIDGSTFNASPGTNPQATVMMLGRYMGVRITNERLAAEGLEGTKP

SEQ ID NO: 25802 - protein, 102 aa, Zea mays subsp. mays
  peptide (1)..(102): Ceres Seq. ID no. 12401664
  misc_feature (1)..(83): Pfam Name: Pfam Description:  GMC oxidoreductase
  misc_feature (1)..(97): NCBI GI NO: 38605946 NR Description: OSJNBa0019K04.7
  misc_feature (1)..(91): NCBI GI NO: 37536228 NR Description: putative mandelonitrile lyase
  misc_feature (1)..(91): NCBI GI NO: 11358959 NR Description: probable mandelonitrile lyase (EC 4.1.2.10)
  misc_feature (1)..(91): NCBI GI NO: 15242236 NR Description: mandelonitrile lyase-like protein
  misc_feature (1)..(98): NCBI GI NO: 18410417 NR Description: mandelonitrile lyase-like protein
  misc_feature (1)..(98): NCBI GI NO: 24417440 NR Description: unknown [Arabidopsis thaliana]
  misc_feature (1)..(92): NCBI GI NO: 8778640 NR Description: F5O11.31 [Arabidopsis thaliana]
  misc_feature (1)..(92): NCBI GI NO: 17978954 NR Description: At1g12570/T12C24_9 [Arabidopsis thaliana]
  misc_feature (1)..(92): NCBI GI NO: 9502391 NR Description: T12C24.11 [Arabidopsis thaliana]
  misc_feature (1)..(92): NCBI GI NO: 22329512 NR Description: hypothetical protein; protein id: At1g12570
MSTGFPVNLLPRHDNDSTSLEMFCKDTVMTIWHYHGGCQVGRVVDAEYRVLGIDALRVIDGSTFNASPGTNPQATVMMLGRYMGVRITNERLAAEGLEGTKP

SEQ ID NO: 25803 - DNA, 1316 bp, Zea mays subsp. mays
  misc_feature (1)..(1316): Ceres Seq. ID no. 12358113
gtgtgccccgtctcggaacagcgcggaccaccagagcgtgcgcgtccgtgccccacccctccctctctatccatggcggtcccccgcgggtgcctcgggctccccctggtcgccgtgctcctcgcgtccctctgccgcggccaggcggcggtgagggagctcaaggtcgggtactacgccgagacgtgcccggaggccgaggacatcgtccgtgagaccatggcgcgcgcgcgcgcacgcgaggcccgcagcgtcgcctccgtcatgcgcctccagttccacgactgcttcgtcaacgggtgcgacggctcggtgctgatggacgccacgccgacgatgcccggcgagaaggatgcgctctccaacatcaactccctgcgctcgttcgaggtcgtcgacgagatcaaggacgcgctggaggagcgctgccccggagtggtctcctgcgccgacatcgtcatcattgccgcccgcgacgccgtcgtcctgaccggtgggcctaactgggaggtgcggctcgggcgcgaggacagcatgacggcgagccaggaggacgcggacaacatcatgccgagcccgcgcgcaaacgcgagcgctctcatccggctcttcgcggggctcaacctcagcgtcaccgacctggtcgcgctctcgggctcgcactccatcggcgaggcccgctgcttctccatcgtcttccgcctctacaaccagtctggatccggccgccccgacccgcacatggacaccgcctaccgccgctcgctcgacgcactctgccccaagggcggcgacgaggaggtcacgggaggcctggacgccaccccacgcatcttcgacaaccagtacttcgaggacctcgtcgcgctccgcggcttcctcaactccgaccagacgctcttctctgacaacaccaggacccgtcgggtcgtcgagcggctcagcaaggaccaggacgccttcttcagggccttcatcgaggggatgataaagatgggggagctccaaaaccccaggaaaggggagatacggcgcaactgtcgcgttgctaacaactcgccgtggcaaccaaggacggggatggcgtccggacagtcgacatctgagctccggtgatgaggttggtgtttcagaagaaatcgagccctgatatggtactaatatgttgacatgcattgttgtttttttggtcgtgtgtaagttttgcacctacctatggctgtggtgcccgagctgcgctcattgctgacgtggggaataattgagacattgtgccttagctccaataacgttcaatatatttatcctttatatcg

SEQ ID NO: 25804 - protein, 371 aa, Zea mays subsp. mays
  peptide (1)..(371): Ceres Seq. ID no. 12358114
  misc_feature (70)..(317): Pfam Name: Pfam Description:  Peroxidase
  misc_feature (35)..(354): NCBI GI NO: 19698448 NR Description: gaiacol peroxidase [Gossypium hirsutum]
  misc_feature (34)..(354): NCBI GI NO: 15227200 NR Description: putative peroxidase; protein id: At2g22420
  misc_feature (34)..(352): NCBI GI NO: 15234394 NR Description: peroxidase, putative; protein id: At4g36430
  misc_feature (57)..(353): NCBI GI NO: 15224116 NR Description: peroxidase, putative; protein id: At2g18150
  misc_feature (57)..(353): NCBI GI NO: 21537275 NR Description: putative peroxidase [Arabidopsis thaliana]
  misc_feature (36)..(352): NCBI GI NO: 1403134 NR Description: peroxidase [Arabidopsis thaliana]
  misc_feature (36)..(352): NCBI GI NO: 21593604 NR Description: peroxidase ATP N [Arabidopsis thaliana]
  misc_feature (36)..(352): NCBI GI NO: 18420061 NR Description: peroxidase, putative; protein id: At5g19890
  misc_feature (52)..(353): NCBI GI NO: 15224114 NR Description: peroxidase, putative; protein id: At2g18140.1
  misc_feature (53)..(352): NCBI GI NO: 7245406 NR Description: Chain A, Arabidopsis Thaliana Peroxidase N
VCPVSEQRGPPERARPCPTPPSLSMAVPRGCLGLPLVAVLLASLCRGQAAVRELKVGYYAETCPEAEDIVRETMARARAREARSVASVMRLQFHDCFVNGCDGSVLMDATPTMPGEKDALSNINSLRSFEVVDEIKDALEERCPGVVSCADIVIIAARDAVVLTGGPNWEVRLGREDSMTASQEDADNIMPSPRANASALIRLFAGLNLSVTDLVALSGSHSIGEARCFSIVFRLYNQSGSGRPDPHMDTAYRRSLDALCPKGGDEEVTGGLDATPRIFDNQYFEDLVALRGFLNSDQTLFSDNTRTRRVVERLSKDQDAFFRAFIEGMIKMGELQNPRKGEIRRNCRVANNSPWQPRTGMASGQSTSELR

SEQ ID NO: 25805 - protein, 347 aa, Zea mays subsp. mays
  peptide (1)..(347): Ceres Seq. ID no. 12358115
  misc_feature (46)..(293): Pfam Name: Pfam Description:  Peroxidase
  misc_feature (11)..(330): NCBI GI NO: 19698448 NR Description: gaiacol peroxidase [Gossypium hirsutum]
  misc_feature (10)..(330): NCBI GI NO: 15227200 NR Description: putative peroxidase; protein id: At2g22420
  misc_feature (10)..(328): NCBI GI NO: 15234394 NR Description: peroxidase, putative; protein id: At4g36430
  misc_feature (33)..(329): NCBI GI NO: 15224116 NR Description: peroxidase, putative; protein id: At2g18150
  misc_feature (33)..(329): NCBI GI NO: 21537275 NR Description: putative peroxidase [Arabidopsis thaliana]
  misc_feature (12)..(328): NCBI GI NO: 1403134 NR Description: peroxidase [Arabidopsis thaliana]
  misc_feature (12)..(328): NCBI GI NO: 21593604 NR Description: peroxidase ATP N [Arabidopsis thaliana]
  misc_feature (12)..(328): NCBI GI NO: 18420061 NR Description: peroxidase, putative; protein id: At5g19890
  misc_feature (28)..(329): NCBI GI NO: 15224114 NR Description: peroxidase, putative; protein id: At2g18140.1
  misc_feature (29)..(328): NCBI GI NO: 7245406 NR Description: Chain A, Arabidopsis Thaliana Peroxidase N
MAVPRGCLGLPLVAVLLASLCRGQAAVRELKVGYYAETCPEAEDIVRETMARARAREARSVASVMRLQFHDCFVNGCDGSVLMDATPTMPGEKDALSNINSLRSFEVVDEIKDALEERCPGVVSCADIVIIAARDAVVLTGGPNWEVRLGREDSMTASQEDADNIMPSPRANASALIRLFAGLNLSVTDLVALSGSHSIGEARCFSIVFRLYNQSGSGRPDPHMDTAYRRSLDALCPKGGDEEVTGGLDATPRIFDNQYFEDLVALRGFLNSDQTLFSDNTRTRRVVERLSKDQDAFFRAFIEGMIKMGELQNPRKGEIRRNCRVANNSPWQPRTGMASGQSTSELR

SEQ ID NO: 25806 - protein, 298 aa, Zea mays subsp. mays
  peptide (1)..(298): Ceres Seq. ID no. 12358116
  misc_feature (1)..(244): Pfam Name: Pfam Description:  Peroxidase
  misc_feature (1)..(281): NCBI GI NO: 19698448 NR Description: gaiacol peroxidase [Gossypium hirsutum]
  misc_feature (1)..(281): NCBI GI NO: 15227200 NR Description: putative peroxidase; protein id: At2g22420
  misc_feature (1)..(279): NCBI GI NO: 15234394 NR Description: peroxidase, putative; protein id: At4g36430
  misc_feature (1)..(280): NCBI GI NO: 15224116 NR Description: peroxidase, putative; protein id: At2g18150
  misc_feature (1)..(280): NCBI GI NO: 21537275 NR Description: putative peroxidase [Arabidopsis thaliana]
  misc_feature (1)..(279): NCBI GI NO: 1403134 NR Description: peroxidase [Arabidopsis thaliana]
  misc_feature (1)..(279): NCBI GI NO: 21593604 NR Description: peroxidase ATP N [Arabidopsis thaliana]
  misc_feature (1)..(279): NCBI GI NO: 18420061 NR Description: peroxidase, putative; protein id: At5g19890
  misc_feature (1)..(280): NCBI GI NO: 15224114 NR Description: peroxidase, putative; protein id: At2g18140.1
  misc_feature (1)..(279): NCBI GI NO: 7245406 NR Description: Chain A, Arabidopsis Thaliana Peroxidase N
MARARAREARSVASVMRLQFHDCFVNGCDGSVLMDATPTMPGEKDALSNINSLRSFEVVDEIKDALEERCPGVVSCADIVIIAARDAVVLTGGPNWEVRLGREDSMTASQEDADNIMPSPRANASALIRLFAGLNLSVTDLVALSGSHSIGEARCFSIVFRLYNQSGSGRPDPHMDTAYRRSLDALCPKGGDEEVTGGLDATPRIFDNQYFEDLVALRGFLNSDQTLFSDNTRTRRVVERLSKDQDAFFRAFIEGMIKMGELQNPRKGEIRRNCRVANNSPWQPRTGMASGQSTSELR

SEQ ID NO: 25807 - DNA, 1144 bp, Zea mays subsp. mays
  misc_feature (1)..(1144): Ceres Seq. ID no. 12340765
aaatcgagctcggaggcgaatctctcgctaactgtcatcaatggcggccgagcccaagatcctagagctctccaacggcaagatcaccgcgaggatctccaactggggcgccaccatcacctccctcctcgtccccgacgcccaggggagtgtcgctgatgtggtgctcggattcgatggcttggatccgtacgtgaaaggcatgtcaccttattttggctgcatagttggccgtgtcgcgaataggatcaaggatgggaagtttacactaaacggacttgagtattcattacctgtcaacaatggacctaacagccttcatggtgggttgaagggatttgataaggtcgtgtgggatgtcgtggagcacaaagatggcgaatgcccttcaataacttttcagtatcacagcaaggacggggaagaaggctatccaggcgatgtaaccattcgagcaacatactctcttcctgaagctactactctaaggcttgacatggaagctacaccagagaacaaagcaactcctataagcctggcgcagcacacctactggaacctcgcaggtcacgcctgcggcgacatcttaaaccactcgctgcagatctggggcaagcacatcactccggtcgacgagaacacaattcccaccggcgagataatgcccgtcgatggcaccccttttgacttcacgacggagcgcaggattggcgagcgcatcgacggtgttcctggagggtatgatcataactacgtgctggactgtggcgacgagaaggacggcctgaagcgtgcggccaggctgaaagatccgtcgagcttgcggaccctggacctgtggactgacgcacccggcatgcagctgtacactgccaactacgtggatggcatcggtggcaaggcgggcgctgtctacgcgaagcatgctggagtgtgcttggaaacccaggggttcccgaatgccatcaaccagcctgagtttccctctgtggttgttcggcccggtgagaagtataagcatactatgctgtttgagttctcgggatgttgaatagtgactggacagcataaattgatgtaaaacatgttgaatgaataaacaagcagaaggataagctgtgataataatgcactagtttgctcc

SEQ ID NO: 25808 - protein, 336 aa, Zea mays subsp. mays
  peptide (1)..(336): Ceres Seq. ID no. 12340766
  misc_feature (6)..(332): Pfam Name: Pfam Description:  Aldose 1-epimerase
  misc_feature (1)..(334): NCBI GI NO: 37531218 NR Description: putative aldose 1-epimerase - like protein
  misc_feature (5)..(334): NCBI GI NO: 30684727 NR Description: aldose 1-epimerase family [Arabidopsis thaliana]
  misc_feature (18)..(334): NCBI GI NO: 14532616 NR Description: putative aldose 1-epimerase [Arabidopsis thaliana]
  misc_feature (7)..(334): NCBI GI NO: 15824567 NR Description: non-cell-autonomous protein pathway2
  misc_feature (7)..(334): NCBI GI NO: 7430313 NR Description: probable aldose 1-epimerase (EC 5
  misc_feature (1)..(334): NCBI GI NO: 15228261 NR Description: aldose 1-epimerase - like protein
  misc_feature (1)..(334): NCBI GI NO: 21537069 NR Description: aldose 1-epimerase-like protein
  misc_feature (7)..(334): NCBI GI NO: 15824565 NR Description: non-cell-autonomous protein pathway1
  misc_feature (9)..(334): NCBI GI NO: 40882679 NR Description: putative aldose 1-epimerase
  misc_feature (7)..(334): NCBI GI NO: 15242223 NR Description: putative aldose 1-epimerase - like protein
MAAEPKILELSNGKITARISNWGATITSLLVPDAQGSVADVVLGFDGLDPYVKGMSPYFGCIVGRVANRIKDGKFTLNGLEYSLPVNNGPNSLHGGLKGFDKVVWDVVEHKDGECPSITFQYHSKDGEEGYPGDVTIRATYSLPEATTLRLDMEATPENKATPISLAQHTYWNLAGHACGDILNHSLQIWGKHITPVDENTIPTGEIMPVDGTPFDFTTERRIGERIDGVPGGYDHNYVLDCGDEKDGLKRAARLKDPSSLRTLDLWTDAPGMQLYTANYVDGIGGKAGAVYAKHAGVCLETQGFPNAINQPEFPSVVVRPGEKYKHTMLFEFSGC

SEQ ID NO: 25809 - protein, 282 aa, Zea mays subsp. mays
  peptide (1)..(282): Ceres Seq. ID no. 12340767
  misc_feature (1)..(278): Pfam Name: Pfam Description:  Aldose 1-epimerase
  misc_feature (1)..(280): NCBI GI NO: 37531218 NR Description: putative aldose 1-epimerase - like protein
  misc_feature (1)..(280): NCBI GI NO: 30684727 NR Description: aldose 1-epimerase family [Arabidopsis thaliana]
  misc_feature (1)..(280): NCBI GI NO: 14532616 NR Description: putative aldose 1-epimerase [Arabidopsis thaliana]
  misc_feature (1)..(280): NCBI GI NO: 15824567 NR Description: non-cell-autonomous protein pathway2
  misc_feature (1)..(280): NCBI GI NO: 7430313 NR Description: probable aldose 1-epimerase (EC 5
  misc_feature (1)..(280): NCBI GI NO: 15228261 NR Description: aldose 1-epimerase - like protein
  misc_feature (1)..(280): NCBI GI NO: 21537069 NR Description: aldose 1-epimerase-like protein
  misc_feature (1)..(280): NCBI GI NO: 15824565 NR Description: non-cell-autonomous protein pathway1
  misc_feature (1)..(280): NCBI GI NO: 40882679 NR Description: putative aldose 1-epimerase
  misc_feature (1)..(280): NCBI GI NO: 15242223 NR Description: putative aldose 1-epimerase - like protein
MSPYFGCIVGRVANRIKDGKFTLNGLEYSLPVNNGPNSLHGGLKGFDKVVWDVVEHKDGECPSITFQYHSKDGEEGYPGDVTIRATYSLPEATTLRLDMEATPENKATPISLAQHTYWNLAGHACGDILNHSLQIWGKHITPVDENTIPTGEIMPVDGTPFDFTTERRIGERIDGVPGGYDHNYVLDCGDEKDGLKRAARLKDPSSLRTLDLWTDAPGMQLYTANYVDGIGGKAGAVYAKHAGVCLETQGFPNAINQPEFPSVVVRPGEKYKHTMLFEFSGC

SEQ ID NO: 25810 - protein, 184 aa, Zea mays subsp. mays
  peptide (1)..(184): Ceres Seq. ID no. 12340768
  misc_feature (1)..(180): Pfam Name: Pfam Description:  Aldose 1-epimerase
  misc_feature (1)..(182): NCBI GI NO: 37531218 NR Description: putative aldose 1-epimerase - like protein
  misc_feature (1)..(182): NCBI GI NO: 30684727 NR Description: aldose 1-epimerase family [Arabidopsis thaliana]
  misc_feature (1)..(182): NCBI GI NO: 14532616 NR Description: putative aldose 1-epimerase [Arabidopsis thaliana]
  misc_feature (1)..(182): NCBI GI NO: 15824567 NR Description: non-cell-autonomous protein pathway2
  misc_feature (1)..(182): NCBI GI NO: 7430313 NR Description: probable aldose 1-epimerase (EC 5
  misc_feature (1)..(182): NCBI GI NO: 15228261 NR Description: aldose 1-epimerase - like protein
  misc_feature (1)..(182): NCBI GI NO: 21537069 NR Description: aldose 1-epimerase-like protein
  misc_feature (1)..(182): NCBI GI NO: 15824565 NR Description: non-cell-autonomous protein pathway1
  misc_feature (1)..(182): NCBI GI NO: 40882679 NR Description: putative aldose 1-epimerase
  misc_feature (1)..(182): NCBI GI NO: 15242223 NR Description: putative aldose 1-epimerase - like protein
MEATPENKATPISLAQHTYWNLAGHACGDILNHSLQIWGKHITPVDENTIPTGEIMPVDGTPFDFTTERRIGERIDGVPGGYDHNYVLDCGDEKDGLKRAARLKDPSSLRTLDLWTDAPGMQLYTANYVDGIGGKAGAVYAKHAGVCLETQGFPNAINQPEFPSVVVRPGEKYKHTMLFEFSGC

SEQ ID NO: 25811 - DNA, 838 bp, Zea mays subsp. mays
  misc_feature (1)..(838): Ceres Seq. ID no. 12401478
accctctccacttccgtttccggatcccgtttccagctccgatccaacccagcatctgtaccgcgccgcgcgagcacgtccggcgccggtgcggcaggcgaaatccgagagcactcctcccccgctacgccgcaccgcccatggccgcagctagccgcagatagagagaggcgcaggcgagggcgtgcagatccagatccggtgggcgggaaggacttgatcgcccccaccaccatggccggcccggtgtcggcgctcttcctgctggacatgaagggccgcgttctcgtctggcgcgactaccgcggcgatgtctccgcgctccaggccgagcgcttcttcaccaagctcctcgacaaggagggcgattcggaagtgcactcgcctgtggtctacgacgacgctggcgtcacttacatgttcatccagcacaacaatgtcttcctcctcaccgccgctcgccagaactgtaacgcggcccagcatcctcctcttcctccaccgtgtaatagatgtgtttaagcactacttcgaggagctggaggaggagtcgctcagagataacttcgtcgttgtgtatgagttgctcgatgagatgatggattttgggtacccacaatacacggaggcgaagatattgagtgagttcatcaagacagatgcatacaggatggaggtcacacagcgtccacccatggccgtgacaaatgctgtgtcatggaggagcgaggggatccggtacaagaagaatgaagtcttcttggatgtagtggagagtgttaacattctagttaacagcaatggccagattgtgagatcagatgtggttggggcactg

SEQ ID NO: 25812 - protein, 176 aa, Zea mays subsp. mays
  peptide (1)..(176): Ceres Seq. ID no. 12401479
  misc_feature (58)..(175): Pfam Name: Pfam Description:  Adaptor complexes medium subunit family
  misc_feature (58)..(175): NCBI GI NO: 34910334 NR Description: putative clathrin-associated protein
  misc_feature (58)..(175): NCBI GI NO: 15219810 NR Description: clathrin adaptor medium chain protein MU1B
  misc_feature (58)..(175): NCBI GI NO: 15220202 NR Description: putative clathrin-coat assembly protein
  misc_feature (87)..(175): NCBI GI NO: 6573741 NR Description: F20B24.16 [Arabidopsis thaliana]
  misc_feature (52)..(175): NCBI GI NO: 28949965 NR Description: probable clathrin assembly protein AP47
  misc_feature (52)..(175): NCBI GI NO: 12000357 NR Description: clathrin-adaptor medium chain apm 1
  misc_feature (59)..(175): NCBI GI NO: 38174108 NR Description: Unknown (protein for MGC:75970)
  misc_feature (59)..(175): NCBI GI NO: 14210504 NR Description: adaptor-related protein complex 1, mu 1 subunit
  misc_feature (59)..(175): NCBI GI NO: 6671557 NR Description: adaptor-related protein complex AP-1, mu subunit 1
  misc_feature (59)..(175): NCBI GI NO: 39580729 NR Description: Hypothetical protein CBG08724
MSPRSRPSASSPSSSTRRAIRKCTRLWSTTTLASLTCSSSTTMSSSSPPLARTVTRPSILLFLHRVIDVFKHYFEELEEESLRDNFVVVYELLDEMMDFGYPQYTEAKILSEFIKTDAYRMEVTQRPPMAVTNAVSWRSEGIRYKKNEVFLDVVESVNILVNSNGQIVRSDVVGAL

SEQ ID NO: 25813 - protein, 173 aa, Zea mays subsp. mays
  peptide (1)..(173): Ceres Seq. ID no. 12401480
  misc_feature (86)..(160): Pfam Name: Pfam Description:  Adaptor complexes medium subunit family
  misc_feature (79)..(160): NCBI GI NO: 34910334 NR Description: putative clathrin-associated protein
  misc_feature (79)..(160): NCBI GI NO: 15219810 NR Description: clathrin adaptor medium chain protein MU1B
  misc_feature (79)..(160): NCBI GI NO: 15220202 NR Description: putative clathrin-coat assembly protein
  misc_feature (79)..(160): NCBI GI NO: 6573741 NR Description: F20B24.16 [Arabidopsis thaliana]
  misc_feature (84)..(161): NCBI GI NO: 28949965 NR Description: probable clathrin assembly protein AP47
  misc_feature (84)..(160): NCBI GI NO: 12000357 NR Description: clathrin-adaptor medium chain apm 1
  misc_feature (84)..(156): NCBI GI NO: 38174108 NR Description: Unknown (protein for MGC:75970)
  misc_feature (84)..(156): NCBI GI NO: 14210504 NR Description: adaptor-related protein complex 1, mu 1 subunit
  misc_feature (84)..(156): NCBI GI NO: 6671557 NR Description: adaptor-related protein complex AP-1, mu subunit 1
  misc_feature (84)..(158): NCBI GI NO: 39580729 NR Description: Hypothetical protein CBG08724
TLSTSVSGSRFQLRSNPASVPRRASTSGAGAAGEIREHSSPATPHRPWPQLAADRERRRRGRADPDPVGGKDLIAPTTMAGPVSALFLLDMKGRVLVWRDYRGDVSALQAERFFTKLLDKEGDSEVHSPVVYDDAGVTYMFIQHNNVFLLTAARQNCNAAQHPPLPPPCNRCV

SEQ ID NO: 25814 - protein, 134 aa, Zea mays subsp. mays
  peptide (1)..(134): Ceres Seq. ID no. 12401481
  misc_feature (16)..(133): Pfam Name: Pfam Description:  Adaptor complexes medium subunit family
  misc_feature (16)..(133): NCBI GI NO: 34910334 NR Description: putative clathrin-associated protein
  misc_feature (16)..(133): NCBI GI NO: 15219810 NR Description: clathrin adaptor medium chain protein MU1B
  misc_feature (16)..(133): NCBI GI NO: 15220202 NR Description: putative clathrin-coat assembly protein
  misc_feature (45)..(133): NCBI GI NO: 6573741 NR Description: F20B24.16 [Arabidopsis thaliana]
  misc_feature (10)..(133): NCBI GI NO: 28949965 NR Description: probable clathrin assembly protein AP47
  misc_feature (10)..(133): NCBI GI NO: 12000357 NR Description: clathrin-adaptor medium chain apm 1
  misc_feature (17)..(133): NCBI GI NO: 38174108 NR Description: Unknown (protein for MGC:75970)
  misc_feature (17)..(133): NCBI GI NO: 14210504 NR Description: adaptor-related protein complex 1, mu 1 subunit
  misc_feature (17)..(133): NCBI GI NO: 6671557 NR Description: adaptor-related protein complex AP-1, mu subunit 1
  misc_feature (17)..(133): NCBI GI NO: 39580729 NR Description: Hypothetical protein CBG08724
MSSSSPPLARTVTRPSILLFLHRVIDVFKHYFEELEEESLRDNFVVVYELLDEMMDFGYPQYTEAKILSEFIKTDAYRMEVTQRPPMAVTNAVSWRSEGIRYKKNEVFLDVVESVNILVNSNGQIVRSDVVGAL

SEQ ID NO: 25815 - DNA, 787 bp, Zea mays subsp. mays
  misc_feature (1)..(787): Ceres Seq. ID no. 13498073
  misc_feature (274)..(274): n is a, c, t, g, unknown, or other
  misc_feature (276)..(276): n is a, c, t, g, unknown, or other
  misc_feature (416)..(416): n is a, c, t, g, unknown, or other
  misc_feature (153)..(153): n is a, c, t, g, unknown, or other
  misc_feature (148)..(148): n is a, c, t, g, unknown, or other
cttgggttaagctctagtgctagatcgttcgttttggtctgcactctgcacagtgcacagacccttcccccgtgttcccgaatcccgaatcgcgacccaaacagagaggccaggagcggaggactatggccgtagccagacatggcgnccgcngctaccgcctcctcctgcgggcccgttggcagcccgccggctcgggggcgcggtgcatccacgagggcccggacaccatcgaggagctgctggaccggcacctcgtgaagaagcccgcggngngcccggacgaggagtcggcggaggcgcggcggcggctgacgagctcccggcgggaggcgctggccctgtaccgggacatcctccgggcggcgcggctcttcgcgtggaccgacgaccgcggggtgccgtggcgggaggtntgcgcgccaacgccaggcgcgagttcgaggatgcccgcggggagcgcgacccggaggtggtggcgcgcctcctcatcggcggccgcgacgccgtgcaacaggcgctcgaccgccttgccgacgcctcacgccgcgcgatcgagaccgaggaggccaagcgccgtggcggagcgtagatttggagtcgggtattccaaacttacgcgtcatgtgctagcatttgcttaatcttgttgtaagcgacgatctctaattctcaatgtctggtataaaaatggtttcaaggattaggctagctcaagcagtactactatgcatgtttgatttttcacttcacaagaatctgagagagaaacacttcaatttcttgc

SEQ ID NO: 25816 - protein, 172 aa, Zea mays subsp. mays
  peptide (1)..(172): Ceres Seq. ID no. 13498074
  misc_feature (22)..(97): NCBI GI NO: 25373205 NR Description: protein T4O12.26 [imported] - Arabidopsis thaliana
  misc_feature (22)..(97): NCBI GI NO: 30699138 NR Description: expressed protein [Arabidopsis thaliana]
  misc_feature (22)..(97): NCBI GI NO: 27754395 NR Description: unknown protein [Arabidopsis thaliana]
  misc_feature (8)..(8): Xaa is any aa, unknown or other
  misc_feature (10)..(10): Xaa is any aa, unknown or other
  misc_feature (50)..(50): Xaa is any aa, unknown or other
  misc_feature (51)..(51): Xaa is any aa, unknown or other
  misc_feature (97)..(97): Xaa is any aa, unknown or other
MAVARHGXRXYRLLLRARWQPAGSGARCIHEGPDTIEELLDRHLVKKPAXXPDEESAEARRRLTSSRREALALYRDILRAARLFAWTDDRGVPWREXCAPTPGASSRMPAGSATRRWWRASSSAAATPCNRRSTALPTPHAARSRPRRPSAVAERRFGVGYSKLTRHVLAFA

SEQ ID NO: 25817 - DNA, 1441 bp, Zea mays subsp. mays
  misc_feature (1)..(1441): Ceres Seq. ID no. 12636899
gaacacgggcacacggatcgtcggctcacggcctcgtcacgcccaccctctccctcttcgggttccaggcttccaaagttgtcagagacggcgagagtagggggtttccaggaagcttcgccagggcgccggtaagttgactggatttgctgctagcagtcaggcaagctcgagttttgccatttgagaaggagagggaaaatgatgacctcgtggcttctgggccgccggggcccctccggcttctcctggagttccaccgccgaccaagtcacgcagggcatctccgccgccggcctcaccgccatcgtcactggggcgtccagcggcatcggcgcggagacggcgcgaacgctggcgctgcgcggggcccacgtcatcatggccgtcaggagccttcccgctgcccaggccgtcaaggacgccgtcctcgcccaggcgccgggggccaagctcgacgtcatggagctcgacctctcgtccatggcctctgtccgcgctttcgcgtcccaattcatcgacaggggtctccccctcaacatccttatcaacaatgcaggagtaatggcaataccttttgcgctttcaaaggatggaattgagatgcagtttgcaactaatcatgttgggcatttcctgctcacacaccttctattggataccatgaagaggacctctcatgaatcaaatttggaaggaagaattgtcaacgtgtcatcagaggggcacagacttgcatatcgggaaggaatccgttttgacaagatcaacgatgaatcagtgtatagtagcattggtgcatatgggcaatcaaagcttgcaaacatattgcatgctaatgaacttgccaggcgatttgaggaagataatgtcaacataactgcaaattctcttcatcctggttccattatcacgaaccttcttcgctaccacagtatcctagatgttctccatcggacgctgggtaaattggtgctgaaaaatgctgagcagggtgcggcaactacatgctatttggcactccacccgcatgtgaagggcgtgtccgggaagtacttctgcgactgtaacctgtacgagccaagcgcgaacgccaaggacatggagttggccaagaggctctgggacttcggcgtcgagctcatcacctagctcatgcttcttgttgttagcgacttgttttcagacatggatgtaatgtaaatcccttgacagatggtaaattctgtaggccctcgaggagctcctgtgtggtaaactcattcacctcaatctatctacgtgtattaaggtggattagggtgtaaattaaattaatttacactccaatcgccctcgaggagctccggtgtggataatgctttggttggatattttagtattcacctgaatttacgtgtattaagatgaattagggtgtaaattaaattaattacactcc

SEQ ID NO: 25818 - protein, 316 aa, Zea mays subsp. mays
  peptide (1)..(316): Ceres Seq. ID no. 12636900
  misc_feature (5)..(314): NCBI GI NO: 15233359 NR Description: putative protein; protein id: At4g11410.1
  misc_feature (5)..(314): NCBI GI NO: 23297050 NR Description: unknown protein [Arabidopsis thaliana]
  misc_feature (5)..(314): NCBI GI NO: 30686197 NR Description: short-chain dehydrogenase/reductase family protein
  misc_feature (5)..(314): NCBI GI NO: 18416145 NR Description: putative protein; protein id: At4g23430
  misc_feature (4)..(315): NCBI GI NO: 18413950 NR Description: putative protein; protein id: At5g02540
  misc_feature (4)..(315): NCBI GI NO: 20260302 NR Description: putative protein [Arabidopsis thaliana]
  misc_feature (4)..(315): NCBI GI NO: 21554820 NR Description: putativepod-specific dehydrogenase SAC25
  misc_feature (9)..(316): NCBI GI NO: 37536622 NR Description: putative WW-domain oxidoreductase
  misc_feature (4)..(315): NCBI GI NO: 34895876 NR Description: P0009G03.18
  misc_feature (6)..(315): NCBI GI NO: 15224306 NR Description: putative oxidoreductase; protein id: At2g37540
MMTSWLLGRRGPSGFSWSSTADQVTQGISAAGLTAIVTGASSGIGAETARTLALRGAHVIMAVRSLPAAQAVKDAVLAQAPGAKLDVMELDLSSMASVRAFASQFIDRGLPLNILINNAGVMAIPFALSKDGIEMQFATNHVGHFLLTHLLLDTMKRTSHESNLEGRIVNVSSEGHRLAYREGIRFDKINDESVYSSIGAYGQSKLANILHANELARRFEEDNVNITANSLHPGSIITNLLRYHSILDVLHRTLGKLVLKNAEQGAATTCYLALHPHVKGVSGKYFCDCNLYEPSANAKDMELAKRLWDFGVELIT

SEQ ID NO: 25819 - protein, 315 aa, Zea mays subsp. mays
  peptide (1)..(315): Ceres Seq. ID no. 12636901
  misc_feature (4)..(313): NCBI GI NO: 15233359 NR Description: putative protein; protein id: At4g11410.1
  misc_feature (4)..(313): NCBI GI NO: 23297050 NR Description: unknown protein [Arabidopsis thaliana]
  misc_feature (4)..(313): NCBI GI NO: 30686197 NR Description: short-chain dehydrogenase/reductase family protein
  misc_feature (4)..(313): NCBI GI NO: 18416145 NR Description: putative protein; protein id: At4g23430
  misc_feature (3)..(314): NCBI GI NO: 18413950 NR Description: putative protein; protein id: At5g02540
  misc_feature (3)..(314): NCBI GI NO: 20260302 NR Description: putative protein [Arabidopsis thaliana]
  misc_feature (3)..(314): NCBI GI NO: 21554820 NR Description: putativepod-specific dehydrogenase SAC25
  misc_feature (8)..(315): NCBI GI NO: 37536622 NR Description: putative WW-domain oxidoreductase
  misc_feature (3)..(314): NCBI GI NO: 34895876 NR Description: P0009G03.18
  misc_feature (5)..(314): NCBI GI NO: 15224306 NR Description: putative oxidoreductase; protein id: At2g37540
MTSWLLGRRGPSGFSWSSTADQVTQGISAAGLTAIVTGASSGIGAETARTLALRGAHVIMAVRSLPAAQAVKDAVLAQAPGAKLDVMELDLSSMASVRAFASQFIDRGLPLNILINNAGVMAIPFALSKDGIEMQFATNHVGHFLLTHLLLDTMKRTSHESNLEGRIVNVSSEGHRLAYREGIRFDKINDESVYSSIGAYGQSKLANILHANELARRFEEDNVNITANSLHPGSIITNLLRYHSILDVLHRTLGKLVLKNAEQGAATTCYLALHPHVKGVSGKYFCDCNLYEPSANAKDMELAKRLWDFGVELIT

SEQ ID NO: 25820 - protein, 256 aa, Zea mays subsp. mays
  peptide (1)..(256): Ceres Seq. ID no. 12636902
  misc_feature (1)..(254): NCBI GI NO: 15233359 NR Description: putative protein; protein id: At4g11410.1
  misc_feature (1)..(254): NCBI GI NO: 23297050 NR Description: unknown protein [Arabidopsis thaliana]
  misc_feature (1)..(254): NCBI GI NO: 30686197 NR Description: short-chain dehydrogenase/reductase family protein
  misc_feature (1)..(254): NCBI GI NO: 18416145 NR Description: putative protein; protein id: At4g23430
  misc_feature (1)..(255): NCBI GI NO: 18413950 NR Description: putative protein; protein id: At5g02540
  misc_feature (1)..(255): NCBI GI NO: 20260302 NR Description: putative protein [Arabidopsis thaliana]
  misc_feature (1)..(255): NCBI GI NO: 21554820 NR Description: putativepod-specific dehydrogenase SAC25
  misc_feature (1)..(256): NCBI GI NO: 37536622 NR Description: putative WW-domain oxidoreductase
  misc_feature (1)..(255): NCBI GI NO: 34895876 NR Description: P0009G03.18
  misc_feature (1)..(255): NCBI GI NO: 15224306 NR Description: putative oxidoreductase; protein id: At2g37540
MAVRSLPAAQAVKDAVLAQAPGAKLDVMELDLSSMASVRAFASQFIDRGLPLNILINNAGVMAIPFALSKDGIEMQFATNHVGHFLLTHLLLDTMKRTSHESNLEGRIVNVSSEGHRLAYREGIRFDKINDESVYSSIGAYGQSKLANILHANELARRFEEDNVNITANSLHPGSIITNLLRYHSILDVLHRTLGKLVLKNAEQGAATTCYLALHPHVKGVSGKYFCDCNLYEPSANAKDMELAKRLWDFGVELIT

SEQ ID NO: 25821 - DNA, 1245 bp, Zea mays subsp. mays
  misc_feature (1)..(1245): Ceres Seq. ID no. 12344687
cttccttcacttctctgcttccgacctcgtagcgaatcggaccggggggctagggttccggtgcgcctctgcaatcggacgcgaggctaggctgggcatggagggaaccgctgcggcccggaagaggtcccggccggagacggcgaacggggctgccgccgccgggaagcgctccaaagacacggagtcatttcaaactggtctatcaagcaaatcgaagccttgcaccaagtttttcagtacgattgggtgcccgtttggcgagggatgtcattttctgcactttgtccctggtggttacccggcagttgcaaaaatgctgaatctaagtagctctgctgtatctgcgccatcaagaactcatgtggatcatgccgctcttaccggtgcctctcatccagcttctacggtcaagacacgcatgtgcaccaagtacaacactacagaaggctgcaagttcggtgataagtgccatttcgctcatagcgaaagagagcttgcgaagccagcctacatgtctcaagaaggacctcctatgggtggtcgatatggacgagctgaacctatgcaaccagctgccatgggccctccagcaggaaactttggtgcctcggcgactgccaagatcagtgtggacgcctctctggccggtggcataatcggcaagggtggggtcaacactaagcagataagtagaattacaggcgtcaagctctccatccgcgaccacgagtctaaccccaacctaaagaacatcgagctggaaggcaattttgaccagatcaagcaagccagcgacttggtgcgtgatctcatcgcaaccatcagcgcaagcatgccagcgaaaaatccatctgctgccgcggcaccagcaggaggaggccgaggcggtggtccagggggcaagagcagcaactacaagacgaagctgtgcgagaacttcttgaagggtgcctgtacttttggtgaccggtgccacttcgcccatggcgagacggagcagcggagaggtgctgcatgagagtcgaggtgctctaggcaatgagatgccatgtgctccctccttttgctactgtgaattttcgccttgcagcgctaggcggttggactgttgtgttgtgttgcgacgtcaatggattaaactctagatttcagctttctttttttaacatataagttcgagaaaacgttaaactgtcgtgcagcttgcattttgttggtcggtaagctagcagctggcctccc

SEQ ID NO: 25822 - protein, 339 aa, Zea mays subsp. mays
  peptide (1)..(339): Ceres Seq. ID no. 12344688
  misc_feature (208)..(254): Pfam Name: Pfam Description:  KH domain
  misc_feature (33)..(339): NCBI GI NO: 32488659 NR Description: OSJNBa0087O24.9
  misc_feature (40)..(339): NCBI GI NO: 5441893 NR Description: ESTs C99174
  misc_feature (138)..(336): NCBI GI NO: 9294110 NR Description: contains similarity to unknownprotein~dbj|BAA82391
  misc_feature (138)..(336): NCBI GI NO: 18399496 NR Description: KH domain/zinc finger protein
  misc_feature (138)..(336): NCBI GI NO: 21555233 NR Description: unknown [Arabidopsis thaliana]
  misc_feature (138)..(336): NCBI GI NO: 15240145 NR Description: KH domain/zinc finger protein
  misc_feature (39)..(119): NCBI GI NO: 15240145 NR Description: KH domain/zinc finger protein
  misc_feature (39)..(119): NCBI GI NO: 21555233 NR Description: unknown [Arabidopsis thaliana]
  misc_feature (40)..(109): NCBI GI NO: 18399496 NR Description: KH domain/zinc finger protein
  misc_feature (53)..(109): NCBI GI NO: 9294110 NR Description: contains similarity to unknownprotein~dbj|BAA82391
FLHFSASDLVANRTGGLGFRCASAIGREARLGMEGTAAARKRSRPETANGAAAAGKRSKDTESFQTGLSSKSKPCTKFFSTIGCPFGEGCHFLHFVPGGYPAVAKMLNLSSSAVSAPSRTHVDHAALTGASHPASTVKTRMCTKYNTTEGCKFGDKCHFAHSERELAKPAYMSQEGPPMGGRYGRAEPMQPAAMGPPAGNFGASATAKISVDASLAGGIIGKGGVNTKQISRITGVKLSIRDHESNPNLKNIELEGNFDQIKQASDLVRDLIATISASMPAKNPSAAAAPAGGGRGGGPGGKSSNYKTKLCENFLKGACTFGDRCHFAHGETEQRRGAA

SEQ ID NO: 25823 - protein, 307 aa, Zea mays subsp. mays
  peptide (1)..(307): Ceres Seq. ID no. 12344689
  misc_feature (176)..(222): Pfam Name: Pfam Description:  KH domain
  misc_feature (1)..(307): NCBI GI NO: 32488659 NR Description: OSJNBa0087O24.9
  misc_feature (8)..(307): NCBI GI NO: 5441893 NR Description: ESTs C99174
  misc_feature (106)..(304): NCBI GI NO: 9294110 NR Description: contains similarity to unknownprotein~dbj|BAA82391
  misc_feature (106)..(304): NCBI GI NO: 18399496 NR Description: KH domain/zinc finger protein
  misc_feature (106)..(304): NCBI GI NO: 21555233 NR Description: unknown [Arabidopsis thaliana]
  misc_feature (106)..(304): NCBI GI NO: 15240145 NR Description: KH domain/zinc finger protein
  misc_feature (7)..(87): NCBI GI NO: 15240145 NR Description: KH domain/zinc finger protein
  misc_feature (7)..(87): NCBI GI NO: 21555233 NR Description: unknown [Arabidopsis thaliana]
  misc_feature (8)..(77): NCBI GI NO: 18399496 NR Description: KH domain/zinc finger protein
  misc_feature (21)..(77): NCBI GI NO: 9294110 NR Description: contains similarity to unknownprotein~dbj|BAA82391
MEGTAAARKRSRPETANGAAAAGKRSKDTESFQTGLSSKSKPCTKFFSTIGCPFGEGCHFLHFVPGGYPAVAKMLNLSSSAVSAPSRTHVDHAALTGASHPASTVKTRMCTKYNTTEGCKFGDKCHFAHSERELAKPAYMSQEGPPMGGRYGRAEPMQPAAMGPPAGNFGASATAKISVDASLAGGIIGKGGVNTKQISRITGVKLSIRDHESNPNLKNIELEGNFDQIKQASDLVRDLIATISASMPAKNPSAAAAPAGGGRGGGPGGKSSNYKTKLCENFLKGACTFGDRCHFAHGETEQRRGAA

SEQ ID NO: 25824 - protein, 234 aa, Zea mays subsp. mays
  peptide (1)..(234): Ceres Seq. ID no. 12344690
  misc_feature (103)..(149): Pfam Name: Pfam Description:  KH domain
  misc_feature (1)..(234): NCBI GI NO: 32488659 NR Description: OSJNBa0087O24.9
  misc_feature (1)..(234): NCBI GI NO: 5441893 NR Description: ESTs C99174
  misc_feature (33)..(231): NCBI GI NO: 9294110 NR Description: contains similarity to unknownprotein~dbj|BAA82391
  misc_feature (33)..(231): NCBI GI NO: 18399496 NR Description: KH domain/zinc finger protein
  misc_feature (33)..(231): NCBI GI NO: 21555233 NR Description: unknown [Arabidopsis thaliana]
  misc_feature (33)..(231): NCBI GI NO: 15240145 NR Description: KH domain/zinc finger protein
  misc_feature (1)..(14): NCBI GI NO: 15240145 NR Description: KH domain/zinc finger protein
  misc_feature (1)..(14): NCBI GI NO: 21555233 NR Description: unknown [Arabidopsis thaliana]
  misc_feature (1)..(63): NCBI GI NO: 34905220 NR Description: P0672D01.12
  misc_feature (1)..(56): NCBI GI NO: 15226988 NR Description: hypothetical protein; protein id: At2g35430.1
MLNLSSSAVSAPSRTHVDHAALTGASHPASTVKTRMCTKYNTTEGCKFGDKCHFAHSERELAKPAYMSQEGPPMGGRYGRAEPMQPAAMGPPAGNFGASATAKISVDASLAGGIIGKGGVNTKQISRITGVKLSIRDHESNPNLKNIELEGNFDQIKQASDLVRDLIATISASMPAKNPSAAAAPAGGGRGGGPGGKSSNYKTKLCENFLKGACTFGDRCHFAHGETEQRRGAA

SEQ ID NO: 25825 - DNA, 989 bp, Zea mays subsp. mays
  misc_feature (1)..(989): Ceres Seq. ID no. 12414145
aacgaccatgatttggtaaagaaagcacaaagcaggaggaagccggcggtgtaggcgacccatggctccacagacgaggagagagaggttggcgggggaggcgcggccgagctcgtcggggctaacaccggcgaagccgggggcggtcgaggtgcagcgccgacgggcgggcagcggttggacgagccgtcggatctccatctacgcctcccgagtctacttcctcctcatcatgctccagatcccgctcttcagggtcccttgtagagctggcacatgcacaactcctattcaagtaacatcatctcagttggtctcaaatgatatattcccagcagctgttgtgaaggccatgctctaccctggagctaccgtgagcagcctaactaaaagcaagacatttccgagttggaatgacctgtttgacatgtacaacctgacagaagcaaaaaatgcttctgcagtagttgatctccagcgtctagagatacttgccggaagctacttctgtgttgctggagcgctcattggcatcataaatcctgggaggatgactttgtttggtacccttttgattatctggggtatggtgaaagaagcactatttgggaagccagtgaacagtgatctgactcaatcaactcatgtctacccaaccattttgattgcacttatctgtgcattcatgtcgataacttacaacgtaaagaagacagcaacaagtagtactcctgtttctatcgctaagccactgataagttctgccaagtcaaaactgaagtagacttacaagtttaatccttgtaactcttttgaaatatttatttatgtgcaaaaaaacaggtttgaggatgacctgatgatgcttttggtgtatatctgactttcaatactgtaacattcagttttctttattgtattaacaattcgcaaggtcacaccgtctgtaatgtttacaaaaaaaaacagataaatcttggttttctctc

SEQ ID NO: 25826 - protein, 240 aa, Zea mays subsp. mays
  peptide (1)..(240): Ceres Seq. ID no. 12414146
  misc_feature (1)..(240): NCBI GI NO: 34913974 NR Description: B1110C07.25
  misc_feature (39)..(240): NCBI GI NO: 18416514 NR Description: putative protein; protein id: At5g11280
  misc_feature (39)..(240): NCBI GI NO: 17064978 NR Description: putative protein [Arabidopsis thaliana]
  misc_feature (87)..(240): NCBI GI NO: 8953390 NR Description: putative protein [Arabidopsis thaliana]
  misc_feature (66)..(229): NCBI GI NO: 15220078 NR Description: hypothetical protein; protein id: At1g80200.1
MAPQTRRERLAGEARPSSSGLTPAKPGAVEVQRRRAGSGWTSRRISIYASRVYFLLIMLQIPLFRVPCRAGTCTTPIQVTSSQLVSNDIFPAAVVKAMLYPGATVSSLTKSKTFPSWNDLFDMYNLTEAKNASAVVDLQRLEILAGSYFCVAGALIGIINPGRMTLFGTLLIIWGMVKEALFGKPVNSDLTQSTHVYPTILIALICAFMSITYNVKKTATSSTPVSIAKPLISSAKSKLK

SEQ ID NO: 25827 - protein, 183 aa, Zea mays subsp. mays
  peptide (1)..(183): Ceres Seq. ID no. 12414147
  misc_feature (1)..(183): NCBI GI NO: 34913974 NR Description: B1110C07.25
  misc_feature (1)..(183): NCBI GI NO: 18416514 NR Description: putative protein; protein id: At5g11280
  misc_feature (1)..(183): NCBI GI NO: 17064978 NR Description: putative protein [Arabidopsis thaliana]
  misc_feature (30)..(183): NCBI GI NO: 8953390 NR Description: putative protein [Arabidopsis thaliana]
  misc_feature (9)..(172): NCBI GI NO: 15220078 NR Description: hypothetical protein; protein id: At1g80200.1
MLQIPLFRVPCRAGTCTTPIQVTSSQLVSNDIFPAAVVKAMLYPGATVSSLTKSKTFPSWNDLFDMYNLTEAKNASAVVDLQRLEILAGSYFCVAGALIGIINPGRMTLFGTLLIIWGMVKEALFGKPVNSDLTQSTHVYPTILIALICAFMSITYNVKKTATSSTPVSIAKPLISSAKSKLK

SEQ ID NO: 25828 - protein, 143 aa, Zea mays subsp. mays
  peptide (1)..(143): Ceres Seq. ID no. 12414148
  misc_feature (1)..(143): NCBI GI NO: 34913974 NR Description: B1110C07.25
  misc_feature (1)..(143): NCBI GI NO: 18416514 NR Description: putative protein; protein id: At5g11280
  misc_feature (1)..(143): NCBI GI NO: 17064978 NR Description: putative protein [Arabidopsis thaliana]
  misc_feature (1)..(143): NCBI GI NO: 8953390 NR Description: putative protein [Arabidopsis thaliana]
  misc_feature (1)..(132): NCBI GI NO: 15220078 NR Description: hypothetical protein; protein id: At1g80200.1
MLYPGATVSSLTKSKTFPSWNDLFDMYNLTEAKNASAVVDLQRLEILAGSYFCVAGALIGIINPGRMTLFGTLLIIWGMVKEALFGKPVNSDLTQSTHVYPTILIALICAFMSITYNVKKTATSSTPVSIAKPLISSAKSKLK

SEQ ID NO: 25829 - DNA, 993 bp, Zea mays subsp. mays
  misc_feature (1)..(993): Ceres Seq. ID no. 12455252
aaaactcatcgccctccccacagccagaaccctagcctcgtcgccatggcctcctccttgctccgctccggccaccgcctctttctccgacgccaccgcctacccgcggcattctccaccgctacggccgaggagctaatcgacgtacgcaagcttcccaccaactacgacccctccaccttcgacccgtcctccccgtcccgcccgctgccgtccgaccgcgtgtggcgcctcgtcgaggatgtctcctccctcaccctcgcggagaccgcggctctctcctctctcctcctccgccgcctcgacataccctccgcaccacccatcgccatcctcaactccgccgcggggctgggcggcgccgccacggccggcgcggcgggggagaaggcgggggcggcggcggcggcggcggccgagaagaccgtcttcgagctgcggctggagggctacgacgctgcgagcaagatcaaggtgatcaaggagatccggtcgttcaccgacctggggctgaaggaggccaaggagctggtggagaaggcgcctgcggtgatcaagggcggcctatccaaggacgaagccaaggcgatcatcgagcggatgaaggcagttggcgccaaggtcgtcatggactgatcagaacaagcctttttcaacggtgaaatcctgcaactgcgaatctatgcttcgtttcagatcaactttaagtgcaaggatggacgggtggattgtggacagttcctgtatgaacttgcggaaatttgatgtggcacagcgctaataggttttcaagcacgttaatcaaatgaacattgatcctgcaatgctatagggtattggcatcaaacgctcgtcattatgttcgaatttgtgacctttcaattgtgggaagttaaaatgacctagttagttattttgttcatcacagggtcttgtttgagactggatgtccatatggatacaataacattttgctcttgtttctgtgaattt

SEQ ID NO: 25830 - protein, 211 aa, Zea mays subsp. mays
  peptide (1)..(211): Ceres Seq. ID no. 12455253
  misc_feature (144)..(211): Pfam Name: Pfam Description:  Ribosomal protein L7/L12 C-terminal domain
  misc_feature (8)..(211): NCBI GI NO: 18409467 NR Description: expressed protein; protein id: At1g70190
  misc_feature (64)..(211): NCBI GI NO: 15234393 NR Description: ribosomal protein; protein id: At4g36420
  misc_feature (83)..(211): NCBI GI NO: 15209174 NR Description: hypothetical protein [Solanum demissum]
  misc_feature (53)..(211): NCBI GI NO: 15230614 NR Description: hypothetical protein; protein id: At3g06040
  misc_feature (77)..(211): NCBI GI NO: 34913132 NR Description: contains EST AU058363
  misc_feature (59)..(211): NCBI GI NO: 40745733 NR Description: hypothetical protein AN2057.2
  misc_feature (119)..(211): NCBI GI NO: 15235649 NR Description: ribosomal - like protein; protein id: At4g37660
  misc_feature (78)..(210): NCBI GI NO: 730573 NR Description: 50S ribosomal protein L7/L12
  misc_feature (40)..(211): NCBI GI NO: 6321369 NR Description: Protein required for cell viability; Ygl068wp
  misc_feature (77)..(208): NCBI GI NO: 17987031 NR Description: LSU ribosomal protein L12P (L7/L12)
KTHRPPHSQNPSLVAMASSLLRSGHRLFLRRHRLPAAFSTATAEELIDVRKLPTNYDPSTFDPSSPSRPLPSDRVWRLVEDVSSLTLAETAALSSLLLRRLDIPSAPPIAILNSAAGLGGAATAGAAGEKAGAAAAAAAEKTVFELRLEGYDAASKIKVIKEIRSFTDLGLKEAKELVEKAPAVIKGGLSKDEAKAIIERMKAVGAKVVMD

SEQ ID NO: 25831 - protein, 196 aa, Zea mays subsp. mays
  peptide (1)..(196): Ceres Seq. ID no. 12455254
  misc_feature (129)..(196): Pfam Name: Pfam Description:  Ribosomal protein L7/L12 C-terminal domain
  misc_feature (1)..(196): NCBI GI NO: 18409467 NR Description: expressed protein; protein id: At1g70190
  misc_feature (49)..(196): NCBI GI NO: 15234393 NR Description: ribosomal protein; protein id: At4g36420
  misc_feature (68)..(196): NCBI GI NO: 15209174 NR Description: hypothetical protein [Solanum demissum]
  misc_feature (38)..(196): NCBI GI NO: 15230614 NR Description: hypothetical protein; protein id: At3g06040
  misc_feature (62)..(196): NCBI GI NO: 34913132 NR Description: contains EST AU058363
  misc_feature (44)..(196): NCBI GI NO: 40745733 NR Description: hypothetical protein AN2057.2
  misc_feature (104)..(196): NCBI GI NO: 15235649 NR Description: ribosomal - like protein; protein id: At4g37660
  misc_feature (63)..(195): NCBI GI NO: 730573 NR Description: 50S ribosomal protein L7/L12
  misc_feature (25)..(196): NCBI GI NO: 6321369 NR Description: Protein required for cell viability; Ygl068wp
  misc_feature (62)..(193): NCBI GI NO: 17987031 NR Description: LSU ribosomal protein L12P (L7/L12)
MASSLLRSGHRLFLRRHRLPAAFSTATAEELIDVRKLPTNYDPSTFDPSSPSRPLPSDRVWRLVEDVSSLTLAETAALSSLLLRRLDIPSAPPIAILNSAAGLGGAATAGAAGEKAGAAAAAAAEKTVFELRLEGYDAASKIKVIKEIRSFTDLGLKEAKELVEKAPAVIKGGLSKDEAKAIIERMKAVGAKVVMD

SEQ ID NO: 25832 - DNA, 1753 bp, Zea mays subsp. mays
  misc_feature (1)..(1753): Ceres Seq. ID no. 12405941
agcaatagactggtcaccactcacgagagcagaaaacaaacaatgcctccttacctgctcgctgccggcgcgcttatcgtcttcctgtacatcatcaagaaccgcaggagcagaaagctcccgccatccccgccgtcgctaccgctgatcggccaccttcacctcatcggccgcgtcgcgcaccgatccttgctagagctgcaggttcgctatggcggcggcggcggtctcctcttcctgcaactcgggcgcagaccgaccttggtcgtgtccactgcggccgcggccgcggatctgttcaagaaccacgacctcgctttcgcctcccgcccacgcagcgtgggaggggataagctgatgtatgagtgcagcaacgtgtcgttcgcgccttacggcgagaactggcgccggggcaagaagatcgctgtggtccacctcctctctccacggcgcgtggaatcgttcgcgcccgtaagggccgccgaggtagccgcgctcgtcgcacggacacgccgcaccgcggaggctggggaggccgtggagttgagggagctcctgaacggctacgccaacgcggtggccacccgcgcggccaccggtgccgctggggcgacagcagagaagctgaaagagctgatggggaactccgagcccgaggcgctgatggcgggcttccaacccgaagacgtgctgccggacgcaccggcgaggttcgtgagatgggtgacgggcctcaataagaagctcgaagacttggtggagtcgtgggacaagttcctgtccgatatagtggccgcacacaaggagaaggggggtggcgacgcagaggaggatgaggacttcttggatgtcttgcttcggctgcgggaagaaggcgcagatgggctcgagctcacagacgatcgcatcaaagctaccgtcaaggacatgatagcggctgcaactgaaacatcgtcccaaacgctggaatggaccatggccgaactcattgccaacccgcgggtgatgagcaagctccaaggcgagatagcgcgagtcgtcagcgccgatcagacgaccatcgctgaaccggacctgaacaaaatggagtacctgagggcagtgttcaaagaggtgcttcggctccacccaccagcgccgctcctcgtcccgcacgaatcaacaacgcccgcggttgtgcagggctacgagatcccggccaagacggctctcttcgtcaacgtgtgggccatcgggcgggaccctgctgtgtgggacgcaccggacgagttccgcccagagcggttcgtgggcggcagtccctcggtggacttcagaggtactactaccagctcatcccgttcggcgccggccggaggatctgccccggcatcaacttcgcgctgccggtcttggagctcgcgcttgtcagccttctgcaccacttcgaatgggagctccccgccggcgtgggaaaagcggacctcgacgtgggcgaggcgccggggatgacgacgccgcggcggattccgctcgtccttgtccccaagtgcaggacgctcgttcagccagcgctgcagtagcgcgaggaatttcatgtgtctccatgcagtggcggaaccagaaatatttaagagcttgggtaaaaaataatacttatactgtaaatatgtagctttgtctaatttttacctgtgtttaactatattttactacttgttgtatgtgtataagttcactagcaataatggaggagcctatgctcttgcccccg

SEQ ID NO: 25833 - protein, 496 aa, Zea mays subsp. mays
  peptide (1)..(496): Ceres Seq. ID no. 12405942
  misc_feature (19)..(440): NCBI GI NO: 25282608 NR Description: cytochrome P-450LXXIA1 [similarity] - avocado
  misc_feature (15)..(440): NCBI GI NO: 40645046 NR Description: cytochrome P450 [Asparagus officinalis]
  misc_feature (19)..(440): NCBI GI NO: 117188 NR Description: CYTOCHROME P450 71A1 (CYPLXXIA1) (ARP-2)
  misc_feature (36)..(440): NCBI GI NO: 5915816 NR Description: Cytochrome P450 71A9 (P450 CP1)
  misc_feature (19)..(440): NCBI GI NO: 22331680 NR Description: Expressed protein; protein id: At3g48310
  misc_feature (24)..(440): NCBI GI NO: 15723953 NR Description: menthofuran synthase [Mentha x piperita]
  misc_feature (18)..(440): NCBI GI NO: 3582021 NR Description: cytochrome P450 [Nepeta racemosa]
  misc_feature (36)..(440): NCBI GI NO: 19909888 NR Description: P450 [Triticum aestivum]
  misc_feature (36)..(440): NCBI GI NO: 26655531 NR Description: cytochrome P450 [Triticum aestivum]
  misc_feature (18)..(440): NCBI GI NO: 25282603 NR Description: cytochrome P450 monooxygenase
SNRLVTTHESRKQTMPPYLLAAGALIVFLYIIKNRRSRKLPPSPPSLPLIGHLHLIGRVAHRSLLELQVRYGGGGGLLFLQLGRRPTLVVSTAAAAADLFKNHDLAFASRPRSVGGDKLMYECSNVSFAPYGENWRRGKKIAVVHLLSPRRVESFAPVRAAEVAALVARTRRTAEAGEAVELRELLNGYANAVATRAATGAAGATAEKLKELMGNSEPEALMAGFQPEDVLPDAPARFVRWVTGLNKKLEDLVESWDKFLSDIVAAHKEKGGGDAEEDEDFLDVLLRLREEGADGLELTDDRIKATVKDMIAAATETSSQTLEWTMAELIANPRVMSKLQGEIARVVSADQTTIAEPDLNKMEYLRAVFKEVLRLHPPAPLLVPHESTTPAVVQGYEIPAKTALFVNVWAIGRDPAVWDAPDEFRPERFVGGSPSVDFRGTTTSSSRSAPAGGSAPASTSRCRSWSSRLSAFCTTSNGSSPPAWEKRTSTWARRRG

SEQ ID NO: 25834 - protein, 482 aa, Zea mays subsp. mays
  peptide (1)..(482): Ceres Seq. ID no. 12405943
  misc_feature (5)..(426): NCBI GI NO: 25282608 NR Description: cytochrome P-450LXXIA1 [similarity] - avocado
  misc_feature (1)..(426): NCBI GI NO: 40645046 NR Description: cytochrome P450 [Asparagus officinalis]
  misc_feature (5)..(426): NCBI GI NO: 117188 NR Description: CYTOCHROME P450 71A1 (CYPLXXIA1) (ARP-2)
  misc_feature (22)..(426): NCBI GI NO: 5915816 NR Description: Cytochrome P450 71A9 (P450 CP1)
  misc_feature (5)..(426): NCBI GI NO: 22331680 NR Description: Expressed protein; protein id: At3g48310
  misc_feature (10)..(426): NCBI GI NO: 15723953 NR Description: menthofuran synthase [Mentha x piperita]
  misc_feature (4)..(426): NCBI GI NO: 3582021 NR Description: cytochrome P450 [Nepeta racemosa]
  misc_feature (22)..(426): NCBI GI NO: 19909888 NR Description: P450 [Triticum aestivum]
  misc_feature (22)..(426): NCBI GI NO: 26655531 NR Description: cytochrome P450 [Triticum aestivum]
  misc_feature (4)..(426): NCBI GI NO: 25282603 NR Description: cytochrome P450 monooxygenase
MPPYLLAAGALIVFLYIIKNRRSRKLPPSPPSLPLIGHLHLIGRVAHRSLLELQVRYGGGGGLLFLQLGRRPTLVVSTAAAAADLFKNHDLAFASRPRSVGGDKLMYECSNVSFAPYGENWRRGKKIAVVHLLSPRRVESFAPVRAAEVAALVARTRRTAEAGEAVELRELLNGYANAVATRAATGAAGATAEKLKELMGNSEPEALMAGFQPEDVLPDAPARFVRWVTGLNKKLEDLVESWDKFLSDIVAAHKEKGGGDAEEDEDFLDVLLRLREEGADGLELTDDRIKATVKDMIAAATETSSQTLEWTMAELIANPRVMSKLQGEIARVVSADQTTIAEPDLNKMEYLRAVFKEVLRLHPPAPLLVPHESTTPAVVQGYEIPAKTALFVNVWAIGRDPAVWDAPDEFRPERFVGGSPSVDFRGTTTSSSRSAPAGGSAPASTSRCRSWSSRLSAFCTTSNGSSPPAWEKRTSTWARRRG

SEQ ID NO: 25835 - protein, 377 aa, Zea mays subsp. mays
  peptide (1)..(377): Ceres Seq. ID no. 12405944
  misc_feature (1)..(321): NCBI GI NO: 25282608 NR Description: cytochrome P-450LXXIA1 [similarity] - avocado
  misc_feature (1)..(321): NCBI GI NO: 40645046 NR Description: cytochrome P450 [Asparagus officinalis]
  misc_feature (1)..(321): NCBI GI NO: 117188 NR Description: CYTOCHROME P450 71A1 (CYPLXXIA1) (ARP-2)
  misc_feature (1)..(321): NCBI GI NO: 5915816 NR Description: Cytochrome P450 71A9 (P450 CP1)
  misc_feature (1)..(321): NCBI GI NO: 22331680 NR Description: Expressed protein; protein id: At3g48310
  misc_feature (1)..(321): NCBI GI NO: 15723953 NR Description: menthofuran synthase [Mentha x piperita]
  misc_feature (1)..(321): NCBI GI NO: 3582021 NR Description: cytochrome P450 [Nepeta racemosa]
  misc_feature (1)..(321): NCBI GI NO: 19909888 NR Description: P450 [Triticum aestivum]
  misc_feature (1)..(321): NCBI GI NO: 26655531 NR Description: cytochrome P450 [Triticum aestivum]
  misc_feature (1)..(321): NCBI GI NO: 25282603 NR Description: cytochrome P450 monooxygenase
MYECSNVSFAPYGENWRRGKKIAVVHLLSPRRVESFAPVRAAEVAALVARTRRTAEAGEAVELRELLNGYANAVATRAATGAAGATAEKLKELMGNSEPEALMAGFQPEDVLPDAPARFVRWVTGLNKKLEDLVESWDKFLSDIVAAHKEKGGGDAEEDEDFLDVLLRLREEGADGLELTDDRIKATVKDMIAAATETSSQTLEWTMAELIANPRVMSKLQGEIARVVSADQTTIAEPDLNKMEYLRAVFKEVLRLHPPAPLLVPHESTTPAVVQGYEIPAKTALFVNVWAIGRDPAVWDAPDEFRPERFVGGSPSVDFRGTTTSSSRSAPAGGSAPASTSRCRSWSSRLSAFCTTSNGSSPPAWEKRTSTWARRRG

SEQ ID NO: 25836 - DNA, 1657 bp, Zea mays subsp. mays
  misc_feature (1)..(1657): Ceres Seq. ID no. 12356149
aattaattactttccccccaaaaaaaagccccccaccgcctcgacctcgattcctccgcccccatcgccgtcgtctcctcctccgcctccctgtctgtccgctccgcacctcccctaaaaaacccccccggccattgccgcaccgagctccccttcctcaaatgccccaggcccggacgcctcgacgcccagctccgtgctcgcatggctagcggcgtcctccatcgctccgcctccctatgtctccgcccggccgccggctcctccgccgactccggccggggccacggcgcggttatgatcggtgattcgaggacgcgcgttgctgctctgcggctgggaggatctagccggagagagttattatctgtcacaatggcctccagagatcacactggcttgacccgacaacttcttgattttcaacatgatacaatagatgaggtaggcgcaggacatgacccattcattgatttgaaagcgagattcatggactttaaacagagaaactatgtggaaaaattttcaaattaccaaacccttgctgagcagcaaacaccaaagttcatggtggttgcttgtgctgactccagggtctgccctaccgctgttttggggtttcagcctggggaagcatttacagttcgtaatgtggcaaatttggtaccaccatatgagcatggggggacagagactagtgcagcactagagtttgctgtcaataccctccaggtagaaaatgtactggtgataggccacagtaggtgtgggggcatccaggcactaatgagcatgaaagatgattcgacctccggaagcttcattaaaaactgggtttcaattgggaagagcgcaaggttaagcacgaaagctgcagctggaaatatgagttttgacatacagtgcaaacattgtgaaaaggaatcaataaatagttctctgttgaacttgttaacatacccattgattgagaagagggtgaatgaaggcactttgaatcttcatggaggctactacaacttcgtcgattgcacatttgagaaatggacattgttgtaccgtgaagggttggaaggtggaagcaagtatgccataaagaaccggtccacctggtgttgaccaacgaaggtcgtgtttacttgggtaaatttcactctgccccccgctgttcagcatggtttcgctttgccactacgttgtccatttcccattgcacctttgctccattgtggcatcgatgttctccgggtcccggtatcaaataactgtggcaaggctgttggcatgccagcttgaactgcgtgttgtagtgtcgcatacacatgcgcaggcacgtctgcatcgtagcagttatttgatacaggaactttttgatactgtagaagcacaataccacaatggagtgaggtgcaacgcgcgatggacaatatggttgcaaggtgaaagtctgtggaactgccgggggcaaagtgaattttatccaactatctgtaatatgtgtgctgttttccggttgaaactattaagaaaaaaataggaataagctgcaggatcggtcgtaatgcgtgtaattgtcgccacatttggcattaccttgctattgtaacatttgtaccatttgttgtatcattataactgagatatatacggtctcgcc

SEQ ID NO: 25837 - protein, 304 aa, Zea mays subsp. mays
  peptide (1)..(304): Ceres Seq. ID no. 12356150
  misc_feature (114)..(282): Pfam Name: Pfam Description:  Carbonic anhydrase
  misc_feature (39)..(303): NCBI GI NO: 18418245 NR Description: carbonate dehydratase - like protein
  misc_feature (17)..(303): NCBI GI NO: 30696223 NR Description: carbonic anhydrase -related [Arabidopsis thaliana]
  misc_feature (17)..(303): NCBI GI NO: 25404198 NR Description: probable carbonic anhydrase T18I24.9
  misc_feature (78)..(286): NCBI GI NO: 15223141 NR Description: carbonic anhydrase, putative; protein id:At1g70410
  misc_feature (78)..(286): NCBI GI NO: 30698715 NR Description: carbonic anhydrase -related [Arabidopsis thaliana]
  misc_feature (40)..(283): NCBI GI NO: 27652186 NR Description: carbonic anhydrase 3 [Flaveria bidentis]
  misc_feature (17)..(259): NCBI GI NO: 30696219 NR Description: carbonic anhydrase -related [Arabidopsis thaliana]
  misc_feature (17)..(259): NCBI GI NO: 21539555 NR Description: putative carbonic anhydrase [Arabidopsis thaliana]
  misc_feature (134)..(303): NCBI GI NO: 7484832 NR Description: carbonate dehydratase homolog T16L1
  misc_feature (91)..(283): NCBI GI NO: 115471 NR Description: CARBONIC ANHYDRASE, CHLOROPLAST PRECURSOR
MASGVLHRSASLCLRPAAGSSADSGRGHGAVMIGDSRTRVAALRLGGSSRRELLSVTMASRDHTGLTRQLLDFQHDTIDEVGAGHDPFIDLKARFMDFKQRNYVEKFSNYQTLAEQQTPKFMVVACADSRVCPTAVLGFQPGEAFTVRNVANLVPPYEHGGTETSAALEFAVNTLQVENVLVIGHSRCGGIQALMSMKDDSTSGSFIKNWVSIGKSARLSTKAAAGNMSFDIQCKHCEKESINSSLLNLLTYPLIEKRVNEGTLNLHGGYYNFVDCTFEKWTLLYREGLEGGSKYAIKNRSTWC

SEQ ID NO: 25838 - protein, 273 aa, Zea mays subsp. mays
  peptide (1)..(273): Ceres Seq. ID no. 12356151
  misc_feature (83)..(251): Pfam Name: Pfam Description:  Carbonic anhydrase
  misc_feature (8)..(272): NCBI GI NO: 18418245 NR Description: carbonate dehydratase - like protein
  misc_feature (1)..(272): NCBI GI NO: 30696223 NR Description: carbonic anhydrase -related [Arabidopsis thaliana]
  misc_feature (1)..(272): NCBI GI NO: 25404198 NR Description: probable carbonic anhydrase T18I24.9
  misc_feature (47)..(255): NCBI GI NO: 15223141 NR Description: carbonic anhydrase, putative; protein id:At1g70410
  misc_feature (47)..(255): NCBI GI NO: 30698715 NR Description: carbonic anhydrase -related [Arabidopsis thaliana]
  misc_feature (9)..(252): NCBI GI NO: 27652186 NR Description: carbonic anhydrase 3 [Flaveria bidentis]
  misc_feature (1)..(228): NCBI GI NO: 30696219 NR Description: carbonic anhydrase -related [Arabidopsis thaliana]
  misc_feature (1)..(228): NCBI GI NO: 21539555 NR Description: putative carbonic anhydrase [Arabidopsis thaliana]
  misc_feature (103)..(272): NCBI GI NO: 7484832 NR Description: carbonate dehydratase homolog T16L1
  misc_feature (60)..(252): NCBI GI NO: 115471 NR Description: CARBONIC ANHYDRASE, CHLOROPLAST PRECURSOR
MIGDSRTRVAALRLGGSSRRELLSVTMASRDHTGLTRQLLDFQHDTIDEVGAGHDPFIDLKARFMDFKQRNYVEKFSNYQTLAEQQTPKFMVVACADSRVCPTAVLGFQPGEAFTVRNVANLVPPYEHGGTETSAALEFAVNTLQVENVLVIGHSRCGGIQALMSMKDDSTSGSFIKNWVSIGKSARLSTKAAAGNMSFDIQCKHCEKESINSSLLNLLTYPLIEKRVNEGTLNLHGGYYNFVDCTFEKWTLLYREGLEGGSKYAIKNRSTWC

SEQ ID NO: 25839 - protein, 247 aa, Zea mays subsp. mays
  peptide (1)..(247): Ceres Seq. ID no. 12356152
  misc_feature (57)..(225): Pfam Name: Pfam Description:  Carbonic anhydrase
  misc_feature (1)..(246): NCBI GI NO: 18418245 NR Description: carbonate dehydratase - like protein
  misc_feature (1)..(246): NCBI GI NO: 30696223 NR Description: carbonic anhydrase -related [Arabidopsis thaliana]
  misc_feature (1)..(246): NCBI GI NO: 25404198 NR Description: probable carbonic anhydrase T18I24.9
  misc_feature (21)..(229): NCBI GI NO: 15223141 NR Description: carbonic anhydrase, putative; protein id:At1g70410
  misc_feature (21)..(229): NCBI GI NO: 30698715 NR Description: carbonic anhydrase -related [Arabidopsis thaliana]
  misc_feature (1)..(226): NCBI GI NO: 27652186 NR Description: carbonic anhydrase 3 [Flaveria bidentis]
  misc_feature (1)..(202): NCBI GI NO: 30696219 NR Description: carbonic anhydrase -related [Arabidopsis thaliana]
  misc_feature (1)..(202): NCBI GI NO: 21539555 NR Description: putative carbonic anhydrase [Arabidopsis thaliana]
  misc_feature (77)..(246): NCBI GI NO: 7484832 NR Description: carbonate dehydratase homolog T16L1
  misc_feature (34)..(226): NCBI GI NO: 115471 NR Description: CARBONIC ANHYDRASE, CHLOROPLAST PRECURSOR
MASRDHTGLTRQLLDFQHDTIDEVGAGHDPFIDLKARFMDFKQRNYVEKFSNYQTLAEQQTPKFMVVACADSRVCPTAVLGFQPGEAFTVRNVANLVPPYEHGGTETSAALEFAVNTLQVENVLVIGHSRCGGIQALMSMKDDSTSGSFIKNWVSIGKSARLSTKAAAGNMSFDIQCKHCEKESINSSLLNLLTYPLIEKRVNEGTLNLHGGYYNFVDCTFEKWTLLYREGLEGGSKYAIKNRSTWC

SEQ ID NO: 25840 - DNA, 1271 bp, Zea mays subsp. mays
  misc_feature (1)..(1271): Ceres Seq. ID no. 12414141
aaaacttcctccccaaacaaccggcggcggcgcgagggcttcgctttgctgccatggctctcgtcgccggctcctacgagcgcttcatctggggcttctcactcaaaaccctgacaaccccctccgccaccggcgcctcgccctccgagaccctgaccctcgcgccgctcttctcgtacccggcccacacgggcccggtgcgctgcgtggccgcggcgccgcgggcggggctggtggcctccggcggcgcggacaactccgtccgcctctacgacctcccttccgccgcggacctcggcccgctcctggacccctcggccgccgtctccgcactcgccttctactcccggggccccgtgccgcggaacctcctggccgcctgcgacgacggctcgctccacatctacgacgccgacggcttcgcgctgctctccacgctccgcgccttcccgcgccacgaggccgccgaggcgctcgccgtgcacccgtcgggccgggtcgcgctcgccgtcggccgcgcgggggcgcttgccatgctcaacctcgtccgcggccgacgcagcttcgcatgccgcctcgagcaccctgcgtccgcgatcgcctacgctgaggacagggatggcggggaccgattcgtgatggctgccgagaacaaggtcagcgtgcacgactccgtggatgccagggttattcatgatatggactgtggcaagaaggtgctcgccatggcgcccgcaaagagtggggtcctttacactggtggcgaggaccgttgtattactgcatgggatctgtccagcggcaaggtctcctcacgcattgagggtgcccatgcaactcgtgtaaaaggggttgttgtttttggtaatagcaatgatggatcacagctctccaatctaatttcttctgcttcgtccgatggtgtcataaggatatgggacattcgaacaatcgggaacggaaagcctactccattagcagaggctaatacaaaagcaaggctaacttgtcttgctggaacgtcactgaaatgactcaaggaacctacagtttgctaggcgtctgattctgcattgttagctgaattagaaaacctggacatgaaagaagaaattgaaggtgaaagatctggcacgcgagcattatctgtgtgcgtttggaacgtatccatccattatgtacaccgacatagttttggcttagtgtctgagctgcataacttatttatatttgattgcgcgacaagttttgcaatgagaaccgttttcagt

SEQ ID NO: 25841 - protein, 343 aa, Zea mays subsp. mays
  peptide (1)..(343): Ceres Seq. ID no. 12414142
  misc_feature (18)..(343): NCBI GI NO: 23306444 NR Description: Unknown protein [Arabidopsis thaliana]
  misc_feature (18)..(343): NCBI GI NO: 15217832 NR Description: G-protein beta-subunit
  misc_feature (18)..(246): NCBI GI NO: 25404514 NR Description: hypothetical protein F16G16.2
  misc_feature (246)..(343): NCBI GI NO: 25404514 NR Description: hypothetical protein F16G16.2
  misc_feature (18)..(337): NCBI GI NO: 21311951 NR Description: RIKEN cDNA 5930415H02 [Mus musculus]
  misc_feature (18)..(337): NCBI GI NO: 26346855 NR Description: unnamed protein product [Mus musculus]
  misc_feature (49)..(337): NCBI GI NO: 37362258 NR Description: PAK1 interacting protein 1 [Danio rerio]
  misc_feature (18)..(337): NCBI GI NO: 14578565 NR Description: putative PAK inhibitor SKB15 [Mus musculus]
  misc_feature (49)..(337): NCBI GI NO: 29436537 NR Description: Similar to hypothetical protein FLJ20624
  misc_feature (62)..(337): NCBI GI NO: 8923577 NR Description: hypothetical protein FLJ20624 [Homo sapiens]
NFLPKQPAAARGLRFAAMALVAGSYERFIWGFSLKTLTTPSATGASPSETLTLAPLFSYPAHTGPVRCVAAAPRAGLVASGGADNSVRLYDLPSAADLGPLLDPSAAVSALAFYSRGPVPRNLLAACDDGSLHIYDADGFALLSTLRAFPRHEAAEALAVHPSGRVALAVGRAGALAMLNLVRGRRSFACRLEHPASAIAYAEDRDGGDRFVMAAENKVSVHDSVDARVIHDMDCGKKVLAMAPAKSGVLYTGGEDRCITAWDLSSGKVSSRIEGAHATRVKGVVVFGNSNDGSQLSNLISSASSDGVIRIWDIRTIGNGKPTPLAEANTKARLTCLAGTSLK

SEQ ID NO: 25842 - protein, 326 aa, Zea mays subsp. mays
  peptide (1)..(326): Ceres Seq. ID no. 12414143
  misc_feature (1)..(326): NCBI GI NO: 23306444 NR Description: Unknown protein [Arabidopsis thaliana]
  misc_feature (1)..(326): NCBI GI NO: 15217832 NR Description: G-protein beta-subunit
  misc_feature (1)..(229): NCBI GI NO: 25404514 NR Description: hypothetical protein F16G16.2
  misc_feature (229)..(326): NCBI GI NO: 25404514 NR Description: hypothetical protein F16G16.2
  misc_feature (1)..(320): NCBI GI NO: 21311951 NR Description: RIKEN cDNA 5930415H02 [Mus musculus]
  misc_feature (1)..(320): NCBI GI NO: 26346855 NR Description: unnamed protein product [Mus musculus]
  misc_feature (32)..(320): NCBI GI NO: 37362258 NR Description: PAK1 interacting protein 1 [Danio rerio]
  misc_feature (1)..(320): NCBI GI NO: 14578565 NR Description: putative PAK inhibitor SKB15 [Mus musculus]
  misc_feature (32)..(320): NCBI GI NO: 29436537 NR Description: Similar to hypothetical protein FLJ20624
  misc_feature (45)..(320): NCBI GI NO: 8923577 NR Description: hypothetical protein FLJ20624 [Homo sapiens]
MALVAGSYERFIWGFSLKTLTTPSATGASPSETLTLAPLFSYPAHTGPVRCVAAAPRAGLVASGGADNSVRLYDLPSAADLGPLLDPSAAVSALAFYSRGPVPRNLLAACDDGSLHIYDADGFALLSTLRAFPRHEAAEALAVHPSGRVALAVGRAGALAMLNLVRGRRSFACRLEHPASAIAYAEDRDGGDRFVMAAENKVSVHDSVDARVIHDMDCGKKVLAMAPAKSGVLYTGGEDRCITAWDLSSGKVSSRIEGAHATRVKGVVVFGNSNDGSQLSNLISSASSDGVIRIWDIRTIGNGKPTPLAEANTKARLTCLAGTSLK

SEQ ID NO: 25843 - protein, 202 aa, Zea mays subsp. mays
  peptide (1)..(202): Ceres Seq. ID no. 12414144
  misc_feature (38)..(202): NCBI GI NO: 23019401 NR Description: hypothetical protein [Thermobifida fusca]
KLPPQTTGGGARASLCCHGSRRRLLRALHLGLLTQNPDNPLRHRRLALRDPDPRAALLVPGPHGPGALRGRGAAGGAGGLRRRGQLRPPLRPPFRRGPRPAPGPLGRRLRTRLLLPGPRAAEPPGRLRRRLAPHLRRRRLRAALHAPRLPAPRGRRGARRAPVGPGRARRRPRGGACHAQPRPRPTQLRMPPRAPCVRDRLR

SEQ ID NO: 25844 - DNA, 1404 bp, Zea mays subsp. mays
  misc_feature (1)..(1404): Ceres Seq. ID no. 12405937
acctttcgccgattccaccggccaccgtgccttcctccaccaccagccgcggcacacccgcggaaccgccgctcgagctcgcgcctgaaccccccaaactctgccaaatttcgccaaatccagccggtcggaccccgcaacacatcgccaaaaccaaccgggccggccgacacaagccgcagcccgtggcgatggacctggcgtcgagcgaccttgcggcgctgggcgcggcggagctggtccgcgtctcggcgtcgatcccgcgcgcggctccccgcaccttcgcgctgctcaccgcctgctctcgtcttcccgctctccttcgccgtgctcgcgcactccctcttcacccaccccatcctgctccgcatccagcgcgccacccactccgagctagcgcagtggctcaggctcttcgcctaccagttcctctacctcatcgtcctcttcaccttctccctcctctccaccgccgccgccgtcttcaccgtcgcctccctctacgccaacaagcccgcgtccatctcctcctcgctcaccgcgctgccccccatcctgccccgcctcctccgcaccttcctctgggtctcccttctcatgctcgcctaccacctcgtcttcgcgctcaccgtcctcctgctcatcgtcgtcttcatccccaacgcgtccgagtccgagtccgcgccgccctccctcgccttcgtactcttcctcgtcgtcgtcgtcttcgtcttcctcgggatccacgtctacatctccgcgctgtggcacctcgccagcgtcatctccgtgctcgagccgctctgcggactcgccgccatggccaagagcaaggatctgctccagggccgcaccggcaccgcagccacgcttgtcgtctcctacttcgcggtctgcggcgtcacctccgtgctgttccgtgccgccgtcgttaaggggcgcgccgaggaggggagcttcggtctggccttgcccgggcggctgcttgtcggcgccgtgctgctgtgcgttcttgtctgtgtcaatttgctgggactgctcgtgcagagcgtcttctactacgcctgcaaggccttccacaaccagcagattgaccggactgcgttgtatgagcaccttggagggtaccttggggagtacgtgccactcaagagcaatatccagatggagaacctttgagattggagcataggacaagggtaagttactcacctcattgcttcatactagcagtttcatgtggatctttatcagaatatgagtatggcttacaaggggctatctggtcttgttgattctagtaccatgtagtagtttataatctgtataagtggtaatgcacagtatggaaccaatctgtggaatggaagtatggaacagagatgcatgaacaaggttgccttt

SEQ ID NO: 25845 - protein, 392 aa, Zea mays subsp. mays
  peptide (1)..(392): Ceres Seq. ID no. 12405938
  misc_feature (8)..(62): Pfam Name: Pfam Description:  Extensin-like region
  misc_feature (102)..(392): NCBI GI NO: 34908936 NR Description: P0691E06.20
  misc_feature (102)..(391): NCBI GI NO: 15241607 NR Description: putative protein; protein id: At5g44860
  misc_feature (102)..(391): NCBI GI NO: 30684945 NR Description: expressed protein [Arabidopsis thaliana]
  misc_feature (101)..(392): NCBI GI NO: 18397813 NR Description: expressed protein; protein id: At1g31130
  misc_feature (102)..(336): NCBI GI NO: 7485737 NR Description: hypothetical protein F18F4
  misc_feature (234)..(391): NCBI GI NO: 7485737 NR Description: hypothetical protein F18F4
TFRRFHRPPCLPPPPAAAHPRNRRSSSRLNPPNSAKFRQIQPVGPRNTSPKPTGPADTSRSPWRWTWRRATLRRWARRSWSASRRRSRARLPAPSRCSPPALVFPLSFAVLAHSLFTHPILLRIQRATHSELAQWLRLFAYQFLYLIVLFTFSLLSTAAAVFTVASLYANKPASISSSLTALPPILPRLLRTFLWVSLLMLAYHLVFALTVLLLIVVFIPNASESESAPPSLAFVLFLVVVVFVFLGIHVYISALWHLASVISVLEPLCGLAAMAKSKDLLQGRTGTAATLVVSYFAVCGVTSVLFRAAVVKGRAEEGSFGLALPGRLLVGAVLLCVLVCVNLLGLLVQSVFYYACKAFHNQQIDRTALYEHLGGYLGEYVPLKSNIQMENL

SEQ ID NO: 25846 - protein, 310 aa, Zea mays subsp. mays
  peptide (1)..(310): Ceres Seq. ID no. 12405939
  misc_feature (64)..(99): NCBI GI NO: 34908936 NR Description: P0691E06.20
  misc_feature (64)..(98): NCBI GI NO: 15241607 NR Description: putative protein; protein id: At5g44860
  misc_feature (2)..(45): NCBI GI NO: 1076802 NR Description: extensin-like protein - maize
LSPIPPATVPSSTTSRGTPAEPPLELAPEPPKLCQISPNPAGRTPQHIAKTNRAGRHKPQPVAMDLASSDLAALGAAELVRVSASIPRAAPRTFALLTACSRLPALLRRARALPLHPPHPAPHPARHPLRASAVAQALRLPVPLPHRPLHLLPPLHRRRRLHRRLPLRQQARVHLLLAHRAAPHPAPPPPHLPLGLPSHARLPPRLRAHRPPAHRRLHPQRVRVRVRAALPRLRTLPRRRRLRLPRDPRLHLRAVAPRQRHLRARAALRTRRHGQEQGSAPGPHRHRSHACRLLLRGLRRHLRAVPCRRR

SEQ ID NO: 25847 - protein, 247 aa, Zea mays subsp. mays
  peptide (1)..(247): Ceres Seq. ID no. 12405940
  misc_feature (1)..(36): NCBI GI NO: 34908936 NR Description: P0691E06.20
  misc_feature (1)..(35): NCBI GI NO: 15241607 NR Description: putative protein; protein id: At5g44860
MDLASSDLAALGAAELVRVSASIPRAAPRTFALLTACSRLPALLRRARALPLHPPHPAPHPARHPLRASAVAQALRLPVPLPHRPLHLLPPLHRRRRLHRRLPLRQQARVHLLLAHRAAPHPAPPPPHLPLGLPSHARLPPRLRAHRPPAHRRLHPQRVRVRVRAALPRLRTLPRRRRLRLPRDPRLHLRAVAPRQRHLRARAALRTRRHGQEQGSAPGPHRHRSHACRLLLRGLRRHLRAVPCRRR

SEQ ID NO: 25848 - DNA, 1016 bp, Zea mays subsp. mays
  misc_feature (1)..(1016): Ceres Seq. ID no. 13501199
cataggttgctaggctcggccgtgtagagcagcaagagcacgccgcgccaagcaacaaagagggaccccgcttccatggaggtggtgggcggcgtgtcgctgaggccgtcgccagcgccggcgcgtatccggactaccctgccacccgtcgacgtaggcggacgcttccttctccgccgggtcgcggggcgccagccggcgaggcgcgcgctggtcgtggaggcccggggcggcaggggctggtcggagcggcagatgcagcagcagcgccgcgcgccgctgctgccgaaaatcgaggacgacggcaacccgcgattcgtcatcttcatccgcaccgccaatgtctacttctggtacccgctcaacatcatcacgggcggtacgacggcgaagatcatgctcgccgccaaggacaacttcctcggcaagtacatctacaaggacacgctcgccaggaacctcgccgccgtcatttacaaagacgaggacgtgatcatagacacagcgaaagagcagtaccgtgtgctcaagaccgaaaatcagtttcggtatggctacaaagttgtggagaaagggaacataaggtctgctctgacgacaagcaatgtgatcgaacttccaaagaaggacgagctcaaaaccgtggttgacaaggtgaaggacttctttggcgacgtgactgccggcgccaaagaatcctttgcgcagataacagggtctgctgtcagcaaggaggaagaggaagcagagagcaaagagaagttccgctccaagagacgaaagaagcagcggaagtcgaaggagggcctcaagacggagaaatgattcagtcagtcacacaagtaaagcaccggctgtagtttcgctatcgatgtccgagaactgttctgtaatttctccagcttccttttttttgtttgttttgtaaaaagacgtcgtgtaacttcattgcgactaacgtgtgctatgccttctcagtaaatctcacaaaatgtgaaggtactccctacgttctc

SEQ ID NO: 25849 - protein, 249 aa, Zea mays subsp. mays
  peptide (1)..(249): Ceres Seq. ID no. 13501200
  misc_feature (40)..(232): NCBI GI NO: 30697556 NR Description: auxin-regulated protein [Arabidopsis thaliana]
  misc_feature (40)..(229): NCBI GI NO: 30697554 NR Description: auxin-regulated protein [Arabidopsis thaliana]
  misc_feature (133)..(229): NCBI GI NO: 11072026 NR Description: F12A21.16 [Arabidopsis thaliana]
  misc_feature (40)..(135): NCBI GI NO: 11072026 NR Description: F12A21.16 [Arabidopsis thaliana]
MEVVGGVSLRPSPAPARIRTTLPPVDVGGRFLLRRVAGRQPARRALVVEARGGRGWSERQMQQQRRAPLLPKIEDDGNPRFVIFIRTANVYFWYPLNIITGGTTAKIMLAAKDNFLGKYIYKDTLARNLAAVIYKDEDVIIDTAKEQYRVLKTENQFRYGYKVVEKGNIRSALTTSNVIELPKKDELKTVVDKVKDFFGDVTAGAKESFAQITGSAVSKEEEEAESKEKFRSKRRKKQRKSKEGLKTEK

SEQ ID NO: 25850 - protein, 189 aa, Zea mays subsp. mays
  peptide (1)..(189): Ceres Seq. ID no. 13501201
  misc_feature (1)..(172): NCBI GI NO: 30697556 NR Description: auxin-regulated protein [Arabidopsis thaliana]
  misc_feature (1)..(169): NCBI GI NO: 30697554 NR Description: auxin-regulated protein [Arabidopsis thaliana]
  misc_feature (73)..(169): NCBI GI NO: 11072026 NR Description: F12A21.16 [Arabidopsis thaliana]
  misc_feature (1)..(75): NCBI GI NO: 11072026 NR Description: F12A21.16 [Arabidopsis thaliana]
MQQQRRAPLLPKIEDDGNPRFVIFIRTANVYFWYPLNIITGGTTAKIMLAAKDNFLGKYIYKDTLARNLAAVIYKDEDVIIDTAKEQYRVLKTENQFRYGYKVVEKGNIRSALTTSNVIELPKKDELKTVVDKVKDFFGDVTAGAKESFAQITGSAVSKEEEEAESKEKFRSKRRKKQRKSKEGLKTEK

SEQ ID NO: 25851 - protein, 142 aa, Zea mays subsp. mays
  peptide (1)..(142): Ceres Seq. ID no. 13501202
  misc_feature (1)..(125): NCBI GI NO: 30697556 NR Description: auxin-regulated protein [Arabidopsis thaliana]
  misc_feature (1)..(122): NCBI GI NO: 30697554 NR Description: auxin-regulated protein [Arabidopsis thaliana]
  misc_feature (26)..(122): NCBI GI NO: 11072026 NR Description: F12A21.16 [Arabidopsis thaliana]
  misc_feature (1)..(28): NCBI GI NO: 11072026 NR Description: F12A21.16 [Arabidopsis thaliana]
MLAAKDNFLGKYIYKDTLARNLAAVIYKDEDVIIDTAKEQYRVLKTENQFRYGYKVVEKGNIRSALTTSNVIELPKKDELKTVVDKVKDFFGDVTAGAKESFAQITGSAVSKEEEEAESKEKFRSKRRKKQRKSKEGLKTEK

SEQ ID NO: 25852 - DNA, 1521 bp, Zea mays subsp. mays
  misc_feature (1)..(1521): Ceres Seq. ID no. 13495297
acggaagaagcgttttgccagtccatccacccaagcgaggcgaccgaggctggcctcttcgcctatcacccgaaacaagattagattagagatagcaaaaggcgaagcgacgggtaaccgccaccaccaaatcgctaccgccaatccgccatgatgctcccgacggccaccgcgacggccgtcttcctcaccgcggcgccttcctctttctccacccgccgtcggcgcagtcgcgccatcttcgcatccctttcgccgtccttctcctcctcggaggagccgctgctggtgcgcgcggcgcggggcgaggacggcctcccacgcccgcccgcgtggatgatgcggcaggcagggcggtacatggcggagtaccaggcgctggccaagcgccacccctcgttccgggagcgctccgagaacacggacctcatcgtcgagatcacgctgcagccgtggcgtgccttcgcgcccgacggcgtcatcctgttctcggacatactcacgcccctgccggccatcggggtgccgttcgatatctcggactccaaggggcccgtgatccaatcgccagtacggtccaaagagcaggtgagggagctcgtccccatcgaccttgatatgctccagttcgtcggggagtcactaaagattctgcgaaatgagattgatggaaaagctgctttgctaggatttgtgggggccccatggacaattgcaacttacattgttgaaggggggatgaccaatacgtacacaaatataaagagcatgtgccatacagctccagatgtcttgaagggtcttctctctcaccttgcacaggccatatctgactatatcatttaccaagttaactcgggggcccagtgtatacagatatttgattcatggggtggacagcttccacctcatgtgtgggagcagtggtcaaaaccatatatcaaacagattgtgagtaggattaagaaagagtgccctaatgtaccccttgtgttgtatataaatggaaatggaggtttacttgagcgcatgaagaacacaggagctgatgttattgggcttgactggacagtggacatgactgatggaaggaggcgccttggtaatggcattagtgtacaagggaatgtggatccagcatttttgttctcaccattaccagtactgactgatgaaattcatagggttgtgaaagcagctggtccaaaaggtcatatacttaatctgggctgtacttcagaaaacacccgaagaagctgtagcacatttctttgatgtcacaaggcgcttgagatatgacacccttttccaaggttctgttgctgaagaattgcatcacgttgcttgacaacggcaatgacattcccatttttcatcaagtggtgtatttgatctgtcatatcatcttagagtcgtagtagattcctagtgttgcctgcattctacctttcaagagagactcattttcttaagcctgtatatgtattgcagagataccggcggcaaatctagtgcaatttt

SEQ ID NO: 25853 - protein, 374 aa, Zea mays subsp. mays
  peptide (1)..(374): Ceres Seq. ID no. 13495298
  misc_feature (41)..(360): Pfam Name: URO-D Pfam Description: Uroporphyrinogen decarboxylase
  misc_feature (5)..(360): NCBI GI NO: 34912796 NR Description: putative uroporphyrinogen decarboxylase
  misc_feature (39)..(360): NCBI GI NO: 16323119 NR Description: AT3g14930/K15M2_7 [Arabidopsis thaliana]
  misc_feature (39)..(360): NCBI GI NO: 18400577 NR Description: uroporphyrinogen decarboxylase (UPD), putative
  misc_feature (63)..(360): NCBI GI NO: 8777476 NR Description: uroporphyrinogen decarboxylase
  misc_feature (41)..(360): NCBI GI NO: 23041382 NR Description: hypothetical protein
  misc_feature (39)..(360): NCBI GI NO: 14334768 NR Description: putative uroporphyrinogen decarboxylase
  misc_feature (39)..(360): NCBI GI NO: 15226690 NR Description: uroporphyrinogen decarboxylase (UPD), putative
  misc_feature (16)..(360): NCBI GI NO: 2501647 NR Description: Uroporphyrinogen decarboxylase
  misc_feature (36)..(360): NCBI GI NO: 16975230 NR Description: Chain A
  misc_feature (44)..(360): NCBI GI NO: 33240529 NR Description: Uroporphyrinogen decarboxylase
MMLPTATATAVFLTAAPSSFSTRRRRSRAIFASLSPSFSSSEEPLLVRAARGEDGLPRPPAWMMRQAGRYMAEYQALAKRHPSFRERSENTDLIVEITLQPWRAFAPDGVILFSDILTPLPAIGVPFDISDSKGPVIQSPVRSKEQVRELVPIDLDMLQFVGESLKILRNEIDGKAALLGFVGAPWTIATYIVEGGMTNTYTNIKSMCHTAPDVLKGLLSHLAQAISDYIIYQVNSGAQCIQIFDSWGGQLPPHVWEQWSKPYIKQIVSRIKKECPNVPLVLYINGNGGLLERMKNTGADVIGLDWTVDMTDGRRRLGNGISVQGNVDPAFLFSPLPVLTDEIHRVVKAAGPKGHILNLGCTSENTRRSCSTFL

SEQ ID NO: 25854 - protein, 373 aa, Zea mays subsp. mays
  peptide (1)..(373): Ceres Seq. ID no. 13495299
  misc_feature (40)..(359): Pfam Name: URO-D Pfam Description: Uroporphyrinogen decarboxylase
  misc_feature (4)..(359): NCBI GI NO: 34912796 NR Description: putative uroporphyrinogen decarboxylase
  misc_feature (38)..(359): NCBI GI NO: 16323119 NR Description: AT3g14930/K15M2_7 [Arabidopsis thaliana]
  misc_feature (38)..(359): NCBI GI NO: 18400577 NR Description: uroporphyrinogen decarboxylase (UPD), putative
  misc_feature (62)..(359): NCBI GI NO: 8777476 NR Description: uroporphyrinogen decarboxylase
  misc_feature (40)..(359): NCBI GI NO: 23041382 NR Description: hypothetical protein
  misc_feature (38)..(359): NCBI GI NO: 14334768 NR Description: putative uroporphyrinogen decarboxylase
  misc_feature (38)..(359): NCBI GI NO: 15226690 NR Description: uroporphyrinogen decarboxylase (UPD), putative
  misc_feature (15)..(359): NCBI GI NO: 2501647 NR Description: Uroporphyrinogen decarboxylase
  misc_feature (35)..(359): NCBI GI NO: 16975230 NR Description: Chain A
  misc_feature (43)..(359): NCBI GI NO: 33240529 NR Description: Uroporphyrinogen decarboxylase
MLPTATATAVFLTAAPSSFSTRRRRSRAIFASLSPSFSSSEEPLLVRAARGEDGLPRPPAWMMRQAGRYMAEYQALAKRHPSFRERSENTDLIVEITLQPWRAFAPDGVILFSDILTPLPAIGVPFDISDSKGPVIQSPVRSKEQVRELVPIDLDMLQFVGESLKILRNEIDGKAALLGFVGAPWTIATYIVEGGMTNTYTNIKSMCHTAPDVLKGLLSHLAQAISDYIIYQVNSGAQCIQIFDSWGGQLPPHVWEQWSKPYIKQIVSRIKKECPNVPLVLYINGNGGLLERMKNTGADVIGLDWTVDMTDGRRRLGNGISVQGNVDPAFLFSPLPVLTDEIHRVVKAAGPKGHILNLGCTSENTRRSCSTFL

SEQ ID NO: 25855 - protein, 312 aa, Zea mays subsp. mays
  peptide (1)..(312): Ceres Seq. ID no. 13495300
  misc_feature (1)..(298): Pfam Name: URO-D Pfam Description: Uroporphyrinogen decarboxylase
  misc_feature (1)..(298): NCBI GI NO: 34912796 NR Description: putative uroporphyrinogen decarboxylase
  misc_feature (1)..(298): NCBI GI NO: 16323119 NR Description: AT3g14930/K15M2_7 [Arabidopsis thaliana]
  misc_feature (1)..(298): NCBI GI NO: 18400577 NR Description: uroporphyrinogen decarboxylase (UPD), putative
  misc_feature (1)..(298): NCBI GI NO: 8777476 NR Description: uroporphyrinogen decarboxylase
  misc_feature (1)..(298): NCBI GI NO: 23041382 NR Description: hypothetical protein
  misc_feature (1)..(298): NCBI GI NO: 14334768 NR Description: putative uroporphyrinogen decarboxylase
  misc_feature (1)..(298): NCBI GI NO: 15226690 NR Description: uroporphyrinogen decarboxylase (UPD), putative
  misc_feature (1)..(298): NCBI GI NO: 2501647 NR Description: Uroporphyrinogen decarboxylase
  misc_feature (1)..(298): NCBI GI NO: 16975230 NR Description: Chain A
  misc_feature (1)..(298): NCBI GI NO: 33240529 NR Description: Uroporphyrinogen decarboxylase
MMRQAGRYMAEYQALAKRHPSFRERSENTDLIVEITLQPWRAFAPDGVILFSDILTPLPAIGVPFDISDSKGPVIQSPVRSKEQVRELVPIDLDMLQFVGESLKILRNEIDGKAALLGFVGAPWTIATYIVEGGMTNTYTNIKSMCHTAPDVLKGLLSHLAQAISDYIIYQVNSGAQCIQIFDSWGGQLPPHVWEQWSKPYIKQIVSRIKKECPNVPLVLYINGNGGLLERMKNTGADVIGLDWTVDMTDGRRRLGNGISVQGNVDPAFLFSPLPVLTDEIHRVVKAAGPKGHILNLGCTSENTRRSCSTFL

SEQ ID NO: 25856 - DNA, 655 bp, Zea mays subsp. mays
  misc_feature (1)..(655): Ceres Seq. ID no. 12404480
acatcctaatcgaaaactcgatgtagtggattcagtttgtgcaaaaaatggaggaaaaccattttcagatcaaatgttcactagcatcaaggaggtgcatgatagagaaaaagaggtgcatacctcgggatattcagatgagcagatatctgaattgaaaaaggagattcatagaactagggatgaacagcttgcgcacataaccaacatggtcgaggaaaagttaaactgcactgtggagaagttgcaacagcagctcatggaagaacagaacgcaaggctggaagctgagaaggtggcgtacgaagctaggctgaaatcagaagcggagatccagaagctcaaggagagcctcaaagctcaaatggaaaatgatgagttccggaggatggcgcagagccagggcagtaaatgtgctatcctataggcattagtacttgctagaaattggtggagctatcgtgctgacgcgtctcttgtacgtagtactttctctgttccaaaaatatatagttcaatacaccttagtagagatgactacgagagtatccaaacaagacctcgtcggacatgttagcctgaagcttgcttatggacatattggatatagtttttgggtgagaacttttgaacaacttccttgtttttttctctc

SEQ ID NO: 25857 - protein, 141 aa, Zea mays subsp. mays
  peptide (1)..(141): Ceres Seq. ID no. 12404481
  misc_feature (49)..(116): Pfam Name: Pfam Description:  Hsp70 protein
  misc_feature (6)..(129): NCBI GI NO: 12324509 NR Description: AIG1-like protein, 5' partial; 1-1205
  misc_feature (6)..(129): NCBI GI NO: 18399081 NR Description: expressed protein; protein id: At1g33970
  misc_feature (6)..(129): NCBI GI NO: 25373414 NR Description: hypothetical protein F12G12
  misc_feature (6)..(129): NCBI GI NO: 24417378 NR Description: unknown [Arabidopsis thaliana]
  misc_feature (6)..(141): NCBI GI NO: 4097585 NR Description: NTGP4 [Nicotiana tabacum]
  misc_feature (4)..(128): NCBI GI NO: 38346576 NR Description: OSJNBa0064D20.7
  misc_feature (4)..(128): NCBI GI NO: 32479674 NR Description: P0076O17.7
  misc_feature (6)..(141): NCBI GI NO: 15234871 NR Description: AIG1-like protein; protein id: At4g09950.1
  misc_feature (6)..(141): NCBI GI NO: 15217731 NR Description: AIG1; protein id: At1g33960
  misc_feature (6)..(123): NCBI GI NO: 15234852 NR Description: AIG1-like protein; protein id: At4g09930.1
HPNRKLDVVDSVCAKNGGKPFSDQMFTSIKEVHDREKEVHTSGYSDEQISELKKEIHRTRDEQLAHITNMVEEKLNCTVEKLQQQLMEEQNARLEAEKVAYEARLKSEAEIQKLKESLKAQMENDEFRRMAQSQGSKCAIL

SEQ ID NO: 25858 - protein, 117 aa, Zea mays subsp. mays
  peptide (1)..(117): Ceres Seq. ID no. 12404482
  misc_feature (25)..(92): Pfam Name: Pfam Description:  Hsp70 protein
  misc_feature (1)..(105): NCBI GI NO: 12324509 NR Description: AIG1-like protein, 5' partial; 1-1205
  misc_feature (1)..(105): NCBI GI NO: 18399081 NR Description: expressed protein; protein id: At1g33970
  misc_feature (1)..(105): NCBI GI NO: 25373414 NR Description: hypothetical protein F12G12
  misc_feature (1)..(105): NCBI GI NO: 24417378 NR Description: unknown [Arabidopsis thaliana]
  misc_feature (1)..(117): NCBI GI NO: 4097585 NR Description: NTGP4 [Nicotiana tabacum]
  misc_feature (1)..(104): NCBI GI NO: 38346576 NR Description: OSJNBa0064D20.7
  misc_feature (1)..(104): NCBI GI NO: 32479674 NR Description: P0076O17.7
  misc_feature (1)..(117): NCBI GI NO: 15234871 NR Description: AIG1-like protein; protein id: At4g09950.1
  misc_feature (1)..(117): NCBI GI NO: 15217731 NR Description: AIG1; protein id: At1g33960
  misc_feature (1)..(99): NCBI GI NO: 15234852 NR Description: AIG1-like protein; protein id: At4g09930.1
MFTSIKEVHDREKEVHTSGYSDEQISELKKEIHRTRDEQLAHITNMVEEKLNCTVEKLQQQLMEEQNARLEAEKVAYEARLKSEAEIQKLKESLKAQMENDEFRRMAQSQGSKCAIL

SEQ ID NO: 25859 - protein, 72 aa, Zea mays subsp. mays
  peptide (1)..(72): Ceres Seq. ID no. 12404483
  misc_feature (1)..(60): NCBI GI NO: 12324509 NR Description: AIG1-like protein, 5' partial; 1-1205
  misc_feature (1)..(60): NCBI GI NO: 25373414 NR Description: hypothetical protein F12G12
  misc_feature (1)..(60): NCBI GI NO: 18399081 NR Description: expressed protein; protein id: At1g33970
  misc_feature (1)..(60): NCBI GI NO: 24417378 NR Description: unknown [Arabidopsis thaliana]
  misc_feature (1)..(72): NCBI GI NO: 4097585 NR Description: NTGP4 [Nicotiana tabacum]
  misc_feature (1)..(59): NCBI GI NO: 38346576 NR Description: OSJNBa0064D20.7
  misc_feature (1)..(59): NCBI GI NO: 32479674 NR Description: P0076O17.7
  misc_feature (1)..(72): NCBI GI NO: 15234871 NR Description: AIG1-like protein; protein id: At4g09950.1
  misc_feature (1)..(72): NCBI GI NO: 15217731 NR Description: AIG1; protein id: At1g33960
  misc_feature (1)..(54): NCBI GI NO: 15234852 NR Description: AIG1-like protein; protein id: At4g09930.1
MVEEKLNCTVEKLQQQLMEEQNARLEAEKVAYEARLKSEAEIQKLKESLKAQMENDEFRRMAQSQGSKCAIL

SEQ ID NO: 25860 - DNA, 684 bp, Zea mays subsp. mays
  misc_feature (1)..(684): Ceres Seq. ID no. 12345970
attggacggatcgagctggtactggcacactcgatccaatattttagctagctagcaagcaaagcaagccttgagcttgagcggcggctagcgcaatgggaggcgtggcgtcggagctggtaggagccagcagggagaggcagagcaggaagaggaagcagttccacacggtggagctcaagatcaggatggactgcgacggctgcgagctcaaggtcaggaacacccttgcccgcatgagaggggtggagtcggtggagatcaaccggaagcagcagaaggtgacggtgaaggggttcgtggaggcgcagcgggtgcttaggcgcacccagtccacggggaagcgcgtcgagctgtggccctacgtgccctacaccaacctctacgtcgcgccgccggtgtacgacaagagggcgccgccgggccacgtccgcagggtcgacgcactcatcgcgcccgccgccggccaggaagagcacctcgccacgctcttcagcgacgataaccccaacgcctgctcccttatgtgatgcctcatgctagctagagccgcctgctccccggccttatgcgatgctagctgcttgcttcatccacgctgtactagcgatgtacatgcattgtttgcatgaaaacgaactgatgctccgtagttacgcagtaatataataatctctatctttt

SEQ ID NO: 25861 - protein, 144 aa, Zea mays subsp. mays
  peptide (1)..(144): Ceres Seq. ID no. 12345971
  misc_feature (27)..(87): Pfam Name: Pfam Description:  Heavy-metal-associated domain
  misc_feature (1)..(144): NCBI GI NO: 37573003 NR Description: putative farnesylated protein
  misc_feature (6)..(144): NCBI GI NO: 15235984 NR Description: copper chaperone
  misc_feature (15)..(144): NCBI GI NO: 32442810 NR Description: putative farnesylated protein
  misc_feature (4)..(144): NCBI GI NO: 38346843 NR Description: OSJNBa0091C12.3
  misc_feature (4)..(144): NCBI GI NO: 23304411 NR Description: farnesylated protein 1
  misc_feature (15)..(144): NCBI GI NO: 15219990 NR Description: copper chaperone
  misc_feature (19)..(144): NCBI GI NO: 15237967 NR Description: copper chaperone
  misc_feature (15)..(144): NCBI GI NO: 15223925 NR Description: copper chaperone
  misc_feature (18)..(144): NCBI GI NO: 21397273 NR Description: Putative atfp6-like protein
  misc_feature (6)..(144): NCBI GI NO: 15233937 NR Description: copper chaperone
MGGVASELVGASRERQSRKRKQFHTVELKIRMDCDGCELKVRNTLARMRGVESVEINRKQQKVTVKGFVEAQRVLRRTQSTGKRVELWPYVPYTNLYVAPPVYDKRAPPGHVRRVDALIAPAAGQEEHLATLFSDDNPNACSLM

SEQ ID NO: 25862 - protein, 113 aa, Zea mays subsp. mays
  peptide (1)..(113): Ceres Seq. ID no. 12345972
  misc_feature (1)..(56): Pfam Name: Pfam Description:  Heavy-metal-associated domain
  misc_feature (1)..(113): NCBI GI NO: 37573003 NR Description: putative farnesylated protein
  misc_feature (1)..(113): NCBI GI NO: 15235984 NR Description: copper chaperone
  misc_feature (1)..(113): NCBI GI NO: 32442810 NR Description: putative farnesylated protein
  misc_feature (1)..(113): NCBI GI NO: 38346843 NR Description: OSJNBa0091C12.3
  misc_feature (1)..(113): NCBI GI NO: 23304411 NR Description: farnesylated protein 1
  misc_feature (1)..(113): NCBI GI NO: 15219990 NR Description: copper chaperone
  misc_feature (1)..(113): NCBI GI NO: 15237967 NR Description: copper chaperone
  misc_feature (1)..(113): NCBI GI NO: 15223925 NR Description: copper chaperone
  misc_feature (1)..(113): NCBI GI NO: 21397273 NR Description: Putative atfp6-like protein
  misc_feature (1)..(113): NCBI GI NO: 15233937 NR Description: copper chaperone
MDCDGCELKVRNTLARMRGVESVEINRKQQKVTVKGFVEAQRVLRRTQSTGKRVELWPYVPYTNLYVAPPVYDKRAPPGHVRRVDALIAPAAGQEEHLATLFSDDNPNACSLM

SEQ ID NO: 25863 - protein, 97 aa, Zea mays subsp. mays
  peptide (1)..(97): Ceres Seq. ID no. 12345973
  misc_feature (1)..(97): NCBI GI NO: 37573003 NR Description: putative farnesylated protein
  misc_feature (1)..(97): NCBI GI NO: 15235984 NR Description: copper chaperone
  misc_feature (1)..(97): NCBI GI NO: 32442810 NR Description: putative farnesylated protein
  misc_feature (1)..(97): NCBI GI NO: 38346843 NR Description: OSJNBa0091C12.3
  misc_feature (1)..(97): NCBI GI NO: 23304411 NR Description: farnesylated protein 1
  misc_feature (1)..(97): NCBI GI NO: 15219990 NR Description: copper chaperone
  misc_feature (1)..(97): NCBI GI NO: 15237967 NR Description: copper chaperone
  misc_feature (1)..(97): NCBI GI NO: 15223925 NR Description: copper chaperone
  misc_feature (1)..(97): NCBI GI NO: 21397273 NR Description: Putative atfp6-like protein
  misc_feature (1)..(97): NCBI GI NO: 15233937 NR Description: copper chaperone
MRGVESVEINRKQQKVTVKGFVEAQRVLRRTQSTGKRVELWPYVPYTNLYVAPPVYDKRAPPGHVRRVDALIAPAAGQEEHLATLFSDDNPNACSLM

SEQ ID NO: 25864 - DNA, 1198 bp, Zea mays subsp. mays
  misc_feature (1)..(1198): Ceres Seq. ID no. 12349951
actctaggctaaacttcactgacgctacggaaggggtctcgaagagctgccaagacccacctgccacctccgatggacttcgccggccgggtatccttcctgctcttcttcctggtcgctggcactgtagcaaacgaccagatcttcaccacttcaggtttgccatttgggcgaagttcgcgtgagccaaggtaccgcgtcgagttccatcctgttgattcgccattccatccagataatggtcaggaatcggtaccaatggctagtcatgaggggaagcgttataagtgctttctaccagttgaagaaactaaaaccatgaagtcaatgctcccacaaaatgcgactaatattataatagaaagtgaaaggcgaattaagccaaaggagccggatgagttacttgaggttctcaaggatcagtgtttctacaggcacgaaggttggtggtcgtatgaattctgttattatgggaaaatcagacaggtccatgtagaggacagtaaggttatccaagaatttgttctaggcgaattcgatgatgacgcaactgctgcataccatgaaaatagcacctctgagttaactgacgatgaccatcacgtgaaagatatatctaagaggtatcatgttcacttgtatacaaatgggactgtatgtgatctcacagatattccccgggagacagaggttagatttgtctgctcggagcctactgtgctgattagttcagtcaaggagatctcttcctgcaaatatgttgtaacaattcaaagcccgatgctttgcaaaaacccgttgttccagcaagaaaaacgaacccttcccatccattgcaatgaattacctgctaaagcagaatccggtgctgaggatggtttgcttccaaaagaagcgcagatttccatcatccccgatcaggatgagctgcatggttttccagcttatgctacttgatataatgatatgccttcaatatttatttctggtgtagaaaaagcacagttttggaggcccagtggcaactgagcaacgcgatgtattactctctccgttcttttttatttgccgtggtttagtttaaaaattacgacaaatattggagaacggacccatagatcctacagcagcggctccttgtaaagcaggttgagacgatcattctgcagtgctaattatttaggaggattacgaaggt

SEQ ID NO: 25865 - protein, 294 aa, Zea mays subsp. mays
  peptide (1)..(294): Ceres Seq. ID no. 12349952
  misc_feature (19)..(276): NCBI GI NO: 18421420 NR Description: putative protein; protein id: At5g35080
  misc_feature (19)..(276): NCBI GI NO: 21592392 NR Description: unknown [Arabidopsis thaliana]
  misc_feature (63)..(146): NCBI GI NO: 7487985 NR Description: hypothetical protein F7N22
  misc_feature (177)..(242): NCBI GI NO: 7487985 NR Description: hypothetical protein F7N22
  misc_feature (47)..(258): NCBI GI NO: 28850402 NR Description: similar to Arabidopsis thaliana (Mouse-ear cress)
  misc_feature (38)..(252): NCBI GI NO: 12653521 NR Description: Similar to amplified in osteosarcoma
  misc_feature (38)..(252): NCBI GI NO: 5803109 NR Description: amplified in osteosarcoma [Homo sapiens]
  misc_feature (38)..(252): NCBI GI NO: 29243990 NR Description: hypothetical protein 1300007E20 [Mus musculus]
  misc_feature (38)..(252): NCBI GI NO: 34865743 NR Description: similar to Protein OS-9 precursor
  misc_feature (109)..(252): NCBI GI NO: 13905114 NR Description: Unknown (protein for IMAGE:3598453) [Mus musculus]
MDFAGRVSFLLFFLVAGTVANDQIFTTSGLPFGRSSREPRYRVEFHPVDSPFHPDNGQESVPMASHEGKRYKCFLPVEETKTMKSMLPQNATNIIIESERRIKPKEPDELLEVLKDQCFYRHEGWWSYEFCYYGKIRQVHVEDSKVIQEFVLGEFDDDATAAYHENSTSELTDDDHHVKDISKRYHVHLYTNGTVCDLTDIPRETEVRFVCSEPTVLISSVKEISSCKYVVTIQSPMLCKNPLFQQEKRTLPIHCNELPAKAESGAEDGLLPKEAQISIIPDQDELHGFPAYAT

SEQ ID NO: 25866 - protein, 232 aa, Zea mays subsp. mays
  peptide (1)..(232): Ceres Seq. ID no. 12349953
  misc_feature (1)..(214): NCBI GI NO: 18421420 NR Description: putative protein; protein id: At5g35080
  misc_feature (1)..(214): NCBI GI NO: 21592392 NR Description: unknown [Arabidopsis thaliana]
  misc_feature (1)..(84): NCBI GI NO: 7487985 NR Description: hypothetical protein F7N22
  misc_feature (115)..(180): NCBI GI NO: 7487985 NR Description: hypothetical protein F7N22
  misc_feature (1)..(196): NCBI GI NO: 28850402 NR Description: similar to Arabidopsis thaliana (Mouse-ear cress)
  misc_feature (1)..(190): NCBI GI NO: 12653521 NR Description: Similar to amplified in osteosarcoma
  misc_feature (1)..(190): NCBI GI NO: 5803109 NR Description: amplified in osteosarcoma [Homo sapiens]
  misc_feature (1)..(190): NCBI GI NO: 29243990 NR Description: hypothetical protein 1300007E20 [Mus musculus]
  misc_feature (1)..(190): NCBI GI NO: 34865743 NR Description: similar to Protein OS-9 precursor
  misc_feature (47)..(190): NCBI GI NO: 13905114 NR Description: Unknown (protein for IMAGE:3598453) [Mus musculus]
MASHEGKRYKCFLPVEETKTMKSMLPQNATNIIIESERRIKPKEPDELLEVLKDQCFYRHEGWWSYEFCYYGKIRQVHVEDSKVIQEFVLGEFDDDATAAYHENSTSELTDDDHHVKDISKRYHVHLYTNGTVCDLTDIPRETEVRFVCSEPTVLISSVKEISSCKYVVTIQSPMLCKNPLFQQEKRTLPIHCNELPAKAESGAEDGLLPKEAQISIIPDQDELHGFPAYAT

SEQ ID NO: 25867 - protein, 212 aa, Zea mays subsp. mays
  peptide (1)..(212): Ceres Seq. ID no. 12349954
  misc_feature (1)..(194): NCBI GI NO: 18421420 NR Description: putative protein; protein id: At5g35080
  misc_feature (1)..(194): NCBI GI NO: 21592392 NR Description: unknown [Arabidopsis thaliana]
  misc_feature (1)..(64): NCBI GI NO: 7487985 NR Description: hypothetical protein F7N22
  misc_feature (95)..(160): NCBI GI NO: 7487985 NR Description: hypothetical protein F7N22
  misc_feature (1)..(176): NCBI GI NO: 28850402 NR Description: similar to Arabidopsis thaliana (Mouse-ear cress)
  misc_feature (1)..(170): NCBI GI NO: 12653521 NR Description: Similar to amplified in osteosarcoma
  misc_feature (1)..(170): NCBI GI NO: 5803109 NR Description: amplified in osteosarcoma [Homo sapiens]
  misc_feature (1)..(170): NCBI GI NO: 29243990 NR Description: hypothetical protein 1300007E20 [Mus musculus]
  misc_feature (1)..(170): NCBI GI NO: 34865743 NR Description: similar to Protein OS-9 precursor
  misc_feature (27)..(170): NCBI GI NO: 13905114 NR Description: Unknown (protein for IMAGE:3598453) [Mus musculus]
MKSMLPQNATNIIIESERRIKPKEPDELLEVLKDQCFYRHEGWWSYEFCYYGKIRQVHVEDSKVIQEFVLGEFDDDATAAYHENSTSELTDDDHHVKDISKRYHVHLYTNGTVCDLTDIPRETEVRFVCSEPTVLISSVKEISSCKYVVTIQSPMLCKNPLFQQEKRTLPIHCNELPAKAESGAEDGLLPKEAQISIIPDQDELHGFPAYAT

SEQ ID NO: 25868 - DNA, 1041 bp, Zea mays subsp. mays
  misc_feature (1)..(1041): Ceres Seq. ID no. 12340753
agtggctgcacctcggtcccagctgtcagcgaacggcaacgaggcaaacacatgacgcctctcttctcttccgtgtagatctcgcttagaattcgtgtaccagaaaccccggccctaaccgcgcccgcaccctcgcccttggctcgccggagattaacgctacagccgtaatcacgtaaattccttttcatggagggtgtgggcgcgcggctagggcgcacttcggcgcgctacgggccggcgacgacgttcacgggccatgtcaggaagtggcgcaaggagtgggtaccagtggtcgccgccgccgccgccgccgccgccaacgccaacaccagcgccaacggtggcacgacgtcctccacggggatgggatctggcggaggatcccgcgggaataatcttctcctgtttaagtggaccccggtgaacggggctaacgggggaggaggggatggggagcagcagcagcaggctgagacggccacgagacgccggcggtatgtgccggtttctttaatggaagagcaaaggcaagaatctaccaaatctgatgatgagaacaaggctaatgatggagatccatcttcgaatgaaactgagccatcaaatggaaagactgatatcaatgatacacctatggatgaatctcaggcaacagatgaggatggtcgagattctggtaaaaacggcggtggaacagacctaaatttgaatttaggtttgaaagacccggatggtgataatgaagttgagacatcagagaaacatgtagcggcaaacaatccgcagacagagaatagatccaagaggaaatccgtaacccctgaccttgagatgacaatgtaacccagaaatttcatttgtcttaattttactatttgccatgagcccatgaggtgtgtaacttgggtacgttctcatcgtagaaacatttaagtaaaatcgattacaggacatacaatagtgtgaactgaagaaacctttttttactcgaacatggagaattgtctaaagtcattgtcaaatataatttaattttcc

SEQ ID NO: 25869 - protein, 218 aa, Zea mays subsp. mays
  peptide (1)..(218): Ceres Seq. ID no. 12340754
  misc_feature (1)..(153): NCBI GI NO: 7486827 NR Description: hypothetical protein T10I14
  misc_feature (1)..(153): NCBI GI NO: 30685783 NR Description: expressed protein [Arabidopsis thaliana]
  misc_feature (1)..(186): NCBI GI NO: 15240476 NR Description: putative protein; protein id: At5g55210.1
MEGVGARLGRTSARYGPATTFTGHVRKWRKEWVPVVAAAAAAAANANTSANGGTTSSTGMGSGGGSRGNNLLLFKWTPVNGANGGGGDGEQQQQAETATRRRRYVPVSLMEEQRQESTKSDDENKANDGDPSSNETEPSNGKTDINDTPMDESQATDEDGRDSGKNGGGTDLNLNLGLKDPDGDNEVETSEKHVAANNPQTENRSKRKSVTPDLEMTM

SEQ ID NO: 25870 - protein, 159 aa, Zea mays subsp. mays
  peptide (1)..(159): Ceres Seq. ID no. 12340755
  misc_feature (1)..(94): NCBI GI NO: 7486827 NR Description: hypothetical protein T10I14
  misc_feature (1)..(94): NCBI GI NO: 30685783 NR Description: expressed protein [Arabidopsis thaliana]
  misc_feature (1)..(127): NCBI GI NO: 15240476 NR Description: putative protein; protein id: At5g55210.1
MGSGGGSRGNNLLLFKWTPVNGANGGGGDGEQQQQAETATRRRRYVPVSLMEEQRQESTKSDDENKANDGDPSSNETEPSNGKTDINDTPMDESQATDEDGRDSGKNGGGTDLNLNLGLKDPDGDNEVETSEKHVAANNPQTENRSKRKSVTPDLEMTM

SEQ ID NO: 25871 - protein, 109 aa, Zea mays subsp. mays
  peptide (1)..(109): Ceres Seq. ID no. 12340756
  misc_feature (1)..(44): NCBI GI NO: 7486827 NR Description: hypothetical protein T10I14
  misc_feature (1)..(44): NCBI GI NO: 30685783 NR Description: expressed protein [Arabidopsis thaliana]
  misc_feature (1)..(77): NCBI GI NO: 15240476 NR Description: putative protein; protein id: At5g55210.1
MEEQRQESTKSDDENKANDGDPSSNETEPSNGKTDINDTPMDESQATDEDGRDSGKNGGGTDLNLNLGLKDPDGDNEVETSEKHVAANNPQTENRSKRKSVTPDLEMTM

SEQ ID NO: 25872 - DNA, 781 bp, Zea mays subsp. mays
  misc_feature (1)..(781): Ceres Seq. ID no. 12356172
gcacagcacagaccggaagcacagcgcccagtcgcccacccacccgctgcgtcccgctcaccaagtcaccagccttgctgcgcgcgtcctcccacccgccgcccgtagccatgtcggtgacgctgcacacgaacctgggcgacatcaagtgcgaggtgttctgcgaccaggtgccccgcacggcggagaacttactggccctctgcgccagcggctactacgacggcaccgtgttccaccgaaacatcaagggcttcatgatccagggcggcgaccccaccggctccggcaagggcggctcctccatctggggcaccaagttcgcggacgagttcagggagtccctcaagcacaacgcacgggggatcatgtcgatggccaacaacgggcccaacaccaacggcagccagttcttcatcacctacgccaagcagccgcacctcaacggccactacaccgtcttcgccaaggtcatccacggcttcgaggtcctcgacctcatggagaaggcgcagaccggccccggggacaggccgctcgccgagatcaggctcaaccgcgtcaccatccacgccaacccgctagccctctgaactactactgccttccacctgctcctgcagtcctgtcccgtggccttattataattactattattactcatggaaatcaggatgaggagagtaatttcgcgaggacacttttgattgattttgaaacatggatctgtagctctctaaacacttgtagttgtagaactctaaaaaaactttagattccc

SEQ ID NO: 25873 - protein, 257 aa, Zea mays subsp. mays
  peptide (1)..(257): Ceres Seq. ID no. 12356173
HSTDRKHSAQSPTHPLRPAHQVTSLAARVLPPAARSHVGDAAHEPGRHQVRGVLRPGAPHGGELTGPLRQRLLRRHRVPPKHQGLHDPGRRPHRLRQGRLLHLGHQVRGRVQGVPQAQRTGDHVDGQQRAQHQRQPVLHHLRQAAAPQRPLHRLRQGHPRLRGPRPHGEGADRPRGQAARRDQAQPRHHPRQPASPLNYYCLPPAPAVLSRGLIIITIITHGNQDEESNFARTLLIDFETWICSSLNTCSCRTLKKL

SEQ ID NO: 25874 - protein, 196 aa, Zea mays subsp. mays
  peptide (1)..(196): Ceres Seq. ID no. 12356174
  misc_feature (37)..(195): NCBI GI NO: 6006361 NR Description: ESTs AU030008
  misc_feature (37)..(195): NCBI GI NO: 30678211 NR Description: expressed protein [Arabidopsis thaliana]
  misc_feature (37)..(195): NCBI GI NO: 14043400 NR Description: Unknown (protein for MGC:10732) [Homo sapiens]
  misc_feature (37)..(195): NCBI GI NO: 19557636 NR Description: peptidylprolyl isomerase-like protein 3 isoformPPIL3b
  misc_feature (37)..(195): NCBI GI NO: 21746159 NR Description: peptidylprolyl isomerase-like 3
  misc_feature (37)..(195): NCBI GI NO: 28190012 NR Description: CYP10L [Mus musculus]
  misc_feature (37)..(195): NCBI GI NO: 29028318 NR Description: cyclophilin [Homo sapiens]
  misc_feature (37)..(181): NCBI GI NO: 39590255 NR Description: Hypothetical protein CBG11184
  misc_feature (4)..(195): NCBI GI NO: 19922376 NR Description: CG7747-PA [Drosophila melanogaster]
  misc_feature (39)..(193): NCBI GI NO: 1199600 NR Description: cyclophilin-like protein
TAQTGSTAPSRPPTRCVPLTKSPALLRASSHPPPVAMSVTLHTNLGDIKCEVFCDQVPRTAENLLALCASGYYDGTVFHRNIKGFMIQGGDPTGSGKGGSSIWGTKFADEFRESLKHNARGIMSMANNGPNTNGSQFFITYAKQPHLNGHYTVFAKVIHGFEVLDLMEKAQTGPGDRPLAEIRLNRVTIHANPLAL

SEQ ID NO: 25875 - protein, 160 aa, Zea mays subsp. mays
  peptide (1)..(160): Ceres Seq. ID no. 12356175
  misc_feature (1)..(159): NCBI GI NO: 6006361 NR Description: ESTs AU030008
  misc_feature (1)..(159): NCBI GI NO: 30678211 NR Description: expressed protein [Arabidopsis thaliana]
  misc_feature (1)..(159): NCBI GI NO: 14043400 NR Description: Unknown (protein for MGC:10732) [Homo sapiens]
  misc_feature (1)..(159): NCBI GI NO: 19557636 NR Description: peptidylprolyl isomerase-like protein 3 isoformPPIL3b
  misc_feature (1)..(159): NCBI GI NO: 21746159 NR Description: peptidylprolyl isomerase-like 3
  misc_feature (1)..(159): NCBI GI NO: 28190012 NR Description: CYP10L [Mus musculus]
  misc_feature (1)..(159): NCBI GI NO: 29028318 NR Description: cyclophilin [Homo sapiens]
  misc_feature (1)..(145): NCBI GI NO: 39590255 NR Description: Hypothetical protein CBG11184
  misc_feature (1)..(159): NCBI GI NO: 19922376 NR Description: CG7747-PA [Drosophila melanogaster]
  misc_feature (3)..(157): NCBI GI NO: 1199600 NR Description: cyclophilin-like protein
MSVTLHTNLGDIKCEVFCDQVPRTAENLLALCASGYYDGTVFHRNIKGFMIQGGDPTGSGKGGSSIWGTKFADEFRESLKHNARGIMSMANNGPNTNGSQFFITYAKQPHLNGHYTVFAKVIHGFEVLDLMEKAQTGPGDRPLAEIRLNRVTIHANPLAL

SEQ ID NO: 25876 - DNA, 1133 bp, Zea mays subsp. mays
  misc_feature (1)..(1133): Ceres Seq. ID no. 12404468
aagtaggcaactaagacaaagtggcgaactcttctctgtactagctttcttcttcttcctcctcttcctcctcccaaacagactggatttcatcaagataatcctgaaactggagccaacaagcagacagagaaagaagagcaagaagaccggctcccagccgatacaaggtaggagtgagcagcgttagatcagttttcatctcaggatcgatatggtgacagtgagagaggagactcgcaaggggccatggacagagcaggaggacctgcaactggtatgcactgtccgtctgttcggtgaacgtcgttgggatttcattgccaaagtatcagggctcaaccggacaggcaagagctgccggctgcgctgggtcaactacctccaccctggcctcaagcgtgggcgcatgtctccccatgaagagcgactcatcctagagctgcacgctcggtggggaaacaggtggtccaggatagcacgccgcttgccagggcgcactgacaatgagatcaagaactactggaggacacacatgagaaagaaggcacaggagaggaagaggaacatgtctccatcgtcgtcctcgtcttcgctgacttaccagtcaggctacccagatactccatcaaccattggagttgagggacaggagcttcatggtggcagtggctgcatcacaagcatcctgaagggcacccctccggacatggatggctatcccatggaccagatatggatggaaattgaggcgccacagatgccctcggaggagagctttgttggggggaaccataatgtgtgcagcagccttgccaccccgctgccaccaccaactgtctgggaatactacccagaggcctgctggaaggttgacgatgagatcaagatggcaccacaatttcaatttggttatagtgaaggagttgggcccctgcttctgatgccataaatattgggtcagattactaagttatacacctacctagcagaagtgaagtgcttttgtagaaacaagctttagcatggatctgaatatttatctccgcgcttagaattgcaggtctatggatctatgcatggttgctatgtatctatctagtgtgcaagacaagatcatcttaatttgtcct

SEQ ID NO: 25877 - protein, 245 aa, Zea mays subsp. mays
  peptide (1)..(245): Ceres Seq. ID no. 12404469
  misc_feature (63)..(108): Pfam Name: Pfam Description:  Myb-like DNA-binding domain
  misc_feature (1)..(241): NCBI GI NO: 11358547 NR Description: myb-related transcription factor MYB59
  misc_feature (1)..(241): NCBI GI NO: 15238519 NR Description: myb family transcription factor
  misc_feature (6)..(230): NCBI GI NO: 15231343 NR Description: Myb family transcription factor
  misc_feature (41)..(241): NCBI GI NO: 30697277 NR Description: myb family transcription factor
  misc_feature (9)..(120): NCBI GI NO: 34906070 NR Description: putative Myb factor protein
  misc_feature (9)..(120): NCBI GI NO: 11967859 NR Description: Myb factor protein
  misc_feature (4)..(118): NCBI GI NO: 15236297 NR Description: myb family transcription factor
  misc_feature (5)..(113): NCBI GI NO: 18409792 NR Description: myb family transcription factor
  misc_feature (4)..(113): NCBI GI NO: 15230095 NR Description: myb family transcription factor
  misc_feature (4)..(113): NCBI GI NO: 1732513 NR Description: snapdragon myb protein 305 homolog
MVTVREETRKGPWTEQEDLQLVCTVRLFGERRWDFIAKVSGLNRTGKSCRLRWVNYLHPGLKRGRMSPHEERLILELHARWGNRWSRIARRLPGRTDNEIKNYWRTHMRKKAQERKRNMSPSSSSSSLTYQSGYPDTPSTIGVEGQELHGGSGCITSILKGTPPDMDGYPMDQIWMEIEAPQMPSEESFVGGNHNVCSSLATPLPPPTVWEYYPEACWKVDDEIKMAPQFQFGYSEGVGPLLLMP

SEQ ID NO: 25878 - protein, 180 aa, Zea mays subsp. mays
  peptide (1)..(180): Ceres Seq. ID no. 12404470
  misc_feature (1)..(43): Pfam Name: Pfam Description:  Myb-like DNA-binding domain
  misc_feature (1)..(176): NCBI GI NO: 11358547 NR Description: myb-related transcription factor MYB59
  misc_feature (1)..(176): NCBI GI NO: 15238519 NR Description: myb family transcription factor
  misc_feature (1)..(165): NCBI GI NO: 15231343 NR Description: Myb family transcription factor
  misc_feature (1)..(176): NCBI GI NO: 30697277 NR Description: myb family transcription factor
  misc_feature (1)..(55): NCBI GI NO: 34906070 NR Description: putative Myb factor protein
  misc_feature (1)..(55): NCBI GI NO: 11967859 NR Description: Myb factor protein
  misc_feature (1)..(53): NCBI GI NO: 15236297 NR Description: myb family transcription factor
  misc_feature (1)..(48): NCBI GI NO: 18409792 NR Description: myb family transcription factor
  misc_feature (1)..(48): NCBI GI NO: 15230095 NR Description: myb family transcription factor
  misc_feature (1)..(48): NCBI GI NO: 1732513 NR Description: snapdragon myb protein 305 homolog
MSPHEERLILELHARWGNRWSRIARRLPGRTDNEIKNYWRTHMRKKAQERKRNMSPSSSSSSLTYQSGYPDTPSTIGVEGQELHGGSGCITSILKGTPPDMDGYPMDQIWMEIEAPQMPSEESFVGGNHNVCSSLATPLPPPTVWEYYPEACWKVDDEIKMAPQFQFGYSEGVGPLLLMP

SEQ ID NO: 25879 - protein, 138 aa, Zea mays subsp. mays
  peptide (1)..(138): Ceres Seq. ID no. 12404471
  misc_feature (1)..(134): NCBI GI NO: 11358547 NR Description: myb-related transcription factor MYB59
  misc_feature (1)..(134): NCBI GI NO: 15238519 NR Description: myb family transcription factor
  misc_feature (1)..(123): NCBI GI NO: 15231343 NR Description: Myb family transcription factor
  misc_feature (1)..(134): NCBI GI NO: 30697277 NR Description: myb family transcription factor
  misc_feature (1)..(13): NCBI GI NO: 34906070 NR Description: putative Myb factor protein
  misc_feature (1)..(13): NCBI GI NO: 11967859 NR Description: Myb factor protein
  misc_feature (1)..(11): NCBI GI NO: 15236297 NR Description: myb family transcription factor
  misc_feature (1)..(23): NCBI GI NO: 7438339 NR Description: myb-related protein - upland cotton
  misc_feature (1)..(23): NCBI GI NO: 14249017 NR Description: myb-like transcription factor Myb 5
  misc_feature (1)..(23): NCBI GI NO: 23476305 NR Description: myb-like transcription factor 5
MRKKAQERKRNMSPSSSSSSLTYQSGYPDTPSTIGVEGQELHGGSGCITSILKGTPPDMDGYPMDQIWMEIEAPQMPSEESFVGGNHNVCSSLATPLPPPTVWEYYPEACWKVDDEIKMAPQFQFGYSEGVGPLLLMP

SEQ ID NO: 25880 - DNA, 958 bp, Zea mays subsp. mays
  misc_feature (1)..(958): Ceres Seq. ID no. 13571162
aaaatttcccccccaatttccctccaccgaagcatcacccaatcagatccgatttcgtagagatgaagccggcagtagaggcggaggctgacgagcgagcggcggaggagatggcacctaagaaggcagcggctgccaagaaagcggccgaggaagttgaggtggaggaggtggtggacggggacgaggcggtcgatggggagggcgacggtgacgaggacgacgatggggaaggcggtgacgaggaggatgatgatgaggaggtggatggggaggagaaggaggcggcaggggttgtggagatctccgacgaagacgacgacgacggtgacggggaggcggacgacgacgacgacgatgacggggatgacgacgacgacgacgacgaggactcagacgacgaggaagaggtcgacggtgaagacgatcaggaggaggagctgggaaccgagtatctggttcagcctcttgggcgggctgaagacgaagagcactcgagcgactttgaaccggaagaaaacggtgagggtgccgacgatgaggagatcgatgaagaggacgatgacggtgaggactctgtgaaggcgcagacctctacgaagaggaagaggtcaggcgacgaagaagaagaagacgacgacgatggggatgatgatggtgacgatgatgacgatgggaggccaccatcaaagcgatagtatggttagctctagttttgtagctgtgtccttgggtgtttggtaggtaggtagtgctgctgatgttggtttagaagaactcatcatcacctgggatatgtgtgtgatttggcttggccgatggatgaatgatgaaggtcttgtacttgttgctgcttctttcatgttgatgaactcgcactgattcactgtacatgctagcttctaattgtctgtctagacagctttatgggtttaactagaatcggatttttttccct

SEQ ID NO: 25881 - protein, 231 aa, Zea mays subsp. mays
  peptide (1)..(231): Ceres Seq. ID no. 13571163
  misc_feature (45)..(211): Pfam Name: Pfam Description:  Chromadorea ALT protein
  misc_feature (21)..(224): NCBI GI NO: 34894890 NR Description: B1140D12.10
  misc_feature (25)..(230): NCBI GI NO: 18401985 NR Description: expressed protein [Arabidopsis thaliana]
  misc_feature (59)..(224): NCBI GI NO: 35210494 NR Description: aspartic acid-rich protein aspolin2
  misc_feature (59)..(224): NCBI GI NO: 35210492 NR Description: aspartic acid-rich protein aspolin1
  misc_feature (59)..(224): NCBI GI NO: 35210494 NR Description: aspartic acid-rich protein aspolin2
  misc_feature (50)..(224): NCBI GI NO: 33284873 NR Description: SI:bZ1G18
  misc_feature (52)..(224): NCBI GI NO: 35210492 NR Description: aspartic acid-rich protein aspolin1
  misc_feature (52)..(224): NCBI GI NO: 35210494 NR Description: aspartic acid-rich protein aspolin2
  misc_feature (59)..(224): NCBI GI NO: 35210494 NR Description: aspartic acid-rich protein aspolin2
  misc_feature (59)..(224): NCBI GI NO: 35210492 NR Description: aspartic acid-rich protein aspolin1
NFPPNFPPPKHHPIRSDFVEMKPAVEAEADERAAEEMAPKKAAAAKKAAEEVEVEEVVDGDEAVDGEGDGDEDDDGEGGDEEDDDEEVDGEEKEAAGVVEISDEDDDDGDGEADDDDDDDGDDDDDDDEDSDDEEEVDGEDDQEEELGTEYLVQPLGRAEDEEHSSDFEPEENGEGADDEEIDEEDDDGEDSVKAQTSTKRKRSGDEEEEDDDDGDDDGDDDDDGRPPSKR

SEQ ID NO: 25882 - protein, 211 aa, Zea mays subsp. mays
  peptide (1)..(211): Ceres Seq. ID no. 13571164
  misc_feature (25)..(191): Pfam Name: Pfam Description:  Chromadorea ALT protein
  misc_feature (1)..(204): NCBI GI NO: 34894890 NR Description: B1140D12.10
  misc_feature (5)..(210): NCBI GI NO: 18401985 NR Description: expressed protein [Arabidopsis thaliana]
  misc_feature (39)..(204): NCBI GI NO: 35210494 NR Description: aspartic acid-rich protein aspolin2
  misc_feature (39)..(204): NCBI GI NO: 35210492 NR Description: aspartic acid-rich protein aspolin1
  misc_feature (39)..(204): NCBI GI NO: 35210494 NR Description: aspartic acid-rich protein aspolin2
  misc_feature (30)..(204): NCBI GI NO: 33284873 NR Description: SI:bZ1G18
  misc_feature (32)..(204): NCBI GI NO: 35210492 NR Description: aspartic acid-rich protein aspolin1
  misc_feature (32)..(204): NCBI GI NO: 35210494 NR Description: aspartic acid-rich protein aspolin2
  misc_feature (39)..(204): NCBI GI NO: 35210494 NR Description: aspartic acid-rich protein aspolin2
  misc_feature (39)..(204): NCBI GI NO: 35210492 NR Description: aspartic acid-rich protein aspolin1
MKPAVEAEADERAAEEMAPKKAAAAKKAAEEVEVEEVVDGDEAVDGEGDGDEDDDGEGGDEEDDDEEVDGEEKEAAGVVEISDEDDDDGDGEADDDDDDDGDDDDDDDEDSDDEEEVDGEDDQEEELGTEYLVQPLGRAEDEEHSSDFEPEENGEGADDEEIDEEDDDGEDSVKAQTSTKRKRSGDEEEEDDDDGDDDGDDDDDGRPPSKR

SEQ ID NO: 25883 - protein, 195 aa, Zea mays subsp. mays
  peptide (1)..(195): Ceres Seq. ID no. 13571165
  misc_feature (9)..(175): Pfam Name: Pfam Description:  Chromadorea ALT protein
  misc_feature (1)..(188): NCBI GI NO: 34894890 NR Description: B1140D12.10
  misc_feature (1)..(194): NCBI GI NO: 18401985 NR Description: expressed protein [Arabidopsis thaliana]
  misc_feature (23)..(188): NCBI GI NO: 35210494 NR Description: aspartic acid-rich protein aspolin2
  misc_feature (23)..(188): NCBI GI NO: 35210492 NR Description: aspartic acid-rich protein aspolin1
  misc_feature (23)..(188): NCBI GI NO: 35210494 NR Description: aspartic acid-rich protein aspolin2
  misc_feature (14)..(188): NCBI GI NO: 33284873 NR Description: SI:bZ1G18
  misc_feature (16)..(188): NCBI GI NO: 35210492 NR Description: aspartic acid-rich protein aspolin1
  misc_feature (16)..(188): NCBI GI NO: 35210494 NR Description: aspartic acid-rich protein aspolin2
  misc_feature (23)..(188): NCBI GI NO: 35210494 NR Description: aspartic acid-rich protein aspolin2
  misc_feature (23)..(188): NCBI GI NO: 35210492 NR Description: aspartic acid-rich protein aspolin1
MAPKKAAAAKKAAEEVEVEEVVDGDEAVDGEGDGDEDDDGEGGDEEDDDEEVDGEEKEAAGVVEISDEDDDDGDGEADDDDDDDGDDDDDDDEDSDDEEEVDGEDDQEEELGTEYLVQPLGRAEDEEHSSDFEPEENGEGADDEEIDEEDDDGEDSVKAQTSTKRKRSGDEEEEDDDDGDDDGDDDDDGRPPSKR

SEQ ID NO: 25884 - DNA, 1252 bp, Zea mays subsp. mays
  misc_feature (1)..(1252): Ceres Seq. ID no. 12365355
aaggctctggctcgcgcacccctgtccctgttcgatccgcaccgcacacctagacgcacctccaactgcagcgcgccatacttgaccgcatcagcatggcatccacgggaacgacggcggcggcggcggcggtggcggtgccggaggtgaccctgcggtcgggcaacgggaagccgatgccgatggtgggcatgggcacggcgtcgttccccgtggtgcacgaggccgtcagggacgccgtgctggcggccatcgaggtggggttccgccacttcgacacggccttcctgtacggcaccgagaagccgctcggcgacgccgtggccgaggcgctgcggcgcggcctcctgcggtcccgggaggagctcttcgtcacgtccaagctgtggtgctcgcagacccacgcggacctcgtgctgccgtccctgcgggaaactctcgagaacctgcagatggagtacgtggacctgtacctgatccactggccggtgtccctcaggccggccggcgggccgcccaagttcccgaacaggaaggaggacgcggtgccgctggacgtggcgggcgtgtggcgcgccatggaggagtgccagcggctgggcctcgccagggcgatcggcgtcagcaacttcaccaccaggcacctggacaaggtcctggccatcgccgcggtcccgcccgcggtgaaccaggtggagctgaacccggcgtggcagcagcggacgctgcgggcgtactgcgtcgaccggggcgtccacgtcgccgcctactcgccgctgggagggcagaactgggacgggcggggcagcgccgtgctcgactcggaggtgctcgcggagatagccagggcgagggggaagaccgtggcacaggtggcgctgcgatggatacatgagcagggagtgacgtgcatcgtcaagagctacaacagggagaggctgaagcagaacctcgagatattcgactgggagctgaccgacgacgaccggctcaagatcaaccacatcccgcagaggaaggttgtcgaggccagcggcttgttctcgcaggagggtgagttcacctctgttgatcccgcggaactgaatactgtggaggaatgggaactggactggaaaatggcccccgcctgtcggtgttgctccgtataggaaccgaataacaacgatcgccctcggtgtttcgagctatagttacagtatggttccgtaaactttgtatgaattttctgatctaaataaagtgggttttt

SEQ ID NO: 25885 - protein, 351 aa, Zea mays subsp. mays
  peptide (1)..(351): Ceres Seq. ID no. 12365356
  misc_feature (14)..(335): NCBI GI NO: 38344824 NR Description: OSJNBa0064H22.5
  misc_feature (12)..(335): NCBI GI NO: 38344823 NR Description: OSJNBa0064H22.4
  misc_feature (1)..(334): NCBI GI NO: 38344822 NR Description: OSJNBa0064H22.3
  misc_feature (15)..(326): NCBI GI NO: 40781599 NR Description: reductase 1 [Hydrangea macrophylla]
  misc_feature (1)..(322): NCBI GI NO: 37530540 NR Description: putative NADPH-dependent oxidoreductase
  misc_feature (12)..(326): NCBI GI NO: 40781598 NR Description: reductase 2 [Hydrangea macrophylla]
  misc_feature (15)..(326): NCBI GI NO: 6478216 NR Description: putative NADPH-dependent oxidoreductase
  misc_feature (15)..(326): NCBI GI NO: 37530522 NR Description: putative NADPH-dependent oxidoreductase
  misc_feature (23)..(326): NCBI GI NO: 27357979 NR Description: Putative NADPH-dependent oxidoreductase
  misc_feature (11)..(326): NCBI GI NO: 37530524 NR Description: putative NADPH-dependent oxidoreductase
MASTGTTAAAAAVAVPEVTLRSGNGKPMPMVGMGTASFPVVHEAVRDAVLAAIEVGFRHFDTAFLYGTEKPLGDAVAEALRRGLLRSREELFVTSKLWCSQTHADLVLPSLRETLENLQMEYVDLYLIHWPVSLRPAGGPPKFPNRKEDAVPLDVAGVWRAMEECQRLGLARAIGVSNFTTRHLDKVLAIAAVPPAVNQVELNPAWQQRTLRAYCVDRGVHVAAYSPLGGQNWDGRGSAVLDSEVLAEIARARGKTVAQVALRWIHEQGVTCIVKSYNRERLKQNLEIFDWELTDDDRLKINHIPQRKVVEASGLFSQEGEFTSVDPAELNTVEEWELDWKMAPACRCCSV

SEQ ID NO: 25886 - protein, 324 aa, Zea mays subsp. mays
  peptide (1)..(324): Ceres Seq. ID no. 12365357
  misc_feature (1)..(308): NCBI GI NO: 38344824 NR Description: OSJNBa0064H22.5
  misc_feature (1)..(308): NCBI GI NO: 38344823 NR Description: OSJNBa0064H22.4
  misc_feature (1)..(307): NCBI GI NO: 38344822 NR Description: OSJNBa0064H22.3
  misc_feature (1)..(299): NCBI GI NO: 40781599 NR Description: reductase 1 [Hydrangea macrophylla]
  misc_feature (1)..(295): NCBI GI NO: 37530540 NR Description: putative NADPH-dependent oxidoreductase
  misc_feature (1)..(299): NCBI GI NO: 40781598 NR Description: reductase 2 [Hydrangea macrophylla]
  misc_feature (1)..(299): NCBI GI NO: 6478216 NR Description: putative NADPH-dependent oxidoreductase
  misc_feature (1)..(299): NCBI GI NO: 37530522 NR Description: putative NADPH-dependent oxidoreductase
  misc_feature (1)..(299): NCBI GI NO: 27357979 NR Description: Putative NADPH-dependent oxidoreductase
  misc_feature (1)..(299): NCBI GI NO: 37530524 NR Description: putative NADPH-dependent oxidoreductase
MPMVGMGTASFPVVHEAVRDAVLAAIEVGFRHFDTAFLYGTEKPLGDAVAEALRRGLLRSREELFVTSKLWCSQTHADLVLPSLRETLENLQMEYVDLYLIHWPVSLRPAGGPPKFPNRKEDAVPLDVAGVWRAMEECQRLGLARAIGVSNFTTRHLDKVLAIAAVPPAVNQVELNPAWQQRTLRAYCVDRGVHVAAYSPLGGQNWDGRGSAVLDSEVLAEIARARGKTVAQVALRWIHEQGVTCIVKSYNRERLKQNLEIFDWELTDDDRLKINHIPQRKVVEASGLFSQEGEFTSVDPAELNTVEEWELDWKMAPACRCCSV

SEQ ID NO: 25887 - protein, 322 aa, Zea mays subsp. mays
  peptide (1)..(322): Ceres Seq. ID no. 12365358
  misc_feature (1)..(306): NCBI GI NO: 38344824 NR Description: OSJNBa0064H22.5
  misc_feature (1)..(306): NCBI GI NO: 38344823 NR Description: OSJNBa0064H22.4
  misc_feature (1)..(305): NCBI GI NO: 38344822 NR Description: OSJNBa0064H22.3
  misc_feature (1)..(297): NCBI GI NO: 40781599 NR Description: reductase 1 [Hydrangea macrophylla]
  misc_feature (1)..(293): NCBI GI NO: 37530540 NR Description: putative NADPH-dependent oxidoreductase
  misc_feature (1)..(297): NCBI GI NO: 40781598 NR Description: reductase 2 [Hydrangea macrophylla]
  misc_feature (1)..(297): NCBI GI NO: 6478216 NR Description: putative NADPH-dependent oxidoreductase
  misc_feature (1)..(297): NCBI GI NO: 37530522 NR Description: putative NADPH-dependent oxidoreductase
  misc_feature (1)..(297): NCBI GI NO: 27357979 NR Description: Putative NADPH-dependent oxidoreductase
  misc_feature (1)..(297): NCBI GI NO: 37530524 NR Description: putative NADPH-dependent oxidoreductase
MVGMGTASFPVVHEAVRDAVLAAIEVGFRHFDTAFLYGTEKPLGDAVAEALRRGLLRSREELFVTSKLWCSQTHADLVLPSLRETLENLQMEYVDLYLIHWPVSLRPAGGPPKFPNRKEDAVPLDVAGVWRAMEECQRLGLARAIGVSNFTTRHLDKVLAIAAVPPAVNQVELNPAWQQRTLRAYCVDRGVHVAAYSPLGGQNWDGRGSAVLDSEVLAEIARARGKTVAQVALRWIHEQGVTCIVKSYNRERLKQNLEIFDWELTDDDRLKINHIPQRKVVEASGLFSQEGEFTSVDPAELNTVEEWELDWKMAPACRCCSV

SEQ ID NO: 25888 - DNA, 1100 bp, Zea mays subsp. mays
  misc_feature (1)..(1100): Ceres Seq. ID no. 13571176
  misc_feature (902)..(902): n is a, c, t, g, unknown, or other
  misc_feature (955)..(955): n is a, c, t, g, unknown, or other
  misc_feature (620)..(620): n is a, c, t, g, unknown, or other
  misc_feature (579)..(579): n is a, c, t, g, unknown, or other
  misc_feature (929)..(929): n is a, c, t, g, unknown, or other
  misc_feature (854)..(854): n is a, c, t, g, unknown, or other
aacaggtgtcccagccgcgcgccgcacgccctgttgccttctctcgacttcgagagcaccgccgcacggcataacgctcgcacggccgagccccgacattctaccgcactccctccgctgcacccctttccattctaccgccggcgacgccaaagttcttgggcctcctcatcggcgacttttccgccggcgacaggaaacaacgaaccaaaccacttctctgtcgagaggcgtcgcgctcctctcttcgccctctgctgttatttttcttaacccggctttctctcgattgctgcgtaaagttgaagatgaggaagctcaagttccatgagcagaagctcctcaagaggcacaatttcttggagtacaagagggagggcggccaccgcgaggcgctcgtcacacagcgctaccgcctcgtggagagggacgactacaagaagtacaatgggatatgcttaatggtgcaaaagctcgttaacatcataaagcagatggacccaagagaccctttcagaatccagatgacagacttgattctcgataagctgtataatatgggtgtaatttcaacaaaanagagcttgttaaagtgtgagaaactttcagtgagcgccttntgcaggcggagacttgcaacagttatggtgaagctcaagtttgcagagcaccttaaggaggctgtgacgtacatcgaacaggggcatgtgcgtgtcggtccagatgcagtcacggacccagcctttcttgtgaccagaaacatggaggacttcatcacctgggtggattcctcaaagatcaagaggaaggtcatggagtacaatgatgcattagatgattatgatgccatgttntgagaaaataattctgcagaaatttatgtgcccgtcagtaatgtaatnttaagcctgccacatatgggtcttttntgaacaaatctgtgggagttgtcttntgcagggctacttgcatttgtattgcacctgcagatgtgatgcaattttgtggttggttgaaggcacattataaattcatatctgatgtagttgtgcaattgtctttgttaaagagcgggtttgcccggatttcccctagtctgc

SEQ ID NO: 25889 - protein, 182 aa, Zea mays subsp. mays
  peptide (1)..(182): Ceres Seq. ID no. 13571177
  misc_feature (1)..(106): Pfam Name: Pfam Description:  Ribosomal protein S4/S9 N-terminal domain
  misc_feature (1)..(181): NCBI GI NO: 38346067 NR Description: OSJNBa0084K01.7
  misc_feature (1)..(181): NCBI GI NO: 18417773 NR Description: ribosomal protein S4/S9 related
  misc_feature (1)..(181): NCBI GI NO: 21554411 NR Description: ribosomal protein-like [Arabidopsis thaliana]
  misc_feature (1)..(181): NCBI GI NO: 11358773 NR Description: ribosomal protein-like - Arabidopsis thaliana
  misc_feature (1)..(179): NCBI GI NO: 19527196 NR Description: RIKEN cDNA 1190002L16 [Mus musculus]
  misc_feature (1)..(179): NCBI GI NO: 34864645 NR Description: similar to RIKEN cDNA 1190002L16
  misc_feature (1)..(179): NCBI GI NO: 6321942 NR Description: part of small
  misc_feature (1)..(179): NCBI GI NO: 8922794 NR Description: chromosome 15 open reading frame 12
  misc_feature (1)..(181): NCBI GI NO: 19115815 NR Description: putative component of U3 snoRNP
  misc_feature (1)..(181): NCBI GI NO: 23479022 NR Description: S4 domain, putative [Plasmodium yoelii yoelii]
  misc_feature (91)..(91): Xaa is any aa, unknown or other
  misc_feature (104)..(104): Xaa is any aa, unknown or other
  misc_feature (182)..(182): Xaa is any aa, unknown or other
MRKLKFHEQKLLKRHNFLEYKREGGHREALVTQRYRLVERDDYKKYNGICLMVQKLVNIIKQMDPRDPFRIQMTDLILDKLYNMGVISTKXSLLKCEKLSVSAXCRRRLATVMVKLKFAEHLKEAVTYIEQGHVRVGPDAVTDPAFLVTRNMEDFITWVDSSKIKRKVMEYNDALDDYDAMX

SEQ ID NO: 25890 - protein, 131 aa, Zea mays subsp. mays
  peptide (1)..(131): Ceres Seq. ID no. 13571178
  misc_feature (1)..(55): Pfam Name: Pfam Description:  Ribosomal protein S4/S9 N-terminal domain
  misc_feature (1)..(130): NCBI GI NO: 38346067 NR Description: OSJNBa0084K01.7
  misc_feature (1)..(130): NCBI GI NO: 18417773 NR Description: ribosomal protein S4/S9 related
  misc_feature (1)..(130): NCBI GI NO: 21554411 NR Description: ribosomal protein-like [Arabidopsis thaliana]
  misc_feature (1)..(130): NCBI GI NO: 11358773 NR Description: ribosomal protein-like - Arabidopsis thaliana
  misc_feature (1)..(128): NCBI GI NO: 19527196 NR Description: RIKEN cDNA 1190002L16 [Mus musculus]
  misc_feature (1)..(128): NCBI GI NO: 34864645 NR Description: similar to RIKEN cDNA 1190002L16
  misc_feature (1)..(128): NCBI GI NO: 6321942 NR Description: part of small
  misc_feature (1)..(128): NCBI GI NO: 8922794 NR Description: chromosome 15 open reading frame 12
  misc_feature (1)..(130): NCBI GI NO: 19115815 NR Description: putative component of U3 snoRNP
  misc_feature (1)..(130): NCBI GI NO: 23479022 NR Description: S4 domain, putative [Plasmodium yoelii yoelii]
  misc_feature (40)..(40): Xaa is any aa, unknown or other
  misc_feature (53)..(53): Xaa is any aa, unknown or other
  misc_feature (131)..(131): Xaa is any aa, unknown or other
MVQKLVNIIKQMDPRDPFRIQMTDLILDKLYNMGVISTKXSLLKCEKLSVSAXCRRRLATVMVKLKFAEHLKEAVTYIEQGHVRVGPDAVTDPAFLVTRNMEDFITWVDSSKIKRKVMEYNDALDDYDAMX

SEQ ID NO: 25891 - protein, 120 aa, Zea mays subsp. mays
  peptide (1)..(120): Ceres Seq. ID no. 13571179
  misc_feature (45)..(92): Pfam Name: Pfam Description:  S4 domain
  misc_feature (1)..(119): NCBI GI NO: 38346067 NR Description: OSJNBa0084K01.7
  misc_feature (1)..(119): NCBI GI NO: 18417773 NR Description: ribosomal protein S4/S9 related
  misc_feature (1)..(119): NCBI GI NO: 21554411 NR Description: ribosomal protein-like [Arabidopsis thaliana]
  misc_feature (1)..(119): NCBI GI NO: 11358773 NR Description: ribosomal protein-like - Arabidopsis thaliana
  misc_feature (1)..(117): NCBI GI NO: 19527196 NR Description: RIKEN cDNA 1190002L16 [Mus musculus]
  misc_feature (1)..(117): NCBI GI NO: 34864645 NR Description: similar to RIKEN cDNA 1190002L16
  misc_feature (1)..(117): NCBI GI NO: 6321942 NR Description: part of small
  misc_feature (1)..(117): NCBI GI NO: 8922794 NR Description: chromosome 15 open reading frame 12
  misc_feature (1)..(119): NCBI GI NO: 19115815 NR Description: putative component of U3 snoRNP
  misc_feature (1)..(119): NCBI GI NO: 23479022 NR Description: S4 domain, putative [Plasmodium yoelii yoelii]
  misc_feature (29)..(29): Xaa is any aa, unknown or other
  misc_feature (42)..(42): Xaa is any aa, unknown or other
  misc_feature (120)..(120): Xaa is any aa, unknown or other
MDPRDPFRIQMTDLILDKLYNMGVISTKXSLLKCEKLSVSAXCRRRLATVMVKLKFAEHLKEAVTYIEQGHVRVGPDAVTDPAFLVTRNMEDFITWVDSSKIKRKVMEYNDALDDYDAMX

SEQ ID NO: 25892 - DNA, 1949 bp, Zea mays subsp. mays
  misc_feature (1)..(1949): Ceres Seq. ID no. 12352261
atcacacagcgccaccgcgtggttcgttaggaaaggaaatcgattcccccgcatccgatctcttcggtgctagagaaatatagggccgccgcctcctcctcattcggtgaaaggtgggcggttagggttgggagatctcttgactcacgacacgagcagcagaattcgtcgagggccgctggttgctgcgagaggtccgggccttcgtgggatcttgaaaattgaatgttctaatggagtccaagggtggcaagaagaagtctagcagtagtcgttcctccctgatgtacgaagctccccttggctacagcatcgaggatatccgccctgcaggcggcatcaagaagttctccgctgcttactcgaactgcgcgaggaagccatcctgatatctctgtcgtcatccccatcctagtagcgtagaaaccacctgcattttcattttgatctccctaatccctccggctagctgctttccagtgaccaaaagatatcaaagaccacttcccgtcttcctcccgtggctgtctgtcatctggctctgaaacgatggcagtcctgcaagttgctgctgctgcccctccccctgtctctgtgattgggttcgagggatttgagaagcgccttgagatcagcttctctgaggcacctgtcttggctgaccccagcggaaggggactgcgtgcgctctcgcgtgcccagatcgactctgttcttgaccttgctcggtgcaccattgtgtccgagctctcaaacgaggacttcgactcttatgtcttatctgagtcgagcctgtttgtctacccatacaagattgtgatcaagacctgtggaactacaaagcttctgctcgctattccgaggatccttgaacttgctgaagagctcctgttgccactcgctgcagttaaatactcccgtggaacgttcatattccctgaagcacagccttccccacacaagaacttcgctgacgaggttgccttcctgaatcgcttcttcggtggcctcaagtccggtggcaatgcttatgtgattggtgactctgcgaagcccgggcagaagtggcacgtctactacgccgctgagcaccctgaggagcctgttgttactctagagatgtgcatgactgggctggacaagaagaaagcttctgtcttcttcaagaccactgctgatggttactcgctgtgcgccaaggagatgaccaagctctctggtatctcggacatcatcccagagatggagatctgtgacttcgacttcgagccctgtggctactccatgaatgctgttcatggccctgctttgtcgaccattcatgtgaccccagaggacggcttcagctatgcaagctacgaggtcatgggctttaacccgggctctttctcttatggtgacctggttaagagggtgctgaggtgctttggtccaactgagttctctgttgccgtgaccatcttcggtgatcgggacaatgcgaagacctgggggacgaaactggatgctgaggcctatgcttgcagcaacatggttgagcaggtgctgccgtttggtggcttgctcatctatcagagcttcactgttatgggcgaaacgacccatgggtcgccgaggtcagtcctgcatgacttcgctggtgacattgtcaagaatcgctcagagagtgatgctccctgatgggaagctgatgctgtggatgagagcgaggaaagagaggtaaagaagatgaaatgctgatgcggtcgacgatagatcagattcagagttgctgccactggttatcttgtgaagcagccaagcctaattatttatgccacataacctttgctattgtaatgtgccacatgcttatatttgcaataaacagctctaggtggtcagctttgtctgccgcaatgagcagtgtatcgatattgtggtttaaattgttggatctaaataaagtc

SEQ ID NO: 25893 - protein, 376 aa, Zea mays subsp. mays
  peptide (1)..(376): Ceres Seq. ID no. 12352262
  misc_feature (14)..(345): Pfam Name: Pfam Description:  Adenosylmethionine decarboxylase
  misc_feature (1)..(376): NCBI GI NO: 6646868 NR Description: S-adenosylmethionine decarboxylase 2
  misc_feature (1)..(376): NCBI GI NO: 19855056 NR Description: S-adenosylmethionine decarboxylase proenzyme
  misc_feature (1)..(376): NCBI GI NO: 3929545 NR Description: S-adenosylmethionine decarboxylase [Oryza sativa]
  misc_feature (1)..(369): NCBI GI NO: 3913427 NR Description: S-adenosylmethionine decarboxylase proenzyme
  misc_feature (13)..(376): NCBI GI NO: 4325045 NR Description: S-adenosylmethionine decarboxylase precursor
  misc_feature (13)..(376): NCBI GI NO: 3913438 NR Description: S-adenosylmethionine decarboxylase proenzyme
  misc_feature (6)..(376): NCBI GI NO: 7436593 NR Description: adenosylmethionine decarboxylase homolog
  misc_feature (1)..(276): NCBI GI NO: 10241685 NR Description: S-adenosylmethionine decarboxylase
  misc_feature (15)..(374): NCBI GI NO: 28566348 NR Description: S-adenosylmethionine decarboxylase
  misc_feature (13)..(359): NCBI GI NO: 31980105 NR Description: S-adenosylmethionine decarboxylase proenzyme
MAVLQVAAAAPPPVSVIGFEGFEKRLEISFSEAPVLADPSGRGLRALSRAQIDSVLDLARCTIVSELSNEDFDSYVLSESSLFVYPYKIVIKTCGTTKLLLAIPRILELAEELLLPLAAVKYSRGTFIFPEAQPSPHKNFADEVAFLNRFFGGLKSGGNAYVIGDSAKPGQKWHVYYAAEHPEEPVVTLEMCMTGLDKKKASVFFKTTADGYSLCAKEMTKLSGISDIIPEMEICDFDFEPCGYSMNAVHGPALSTIHVTPEDGFSYASYEVMGFNPGSFSYGDLVKRVLRCFGPTEFSVAVTIFGDRDNAKTWGTKLDAEAYACSNMVEQVLPFGGLLIYQSFTVMGETTHGSPRSVLHDFAGDIVKNRSESDAP

SEQ ID NO: 25894 - DNA, 1447 bp, Zea mays subsp. mays
  misc_feature (1)..(1447): Ceres Seq. ID no. 12373744
ctgtttcaatttgtactctctaggtatgggccattttggacatgcaccaccctgattttcgttgctgcatctattgctacttttgtcacctacctatcccacaaatggcacaagaaggaatggaactatgatatcaacttggttacctggtctgctgggttattctatggctacgtgacatttgttcctcttcttttatatgttattctcaagtacttctcagcacctgctggtttggtgcaattgtggtgcctatatggatattctctgttcatattcattccagcatcggtaaggttcttactaaaatgcatgcacatatacttgggaatttcagctctattagtctacaattttgtgccactggtctacagctaaagttgtttaaaatttggccttttctgtgggaaatgttcactcgattctaacacctgtaaaggcagcagcaaggttgagtttaaagaatttgcactgattttgtatgaaaactggaaccaattaattccaagagtcattattactaccacttaccaatataatttgtttgctaggtacccttttactgctacatattatagttacatgattttacaaggcatatagttgtgcagtatgttagtaggcttcatgattaaacctgtttcatatggtcaaatacttttctatggatcatttgtcaaaagaaaaaaaatctttactatttttacttccatataaccaatatcggtcatttactggtcctctattgacaaaatactactacctccatgccaaattatgagatgttttggcatttctaggtacataacttttattttacactatatctagatacatagtaataatgatgtatttgggaaaactaaaacgtcttataatttggaaatgagggactagtatattatctgttcaaatgatttggaatatttctacactgctttagcatttgaagttgactggaagttctttctcctttgtgttacagcttctgtctattgtgccaatagaaatattcagatgggtgattgctggtgttgctggtttcatgtctgctactttcgttgctgtaaatctccgcgcacacattgtaaattccggcgagcgatggttcctgatcgttgctgggatattcttgttgcagttggggcttgctttttgctgaaactatatttcttcacgataactgtatagggttatttacatctaatgatcgtactagtcaagaatacacaattttccatgtggaatcacttccatgttcattgaacattgatgtaatttttccatgtatacatctttcttacacgtagaattgagaagcccctgaaattgaattacagcagccaaacaagtactgtgattgatatgggtgaagagtctgatctgtagtctattctgtgttccgctgcttgaggtgaataatgaatgagaaatcgctgtgttctcc

SEQ ID NO: 25895 - protein, 125 aa, Zea mays subsp. mays
  peptide (1)..(125): Ceres Seq. ID no. 12373745
  misc_feature (9)..(96): Pfam Name: Pfam Description:  Yip1 domain
  misc_feature (9)..(96): NCBI GI NO: 6729038 NR Description: unknown protein [Arabidopsis thaliana]
  misc_feature (9)..(96): NCBI GI NO: 30679454 NR Description: expressed protein [Arabidopsis thaliana]
  misc_feature (9)..(122): NCBI GI NO: 34912560 NR Description: P0410E03.18
  misc_feature (9)..(122): NCBI GI NO: 30690667 NR Description: expressed protein [Arabidopsis thaliana]
  misc_feature (9)..(122): NCBI GI NO: 38564308 NR Description: At5g27490 [Arabidopsis thaliana]
  misc_feature (9)..(102): NCBI GI NO: 30688039 NR Description: expressed protein [Arabidopsis thaliana]
  misc_feature (9)..(98): NCBI GI NO: 40740298 NR Description: hypothetical protein AN4017.2
  misc_feature (9)..(123): NCBI GI NO: 10092643 NR Description: hypothetical protein DJ167A19.1 [Homo sapiens]
  misc_feature (9)..(123): NCBI GI NO: 21704084 NR Description: RIKEN cDNA C030002N13 [Mus musculus]
  misc_feature (9)..(102): NCBI GI NO: 17536971 NR Description: Putative membrane protein
LFQFVLSRYGPFWTCTTLIFVAASIATFVTYLSHKWHKKEWNYDINLVTWSAGLFYGYVTFVPLLLYVILKYFSAPAGLVQLWCLYGYSLFIFIPASVRFLLKCMHIYLGISALLVYNFVPLVYS

SEQ ID NO: 25896 - DNA, 1903 bp, Zea mays subsp. mays
  misc_feature (1)..(1903): Ceres Seq. ID no. 12344698
accagctgcctgtgcagcagtccaattcctcttgctggagcataccagaagcagaatcgggtgagaggaaatgggatcaacaagaacgtctcatccatctttcccggtcctcctgctcttcctcctcgctaccgccgccgccgccggaagcaacaaggctgaggaggtggacgacctccagtaccttattgacaactccgaagacatcccacccaacgaccctgacgggtggcctgagggcggcggcggcggcgactacgacgacgaccttctcttccaagatcaggaccaggacctcccagactacgagccgcagatcgacgagacccacgtcgtggtcctcaccgccgccaacttctcctccttcctcgccgccacccgccatgtcatggttgagttctacgccccctggtgtggccactgccgcgagctcgcccctgaatacgccgccgccgccgcgcatctcgccgtccaccacaaccagaccgatctcgctcttgccaaggccgacgccaccgaggaaaccgacctagcccagaggtacgacgtccagggcttccccactatcatcctcttcatcgacggcgtccccaaggactacaacggcgcgaggaccaaggacgccatcgtcgactggatcaacaagaagctcggcccggccgtgcaagatgtcaccagcgtccacgaggccgagaggatactcaccggggatgacaaagccgtcattgccttcctcgacactctaaccggtgctcacagtgacgagcttgctgctgcttcaaggctggaagatagcatcaacttttatcaaacttcgattcctgatgttgctaagcttttccatatcgacccagcagcaaagcgtccatccatagtattactgaagaaagaggaggagaagttgaccttctatgatggaaagtttaaagcatcagccattgctgattttgtgtctgctaacaagcttcctttggttaccacactaactcaagaaacttccccttctatttttggcaatgcaatcaagaagcagattttactatttgctgttgcaagtgaatcctcaaaatttctgtccatctttaaggaagcagcaaagccatttaagggaaagctattatttgtctttgtggagcgagacaatgatgaagttggtgaaccagttgccaactactttggtcttactggacaagagaccacagttcttgcttacactggtaatgaagatgctaggaaatttttccttgatggcgaggtgtcacttgaagccattaaggacttcgctgaaggtttcttggaagacaaacttacaccattctacaagtctgaaccagtacctgaatctaatgatggggatgtcaaaattgttgttggaaagagtctggatgtaatagttttggatgaatcaaaagatgtacttctggagatatatgcaccgtggtgtgggcattgtcaatcactggagcctacttacaacaaactagccaagcatctaagtggagttgactcccttgtgatagccaaaatggatggtactaccaatgagcatccacgtgcaaagtctgacggatacccaacaattctcttctatccagctgggaagaaaagctttgagcctgtcacgtttgagggggagcggacagtggtagatatgtacaggttcatcaagaaacatgctagcatccctttcaagttgaagcgccaggagtcaagaagggagagcatccagacggatggtgtcaaggacgaactgtagggcaggtcatgcattgatagatagctgagttttgaattttggttttataaaattaggtccgccaccgaatttcgcgttttcagcttaaacatcacctaaatctgtttctttatattatactatattaaagcaccagtttcaaccgtg

SEQ ID NO: 25897 - protein, 561 aa, Zea mays subsp. mays
  peptide (1)..(561): Ceres Seq. ID no. 12344699
  misc_feature (429)..(537): Pfam Name: Pfam Description:  Thioredoxin
  misc_feature (10)..(554): NCBI GI NO: 30697404 NR Description: protein disulfide isomerase family
  misc_feature (10)..(554): NCBI GI NO: 21593313 NR Description: protein disulfide isomerase precursor-like
  misc_feature (124)..(556): NCBI GI NO: 28140231 NR Description: protein disulphide isomerase [Elaeis guineensis]
  misc_feature (56)..(561): NCBI GI NO: 22331799 NR Description: protein disulfide-isomerase-like protein
  misc_feature (10)..(518): NCBI GI NO: 30697408 NR Description: protein disulfide isomerase family
  misc_feature (56)..(561): NCBI GI NO: 7437396 NR Description: protein disulfide-isomerase homolog F28P10
  misc_feature (77)..(541): NCBI GI NO: 20805285 NR Description: protein disulfide isomerase-like PDI-H
  misc_feature (79)..(541): NCBI GI NO: 20805287 NR Description: protein disulfide isomerase-like PDI-M
  misc_feature (71)..(561): NCBI GI NO: 5902592 NR Description: protein disulfide isomerase precursor
  misc_feature (69)..(560): NCBI GI NO: 7437394 NR Description: protein disulfide-isomerase (EC 5
MGSTRTSHPSFPVLLLFLLATAAAAGSNKAEEVDDLQYLIDNSEDIPPNDPDGWPEGGGGGDYDDDLLFQDQDQDLPDYEPQIDETHVVVLTAANFSSFLAATRHVMVEFYAPWCGHCRELAPEYAAAAAHLAVHHNQTDLALAKADATEETDLAQRYDVQGFPTIILFIDGVPKDYNGARTKDAIVDWINKKLGPAVQDVTSVHEAERILTGDDKAVIAFLDTLTGAHSDELAAASRLEDSINFYQTSIPDVAKLFHIDPAAKRPSIVLLKKEEEKLTFYDGKFKASAIADFVSANKLPLVTTLTQETSPSIFGNAIKKQILLFAVASESSKFLSIFKEAAKPFKGKLLFVFVERDNDEVGEPVANYFGLTGQETTVLAYTGNEDARKFFLDGEVSLEAIKDFAEGFLEDKLTPFYKSEPVPESNDGDVKIVVGKSLDVIVLDESKDVLLEIYAPWCGHCQSLEPTYNKLAKHLSGVDSLVIAKMDGTTNEHPRAKSDGYPTILFYPAGKKSFEPVTFEGERTVVDMYRFIKKHASIPFKLKRQESRRESIQTDGVKDEL

SEQ ID NO: 25898 - protein, 455 aa, Zea mays subsp. mays
  peptide (1)..(455): Ceres Seq. ID no. 12344700
  misc_feature (323)..(431): Pfam Name: Pfam Description:  Thioredoxin
  misc_feature (1)..(448): NCBI GI NO: 30697404 NR Description: protein disulfide isomerase family
  misc_feature (1)..(448): NCBI GI NO: 21593313 NR Description: protein disulfide isomerase precursor-like
  misc_feature (18)..(450): NCBI GI NO: 28140231 NR Description: protein disulphide isomerase [Elaeis guineensis]
  misc_feature (1)..(455): NCBI GI NO: 22331799 NR Description: protein disulfide-isomerase-like protein
  misc_feature (1)..(412): NCBI GI NO: 30697408 NR Description: protein disulfide isomerase family
  misc_feature (1)..(455): NCBI GI NO: 7437396 NR Description: protein disulfide-isomerase homolog F28P10
  misc_feature (1)..(435): NCBI GI NO: 20805285 NR Description: protein disulfide isomerase-like PDI-H
  misc_feature (1)..(435): NCBI GI NO: 20805287 NR Description: protein disulfide isomerase-like PDI-M
  misc_feature (1)..(455): NCBI GI NO: 5902592 NR Description: protein disulfide isomerase precursor
  misc_feature (1)..(454): NCBI GI NO: 7437394 NR Description: protein disulfide-isomerase (EC 5
MVEFYAPWCGHCRELAPEYAAAAAHLAVHHNQTDLALAKADATEETDLAQRYDVQGFPTIILFIDGVPKDYNGARTKDAIVDWINKKLGPAVQDVTSVHEAERILTGDDKAVIAFLDTLTGAHSDELAAASRLEDSINFYQTSIPDVAKLFHIDPAAKRPSIVLLKKEEEKLTFYDGKFKASAIADFVSANKLPLVTTLTQETSPSIFGNAIKKQILLFAVASESSKFLSIFKEAAKPFKGKLLFVFVERDNDEVGEPVANYFGLTGQETTVLAYTGNEDARKFFLDGEVSLEAIKDFAEGFLEDKLTPFYKSEPVPESNDGDVKIVVGKSLDVIVLDESKDVLLEIYAPWCGHCQSLEPTYNKLAKHLSGVDSLVIAKMDGTTNEHPRAKSDGYPTILFYPAGKKSFEPVTFEGERTVVDMYRFIKKHASIPFKLKRQESRRESIQTDGVKDEL

SEQ ID NO: 25899 - DNA, 1178 bp, Zea mays subsp. mays
  misc_feature (1)..(1178): Ceres Seq. ID no. 12409975
atcgccgcctgctctctacctctgcactccaatcagatcatcagatagatcactggccccgtgctgattaccgcgcttcccatctgagcagccagcctcccagggtacagggagagacgcagaagagacagctgctgcctcgctgagacgatggccggaggcggagaccactcccagacgaacggaggccacgtcgaccagagggccttggaggagggcaggaaggaggagttcgctgaccagggctgcgccgccatggtcgtctccgtcccatttatccagaagatcatcgcggagatcttcggcacctacttcctgatgttcgcggggtgcggcgcggtgacgatcaacgcgagcaagaacgggcagatcacgttcccgggcgtggcgatcgtgtgggggctagcggtgatggtgatggtgtacgccgtgggccacatctccggcgcgcacttcaacccggcggtgaccctggccttcgccaccagcgggcggttcccgtggcggcagctgccggcgtacgtgctggcgcagatgctgggcgccacgctcgcctccgggacgctgcgcctcatgttcggcggccggcacgagcacttccccggcacgctgcccacgggctccgaggtgcagtcgctcgtcatcgagatcatcaccacattctacctcatgttcgtcatctccggcgtcgccacggacaacagagcaatcggggagctggctgggctggccgtgggcgcaaccatcctgcttaacgtgctcattgccgggcccgtctccggcgcgtcgatgaacccggcccggagcgtgggcccggcgctggtgagcggggagtacacgtccatctgggtgtacgtggtggggccggtggtgggggccgtggccggggcgtgggcctacaacctcatccgcttcaccaacaagcccctccgcgagatcaccaagagcacgtctttcctcaagagcacgagcaggatgaactccgccgcctccgcctgatggatctccatggccggtaatttagcctacaaaactatatattcacccgtgtcgtcgtgtcagtacgtgagaggatatagatatataattcctgcgtgcgtgtgcgtttgtgtgtggatggaaaacatatgaaagaagaggtatggtttgtgtgtggatggaaaacgtactgtgcctgc

SEQ ID NO: 25900 - protein, 282 aa, Zea mays subsp. mays
  peptide (1)..(282): Ceres Seq. ID no. 12409976
  misc_feature (36)..(250): Pfam Name: Pfam Description:  Major intrinsic protein
  misc_feature (1)..(282): NCBI GI NO: 13447785 NR Description: NOD26-like membrane integral protein ZmNIP1-1
  misc_feature (1)..(279): NCBI GI NO: 1076748 NR Description: major intrinsic protein - rice
  misc_feature (38)..(275): NCBI GI NO: 17025880 NR Description: multifunctional aquaporin [Medicago truncatula]
  misc_feature (1)..(278): NCBI GI NO: 15234059 NR Description: major intrinsic protein
  misc_feature (1)..(278): NCBI GI NO: 21536953 NR Description: major intrinsic protein (MIP)- like
  misc_feature (43)..(271): NCBI GI NO: 5139541 NR Description: nodulin26-like major intrinsic protein
  misc_feature (37)..(271): NCBI GI NO: 81800 NR Description: nodulin-26 precursor - soybean
  misc_feature (38)..(271): NCBI GI NO: 541944 NR Description: nodulin-26 - soybean
  misc_feature (39)..(271): NCBI GI NO: 9082287 NR Description: multifunctional transport intrinsic membrane protein 2
  misc_feature (37)..(271): NCBI GI NO: 1352509 NR Description: NODULIN-26 (N-26)
MAGGGDHSQTNGGHVDQRALEEGRKEEFADQGCAAMVVSVPFIQKIIAEIFGTYFLMFAGCGAVTINASKNGQITFPGVAIVWGLAVMVMVYAVGHISGAHFNPAVTLAFATSGRFPWRQLPAYVLAQMLGATLASGTLRLMFGGRHEHFPGTLPTGSEVQSLVIEIITTFYLMFVISGVATDNRAIGELAGLAVGATILLNVLIAGPVSGASMNPARSVGPALVSGEYTSIWVYVVGPVVGAVAGAWAYNLIRFTNKPLREITKSTSFLKSTSRMNSAASA

SEQ ID NO: 25901 - protein, 247 aa, Zea mays subsp. mays
  peptide (1)..(247): Ceres Seq. ID no. 12409977
  misc_feature (1)..(215): Pfam Name: Pfam Description:  Major intrinsic protein
  misc_feature (1)..(247): NCBI GI NO: 13447785 NR Description: NOD26-like membrane integral protein ZmNIP1-1
  misc_feature (1)..(244): NCBI GI NO: 1076748 NR Description: major intrinsic protein - rice
  misc_feature (3)..(240): NCBI GI NO: 17025880 NR Description: multifunctional aquaporin [Medicago truncatula]
  misc_feature (1)..(243): NCBI GI NO: 15234059 NR Description: major intrinsic protein
  misc_feature (1)..(243): NCBI GI NO: 21536953 NR Description: major intrinsic protein (MIP)- like
  misc_feature (8)..(236): NCBI GI NO: 5139541 NR Description: nodulin26-like major intrinsic protein
  misc_feature (2)..(236): NCBI GI NO: 81800 NR Description: nodulin-26 precursor - soybean
  misc_feature (3)..(236): NCBI GI NO: 541944 NR Description: nodulin-26 - soybean
  misc_feature (4)..(236): NCBI GI NO: 9082287 NR Description: multifunctional transport intrinsic membrane protein 2
  misc_feature (2)..(236): NCBI GI NO: 1352509 NR Description: NODULIN-26 (N-26)
MVVSVPFIQKIIAEIFGTYFLMFAGCGAVTINASKNGQITFPGVAIVWGLAVMVMVYAVGHISGAHFNPAVTLAFATSGRFPWRQLPAYVLAQMLGATLASGTLRLMFGGRHEHFPGTLPTGSEVQSLVIEIITTFYLMFVISGVATDNRAIGELAGLAVGATILLNVLIAGPVSGASMNPARSVGPALVSGEYTSIWVYVVGPVVGAVAGAWAYNLIRFTNKPLREITKSTSFLKSTSRMNSAASA

SEQ ID NO: 25902 - protein, 226 aa, Zea mays subsp. mays
  peptide (1)..(226): Ceres Seq. ID no. 12409978
  misc_feature (1)..(194): Pfam Name: Pfam Description:  Major intrinsic protein
  misc_feature (1)..(226): NCBI GI NO: 13447785 NR Description: NOD26-like membrane integral protein ZmNIP1-1
  misc_feature (1)..(223): NCBI GI NO: 1076748 NR Description: major intrinsic protein - rice
  misc_feature (1)..(219): NCBI GI NO: 17025880 NR Description: multifunctional aquaporin [Medicago truncatula]
  misc_feature (1)..(222): NCBI GI NO: 15234059 NR Description: major intrinsic protein
  misc_feature (1)..(222): NCBI GI NO: 21536953 NR Description: major intrinsic protein (MIP)- like
  misc_feature (1)..(215): NCBI GI NO: 5139541 NR Description: nodulin26-like major intrinsic protein
  misc_feature (1)..(215): NCBI GI NO: 81800 NR Description: nodulin-26 precursor - soybean
  misc_feature (1)..(215): NCBI GI NO: 541944 NR Description: nodulin-26 - soybean
  misc_feature (1)..(215): NCBI GI NO: 9082287 NR Description: multifunctional transport intrinsic membrane protein 2
  misc_feature (1)..(215): NCBI GI NO: 1352509 NR Description: NODULIN-26 (N-26)
MFAGCGAVTINASKNGQITFPGVAIVWGLAVMVMVYAVGHISGAHFNPAVTLAFATSGRFPWRQLPAYVLAQMLGATLASGTLRLMFGGRHEHFPGTLPTGSEVQSLVIEIITTFYLMFVISGVATDNRAIGELAGLAVGATILLNVLIAGPVSGASMNPARSVGPALVSGEYTSIWVYVVGPVVGAVAGAWAYNLIRFTNKPLREITKSTSFLKSTSRMNSAASA

SEQ ID NO: 25903 - DNA, 1167 bp, Zea mays subsp. mays
  misc_feature (1)..(1167): Ceres Seq. ID no. 12365393
aaattctacatgggcctggccgtcttcagttcttcacccttcaccaccagaagcttctaggaagtaggaactcgaacggccggcagcattccgacgagacgagtcacgaatccggatagagcgccgccccccaacctgctgcgccgaccctgctcgccgccggcccgagtagagagagagagagaggagagaaggaagcatgacgacaatccgtcggttctgctgcgacgacctcctccgcttcgcctccgtcaacctggaccacctcaccgagacgttcaacatgtcgttctacatgacgtacctggcgcgctggcccgactacttccacgccgccgtcagccctggcggccgcgtcatgggttacatcatgggtaaagttgaaggccaaggtgaatcttggcatggacatgtcacagcggtttctgttgcctctgaatttcgtaggcagaagttagccaaaaaacttatgaacttactggaggaaatcagtgataagatggataaggcctacttcgtggatctctttgtaagggcatctaacatgccagcgataaggatgtatgaaaagcttggttatgtggtttatcgaagggtgctccggtactactcaggggaagaagatggcctcgatatgagaaaagcattatcacaagatgttgagaagaagtccatcataccactcaagaggccaattacgcctgatgaacttgaatatgattgatgttagctacctggtgcttacgttggatgctccggtggggaatttgacaggctttgaaaatctggtagtgagtgtattgttgtcgtttttacgcctgctaggggacaggttttgatggtgaattcgatgacaagaccaacgtcaaggccgcctggggtaaggtcggcgcgcacgctggcgagtatggtgcggaggccctggagaggatgttcctgtccttccccaccaccaagacctacttcccgcacttcgacctgagccacggctctgccccaggttaagggccacggcaagaaggtggccgacgcgctgaccaacgccgtggcgcacgtggacgacatgcccaacgcgctgtccgccctgagcgacctgcacgcgcacaagcttcgggtggacccggtcaacttcaagctcctaagccactgcctgctggtgagcccatc

SEQ ID NO: 25904 - protein, 174 aa, Zea mays subsp. mays
  peptide (1)..(174): Ceres Seq. ID no. 12365394
  misc_feature (45)..(128): Pfam Name: GNAT Pfam Description: Acetyltransferase
  misc_feature (1)..(174): NCBI GI NO: 14550118 NR Description: silencing group B protein [Zea mays]
  misc_feature (1)..(174): NCBI GI NO: 28273362 NR Description: silencing group B protein
  misc_feature (1)..(174): NCBI GI NO: 18379062 NR Description: expressed protein; protein id: At1g03150
  misc_feature (1)..(174): NCBI GI NO: 14423552 NR Description: Unknown protein [Arabidopsis thaliana]
  misc_feature (1)..(124): NCBI GI NO: 25518612 NR Description: hypothetical protein F10O3.2
  misc_feature (124)..(174): NCBI GI NO: 25518612 NR Description: hypothetical protein F10O3.2
  misc_feature (1)..(172): NCBI GI NO: 12052808 NR Description: hypothetical protein [Homo sapiens]
  misc_feature (1)..(172): NCBI GI NO: 7705823 NR Description: N-terminal acetyltransferase complex ard1subunit
  misc_feature (1)..(172): NCBI GI NO: 28278699 NR Description: Unknown (protein for MGC:53877) [Xenopus laevis]
  misc_feature (1)..(172): NCBI GI NO: 38566006 NR Description: N-acetyltransferase 5 [Silurana tropicalis]
MTTIRRFCCDDLLRFASVNLDHLTETFNMSFYMTYLARWPDYFHAAVSPGGRVMGYIMGKVEGQGESWHGHVTAVSVASEFRRQKLAKKLMNLLEEISDKMDKAYFVDLFVRASNMPAIRMYEKLGYVVYRRVLRYYSGEEDGLDMRKALSQDVEKKSIIPLKRPITPDELEYD

SEQ ID NO: 25905 - protein, 146 aa, Zea mays subsp. mays
  peptide (1)..(146): Ceres Seq. ID no. 12365395
  misc_feature (17)..(100): Pfam Name: GNAT Pfam Description: Acetyltransferase
  misc_feature (1)..(146): NCBI GI NO: 14550118 NR Description: silencing group B protein [Zea mays]
  misc_feature (1)..(146): NCBI GI NO: 28273362 NR Description: silencing group B protein
  misc_feature (1)..(146): NCBI GI NO: 18379062 NR Description: expressed protein; protein id: At1g03150
  misc_feature (1)..(146): NCBI GI NO: 14423552 NR Description: Unknown protein [Arabidopsis thaliana]
  misc_feature (1)..(96): NCBI GI NO: 25518612 NR Description: hypothetical protein F10O3.2
  misc_feature (96)..(146): NCBI GI NO: 25518612 NR Description: hypothetical protein F10O3.2
  misc_feature (1)..(144): NCBI GI NO: 12052808 NR Description: hypothetical protein [Homo sapiens]
  misc_feature (1)..(144): NCBI GI NO: 7705823 NR Description: N-terminal acetyltransferase complex ard1subunit
  misc_feature (1)..(144): NCBI GI NO: 28278699 NR Description: Unknown (protein for MGC:53877) [Xenopus laevis]
  misc_feature (1)..(144): NCBI GI NO: 38566006 NR Description: N-acetyltransferase 5 [Silurana tropicalis]
MSFYMTYLARWPDYFHAAVSPGGRVMGYIMGKVEGQGESWHGHVTAVSVASEFRRQKLAKKLMNLLEEISDKMDKAYFVDLFVRASNMPAIRMYEKLGYVVYRRVLRYYSGEEDGLDMRKALSQDVEKKSIIPLKRPITPDELEYD

SEQ ID NO: 25906 - protein, 142 aa, Zea mays subsp. mays
  peptide (1)..(142): Ceres Seq. ID no. 12365396
  misc_feature (13)..(96): Pfam Name: GNAT Pfam Description: Acetyltransferase
  misc_feature (1)..(142): NCBI GI NO: 14550118 NR Description: silencing group B protein [Zea mays]
  misc_feature (1)..(142): NCBI GI NO: 28273362 NR Description: silencing group B protein
  misc_feature (1)..(142): NCBI GI NO: 18379062 NR Description: expressed protein; protein id: At1g03150
  misc_feature (1)..(142): NCBI GI NO: 14423552 NR Description: Unknown protein [Arabidopsis thaliana]
  misc_feature (1)..(92): NCBI GI NO: 25518612 NR Description: hypothetical protein F10O3.2
  misc_feature (92)..(142): NCBI GI NO: 25518612 NR Description: hypothetical protein F10O3.2
  misc_feature (1)..(140): NCBI GI NO: 12052808 NR Description: hypothetical protein [Homo sapiens]
  misc_feature (1)..(140): NCBI GI NO: 7705823 NR Description: N-terminal acetyltransferase complex ard1subunit
  misc_feature (1)..(140): NCBI GI NO: 28278699 NR Description: Unknown (protein for MGC:53877) [Xenopus laevis]
  misc_feature (1)..(140): NCBI GI NO: 38566006 NR Description: N-acetyltransferase 5 [Silurana tropicalis]
MTYLARWPDYFHAAVSPGGRVMGYIMGKVEGQGESWHGHVTAVSVASEFRRQKLAKKLMNLLEEISDKMDKAYFVDLFVRASNMPAIRMYEKLGYVVYRRVLRYYSGEEDGLDMRKALSQDVEKKSIIPLKRPITPDELEYD

SEQ ID NO: 25907 - DNA, 1635 bp, Zea mays subsp. mays
  misc_feature (1)..(1635): Ceres Seq. ID no. 13577792
gcaccaaccttgttgttgttgttcttctatttcttagtatcatagcacagtatttcgtgctctcgcttcgctcccttaatttatcaccattcctaatttattctatttcttagtatcatagcacagtatttcgctcgccccgatttcccaactcttcccgtgcctcagacagcatcggattgcttgatctcgattgtcagaataagattcagcgcaggtttggattcaccgaatccaccgattgcttgcgccccgcggtcgcgcgcggcggaatttcggccgccgccaattcgggcctctccggaagggtgtccccggtgtggttcgcctaatatccgctgccctcgtgcgggactcctcgtgattttcggctgtgcgcttggcttttccagtcccgtgttgtggttccagcctttcaggggatggggcgccgcgggttgctcaaggctgcgcttctgctgtgcttccttgctgcttgctccgggagagaacttacgatcaaacagaacccttccactaccatatacaactcgactcttgccaagatactcgtggaatatgcttctgcaatctatactgctgatttgacgcaattgtttacttggacatgtgccagatgcggtgacttgatcgaggggttcgagatgatagagatcattgtggatgtcgagaactgcttgcaggcatattttggttttgccagtgacataaacgcagtcgttgttgtttttagaggaactcaagagaacagcatccagaattggatagaggacttgttatggaaacaacttgatcttgactaccctggcatgcctgaagcaatggttcaccgagggttttattctgcatatcacaacacgacactacgtgatggagtagtcagtggtattcagaggactaggaaagcttacggagacattccaatcatgatcacgggtcattcaatgggtggagctatggcttcattctgtgcgctcgatcttgttgttaactacggactggatggcgtaaacctgatgacatttgggcagcctcgtattggcaatgctgcatttgcttcttatttcaagacatacttgcctcaagcgatccgagttactcatgcccatgatattgtgcctcacctgccaccatatttctcattcttcccacagaagacctaccatcacttcccaagagaggtatggacccacaatattggactaggaaccctagtgtaccccgtagaaaagatctgtgacgattctggtgaagaccctacatgctgcagatcagtaagtggaagtagcgtgcgagaccatatatactatcttggcgtcagcatgcatgcagaagactggagcagctgcagaatcgtcatggactacagcaaattgcagtatcagatggacctcaacggtaatctcgtattgtcgaagcagcccggtttgtcaaacgccagaggattcagtgctcagtgaaccagtctatgatttgtacagtataatagcttcacgaatcagtaatgttcaattgttaatggatcaaaggagaagggttggaaccagcatgccgattcggagatgcttattgtacatgtgattacgtaatgtattgttcagtttgcaaatatatattcacacacgccgatatttg

SEQ ID NO: 25908 - protein, 345 aa, Zea mays subsp. mays
  peptide (1)..(345): Ceres Seq. ID no. 13577793
  misc_feature (1)..(345): NCBI GI NO: 21425571 NR Description: triacylglycerol lipase [Triticum aestivum]
  misc_feature (1)..(345): NCBI GI NO: 21425569 NR Description: triacylglycerol Lipase [Triticum aestivum]
  misc_feature (75)..(337): NCBI GI NO: 34907212 NR Description: P0492G09.26
  misc_feature (1)..(332): NCBI GI NO: 15238889 NR Description: lipase (class 3) family [Arabidopsis thaliana]
  misc_feature (1)..(332): NCBI GI NO: 18418946 NR Description: lipase (class 3) family [Arabidopsis thaliana]
  misc_feature (10)..(332): NCBI GI NO: 34395192 NR Description: putative triacylglycerol lipase
  misc_feature (10)..(332): NCBI GI NO: 34899296 NR Description: putative triacylglycerol lipase
  misc_feature (1)..(283): NCBI GI NO: 30686925 NR Description: lipase (class 3) family [Arabidopsis thaliana]
  misc_feature (29)..(302): NCBI GI NO: 21166167 NR Description: triacylglycerol lipase-like protein triacylglycerollipase
  misc_feature (60)..(300): NCBI GI NO: 230348 NR Description: Triacylglycerol Acylhydrolase (E.C.3.1.1.3)
MGRRGLLKAALLLCFLAACSGRELTIKQNPSTTIYNSTLAKILVEYASAIYTADLTQLFTWTCARCGDLIEGFEMIEIIVDVENCLQAYFGFASDINAVVVVFRGTQENSIQNWIEDLLWKQLDLDYPGMPEAMVHRGFYSAYHNTTLRDGVVSGIQRTRKAYGDIPIMITGHSMGGAMASFCALDLVVNYGLDGVNLMTFGQPRIGNAAFASYFKTYLPQAIRVTHAHDIVPHLPPYFSFFPQKTYHHFPREVWTHNIGLGTLVYPVEKICDDSGEDPTCCRSVSGSSVRDHIYYLGVSMHAEDWSSCRIVMDYSKLQYQMDLNGNLVLSKQPGLSNARGFSAQ

SEQ ID NO: 25909 - protein, 271 aa, Zea mays subsp. mays
  peptide (1)..(271): Ceres Seq. ID no. 13577794
  misc_feature (1)..(271): NCBI GI NO: 21425571 NR Description: triacylglycerol lipase [Triticum aestivum]
  misc_feature (1)..(271): NCBI GI NO: 21425569 NR Description: triacylglycerol Lipase [Triticum aestivum]
  misc_feature (1)..(263): NCBI GI NO: 34907212 NR Description: P0492G09.26
  misc_feature (1)..(258): NCBI GI NO: 15238889 NR Description: lipase (class 3) family [Arabidopsis thaliana]
  misc_feature (1)..(258): NCBI GI NO: 18418946 NR Description: lipase (class 3) family [Arabidopsis thaliana]
  misc_feature (1)..(258): NCBI GI NO: 34395192 NR Description: putative triacylglycerol lipase
  misc_feature (1)..(258): NCBI GI NO: 34899296 NR Description: putative triacylglycerol lipase
  misc_feature (1)..(209): NCBI GI NO: 30686925 NR Description: lipase (class 3) family [Arabidopsis thaliana]
  misc_feature (1)..(228): NCBI GI NO: 21166167 NR Description: triacylglycerol lipase-like protein triacylglycerollipase
  misc_feature (1)..(226): NCBI GI NO: 230348 NR Description: Triacylglycerol Acylhydrolase (E.C.3.1.1.3)
MIEIIVDVENCLQAYFGFASDINAVVVVFRGTQENSIQNWIEDLLWKQLDLDYPGMPEAMVHRGFYSAYHNTTLRDGVVSGIQRTRKAYGDIPIMITGHSMGGAMASFCALDLVVNYGLDGVNLMTFGQPRIGNAAFASYFKTYLPQAIRVTHAHDIVPHLPPYFSFFPQKTYHHFPREVWTHNIGLGTLVYPVEKICDDSGEDPTCCRSVSGSSVRDHIYYLGVSMHAEDWSSCRIVMDYSKLQYQMDLNGNLVLSKQPGLSNARGFSAQ

SEQ ID NO: 25910 - protein, 216 aa, Zea mays subsp. mays
  peptide (1)..(216): Ceres Seq. ID no. 13577795
  misc_feature (1)..(216): NCBI GI NO: 21425571 NR Description: triacylglycerol lipase [Triticum aestivum]
  misc_feature (1)..(216): NCBI GI NO: 21425569 NR Description: triacylglycerol Lipase [Triticum aestivum]
  misc_feature (1)..(208): NCBI GI NO: 34907212 NR Description: P0492G09.26
  misc_feature (1)..(203): NCBI GI NO: 15238889 NR Description: lipase (class 3) family [Arabidopsis thaliana]
  misc_feature (1)..(203): NCBI GI NO: 18418946 NR Description: lipase (class 3) family [Arabidopsis thaliana]
  misc_feature (1)..(203): NCBI GI NO: 34395192 NR Description: putative triacylglycerol lipase
  misc_feature (1)..(203): NCBI GI NO: 34899296 NR Description: putative triacylglycerol lipase
  misc_feature (1)..(154): NCBI GI NO: 30686925 NR Description: lipase (class 3) family [Arabidopsis thaliana]
  misc_feature (1)..(173): NCBI GI NO: 21166167 NR Description: triacylglycerol lipase-like protein triacylglycerollipase
  misc_feature (1)..(171): NCBI GI NO: 230348 NR Description: Triacylglycerol Acylhydrolase (E.C.3.1.1.3)
MPEAMVHRGFYSAYHNTTLRDGVVSGIQRTRKAYGDIPIMITGHSMGGAMASFCALDLVVNYGLDGVNLMTFGQPRIGNAAFASYFKTYLPQAIRVTHAHDIVPHLPPYFSFFPQKTYHHFPREVWTHNIGLGTLVYPVEKICDDSGEDPTCCRSVSGSSVRDHIYYLGVSMHAEDWSSCRIVMDYSKLQYQMDLNGNLVLSKQPGLSNARGFSAQ

SEQ ID NO: 25911 - DNA, 973 bp, Zea mays subsp. mays
  misc_feature (1)..(973): Ceres Seq. ID no. 12401449
acacatccgccgccgtttcttctcccatcatcttcctcgcagcgccggcgctccctctcccgctcccttccttactcgcgctcggcacacaggcggcggcgctcgggctctcagcgacggcgtcagcggcttaccctcgcgccctcgcctccggtcctccgcacaccggccggtgaccctgcgacaacattgcatctgaactgcattggatcctaagagatgatggatgagtcttttcttgataggatggtttcccaacttcggtcaacatgcaagtactacactggatatcccaaggacttagggcgatcaagaattataccattcacatctgagcgtcagtttgtgcagctattacatgaaggcaggcctgtagtcgttgcctttactattaagtgcacatatacacagcatcttgataaagttctggaagaggccgcagctaaattttatccacatatcaagtttgtccgagttgagtgcccgaagtaccctgggttttgcctcacaaggcaaaggaacgaatatccatttgttgaagtattctacaacccagaacaggctgcaagcccaggaaagagcgtggatcctaacatcaccaagtattctgtaaaagtgctaccgttcaactatgaccaaagcgtgtatggatttcgagaatatttcaagaagcatggtttcaagtattctgaaacaaactagatctgttgttaaagatctgcctcgagagtagtcctagggacttgagtagcatgtggaggcagttgttgtatggagttgaaatggcgtgaggctctaatgggaggccttgactagttcattcgagaatgcctgtcatgtattcatttgtatacgggctactgctcatgcctagagatttgcttttccgtacctatgaaccattggatttggtaatgttttacctctcaaagcccggagtgagcaatttgcatcattttttcaagcactgtcg

SEQ ID NO: 25912 - protein, 160 aa, Zea mays subsp. mays
  peptide (1)..(160): Ceres Seq. ID no. 12401450
  misc_feature (1)..(158): NCBI GI NO: 15242070 NR Description: unknown protein; protein id: At5g57230.1
MMDESFLDRMVSQLRSTCKYYTGYPKDLGRSRIIPFTSERQFVQLLHEGRPVVVAFTIKCTYTQHLDKVLEEAAAKFYPHIKFVRVECPKYPGFCLTRQRNEYPFVEVFYNPEQAASPGKSVDPNITKYSVKVLPFNYDQSVYGFREYFKKHGFKYSETN

SEQ ID NO: 25913 - protein, 159 aa, Zea mays subsp. mays
  peptide (1)..(159): Ceres Seq. ID no. 12401451
  misc_feature (1)..(157): NCBI GI NO: 15242070 NR Description: unknown protein; protein id: At5g57230.1
MDESFLDRMVSQLRSTCKYYTGYPKDLGRSRIIPFTSERQFVQLLHEGRPVVVAFTIKCTYTQHLDKVLEEAAAKFYPHIKFVRVECPKYPGFCLTRQRNEYPFVEVFYNPEQAASPGKSVDPNITKYSVKVLPFNYDQSVYGFREYFKKHGFKYSETN

SEQ ID NO: 25914 - protein, 151 aa, Zea mays subsp. mays
  peptide (1)..(151): Ceres Seq. ID no. 12401452
  misc_feature (1)..(149): NCBI GI NO: 15242070 NR Description: unknown protein; protein id: At5g57230.1
MVSQLRSTCKYYTGYPKDLGRSRIIPFTSERQFVQLLHEGRPVVVAFTIKCTYTQHLDKVLEEAAAKFYPHIKFVRVECPKYPGFCLTRQRNEYPFVEVFYNPEQAASPGKSVDPNITKYSVKVLPFNYDQSVYGFREYFKKHGFKYSETN

SEQ ID NO: 25915 - DNA, 1150 bp, Zea mays subsp. mays
  misc_feature (1)..(1150): Ceres Seq. ID no. 12356179
acacacaacaccagtcaccagctcatcacatccatctcattctactactgcctcagagaccaagctgctgcaaccggagaaggagatctattctacaaagtgaagtacttggcttgggacatggaaaccgtcgtgggagacctcatggcgaccgagctgaggcttggcctgccgggcaccgtggacgactgcagccagcaccagcagcagacccagctgaaggtggccgcgccgccgtccaaccctactaggggcaagaagcgcgccgccgccgaggaggaggcagacaagcgcgacgcggaggcagcacccccggcggccaaggcgcccgtggtcggatggccaccggtgaggtcgtaccgggaagagctgcttccagcaggcaaagcagcaggccgtcagcagcagcagcagcaaggcggccgacaaagaggatgctgcggcgccggcgccgaggctgcacggcttccgcagccgcctcaaacgccaccgccggcgccggggccggctcattcgtcaaggttagcatggacggcgccccgtacctgcggaagctcgacctgaggatgtacaagggctaccgggagctccgggaggccctggaggccatgttcgtctcctccggcagcgccaacgacaaaaacctgtcggagtttgccgtcacctaccaggacaaggacggcgacctcatgctcgtcggagacgtgccgttcgagatgttcgctagcacctgcaggaagctgaggatcatgaagagatctgaagccacaggcctgggatcggcgaggcaatgaagaaggtctgaccacgaccgagggcccgacaacgttcatgtcgatctctctctctctctctctctctctcttctttttttttttgccccattattttattttgttcttcttgttcgggagaccccaagccaaaaggatgagcttggtggcgcatcaatctacaaagcgcatgcatatacgcggatgtgtgtgcggctttggttctgtaagacgacgactagtagagctaggtctttttttagcagcagcacagaaggagatgcatgctgatgacgaggttgtttcggcttagctctccatatgctgtgtttgtacaaaccaaacaatacagttatcttcaccgtcgttgatccctt

SEQ ID NO: 25916 - protein, 187 aa, Zea mays subsp. mays
  peptide (1)..(187): Ceres Seq. ID no. 12356180
  misc_feature (47)..(129): Pfam Name: Pfam Description:  AUX/IAA family
  misc_feature (47)..(129): NCBI GI NO: 20269063 NR Description: aux/IAA protein
  misc_feature (47)..(132): NCBI GI NO: 416641 NR Description: Auxin-induced protein 22B
  misc_feature (47)..(129): NCBI GI NO: 34550779 NR Description: Gbiaa-Re [Gossypium barbadense]
  misc_feature (47)..(132): NCBI GI NO: 1352057 NR Description: AUXIN-INDUCED PROTEIN IAA4
  misc_feature (68)..(149): NCBI GI NO: 17154533 NR Description: putative IAA1 protein
  misc_feature (47)..(122): NCBI GI NO: 11131103 NR Description: Auxin-induced protein 22D
  misc_feature (68)..(149): NCBI GI NO: 30962267 NR Description: Aux/IAA protein
  misc_feature (50)..(132): NCBI GI NO: 18071490 NR Description: auxin-induced AUX/IAA1 [Antirrhinum majus]
  misc_feature (47)..(135): NCBI GI NO: 15239950 NR Description: auxin-induced protein AUX2-11
  misc_feature (47)..(130): NCBI GI NO: 4887018 NR Description: Nt-iaa4.5 deduced protein [Nicotiana tabacum]
THNTSHQLITSISFYYCLRDQAAATGEGDLFYKVKYLAWDMETVVGDLMATELRLGLPGTVDDCSQHQQQTQLKVAAPPSNPTRGKKRAAAEEEADKRDAEAAPPAAKAPVVGWPPVRSYREELLPAGKAAGRQQQQQQGGRQRGCCGAGAEAARLPQPPQTPPPAPGPAHSSRLAWTAPRTCGSST

SEQ ID NO: 25917 - protein, 151 aa, Zea mays subsp. mays
  peptide (1)..(151): Ceres Seq. ID no. 12356181
  misc_feature (34)..(149): Pfam Name: Pfam Description:  AUX/IAA family
  misc_feature (34)..(149): NCBI GI NO: 20269063 NR Description: aux/IAA protein
  misc_feature (53)..(147): NCBI GI NO: 416641 NR Description: Auxin-induced protein 22B
  misc_feature (55)..(147): NCBI GI NO: 34550779 NR Description: Gbiaa-Re [Gossypium barbadense]
  misc_feature (57)..(147): NCBI GI NO: 1352057 NR Description: AUXIN-INDUCED PROTEIN IAA4
  misc_feature (47)..(146): NCBI GI NO: 17154533 NR Description: putative IAA1 protein
  misc_feature (55)..(147): NCBI GI NO: 11131103 NR Description: Auxin-induced protein 22D
  misc_feature (47)..(146): NCBI GI NO: 30962267 NR Description: Aux/IAA protein
  misc_feature (50)..(139): NCBI GI NO: 18071490 NR Description: auxin-induced AUX/IAA1 [Antirrhinum majus]
  misc_feature (55)..(147): NCBI GI NO: 15239950 NR Description: auxin-induced protein AUX2-11
  misc_feature (56)..(150): NCBI GI NO: 4887018 NR Description: Nt-iaa4.5 deduced protein [Nicotiana tabacum]
MATGEVVPGRAASSRQSSRPSAAAAARRPTKRMLRRRRRGCTASAAASNATAGAGAGSFVKVSMDGAPYLRKLDLRMYKGYRELREALEAMFVSSGSANDKNLSEFAVTYQDKDGDLMLVGDVPFEMFASTCRKLRIMKRSEATGLGSARQ

SEQ ID NO: 25918 - protein, 147 aa, Zea mays subsp. mays
  peptide (1)..(147): Ceres Seq. ID no. 12356182
  misc_feature (7)..(89): Pfam Name: Pfam Description:  AUX/IAA family
  misc_feature (7)..(89): NCBI GI NO: 20269063 NR Description: aux/IAA protein
  misc_feature (7)..(92): NCBI GI NO: 416641 NR Description: Auxin-induced protein 22B
  misc_feature (7)..(89): NCBI GI NO: 34550779 NR Description: Gbiaa-Re [Gossypium barbadense]
  misc_feature (7)..(92): NCBI GI NO: 1352057 NR Description: AUXIN-INDUCED PROTEIN IAA4
  misc_feature (28)..(109): NCBI GI NO: 17154533 NR Description: putative IAA1 protein
  misc_feature (7)..(82): NCBI GI NO: 11131103 NR Description: Auxin-induced protein 22D
  misc_feature (28)..(109): NCBI GI NO: 30962267 NR Description: Aux/IAA protein
  misc_feature (10)..(92): NCBI GI NO: 18071490 NR Description: auxin-induced AUX/IAA1 [Antirrhinum majus]
  misc_feature (7)..(95): NCBI GI NO: 15239950 NR Description: auxin-induced protein AUX2-11
  misc_feature (7)..(90): NCBI GI NO: 4887018 NR Description: Nt-iaa4.5 deduced protein [Nicotiana tabacum]
METVVGDLMATELRLGLPGTVDDCSQHQQQTQLKVAAPPSNPTRGKKRAAAEEEADKRDAEAAPPAAKAPVVGWPPVRSYREELLPAGKAAGRQQQQQQGGRQRGCCGAGAEAARLPQPPQTPPPAPGPAHSSRLAWTAPRTCGSST

SEQ ID NO: 25919 - DNA, 1021 bp, Zea mays subsp. mays
  misc_feature (1)..(1021): Ceres Seq. ID no. 12403002
ctctcctctcatcctaccctaaccgccgccgccgccgcccgccgtcctttcctgtataataaaacctcaaatcgtctctctcccgtcctcccctccaccgccgcagccgccgccgtacctcctcctcccgcgcagcagccaccgccaccgccggaaatgaagaccatcctggccacggagacgatggacatccccgagggggtcacggtcacggtggcggccaagctggtgacggtggaggggccgcgcggtaagctcacccgcaacttcaagcacctcaacctcgacttccagctgcaggacggcggtcgcaagctcaaggtcgacgcctggtttggcacccgccgaaccatggccgccatccgcaccgccatctcccacgtccagaacctcatcgcaggcgtcaccaagggtttccgctacaagatgcggttcgtctacgctcactttcccatcaacgcctccatcaccaacgccaactccgccattgagatcagaaacttcctcggggagaagaaggtcaggaaggttgatatgcttgaaggtgtgaccatcttgcgttcagagaaggtcaaggatgagcttgttcttgaaggcaatgatgttgagcttgtctctcgctccgctgctctcataaaccagaaatgccatgtcaagaagaaggatatccggaagttcttggacggtatctatgtgagtgacaagggccccatctttgatgagcaatgagctgccctttgttcctggctagcaaaagccgtgttaggctgtggccagtagactgtttgcggagtggatgtagttggaaataggagatgggatgagtaaggttgctggagataagctttagcaagagtttatgagatggacctttattttgtgttgtgtttttttttgtttgagttcagttaactacatctttgcaagttggttggatctgaagttctgtactgtcttaggatgttattatgtaacccgaggtggacattgtttgtgatcatattcttcacctaagtacctc

SEQ ID NO: 25920 - protein, 242 aa, Zea mays subsp. mays
  peptide (1)..(242): Ceres Seq. ID no. 12403003
  misc_feature (150)..(229): Pfam Name: Pfam Description:  Ribosomal protein L6
  misc_feature (53)..(241): NCBI GI NO: 33087067 NR Description: ribosomal L9-like protein
  misc_feature (53)..(241): NCBI GI NO: 6174959 NR Description: 60S RIBOSOMAL PROTEIN L9
  misc_feature (53)..(242): NCBI GI NO: 266945 NR Description: 60S ribosomal protein L9
  misc_feature (53)..(242): NCBI GI NO: 6015604 NR Description: ribosomal protein L9 [Pisum sativum]
  misc_feature (53)..(242): NCBI GI NO: 18398753 NR Description: ribosomal protein L9, putative
  misc_feature (53)..(242): NCBI GI NO: 21554945 NR Description: ribosomal protein L9, putative
  misc_feature (53)..(242): NCBI GI NO: 15235114 NR Description: putative ribosomal protein L9, cytosolic
  misc_feature (53)..(242): NCBI GI NO: 2129720 NR Description: ribosomal protein L9
  misc_feature (53)..(241): NCBI GI NO: 21759393 NR Description: 60S ribosomal protein L9
  misc_feature (53)..(242): NCBI GI NO: 21759391 NR Description: 60S ribosomal protein L9
LSSHPTLTAAAAARRPFLYNKTSNRLSPVLPSTAAAAAVPPPPAQQPPPPPEMKTILATETMDIPEGVTVTVAAKLVTVEGPRGKLTRNFKHLNLDFQLQDGGRKLKVDAWFGTRRTMAAIRTAISHVQNLIAGVTKGFRYKMRFVYAHFPINASITNANSAIEIRNFLGEKKVRKVDMLEGVTILRSEKVKDELVLEGNDVELVSRSAALINQKCHVKKKDIRKFLDGIYVSDKGPIFDEQ

SEQ ID NO: 25921 - protein, 190 aa, Zea mays subsp. mays
  peptide (1)..(190): Ceres Seq. ID no. 12403004
  misc_feature (98)..(177): Pfam Name: Pfam Description:  Ribosomal protein L6
  misc_feature (1)..(189): NCBI GI NO: 33087067 NR Description: ribosomal L9-like protein
  misc_feature (1)..(189): NCBI GI NO: 6174959 NR Description: 60S RIBOSOMAL PROTEIN L9
  misc_feature (1)..(190): NCBI GI NO: 266945 NR Description: 60S ribosomal protein L9
  misc_feature (1)..(190): NCBI GI NO: 6015604 NR Description: ribosomal protein L9 [Pisum sativum]
  misc_feature (1)..(190): NCBI GI NO: 18398753 NR Description: ribosomal protein L9, putative
  misc_feature (1)..(190): NCBI GI NO: 21554945 NR Description: ribosomal protein L9, putative
  misc_feature (1)..(190): NCBI GI NO: 15235114 NR Description: putative ribosomal protein L9, cytosolic
  misc_feature (1)..(190): NCBI GI NO: 2129720 NR Description: ribosomal protein L9
  misc_feature (1)..(189): NCBI GI NO: 21759393 NR Description: 60S ribosomal protein L9
  misc_feature (1)..(190): NCBI GI NO: 21759391 NR Description: 60S ribosomal protein L9
MKTILATETMDIPEGVTVTVAAKLVTVEGPRGKLTRNFKHLNLDFQLQDGGRKLKVDAWFGTRRTMAAIRTAISHVQNLIAGVTKGFRYKMRFVYAHFPINASITNANSAIEIRNFLGEKKVRKVDMLEGVTILRSEKVKDELVLEGNDVELVSRSAALINQKCHVKKKDIRKFLDGIYVSDKGPIFDEQ

SEQ ID NO: 25922 - protein, 181 aa, Zea mays subsp. mays
  peptide (1)..(181): Ceres Seq. ID no. 12403005
  misc_feature (89)..(168): Pfam Name: Pfam Description:  Ribosomal protein L6
  misc_feature (1)..(180): NCBI GI NO: 33087067 NR Description: ribosomal L9-like protein
  misc_feature (1)..(180): NCBI GI NO: 6174959 NR Description: 60S RIBOSOMAL PROTEIN L9
  misc_feature (1)..(181): NCBI GI NO: 266945 NR Description: 60S ribosomal protein L9
  misc_feature (1)..(181): NCBI GI NO: 6015604 NR Description: ribosomal protein L9 [Pisum sativum]
  misc_feature (1)..(181): NCBI GI NO: 18398753 NR Description: ribosomal protein L9, putative
  misc_feature (1)..(181): NCBI GI NO: 21554945 NR Description: ribosomal protein L9, putative
  misc_feature (1)..(181): NCBI GI NO: 15235114 NR Description: putative ribosomal protein L9, cytosolic
  misc_feature (1)..(181): NCBI GI NO: 2129720 NR Description: ribosomal protein L9
  misc_feature (1)..(180): NCBI GI NO: 21759393 NR Description: 60S ribosomal protein L9
  misc_feature (1)..(181): NCBI GI NO: 21759391 NR Description: 60S ribosomal protein L9
MDIPEGVTVTVAAKLVTVEGPRGKLTRNFKHLNLDFQLQDGGRKLKVDAWFGTRRTMAAIRTAISHVQNLIAGVTKGFRYKMRFVYAHFPINASITNANSAIEIRNFLGEKKVRKVDMLEGVTILRSEKVKDELVLEGNDVELVSRSAALINQKCHVKKKDIRKFLDGIYVSDKGPIFDEQ

SEQ ID NO: 25923 - DNA, 1006 bp, Zea mays subsp. mays
  misc_feature (1)..(1006): Ceres Seq. ID no. 13495435
aaacatggaatggtagtgggggggtggtttcggatcgggactccacagcttttggcggcgtattctagtatacaccaaaaaagagaaagaaaagcaccgaaaaactagcaaaccctacctcctctcctcccctcccctcctcggcggcggaatgtccgaccgccgccgcgacaaggagaagccccgcgaccgcgacatcgaccgtcatcgcgaccgagaccgcgacatcgaccgtcatcgcgaccgagaccgcgaccgggaccgggacagggacagggacagggatcgcgagcgagaccaccgccgcgagcgcgagcgcgagcggaagcgctcccgctcccggtccccgtcggcggatcgggaccgctcccaccgccgccactctcattcgcaccgaggccgtccttccccctctcccgacgccggccgccacaagcgccgccgcgaggcgtcccctgcctccgcggaccatcaccataaggaggataagaaggctgccgactctcacgcgacacccggcggaggggacatcgcggccgcggccgctgcggtgggtgacggcgacgtgaatgcggaggaactggagatgatgaagatgatgggcattcccgtcggtttcgactccaccaaggggaagcacgtgcccgacgccgacgtcagcggggtgcgtgccgtcaccaagcgccagccgcgccagtacatgaaccgccgcggcggattcaaccgccctctgccgcctgagcgcaaccgctaaggatgggaaaaggatcatgcgccaacacaaggatgtgctgatttctgggtagcagttactctgttactggacagtgtagtgagcatgtataaaccttgatggctatttaatttgcaaaacactgtagaatgatttcccgttcccttttgtcatcgtttattctgtgggcattccaggaaaacagaatttggtggatcattttgaaactgtggctttacagctttaacatgatgtttctggctttctgcgtgc

SEQ ID NO: 25924 - protein, 200 aa, Zea mays subsp. mays
  peptide (1)..(200): Ceres Seq. ID no. 13495436
  misc_feature (4)..(117): Pfam Name: Pfam Description:  SART-1 family
  misc_feature (3)..(200): NCBI GI NO: 18423973 NR Description: expressed protein [Arabidopsis thaliana]
  misc_feature (3)..(200): NCBI GI NO: 21592725 NR Description: unknown [Arabidopsis thaliana]
  misc_feature (1)..(196): NCBI GI NO: 23478750 NR Description: cyclophilin-RNA interacting protein
  misc_feature (3)..(161): NCBI GI NO: 23482058 NR Description: hypothetical protein [Plasmodium yoelii yoelii]
  misc_feature (3)..(161): NCBI GI NO: 23479655 NR Description: eukaryotic translation initiation factor 3 subunit10
  misc_feature (8)..(198): NCBI GI NO: 40738944 NR Description: hypothetical protein AN6605.2
  misc_feature (3)..(117): NCBI GI NO: 23510137 NR Description: Plasmodium falciparum protein kinase, putative
  misc_feature (3)..(113): NCBI GI NO: 23508822 NR Description: eukaryotic translation initiation factor 3 subunit10
  misc_feature (30)..(194): NCBI GI NO: 34856367 NR Description: similar to putative nucleic acid binding proteinRY-1
  misc_feature (22)..(194): NCBI GI NO: 7513213 NR Description: nucleic acid binding protein - human (fragment)
MSDRRRDKEKPRDRDIDRHRDRDRDIDRHRDRDRDRDRDRDRDRDRERDHRRERERERKRSRSRSPSADRDRSHRRHSHSHRGRPSPSPDAGRHKRRREASPASADHHHKEDKKAADSHATPGGGDIAAAAAAVGDGDVNAEELEMMKMMGIPVGFDSTKGKHVPDADVSGVRAVTKRQPRQYMNRRGGFNRPLPPERNR

SEQ ID NO: 25925 - DNA, 985 bp, Zea mays subsp. mays
  misc_feature (1)..(985): Ceres Seq. ID no. 13495278
acagaagggcggagcagtgccagtgtactggccgccaccactcgccactcgtccccctccccccgaaagccggcacgagccctcccttcccttcctccaacctgttccgatccgccccgagccggctggccatggcgatcagggctggccgctcggccctccacctccacgctctcgctttcctcatcctcgccgcctccccctgcctccaagtccaagctctagtggaccatcgcaaacagatatctgactggggtaggcaacccaactttgaactgcagaatatgtcctcgagtcaaagggatggctctcatctcttgggcagatcaaaggaaataacacacaggaaactaagggtgagaattggtgtaaggaacaaaatggaagtagtgcagcaggatgatgaagcattagttaaacttgagaacacaggtattgaacgctcaaaagctgttgattctgcagtgctgggaaaatatagcatctggagacgtgaaaatgaaaatgagaaggcagattcaagggttcgtctgatgcgagatcaaatgatcatggccagaatatattctgttcttgccaaatctagggacaaacttgatctctatcaggagctgctagcaagactcaaggaaagccagcgctcccttggggaagctactgctgatgccgaacttccgaagagtgcttcagatagaatcaaagcaatgggccaagttttatcaaaagcaagggatctgttgtatgattgcaaggaaattacccagcgtttgagagcaatgcttcagtcagcagatgagcaggtccggagcttgaagaagcagagcaccttccttagccagcttgcagctaagacaatcccaaatggcatccattgtctttctatgcgcttaacaattgattattaccttctctctccagagaaaagaaagttccccaatagcgagaacttggaaaatcctgatctttaccattatgctcttttctc

SEQ ID NO: 25926 - protein, 327 aa, Zea mays subsp. mays
  peptide (1)..(327): Ceres Seq. ID no. 13495279
  misc_feature (93)..(326): NCBI GI NO: 14517362 NR Description: AT3g61130/T20K12_30 [Arabidopsis thaliana]
  misc_feature (93)..(326): NCBI GI NO: 15233046 NR Description: glycosyltransferase family 8
  misc_feature (87)..(326): NCBI GI NO: 7271113 NR Description: 68 kDa protein [Cicer arietinum]
  misc_feature (120)..(326): NCBI GI NO: 7485958 NR Description: hypothetical protein F22I13
  misc_feature (120)..(326): NCBI GI NO: 30691875 NR Description: glycosyltransferase family 8
  misc_feature (111)..(326): NCBI GI NO: 15227235 NR Description: glycosyltransferase family 8
  misc_feature (172)..(326): NCBI GI NO: 10177914 NR Description: emb|CAB71043
  misc_feature (172)..(326): NCBI GI NO: 18422837 NR Description: glycosyltransferase family 8
  misc_feature (105)..(326): NCBI GI NO: 37533460 NR Description: hypothetical protein
  misc_feature (172)..(326): NCBI GI NO: 38423965 NR Description: putative glycosyltransferase
RRAEQCQCTGRHHSPLVPLPPKAGTSPPFPSSNLFRSAPSRLAMAIRAGRSALHLHALAFLILAASPCLQVQALVDHRKQISDWGRQPNFELQNMSSSQRDGSHLLGRSKEITHRKLRVRIGVRNKMEVVQQDDEALVKLENTGIERSKAVDSAVLGKYSIWRRENENEKADSRVRLMRDQMIMARIYSVLAKSRDKLDLYQELLARLKESQRSLGEATADAELPKSASDRIKAMGQVLSKARDLLYDCKEITQRLRAMLQSADEQVRSLKKQSTFLSQLAAKTIPNGIHCLSMRLTIDYYLLSPEKRKFPNSENLENPDLYHYALF

SEQ ID NO: 25927 - protein, 284 aa, Zea mays subsp. mays
  peptide (1)..(284): Ceres Seq. ID no. 13495280
  misc_feature (50)..(283): NCBI GI NO: 14517362 NR Description: AT3g61130/T20K12_30 [Arabidopsis thaliana]
  misc_feature (50)..(283): NCBI GI NO: 15233046 NR Description: glycosyltransferase family 8
  misc_feature (44)..(283): NCBI GI NO: 7271113 NR Description: 68 kDa protein [Cicer arietinum]
  misc_feature (77)..(283): NCBI GI NO: 7485958 NR Description: hypothetical protein F22I13
  misc_feature (77)..(283): NCBI GI NO: 30691875 NR Description: glycosyltransferase family 8
  misc_feature (68)..(283): NCBI GI NO: 15227235 NR Description: glycosyltransferase family 8
  misc_feature (129)..(283): NCBI GI NO: 10177914 NR Description: emb|CAB71043
  misc_feature (129)..(283): NCBI GI NO: 18422837 NR Description: glycosyltransferase family 8
  misc_feature (62)..(283): NCBI GI NO: 37533460 NR Description: hypothetical protein
  misc_feature (129)..(283): NCBI GI NO: 38423965 NR Description: putative glycosyltransferase
MAIRAGRSALHLHALAFLILAASPCLQVQALVDHRKQISDWGRQPNFELQNMSSSQRDGSHLLGRSKEITHRKLRVRIGVRNKMEVVQQDDEALVKLENTGIERSKAVDSAVLGKYSIWRRENENEKADSRVRLMRDQMIMARIYSVLAKSRDKLDLYQELLARLKESQRSLGEATADAELPKSASDRIKAMGQVLSKARDLLYDCKEITQRLRAMLQSADEQVRSLKKQSTFLSQLAAKTIPNGIHCLSMRLTIDYYLLSPEKRKFPNSENLENPDLYHYALF

SEQ ID NO: 25928 - protein, 233 aa, Zea mays subsp. mays
  peptide (1)..(233): Ceres Seq. ID no. 13495281
  misc_feature (1)..(232): NCBI GI NO: 14517362 NR Description: AT3g61130/T20K12_30 [Arabidopsis thaliana]
  misc_feature (1)..(232): NCBI GI NO: 15233046 NR Description: glycosyltransferase family 8
  misc_feature (1)..(232): NCBI GI NO: 7271113 NR Description: 68 kDa protein [Cicer arietinum]
  misc_feature (26)..(232): NCBI GI NO: 7485958 NR Description: hypothetical protein F22I13
  misc_feature (26)..(232): NCBI GI NO: 30691875 NR Description: glycosyltransferase family 8
  misc_feature (17)..(232): NCBI GI NO: 15227235 NR Description: glycosyltransferase family 8
  misc_feature (78)..(232): NCBI GI NO: 10177914 NR Description: emb|CAB71043
  misc_feature (78)..(232): NCBI GI NO: 18422837 NR Description: glycosyltransferase family 8
  misc_feature (11)..(232): NCBI GI NO: 37533460 NR Description: hypothetical protein
  misc_feature (78)..(232): NCBI GI NO: 38423965 NR Description: putative glycosyltransferase
MSSSQRDGSHLLGRSKEITHRKLRVRIGVRNKMEVVQQDDEALVKLENTGIERSKAVDSAVLGKYSIWRRENENEKADSRVRLMRDQMIMARIYSVLAKSRDKLDLYQELLARLKESQRSLGEATADAELPKSASDRIKAMGQVLSKARDLLYDCKEITQRLRAMLQSADEQVRSLKKQSTFLSQLAAKTIPNGIHCLSMRLTIDYYLLSPEKRKFPNSENLENPDLYHYALF

SEQ ID NO: 25929 - DNA, 1233 bp, Zea mays subsp. mays
  misc_feature (1)..(1233): Ceres Seq. ID no. 12372784
ccgagtcgtcttcccgttgatcggcaaagagactttagggttttagcggcttctatttctgagcgagggtttatccgccaggggcggcgcgacgcggcggcagttgagctgggatttccttcccatcccgttcccttccaggcgaggcgatggacgaggcggcggtcgacgacctcatccggcggctcctcgaggcccgcggcgggcgcaccccgcgcaacgcgcaggtgaccgacgctgagatccggcgcctctgcgccgccgccaaggatgtgttcctctcccagcccaacctcctggagctcgaggcccccatcaagatatgcggggatgtccatggtcagtattcagaccttcttcgattatttgagtatggtggctatccaccagatgcaaattatctgttcctcggtgactatgttgatagggggaaacagagcatagaaacaatatgccttctcttggcatacaagataaagtacccagaaaacttctttcttctcaggggaaaccatgaatgcgcctcaatcaaccgaatatatgggttttttgatgagtgtaagaggagattcaatgttcgtatctggaagatattcaccgagtgttttaactgcctcccagtggctgcgcttattgatgacaagatcttttgcatgcatggagggttgtctcctgagctaaagagcatggaccaaatacgtaacatttctcgtcctgtggatgttcctgatgttggtctcctatgtgatctgttatggtcggaccctgataaggagattgataggtggggtgagaatgacaggggtgtttcctacacctttggagctgacgtagttgccgagtttcttcagaaacatgatctagatttgatctgcagggcccaccaggtcgtagaggatggttatgaatttttcgcaaaacgccagcttgtaacaatattctcagctccgaactactgtggagagttcgacaatgctggtgcactgatgagcattgacaactccctagtatgctcgttccagatactcaagccttctgagaagaaaggaaaagcaggaaatgggaacatgccaaagcccggtacacctcccaggaagataaaaataagtgttacccatatttagccaggttctcgctatcaatctgcatttgcgaagttgtgattaagtgctcccccaaacttgtggtagtttttttttttggtgagcttaacacgattttaaattgtggacc

SEQ ID NO: 25930 - protein, 324 aa, Zea mays subsp. mays
  peptide (1)..(324): Ceres Seq. ID no. 12372785
  misc_feature (54)..(249): Pfam Name: Pfam Description:  Calcineurin-like phosphoesterase
  misc_feature (1)..(317): NCBI GI NO: 7435131 NR Description: phosphoprotein phosphatase (EC 3
  misc_feature (1)..(316): NCBI GI NO: 18413493 NR Description: protein phosphatase type 1
  misc_feature (1)..(316): NCBI GI NO: 1346760 NR Description: Serine/threonine protein phosphatase PP1 isozyme 6
  misc_feature (1)..(316): NCBI GI NO: 1346763 NR Description: SERINE/THREONINE PROTEIN PHOSPHATASE PP1
  misc_feature (1)..(316): NCBI GI NO: 15222607 NR Description: phosphoprotein phosphatase-type 1 catalyticsubunit
  misc_feature (1)..(319): NCBI GI NO: 25752372 NR Description: phosphoprotein phosphatase (EC 3
  misc_feature (1)..(315): NCBI GI NO: 1346753 NR Description: SERINE/THREONINE PROTEIN PHOSPHATASE PP1 ISOZYME 2
  misc_feature (1)..(318): NCBI GI NO: 7435129 NR Description: phosphoprotein phosphatase (EC 3
  misc_feature (1)..(315): NCBI GI NO: 1346750 NR Description: SERINE/THREONINE PROTEIN PHOSPHATASE PP1 ISOZYME 1
  misc_feature (1)..(315): NCBI GI NO: 27884151 NR Description: SI:zC214P16
MDEAAVDDLIRRLLEARGGRTPRNAQVTDAEIRRLCAAAKDVFLSQPNLLELEAPIKICGDVHGQYSDLLRLFEYGGYPPDANYLFLGDYVDRGKQSIETICLLLAYKIKYPENFFLLRGNHECASINRIYGFFDECKRRFNVRIWKIFTECFNCLPVAALIDDKIFCMHGGLSPELKSMDQIRNISRPVDVPDVGLLCDLLWSDPDKEIDRWGENDRGVSYTFGADVVAEFLQKHDLDLICRAHQVVEDGYEFFAKRQLVTIFSAPNYCGEFDNAGALMSIDNSLVCSFQILKPSEKKGKAGNGNMPKPGTPPRKIKISVTHI

SEQ ID NO: 25931 - DNA, 506 bp, Zea mays subsp. mays
  misc_feature (1)..(506): Ceres Seq. ID no. 12637912
  misc_feature (420)..(420): n is a, c, t, g, unknown, or other
  misc_feature (419)..(419): n is a, c, t, g, unknown, or other
  misc_feature (418)..(418): n is a, c, t, g, unknown, or other
gttagggttattttttctactctgcctctgctctcacctgtttcgctgctcgcccgatctcgcgctgccggcagcgatctgagatcgagcgaagctaagctttttcatcgagatggcgcttgtactgcatgctaacagtggtaacaaaaatgcattcaaaacactaattgccgcagaatacagcggtgtcaaggttgagttggtgaaggactttcaaatgggtgtctcccacaaaactccagagttcctcaagatgaaccctattgggaagattcccgtcctggagactcctgatgatcctgtttttgagagcaatgcaattgcaagatatgttactcgcttgaaggctgataacccactttatggatcttcactgactgattatgcccatattgagcaatggattgactttgctgcnnnagagattgatgcaaacattggaaagtggttgtacccacggatggggttttatccccatgctggtgtggtagaagaatcaactattg

SEQ ID NO: 25932 - protein, 131 aa, Zea mays subsp. mays
  peptide (1)..(131): Ceres Seq. ID no. 13624424
  misc_feature (1)..(130): NCBI GI NO: 13626515 NR Description: Elongation factor 1-gamma
  misc_feature (10)..(130): NCBI GI NO: 29367403 NR Description: elongation factor 1 gamma-like protein
  misc_feature (4)..(130): NCBI GI NO: 29367381 NR Description: elongation factor 1 gamma-like protein
  misc_feature (1)..(130): NCBI GI NO: 13626392 NR Description: Elongation factor 1-gamma
  misc_feature (3)..(130): NCBI GI NO: 18958499 NR Description: elongation factor 1-gamma [Glycine max]
  misc_feature (1)..(130): NCBI GI NO: 14334818 NR Description: putative elongation factor 1B gamma
  misc_feature (1)..(130): NCBI GI NO: 15223649 NR Description: elongation factor 1B-gamma, putative
  misc_feature (1)..(130): NCBI GI NO: 18391048 NR Description: elongation factor 1B-gamma, putative
  misc_feature (2)..(122): NCBI GI NO: 26379842 NR Description: unnamed protein product [Mus musculus]
  misc_feature (5)..(118): NCBI GI NO: 119164 NR Description: Elongation factor 1-gamma
  misc_feature (102)..(102): Xaa is any aa, unknown or other
  misc_feature (103)..(103): Xaa is any aa, unknown or other
MALVLHANSGNKNAFKTLIAAEYSGVKVELVKDFQMGVSHKTPEFLKMNPIGKIPVLETPDDPVFESNAIARYVTRLKADNPLYGSSLTDYAHIEQWIDFAXXEIDANIGKWLYPRMGFYPHAGVVEESTI

SEQ ID NO: 25933 - protein, 96 aa, Zea mays subsp. mays
  peptide (1)..(96): Ceres Seq. ID no. 13624425
  misc_feature (1)..(95): NCBI GI NO: 13626515 NR Description: Elongation factor 1-gamma
  misc_feature (1)..(95): NCBI GI NO: 29367403 NR Description: elongation factor 1 gamma-like protein
  misc_feature (1)..(95): NCBI GI NO: 29367381 NR Description: elongation factor 1 gamma-like protein
  misc_feature (1)..(95): NCBI GI NO: 13626392 NR Description: Elongation factor 1-gamma
  misc_feature (1)..(95): NCBI GI NO: 18958499 NR Description: elongation factor 1-gamma [Glycine max]
  misc_feature (1)..(95): NCBI GI NO: 14334818 NR Description: putative elongation factor 1B gamma
  misc_feature (1)..(95): NCBI GI NO: 15223649 NR Description: elongation factor 1B-gamma, putative
  misc_feature (1)..(95): NCBI GI NO: 18391048 NR Description: elongation factor 1B-gamma, putative
  misc_feature (1)..(87): NCBI GI NO: 26379842 NR Description: unnamed protein product [Mus musculus]
  misc_feature (1)..(83): NCBI GI NO: 119164 NR Description: Elongation factor 1-gamma
  misc_feature (67)..(67): Xaa is any aa, unknown or other
  misc_feature (68)..(68): Xaa is any aa, unknown or other
MGVSHKTPEFLKMNPIGKIPVLETPDDPVFESNAIARYVTRLKADNPLYGSSLTDYAHIEQWIDFAXXEIDANIGKWLYPRMGFYPHAGVVEESTI

SEQ ID NO: 25934 - protein, 84 aa, Zea mays subsp. mays
  peptide (1)..(84): Ceres Seq. ID no. 13624426
  misc_feature (1)..(83): NCBI GI NO: 13626515 NR Description: Elongation factor 1-gamma
  misc_feature (1)..(83): NCBI GI NO: 29367403 NR Description: elongation factor 1 gamma-like protein
  misc_feature (1)..(83): NCBI GI NO: 29367381 NR Description: elongation factor 1 gamma-like protein
  misc_feature (1)..(83): NCBI GI NO: 13626392 NR Description: Elongation factor 1-gamma
  misc_feature (1)..(83): NCBI GI NO: 18958499 NR Description: elongation factor 1-gamma [Glycine max]
  misc_feature (1)..(83): NCBI GI NO: 14334818 NR Description: putative elongation factor 1B gamma
  misc_feature (1)..(83): NCBI GI NO: 15223649 NR Description: elongation factor 1B-gamma, putative
  misc_feature (1)..(83): NCBI GI NO: 18391048 NR Description: elongation factor 1B-gamma, putative
  misc_feature (1)..(75): NCBI GI NO: 26379842 NR Description: unnamed protein product [Mus musculus]
  misc_feature (1)..(71): NCBI GI NO: 119164 NR Description: Elongation factor 1-gamma
  misc_feature (55)..(55): Xaa is any aa, unknown or other
  misc_feature (56)..(56): Xaa is any aa, unknown or other
MNPIGKIPVLETPDDPVFESNAIARYVTRLKADNPLYGSSLTDYAHIEQWIDFAXXEIDANIGKWLYPRMGFYPHAGVVEESTI

SEQ ID NO: 25935 - DNA, 1454 bp, Zea mays subsp. mays
  misc_feature (1)..(1454): Ceres Seq. ID no. 12409971
aagagctaagagggaagaacaatcgagctactaataaggtcgtatacatatcttctatatactcctctgaaagttgtgaactccggtcgagcttaaaaacagcagcaatggcgaagctttggacattgctgctggctgcagtggtggtcctctcactcctagtgagccccattgcttgcacccgaaagctcaacaaacccaagccgaagccgggcagctacaggcggccggtcaagccgaagccaaaaccggtcacgggcagctacaagccggcgcctgtggccgccagaagaaaccacacagctacacccacgccatcgccgactgtctacggccccggtggctggctgtcaggcgccggcgccacgtactacggcgcgaccaacggcgacgggagcgacggcggcgcgtgcggctaccagacggccgtcggaaagaagccattcgactcgatgatcgccgccgggagcacgccactgtacaggggaggcgagggctgcggcgcctgctacgaggtgaaatgcacgaccaacgccgcgtgctccggccagcccgtgaccatcgtaatcaccgaccagtcccctggcgggctgttccccggcgaggtcgagcactttgacatgagcggcaccgccatgggcgccatggcccggcccggcatggccgacaagctccgcgctggcggcgtgctcaggatcctgtacaggagggtgccgtgcaagtacaccggcgtcaacatcgcgttcaaggtggatcagggcgcgaacccgtactacttcgacgtgctcatcgagttcgaggacgacgacggcgacctcagcgccgtggacctcatggaggccggcagcggcgtctggactcctatggcgcacaactggggcgccacgtggcgcctcaacaacggcaggaagctcaaagcgccgttcgggctccggctcacctccgactcccgcagggtgctcgtcgccaacaacgccatcccggccgcgtggaagcccggcaagacctaccgctccttggtcaactacccctgaaaagagaaataccgacaagtggatggcgtgtattgtgcgtccgggtgttgcgagtggcggcggtgtactactggtgtcggaaaacagaagagaatgaaagaggaggttgaagaagagaataatgtccttcttccctccctggacggtctctgcagtccccaaaagtgatgtgtgacggtgttagtcaaatcatgccggtaatttgatacttcatctcgatttgagttttactgctatactactgtgattgaggtaagacagaatcttatttcttgaccacgtagtacataaactacaaagcatgcccgttgcgttggtaattagactcttgtagtggtttttgccaatatcaagatgtatgtagaatgtgtgtgcatgcgttcacagtgatgagaatatacatgcgtgtatctgatcctg

SEQ ID NO: 25936 - protein, 343 aa, Zea mays subsp. mays
  peptide (1)..(343): Ceres Seq. ID no. 12409972
  misc_feature (246)..(327): Pfam Name: Pfam Description:  Pollen allergen
  misc_feature (36)..(343): NCBI GI NO: 14193767 NR Description: beta-expansin 4 [Zea mays]
  misc_feature (84)..(343): NCBI GI NO: 40363749 NR Description: putative beta-expansin [Triticum aestivum]
  misc_feature (74)..(342): NCBI GI NO: 16517013 NR Description: beta-expansin [Oryza sativa]
  misc_feature (92)..(342): NCBI GI NO: 16303229 NR Description: beta-expansin 5 [Oryza sativa]
  misc_feature (92)..(342): NCBI GI NO: 8118428 NR Description: beta-expansin [Oryza sativa]
  misc_feature (115)..(342): NCBI GI NO: 21666630 NR Description: beta-expansin [Oryza sativa]
  misc_feature (91)..(342): NCBI GI NO: 34101047 NR Description: beta-expansin 1 precursor [Hordeum vulgare]
  misc_feature (114)..(337): NCBI GI NO: 16303233 NR Description: beta-expansin [Oryza sativa]
  misc_feature (114)..(337): NCBI GI NO: 16517017 NR Description: beta-expansin [Oryza sativa]
  misc_feature (40)..(342): NCBI GI NO: 8118432 NR Description: beta-expansin [Oryza sativa]
ELRGKNNRATNKVVYISSIYSSESCELRSSLKTAAMAKLWTLLLAAVVVLSLLVSPIACTRKLNKPKPKPGSYRRPVKPKPKPVTGSYKPAPVAARRNHTATPTPSPTVYGPGGWLSGAGATYYGATNGDGSDGGACGYQTAVGKKPFDSMIAAGSTPLYRGGEGCGACYEVKCTTNAACSGQPVTIVITDQSPGGLFPGEVEHFDMSGTAMGAMARPGMADKLRAGGVLRILYRRVPCKYTGVNIAFKVDQGANPYYFDVLIEFEDDDGDLSAVDLMEAGSGVWTPMAHNWGATWRLNNGRKLKAPFGLRLTSDSRRVLVANNAIPAAWKPGKTYRSLVNYP

SEQ ID NO: 25937 - protein, 308 aa, Zea mays subsp. mays
  peptide (1)..(308): Ceres Seq. ID no. 12409973
  misc_feature (211)..(292): Pfam Name: Pfam Description:  Pollen allergen
  misc_feature (1)..(308): NCBI GI NO: 14193767 NR Description: beta-expansin 4 [Zea mays]
  misc_feature (49)..(308): NCBI GI NO: 40363749 NR Description: putative beta-expansin [Triticum aestivum]
  misc_feature (39)..(307): NCBI GI NO: 16517013 NR Description: beta-expansin [Oryza sativa]
  misc_feature (57)..(307): NCBI GI NO: 16303229 NR Description: beta-expansin 5 [Oryza sativa]
  misc_feature (57)..(307): NCBI GI NO: 8118428 NR Description: beta-expansin [Oryza sativa]
  misc_feature (80)..(307): NCBI GI NO: 21666630 NR Description: beta-expansin [Oryza sativa]
  misc_feature (56)..(307): NCBI GI NO: 34101047 NR Description: beta-expansin 1 precursor [Hordeum vulgare]
  misc_feature (79)..(302): NCBI GI NO: 16303233 NR Description: beta-expansin [Oryza sativa]
  misc_feature (79)..(302): NCBI GI NO: 16517017 NR Description: beta-expansin [Oryza sativa]
  misc_feature (5)..(307): NCBI GI NO: 8118432 NR Description: beta-expansin [Oryza sativa]
MAKLWTLLLAAVVVLSLLVSPIACTRKLNKPKPKPGSYRRPVKPKPKPVTGSYKPAPVAARRNHTATPTPSPTVYGPGGWLSGAGATYYGATNGDGSDGGACGYQTAVGKKPFDSMIAAGSTPLYRGGEGCGACYEVKCTTNAACSGQPVTIVITDQSPGGLFPGEVEHFDMSGTAMGAMARPGMADKLRAGGVLRILYRRVPCKYTGVNIAFKVDQGANPYYFDVLIEFEDDDGDLSAVDLMEAGSGVWTPMAHNWGATWRLNNGRKLKAPFGLRLTSDSRRVLVANNAIPAAWKPGKTYRSLVNYP

SEQ ID NO: 25938 - protein, 193 aa, Zea mays subsp. mays
  peptide (1)..(193): Ceres Seq. ID no. 12409974
  misc_feature (96)..(177): Pfam Name: Pfam Description:  Pollen allergen
  misc_feature (1)..(193): NCBI GI NO: 14193767 NR Description: beta-expansin 4 [Zea mays]
  misc_feature (1)..(193): NCBI GI NO: 40363749 NR Description: putative beta-expansin [Triticum aestivum]
  misc_feature (1)..(192): NCBI GI NO: 16517013 NR Description: beta-expansin [Oryza sativa]
  misc_feature (1)..(192): NCBI GI NO: 16303229 NR Description: beta-expansin 5 [Oryza sativa]
  misc_feature (1)..(192): NCBI GI NO: 8118428 NR Description: beta-expansin [Oryza sativa]
  misc_feature (1)..(192): NCBI GI NO: 21666630 NR Description: beta-expansin [Oryza sativa]
  misc_feature (1)..(192): NCBI GI NO: 34101047 NR Description: beta-expansin 1 precursor [Hordeum vulgare]
  misc_feature (1)..(187): NCBI GI NO: 16303233 NR Description: beta-expansin [Oryza sativa]
  misc_feature (1)..(187): NCBI GI NO: 16517017 NR Description: beta-expansin [Oryza sativa]
  misc_feature (1)..(192): NCBI GI NO: 8118432 NR Description: beta-expansin [Oryza sativa]
MIAAGSTPLYRGGEGCGACYEVKCTTNAACSGQPVTIVITDQSPGGLFPGEVEHFDMSGTAMGAMARPGMADKLRAGGVLRILYRRVPCKYTGVNIAFKVDQGANPYYFDVLIEFEDDDGDLSAVDLMEAGSGVWTPMAHNWGATWRLNNGRKLKAPFGLRLTSDSRRVLVANNAIPAAWKPGKTYRSLVNYP

SEQ ID NO: 25939 - DNA, 1895 bp, Zea mays subsp. mays
  misc_feature (1)..(1895): Ceres Seq. ID no. 12409967
accctcataccacactcaaactcgcatcctgtggagtttttacatagaagtcgtcacttattgcgccgtggtggatgggcagggggctcgtgtcgaacactcgaacagaaccaccgccattctagaggcatccagtattccagcccaatcctatctttgtattcctctccctcgtctcggaagtctggttcgccgaacagtcccgaacccccgattcactgccgctgccccgtctcgtcctcttcgccagcgaaaaccctagtctaggggacgggagcgcaatccacgcacggcaacatggacgccatccgcaagcagctcgaccagctcatgggggccaaccgcaacggcgatgtacgggaggtcagccgcaagtactatgatcgcgacgtctgccgcctctacctcgccggcctctgcccccacgacctcttccagcttaccaagatggacatgggcccgtgcccgaagctgcactcgctgcaactgcgcaaagaatatgaagaagccaaagccaaagattcagagagcccttaagcggttggaggaagaggatgctaaggcagctattgctatttctgttactgaggttacacagactaaagaagtaatggagttatccaaacaaattaggcagaagatgaaggatattgatgcttttgatcttgagggtaacaccgaggggaaaattcgggccactgaagaacttgacaagctaaaagaacaaagggcagaagagcaggcaaagatgttacttgaagctttcaacaaagaccgtgcttctttaataaactctcttcaaaatgccactcaaacaactacacctgtcccccctgctgctccggatgcacggacacaagaaatgataaacgagaaactgaaaaaggcagaagaactaggtgagaatgggatggttgatgaagcccaaaaattgttggatgaggcggaagctctgaagaagctggccacccgaccacaggctgttccagactctacaaaaatgagcgctcatgtccagataactgaccaaaagctgcgcctgtgtgacatatgtggagcattcttgagcgtatatgacagtgaccgtcgcttggcagatcattttggagggaaacttcatatgggttatatgcttatacgtgagagattgtctgaactgcaggaagagaagaacaaaaaacggaagctagaccgagctgagtatgacagaaggtccagggaaaggagcggggaacgtgccagggattcgagcagggatcgctacatagaccgcagcagcagccgtgacagggagtatgaccgcagaagaagccatgatcgctaccatgacagggaaagagagagagattccaggcagtctcgtagttatgattccagaagccaccgcaggtcatattcaccaaggggaagttctagggattatgatcgatctgggcgtcatgaacgccgtgatcggtactaggagcaaggaagcctccttgaaatttagggtactagattgcgttgcctcagggctagtttggccacctcatttttccaaggattgacaaccttatttttttaagggatttctattttcctaagaaaaattagttcattttcccctgggagggaataccttggggaaatggaggtgccaaactagcctaagtgttgttcgggaattctaagagggggcttaggtccaactggagaaaggcatcagctctttgcattataactaagggataggatctgacgtaatctatgcgtatcatattgttgtgttagctggtgttcatcgtgtaaacacaatgtggtggcgacgtgtcatgctttaatacgcttatatgcatttgaattaagttaatctgcccttgccatgtgtcttttattctggtaataagtttgtactc

SEQ ID NO: 25940 - protein, 369 aa, Zea mays subsp. mays
  peptide (1)..(369): Ceres Seq. ID no. 12409968
  misc_feature (56)..(313): Pfam Name: Pfam Description:  LUC7 N_terminus
  misc_feature (56)..(365): NCBI GI NO: 18418301 NR Description: putative protein; protein id: At5g17440
  misc_feature (56)..(359): NCBI GI NO: 29367401 NR Description: sarcoplasmic reticulum protein-like protein
  misc_feature (56)..(369): NCBI GI NO: 30678827 NR Description: expressed protein [Arabidopsis thaliana]
  misc_feature (41)..(369): NCBI GI NO: 6017114 NR Description: unknown protein [Arabidopsis thaliana]
  misc_feature (56)..(365): NCBI GI NO: 11357938 NR Description: hypothetical protein K3M16_10 - Arabidopsisthaliana
  misc_feature (56)..(369): NCBI GI NO: 21595481 NR Description: unknown [Arabidopsis thaliana]
  misc_feature (113)..(368): NCBI GI NO: 33604140 NR Description: LUC7-like 2 [Mus musculus]
  misc_feature (113)..(368): NCBI GI NO: 20373167 NR Description: CGI-74-like SR-rich [Mus musculus]
  misc_feature (113)..(368): NCBI GI NO: 7022826 NR Description: unnamed protein product [Homo sapiens]
  misc_feature (113)..(368): NCBI GI NO: 7022757 NR Description: unnamed protein product [Homo sapiens]
MYGRSAASTMIATSAASTSPASAPTTSSSLPRWTWARARSCTRCNCAKNMKKPKPKIQRALKRLEEEDAKAAIAISVTEVTQTKEVMELSKQIRQKMKDIDAFDLEGNTEGKIRATEELDKLKEQRAEEQAKMLLEAFNKDRASLINSLQNATQTTTPVPPAAPDARTQEMINEKLKKAEELGENGMVDEAQKLLDEAEALKKLATRPQAVPDSTKMSAHVQITDQKLRLCDICGAFLSVYDSDRRLADHFGGKLHMGYMLIRERLSELQEEKNKKRKLDRAEYDRRSRERSGERARDSSRDRYIDRSSSRDREYDRRRSHDRYHDRERERDSRQSRSYDSRSHRRSYSPRGSSRDYDRSGRHERRDRY

SEQ ID NO: 25941 - protein, 360 aa, Zea mays subsp. mays
  peptide (1)..(360): Ceres Seq. ID no. 12409969
  misc_feature (47)..(304): Pfam Name: Pfam Description:  LUC7 N_terminus
  misc_feature (47)..(356): NCBI GI NO: 18418301 NR Description: putative protein; protein id: At5g17440
  misc_feature (47)..(350): NCBI GI NO: 29367401 NR Description: sarcoplasmic reticulum protein-like protein
  misc_feature (47)..(360): NCBI GI NO: 30678827 NR Description: expressed protein [Arabidopsis thaliana]
  misc_feature (32)..(360): NCBI GI NO: 6017114 NR Description: unknown protein [Arabidopsis thaliana]
  misc_feature (47)..(356): NCBI GI NO: 11357938 NR Description: hypothetical protein K3M16_10 - Arabidopsisthaliana
  misc_feature (47)..(360): NCBI GI NO: 21595481 NR Description: unknown [Arabidopsis thaliana]
  misc_feature (104)..(359): NCBI GI NO: 33604140 NR Description: LUC7-like 2 [Mus musculus]
  misc_feature (104)..(359): NCBI GI NO: 20373167 NR Description: CGI-74-like SR-rich [Mus musculus]
  misc_feature (104)..(359): NCBI GI NO: 7022826 NR Description: unnamed protein product [Homo sapiens]
  misc_feature (104)..(359): NCBI GI NO: 7022757 NR Description: unnamed protein product [Homo sapiens]
MIATSAASTSPASAPTTSSSLPRWTWARARSCTRCNCAKNMKKPKPKIQRALKRLEEEDAKAAIAISVTEVTQTKEVMELSKQIRQKMKDIDAFDLEGNTEGKIRATEELDKLKEQRAEEQAKMLLEAFNKDRASLINSLQNATQTTTPVPPAAPDARTQEMINEKLKKAEELGENGMVDEAQKLLDEAEALKKLATRPQAVPDSTKMSAHVQITDQKLRLCDICGAFLSVYDSDRRLADHFGGKLHMGYMLIRERLSELQEEKNKKRKLDRAEYDRRSRERSGERARDSSRDRYIDRSSSRDREYDRRRSHDRYHDRERERDSRQSRSYDSRSHRRSYSPRGSSRDYDRSGRHERRDRY

SEQ ID NO: 25942 - protein, 320 aa, Zea mays subsp. mays
  peptide (1)..(320): Ceres Seq. ID no. 12409970
  misc_feature (7)..(264): Pfam Name: Pfam Description:  LUC7 N_terminus
  misc_feature (7)..(316): NCBI GI NO: 18418301 NR Description: putative protein; protein id: At5g17440
  misc_feature (7)..(310): NCBI GI NO: 29367401 NR Description: sarcoplasmic reticulum protein-like protein
  misc_feature (7)..(320): NCBI GI NO: 30678827 NR Description: expressed protein [Arabidopsis thaliana]
  misc_feature (1)..(320): NCBI GI NO: 6017114 NR Description: unknown protein [Arabidopsis thaliana]
  misc_feature (7)..(316): NCBI GI NO: 11357938 NR Description: hypothetical protein K3M16_10 - Arabidopsisthaliana
  misc_feature (7)..(320): NCBI GI NO: 21595481 NR Description: unknown [Arabidopsis thaliana]
  misc_feature (64)..(319): NCBI GI NO: 33604140 NR Description: LUC7-like 2 [Mus musculus]
  misc_feature (64)..(319): NCBI GI NO: 20373167 NR Description: CGI-74-like SR-rich [Mus musculus]
  misc_feature (64)..(319): NCBI GI NO: 7022826 NR Description: unnamed protein product [Homo sapiens]
  misc_feature (64)..(319): NCBI GI NO: 7022757 NR Description: unnamed protein product [Homo sapiens]
MKKPKPKIQRALKRLEEEDAKAAIAISVTEVTQTKEVMELSKQIRQKMKDIDAFDLEGNTEGKIRATEELDKLKEQRAEEQAKMLLEAFNKDRASLINSLQNATQTTTPVPPAAPDARTQEMINEKLKKAEELGENGMVDEAQKLLDEAEALKKLATRPQAVPDSTKMSAHVQITDQKLRLCDICGAFLSVYDSDRRLADHFGGKLHMGYMLIRERLSELQEEKNKKRKLDRAEYDRRSRERSGERARDSSRDRYIDRSSSRDREYDRRRSHDRYHDRERERDSRQSRSYDSRSHRRSYSPRGSSRDYDRSGRHERRDRY

SEQ ID NO: 25943 - DNA, 770 bp, Zea mays subsp. mays
  misc_feature (1)..(770): Ceres Seq. ID no. 12348995
attgcacccttggctcctactcactctctctccccatccgcgccagtccaaccaagtcagcacccgcgcgcggcaaggagttcacgcccatggcgagcaccaacatggcgtcggccacctcgcggttcatgctggccgcgggcgtgcccaccgccagtagcggcagcggccgcgtcagcttcgcctcggcgcccaaccggcttggcaggaggcttgtggtccgggccgatgaggagtccccggcagagccggcgccgacggcggaaggggagggcgccgtggccaccaagcccaaggccgagaagccgccgccgatcgggcccaagagaggcgccaaggtgaagatcctgaggcgggagtcctactggtacaacgggatcggcaacgtcgtcaccgtcgatcaggatcctaacacccgttacccggtggtggtgcggttcaacaaggtgaactacgccggcgtgtctaccaacaactacgccttggacgagatcctcgaggtgaaatgagtgaggccagtctgctcaaggaccccatgctcctgtgtgatttgtagttgtgaagtgaggctgctgcctagctgctacgttagctgctagcgtcacaacatcaatcttgtaatagcttaatctccacaatcatcatgtaatttattgcatgcttcattcaccgtggactcaataatctctcttgctctaaaatcgatgtattcgtttttcttgtgattttgtacatgcacataaatttctctctggaaacattgtttgtgc

SEQ ID NO: 25944 - protein, 168 aa, Zea mays subsp. mays
  peptide (1)..(168): Ceres Seq. ID no. 12348996
  misc_feature (107)..(167): Pfam Name: Pfam Description:  Photosystem I reaction centre subunit IV / PsaE
  misc_feature (30)..(167): NCBI GI NO: 131176 NR Description: Photosystem I reaction center subunit IV
  misc_feature (30)..(168): NCBI GI NO: 34394725 NR Description: putative Photosystem I reaction center subunit IV
  misc_feature (30)..(168): NCBI GI NO: 2499967 NR Description: Photosystem I reaction center subunit IV B
  misc_feature (30)..(168): NCBI GI NO: 2499966 NR Description: Photosystem I reaction center subunit IV A
  misc_feature (30)..(168): NCBI GI NO: 26986114 NR Description: putative photosystem I reaction centre subunit IV
  misc_feature (30)..(168): NCBI GI NO: 7443145 NR Description: photosystem I chain IV - wood tobacco
  misc_feature (35)..(167): NCBI GI NO: 24030202 NR Description: putative photosystem I subunit PSI-E protein
  misc_feature (35)..(167): NCBI GI NO: 30688100 NR Description: photosystem I subunit PSI-E - like protein
  misc_feature (35)..(168): NCBI GI NO: 15225331 NR Description: putative photosystem I reaction center subunit IV
  misc_feature (35)..(168): NCBI GI NO: 21555308 NR Description: Photosystem I reaction center subunit IV B
CTLGSYSLSLPIRASPTKSAPARGKEFTPMASTNMASATSRFMLAAGVPTASSGSGRVSFASAPNRLGRRLVVRADEESPAEPAPTAEGEGAVATKPKAEKPPPIGPKRGAKVKILRRESYWYNGIGNVVTVDQDPNTRYPVVVRFNKVNYAGVSTNNYALDEILEVK

SEQ ID NO: 25945 - protein, 139 aa, Zea mays subsp. mays
  peptide (1)..(139): Ceres Seq. ID no. 12348997
  misc_feature (78)..(138): Pfam Name: Pfam Description:  Photosystem I reaction centre subunit IV / PsaE
  misc_feature (1)..(138): NCBI GI NO: 131176 NR Description: Photosystem I reaction center subunit IV
  misc_feature (1)..(139): NCBI GI NO: 34394725 NR Description: putative Photosystem I reaction center subunit IV
  misc_feature (1)..(139): NCBI GI NO: 2499967 NR Description: Photosystem I reaction center subunit IV B
  misc_feature (1)..(139): NCBI GI NO: 2499966 NR Description: Photosystem I reaction center subunit IV A
  misc_feature (1)..(139): NCBI GI NO: 26986114 NR Description: putative photosystem I reaction centre subunit IV
  misc_feature (1)..(139): NCBI GI NO: 7443145 NR Description: photosystem I chain IV - wood tobacco
  misc_feature (6)..(138): NCBI GI NO: 24030202 NR Description: putative photosystem I subunit PSI-E protein
  misc_feature (6)..(138): NCBI GI NO: 30688100 NR Description: photosystem I subunit PSI-E - like protein
  misc_feature (6)..(139): NCBI GI NO: 15225331 NR Description: putative photosystem I reaction center subunit IV
  misc_feature (6)..(139): NCBI GI NO: 21555308 NR Description: Photosystem I reaction center subunit IV B
MASTNMASATSRFMLAAGVPTASSGSGRVSFASAPNRLGRRLVVRADEESPAEPAPTAEGEGAVATKPKAEKPPPIGPKRGAKVKILRRESYWYNGIGNVVTVDQDPNTRYPVVVRFNKVNYAGVSTNNYALDEILEVK

SEQ ID NO: 25946 - protein, 134 aa, Zea mays subsp. mays
  peptide (1)..(134): Ceres Seq. ID no. 12348998
  misc_feature (73)..(133): Pfam Name: Pfam Description:  Photosystem I reaction centre subunit IV / PsaE
  misc_feature (1)..(133): NCBI GI NO: 131176 NR Description: Photosystem I reaction center subunit IV
  misc_feature (1)..(134): NCBI GI NO: 34394725 NR Description: putative Photosystem I reaction center subunit IV
  misc_feature (1)..(134): NCBI GI NO: 2499967 NR Description: Photosystem I reaction center subunit IV B
  misc_feature (1)..(134): NCBI GI NO: 2499966 NR Description: Photosystem I reaction center subunit IV A
  misc_feature (1)..(134): NCBI GI NO: 26986114 NR Description: putative photosystem I reaction centre subunit IV
  misc_feature (1)..(134): NCBI GI NO: 7443145 NR Description: photosystem I chain IV - wood tobacco
  misc_feature (1)..(133): NCBI GI NO: 24030202 NR Description: putative photosystem I subunit PSI-E protein
  misc_feature (1)..(133): NCBI GI NO: 30688100 NR Description: photosystem I subunit PSI-E - like protein
  misc_feature (1)..(134): NCBI GI NO: 15225331 NR Description: putative photosystem I reaction center subunit IV
  misc_feature (1)..(134): NCBI GI NO: 21555308 NR Description: Photosystem I reaction center subunit IV B
MASATSRFMLAAGVPTASSGSGRVSFASAPNRLGRRLVVRADEESPAEPAPTAEGEGAVATKPKAEKPPPIGPKRGAKVKILRRESYWYNGIGNVVTVDQDPNTRYPVVVRFNKVNYAGVSTNNYALDEILEVK

SEQ ID NO: 25947 - DNA, 1320 bp, Zea mays subsp. mays
  misc_feature (1)..(1320): Ceres Seq. ID no. 12381241
ctgcaagaatggatcgcgagacccaagtagagtagaccaaagacaaaggaaagcgagggccaccatcccccaaacccgtgagaaatcgaatcgagaagggaagagcacgcgccgtcgccagcaccgcgtccgccatggccgcctcctccccccgcgcgttgcaatcgctggggtccgccgcctcccgcttcctccacgcgcggggcttcgccgcggcggccgccgccgcgccctcgccggcggtcttcgtcgacaagagcacccgcgtgatctgtcagggcatcacggggaagaacggcaccttccacaccgagcaggccatcgagtacggcaccaacatggttggtggagtgactcctaagaaaggtggaactgaacatttagggctcccagtgtttaactctgtagcagaagctaaggctgaaacaaaagccaatgcaactgttatatatgttccaccaccatttgccgccgccgctataatggaggcaatggaggctgagctcgaccttgccgtctgcattacagaaggaatacctcagcatgacatggtgaaagtgaaggctgcactaaacagccagtctaaaactcgattgattgggccaaattgccctggtatcattaagcctggtgagtgtaaaattggaatcatgccaggttacatccacaagcctgggcgtattgggatcgtatctcgttctggtactttgacatatgaagcggtgtttcaaacaacagctgtaggattgggtcagtcaacttgtgtaggcattggtggtgacccgttcaacggcacaaattttgttgattgccttgaaaagttcgttaacgaccctcagacagaaggtattgttctcattggtgaaattggaggtacggctgaggaggatgctgcgacattcatccaggaaagcaaaacacaaaagcctgttgttgcattcattgctggacttacggcacccccgggccgtcgcatgggtcatgctggagctatcgtggcaggaggaaagggtactgcccaggacaaaatcaaggcactcagagaggcaggtgttaccgttgtcgagtcaccagcgaagattggctctaccatgtttgaaatcttcaagcagcgtggaatggtagaatagacgatggtacagtagagacattgagaaaccgcattttgatgctcatgggcaattgcgagcaattccttccatggcctcaaacaaaactaatgaggctaccttttcttacgtgccttctgtttggaagatggcctgacttcacctggatcaccttccaatgagctcatttccaataagacgtttcagagtc

SEQ ID NO: 25948 - protein, 331 aa, Zea mays subsp. mays
  peptide (1)..(331): Ceres Seq. ID no. 12381242
  misc_feature (38)..(149): Pfam Name: Pfam Description:  CoA binding domain
  misc_feature (1)..(331): NCBI GI NO: 34393512 NR Description: putative succinyl-CoA ligase alpha subunit
  misc_feature (31)..(330): NCBI GI NO: 27357175 NR Description: succinyl-CoA ligase alpha subunit
  misc_feature (33)..(331): NCBI GI NO: 15237260 NR Description: succinyl-CoA synthetase, alpha subunit
  misc_feature (1)..(331): NCBI GI NO: 15241592 NR Description: succinyl-CoA-ligase alpha subunit
  misc_feature (33)..(331): NCBI GI NO: 21593483 NR Description: succinyl-CoA synthetase, alpha subunit
  misc_feature (37)..(331): NCBI GI NO: 1076415 NR Description: succinate-CoA ligase (GDP-forming) (EC 6
  misc_feature (22)..(320): NCBI GI NO: 1711574 NR Description: SUCCINYL-COA LIGASE
  misc_feature (1)..(330): NCBI GI NO: 2258465 NR Description: succinyl-CoA synthetase alpha subunit [Sus scrofa]
  misc_feature (37)..(330): NCBI GI NO: 4104377 NR Description: ATP-specific succinyl-CoA synthetase alpha subunit
  misc_feature (11)..(330): NCBI GI NO: 38181885 NR Description: Suclg1 protein [Rattus norvegicus]
MAASSPRALQSLGSAASRFLHARGFAAAAAAAPSPAVFVDKSTRVICQGITGKNGTFHTEQAIEYGTNMVGGVTPKKGGTEHLGLPVFNSVAEAKAETKANATVIYVPPPFAAAAIMEAMEAELDLAVCITEGIPQHDMVKVKAALNSQSKTRLIGPNCPGIIKPGECKIGIMPGYIHKPGRIGIVSRSGTLTYEAVFQTTAVGLGQSTCVGIGGDPFNGTNFVDCLEKFVNDPQTEGIVLIGEIGGTAEEDAATFIQESKTQKPVVAFIAGLTAPPGRRMGHAGAIVAGGKGTAQDKIKALREAGVTVVESPAKIGSTMFEIFKQRGMVE

SEQ ID NO: 25949 - protein, 263 aa, Zea mays subsp. mays
  peptide (1)..(263): Ceres Seq. ID no. 12381243
  misc_feature (1)..(81): Pfam Name: Pfam Description:  CoA binding domain
  misc_feature (1)..(263): NCBI GI NO: 34393512 NR Description: putative succinyl-CoA ligase alpha subunit
  misc_feature (1)..(262): NCBI GI NO: 27357175 NR Description: succinyl-CoA ligase alpha subunit
  misc_feature (1)..(263): NCBI GI NO: 15237260 NR Description: succinyl-CoA synthetase, alpha subunit
  misc_feature (1)..(263): NCBI GI NO: 15241592 NR Description: succinyl-CoA-ligase alpha subunit
  misc_feature (1)..(263): NCBI GI NO: 21593483 NR Description: succinyl-CoA synthetase, alpha subunit
  misc_feature (1)..(263): NCBI GI NO: 1076415 NR Description: succinate-CoA ligase (GDP-forming) (EC 6
  misc_feature (1)..(252): NCBI GI NO: 1711574 NR Description: SUCCINYL-COA LIGASE
  misc_feature (1)..(262): NCBI GI NO: 2258465 NR Description: succinyl-CoA synthetase alpha subunit [Sus scrofa]
  misc_feature (1)..(262): NCBI GI NO: 4104377 NR Description: ATP-specific succinyl-CoA synthetase alpha subunit
  misc_feature (1)..(262): NCBI GI NO: 38181885 NR Description: Suclg1 protein [Rattus norvegicus]
MVGGVTPKKGGTEHLGLPVFNSVAEAKAETKANATVIYVPPPFAAAAIMEAMEAELDLAVCITEGIPQHDMVKVKAALNSQSKTRLIGPNCPGIIKPGECKIGIMPGYIHKPGRIGIVSRSGTLTYEAVFQTTAVGLGQSTCVGIGGDPFNGTNFVDCLEKFVNDPQTEGIVLIGEIGGTAEEDAATFIQESKTQKPVVAFIAGLTAPPGRRMGHAGAIVAGGKGTAQDKIKALREAGVTVVESPAKIGSTMFEIFKQRGMVE

SEQ ID NO: 25950 - protein, 215 aa, Zea mays subsp. mays
  peptide (1)..(215): Ceres Seq. ID no. 12381244
  misc_feature (1)..(215): NCBI GI NO: 34393512 NR Description: putative succinyl-CoA ligase alpha subunit
  misc_feature (1)..(214): NCBI GI NO: 27357175 NR Description: succinyl-CoA ligase alpha subunit
  misc_feature (1)..(215): NCBI GI NO: 15237260 NR Description: succinyl-CoA synthetase, alpha subunit
  misc_feature (1)..(215): NCBI GI NO: 15241592 NR Description: succinyl-CoA-ligase alpha subunit
  misc_feature (1)..(215): NCBI GI NO: 21593483 NR Description: succinyl-CoA synthetase, alpha subunit
  misc_feature (1)..(215): NCBI GI NO: 1076415 NR Description: succinate-CoA ligase (GDP-forming) (EC 6
  misc_feature (1)..(204): NCBI GI NO: 1711574 NR Description: SUCCINYL-COA LIGASE
  misc_feature (1)..(214): NCBI GI NO: 2258465 NR Description: succinyl-CoA synthetase alpha subunit [Sus scrofa]
  misc_feature (1)..(214): NCBI GI NO: 4104377 NR Description: ATP-specific succinyl-CoA synthetase alpha subunit
  misc_feature (1)..(214): NCBI GI NO: 38181885 NR Description: Suclg1 protein [Rattus norvegicus]
MEAMEAELDLAVCITEGIPQHDMVKVKAALNSQSKTRLIGPNCPGIIKPGECKIGIMPGYIHKPGRIGIVSRSGTLTYEAVFQTTAVGLGQSTCVGIGGDPFNGTNFVDCLEKFVNDPQTEGIVLIGEIGGTAEEDAATFIQESKTQKPVVAFIAGLTAPPGRRMGHAGAIVAGGKGTAQDKIKALREAGVTVVESPAKIGSTMFEIFKQRGMVE

SEQ ID NO: 25951 - DNA, 1163 bp, Zea mays subsp. mays
  misc_feature (1)..(1163): Ceres Seq. ID no. 12406669
ctttttttcggcctttccctcccatatactcgccgtcggccagcggatctaatcggggcgggcgcgatggctgggcagaaccagcggctcaacgtcgtgccgacggtgacgatgctcggcgtcatgaaggctcggctcgtcggcgcgacccgcggccacgcgctgctgaagaagaagtccgacgcgctgacggtccagttccgcgccatcctcaagaagatcgtcgccgccaaggagtcgatgggcgagacgatgcgcgcctcctccttctccctcgccgaggccaagtacgtcgctggcgacggcgtccgccacgtcatcctccagtccgtccgcgcggcatccgtccgcgtccgctcccaccaggagaacgtggccggggtcaagctccccaagttcacccacttcgtcgaccccgccgcggcctccgggggcccctccaacgcgtccccgagcctcacgggcctggcccgcggcgggcagcaggtcgccgcctgcctctccgcgcacgtcaaggccatcgaggtgctcgtcgagctcgcatctctgcaaacctccttcctcactctcgacgaggccatcaagaccaccaaccgccgcgtcaacgcgctcgagaacgtcgtcaagcccaggatcgagaacaccatcagctacatcaagggggagctcgacgagctcgagcgcgaggacttcttcaggctcaagaagatccagggctacaagaagagggagatcgagcgccagatggccgccgccaggctatttgcggaggaacagcttgccgaggatctcgcgcttaagaggggtatctccgtgggggctgcggcaaacctgctggttgctggtggggagaaggacgacgacatcatcttctgaccactccttccatggccatccagtcattcaatcgtggcagaaacaataagttgatgctggagctccagaattgtatctgtttatagaatgatggagattttgattcagtaatctggagtctagccatccgagatcctcaataatctgtacctggaaaccaaacagtgccaagtaacttttacggagcgttatgtgcagctcgtgtagaaaattcaattgaaccgtatttcctgtcgtgtaccttccagtaccgtattatattatatatttattattcaattggacct

SEQ ID NO: 25952 - protein, 291 aa, Zea mays subsp. mays
  peptide (1)..(291): Ceres Seq. ID no. 12406670
  misc_feature (37)..(243): Pfam Name: Pfam Description:  ATP synthase subunit D
  misc_feature (23)..(291): NCBI GI NO: 38344879 NR Description: OSJNBa0033G05.3
  misc_feature (23)..(291): NCBI GI NO: 25529226 NR Description: H+-transporting two-sector ATPase (EC 3
  misc_feature (23)..(291): NCBI GI NO: 15231126 NR Description: v-ATPase subunit D (vATPD); protein id:At3g58730
  misc_feature (23)..(250): NCBI GI NO: 28829327 NR Description: similar to Homo sapiens (Human)
  misc_feature (23)..(291): NCBI GI NO: 21355551 NR Description: CG8186-PA [Drosophila melanogaster]
  misc_feature (23)..(291): NCBI GI NO: 28278870 NR Description: Similar to ATPase
  misc_feature (23)..(291): NCBI GI NO: 12963799 NR Description: ATPase, H+ transporting, V1 subunit D
  misc_feature (23)..(291): NCBI GI NO: 40786463 NR Description: ATPase
  misc_feature (23)..(291): NCBI GI NO: 7706757 NR Description: ATPase
  misc_feature (23)..(291): NCBI GI NO: 21410966 NR Description: ATPase
LFFGLSLPYTRRRPADLIGAGAMAGQNQRLNVVPTVTMLGVMKARLVGATRGHALLKKKSDALTVQFRAILKKIVAAKESMGETMRASSFSLAEAKYVAGDGVRHVILQSVRAASVRVRSHQENVAGVKLPKFTHFVDPAAASGGPSNASPSLTGLARGGQQVAACLSAHVKAIEVLVELASLQTSFLTLDEAIKTTNRRVNALENVVKPRIENTISYIKGELDELEREDFFRLKKIQGYKKREIERQMAAARLFAEEQLAEDLALKRGISVGAAANLLVAGGEKDDDIIF

SEQ ID NO: 25953 - protein, 269 aa, Zea mays subsp. mays
  peptide (1)..(269): Ceres Seq. ID no. 12406671
  misc_feature (15)..(221): Pfam Name: Pfam Description:  ATP synthase subunit D
  misc_feature (1)..(269): NCBI GI NO: 38344879 NR Description: OSJNBa0033G05.3
  misc_feature (1)..(269): NCBI GI NO: 25529226 NR Description: H+-transporting two-sector ATPase (EC 3
  misc_feature (1)..(269): NCBI GI NO: 15231126 NR Description: v-ATPase subunit D (vATPD); protein id:At3g58730
  misc_feature (1)..(228): NCBI GI NO: 28829327 NR Description: similar to Homo sapiens (Human)
  misc_feature (1)..(269): NCBI GI NO: 21355551 NR Description: CG8186-PA [Drosophila melanogaster]
  misc_feature (1)..(269): NCBI GI NO: 28278870 NR Description: Similar to ATPase
  misc_feature (1)..(269): NCBI GI NO: 12963799 NR Description: ATPase, H+ transporting, V1 subunit D
  misc_feature (1)..(269): NCBI GI NO: 40786463 NR Description: ATPase
  misc_feature (1)..(269): NCBI GI NO: 7706757 NR Description: ATPase
  misc_feature (1)..(269): NCBI GI NO: 21410966 NR Description: ATPase
MAGQNQRLNVVPTVTMLGVMKARLVGATRGHALLKKKSDALTVQFRAILKKIVAAKESMGETMRASSFSLAEAKYVAGDGVRHVILQSVRAASVRVRSHQENVAGVKLPKFTHFVDPAAASGGPSNASPSLTGLARGGQQVAACLSAHVKAIEVLVELASLQTSFLTLDEAIKTTNRRVNALENVVKPRIENTISYIKGELDELEREDFFRLKKIQGYKKREIERQMAAARLFAEEQLAEDLALKRGISVGAAANLLVAGGEKDDDIIF

SEQ ID NO: 25954 - protein, 265 aa, Zea mays subsp. mays
  peptide (1)..(265): Ceres Seq. ID no. 12406672
FFRPFPPIYSPSASGSNRGGRDGWAEPAAQRRADGDDARRHEGSARRRDPRPRAAEEEVRRADGPVPRHPQEDRRRQGVDGRDDARLLLLPRRGQVRRWRRRPPRHPPVRPRGIRPRPLPPGERGRGQAPQVHPLRRPRRGLRGPLQRVPEPHGPGPRRAAGRRLPLRARQGHRGARRARISANLLPHSRRGHQDHQPPRQRARERRQAQDREHHQLHQGGARRARARGLLQAQEDPGLQEEGDRAPDGRRQAICGGTACRGSRA

SEQ ID NO: 25955 - DNA, 1006 bp, Zea mays subsp. mays
  misc_feature (1)..(1006): Ceres Seq. ID no. 12403719
ctagggtttacatcccttataaaatctcgtcttccacccctgcctccctcagtcgcacttcctccggcggcggcaactcgacggccaaccgcgccaccctgccgcggcagccatggtgcatgttaacttctaccgcaactatgggaagactttcaagaagccaaggcggccgtatgagaaggagcgcctagatgctgagctgaagctggttggtgagtatggcctgcggtgcaagcgcgagctgtggcgcgtgcagtatgccctgagccgtatcaggaatgcagccagggagctgctcaccctggatgagaagaacccacgccgtatctttgagggcgaggcgctcctccgccgcatgaacagatatggtcttcttggtgagggacagaacaagcttgattacgtgcttgctctcactgttgagaacttcctccagcgccgcctccagaccatcgtcttcaagaatggcatggccaagtccatccaccatgctcgtgtcctgatcaggcagcgccacatcagggtgggaaggcagctcgtcaacatcccctcgttcatggtcagggtcgaatcagagaagcacatcgacttctccctcaccagccctctgggtggtggtcctgccggaagggtgaagcggaagaaccagaagaaggcctcagggggcggcgacgctgaggaggacgaggagtaaagggggggggggcacgtaggattctgggacggcaattggtttaaatgtgaggtggacactttagttgttgtgcctgagtgtgtttgtgttgtaatgaatacaaattctactgtggtagacaattttgcacccccactactgacactcgtgtttaaatttaaacattggcatcgtgtctggacacgatgaattgtattctggtttgggtggctatttgctagtttggtctttaggccaatgtttaagactgaaacaaattggtagccaactttactatcttatgctctgctggtctgtttggtgatttttttt

SEQ ID NO: 25956 - protein, 193 aa, Zea mays subsp. mays
  peptide (1)..(193): Ceres Seq. ID no. 12403720
  misc_feature (6)..(108): Pfam Name: Pfam Description:  Ribosomal protein S4/S9 N-terminal domain
  misc_feature (1)..(193): NCBI GI NO: 15242498 NR Description: 40S ribosomal protein S9-like
  misc_feature (1)..(193): NCBI GI NO: 15242241 NR Description: 40S ribosomal protein - like; protein id:At5g15200
  misc_feature (1)..(192): NCBI GI NO: 6440857 NR Description: 40S ribosomal protein S9 [Chlamydomonas sp. HS-5]
  misc_feature (8)..(193): NCBI GI NO: 1710780 NR Description: 40S ribosomal protein S9 (S7)
  misc_feature (8)..(193): NCBI GI NO: 40741183 NR Description: RS9_PODAN 40S ribosomal protein S9 (S7)
  misc_feature (12)..(193): NCBI GI NO: 14141193 NR Description: ribosomal protein S9; 40S ribosomal protein S9
  misc_feature (12)..(193): NCBI GI NO: 13592067 NR Description: ribosomal protein S9 [Rattus norvegicus]
  misc_feature (12)..(193): NCBI GI NO: 15294029 NR Description: 40S ribosomal protein S9 [Ictalurus punctatus]
  misc_feature (7)..(191): NCBI GI NO: 23613223 NR Description: 40S ribosomal subunit protein S9, putative
  misc_feature (12)..(193): NCBI GI NO: 1362936 NR Description: ribosomal protein S9, cytosolic - human
MVHVNFYRNYGKTFKKPRRPYEKERLDAELKLVGEYGLRCKRELWRVQYALSRIRNAARELLTLDEKNPRRIFEGEALLRRMNRYGLLGEGQNKLDYVLALTVENFLQRRLQTIVFKNGMAKSIHHARVLIRQRHIRVGRQLVNIPSFMVRVESEKHIDFSLTSPLGGGPAGRVKRKNQKKASGGGDAEEDEE

SEQ ID NO: 25957 - protein, 112 aa, Zea mays subsp. mays
  peptide (1)..(112): Ceres Seq. ID no. 12403721
  misc_feature (28)..(75): Pfam Name: Pfam Description:  S4 domain
  misc_feature (1)..(112): NCBI GI NO: 15242498 NR Description: 40S ribosomal protein S9-like
  misc_feature (1)..(112): NCBI GI NO: 15242241 NR Description: 40S ribosomal protein - like; protein id:At5g15200
  misc_feature (1)..(111): NCBI GI NO: 6440857 NR Description: 40S ribosomal protein S9 [Chlamydomonas sp. HS-5]
  misc_feature (1)..(112): NCBI GI NO: 1710780 NR Description: 40S ribosomal protein S9 (S7)
  misc_feature (1)..(112): NCBI GI NO: 40741183 NR Description: RS9_PODAN 40S ribosomal protein S9 (S7)
  misc_feature (1)..(112): NCBI GI NO: 14141193 NR Description: ribosomal protein S9; 40S ribosomal protein S9
  misc_feature (1)..(112): NCBI GI NO: 13592067 NR Description: ribosomal protein S9 [Rattus norvegicus]
  misc_feature (1)..(112): NCBI GI NO: 15294029 NR Description: 40S ribosomal protein S9 [Ictalurus punctatus]
  misc_feature (1)..(110): NCBI GI NO: 23613223 NR Description: 40S ribosomal subunit protein S9, putative
  misc_feature (1)..(112): NCBI GI NO: 1362936 NR Description: ribosomal protein S9, cytosolic - human
MNRYGLLGEGQNKLDYVLALTVENFLQRRLQTIVFKNGMAKSIHHARVLIRQRHIRVGRQLVNIPSFMVRVESEKHIDFSLTSPLGGGPAGRVKRKNQKKASGGGDAEEDEE

SEQ ID NO: 25958 - DNA, 849 bp, Zea mays subsp. mays
  misc_feature (1)..(849): Ceres Seq. ID no. 12434769
aagagctccccacctcgcccccccccatccagctccgaccctagggtttccatccggctcttccggaagcttccgaaaatggccaccgacgagctcgcccacgccgtcgcccccgccccggccgggggagaccactccccggccttctcgttcagcatctggccgccgacgcagcgcacgcgggacgcggtggtgcggcgcctcgtggagacgctcgcgggagacaccatcctctgcaagcgctacggtgcggtgccggccgccgacgccgagcccgcggcgcgcgccatcgaggccgaggccttcgacgccgcggcctccacgggaggcgccgccgccgcctccgtggaggaggggatcgaggcgctgcagttctactccaaggaggtgagccgccgcctcctcgacttcgtcaagtcccgctccgcggacgccaaggccggtgacacgccgtcggaggaggcccgggcccctggcgcgcccgaggccgaggccgcccagcccgcggcgtgagcgccggacagccattcgttccgttttgtatttcctgcagcctgtgtttggcttgggtctgagtttgtatgacttgaacgttagctgtttgcacatctatgcaattcttgttcttccatgaatagccccgttctagtgcgtgttcctgtttttctgggaatccctgcccgatcctgaggttgtcaaaccatcgcagcattgacctctgtctgtgtgcagcttcgagtgatggtcgaattgttccggagaccgaattgacaagcaattaagattcctcccatctttcaagccacatttatatgtataataataatctgaccgttgatttgaaattct

SEQ ID NO: 25959 - protein, 170 aa, Zea mays subsp. mays
  peptide (1)..(170): Ceres Seq. ID no. 12434770
  misc_feature (27)..(170): NCBI GI NO: 7546727 NR Description: MFP1 attachment factor 1 [Zea mays]
  misc_feature (27)..(168): NCBI GI NO: 26006500 NR Description: Unknown protein
  misc_feature (40)..(155): NCBI GI NO: 37533022 NR Description: hypothetical protein
  misc_feature (33)..(170): NCBI GI NO: 33146512 NR Description: putative MFP1 attachment factor 1
  misc_feature (50)..(170): NCBI GI NO: 7546725 NR Description: MFP1 attachment factor 1 [Lycopersicon esculentum]
  misc_feature (39)..(147): NCBI GI NO: 7546729 NR Description: MFP1 attachment factor 1 [Glycine max]
  misc_feature (42)..(152): NCBI GI NO: 7546731 NR Description: MFP1 attachment factor 1 [Canna edulis]
  misc_feature (2)..(170): NCBI GI NO: 18401618 NR Description: expressed protein; protein id: At1g47200
  misc_feature (2)..(155): NCBI GI NO: 21553809 NR Description: unknown [Arabidopsis thaliana]
  misc_feature (50)..(142): NCBI GI NO: 21618109 NR Description: MFP1 attachment factor 1 [Arabidopsis thaliana]
KSSPPRPPPSSSDPRVSIRLFRKLPKMATDELAHAVAPAPAGGDHSPAFSFSIWPPTQRTRDAVVRRLVETLAGDTILCKRYGAVPAADAEPAARAIEAEAFDAAASTGGAAAASVEEGIEALQFYSKEVSRRLLDFVKSRSADAKAGDTPSEEARAPGAPEAEAAQPAA

SEQ ID NO: 25960 - protein, 144 aa, Zea mays subsp. mays
  peptide (1)..(144): Ceres Seq. ID no. 12434771
  misc_feature (1)..(144): NCBI GI NO: 7546727 NR Description: MFP1 attachment factor 1 [Zea mays]
  misc_feature (1)..(142): NCBI GI NO: 26006500 NR Description: Unknown protein
  misc_feature (14)..(129): NCBI GI NO: 37533022 NR Description: hypothetical protein
  misc_feature (7)..(144): NCBI GI NO: 33146512 NR Description: putative MFP1 attachment factor 1
  misc_feature (24)..(144): NCBI GI NO: 7546725 NR Description: MFP1 attachment factor 1 [Lycopersicon esculentum]
  misc_feature (13)..(121): NCBI GI NO: 7546729 NR Description: MFP1 attachment factor 1 [Glycine max]
  misc_feature (16)..(126): NCBI GI NO: 7546731 NR Description: MFP1 attachment factor 1 [Canna edulis]
  misc_feature (1)..(144): NCBI GI NO: 18401618 NR Description: expressed protein; protein id: At1g47200
  misc_feature (1)..(129): NCBI GI NO: 21553809 NR Description: unknown [Arabidopsis thaliana]
  misc_feature (24)..(116): NCBI GI NO: 21618109 NR Description: MFP1 attachment factor 1 [Arabidopsis thaliana]
MATDELAHAVAPAPAGGDHSPAFSFSIWPPTQRTRDAVVRRLVETLAGDTILCKRYGAVPAADAEPAARAIEAEAFDAAASTGGAAAASVEEGIEALQFYSKEVSRRLLDFVKSRSADAKAGDTPSEEARAPGAPEAEAAQPAA

SEQ ID NO: 25961 - protein, 129 aa, Zea mays subsp. mays
  peptide (1)..(129): Ceres Seq. ID no. 12434772
  misc_feature (7)..(129): Pfam Name: Pfam Description:  Glycoprotein GG/GX
  misc_feature (1)..(129): NCBI GI NO: 39596044 NR Description: Hypothetical protein CBG15933
  misc_feature (2)..(129): NCBI GI NO: 6523547 NR Description: hydroxyproline-rich glycoprotein DZ-HRGP
  misc_feature (5)..(129): NCBI GI NO: 14599404 NR Description: protease 1 [Pneumocystis carinii]
  misc_feature (7)..(129): NCBI GI NO: 9630030 NR Description: unknown
  misc_feature (3)..(129): NCBI GI NO: 20138131 NR Description: Vegetative cell wall protein gp1 precursor
  misc_feature (3)..(129): NCBI GI NO: 5032119 NR Description: Ser/Arg-related nuclear matrix protein
  misc_feature (30)..(129): NCBI GI NO: 141449 NR Description: Hypothetical 35.5 kDa protein in transposon TN4556
  misc_feature (1)..(129): NCBI GI NO: 25143299 NR Description: pre-mRNA splicing SR protein related RSR-1 (68
  misc_feature (3)..(129): NCBI GI NO: 23274133 NR Description: Similar to serine/arginine repetitive matrix 1
  misc_feature (8)..(129): NCBI GI NO: 1076211 NR Description: hypothetical protein VSP-3 - Chlamydomonasreinhardtii
RAPHLAPPHPAPTLGFPSGSSGSFRKWPPTSSPTPSPPPRPGETTPRPSRSASGRRRSARGTRWCGASWRRSRETPSSASATVRCRPPTPSPRRAPSRPRPSTPRPPREAPPPPPWRRGSRRCSSTPRR

SEQ ID NO: 25962 - DNA, 1057 bp, Zea mays subsp. mays
  misc_feature (1)..(1057): Ceres Seq. ID no. 12345982
aagaaaaaaaagatggtgtgtccccaaacaggacctttgtttaagccgcgccttggctcgtcacgactcacgaccatgatttggtaaagaaagcacaaagcaggaggaagccggcggtgtaggcgacccatggctccacagacgaggagagagaggttggcgggggaggcgcggccgagctcgtcggggctaacaccggcgaagccgggggcggtcgaggtgcagcgccgacgggcgggcagcggttggacgagccgtcggatctccatctacgcctcccgagtctacttcctcctcatcatgctccagatcccgctcttcagggtcccttgtagagctggcacatgcacaactcctattcaagtaacatcatctcagttggtctcaaatgatatattcccagcagctgttgtgaaggccatgctctaccctggagctaccgtgagcagcctaactaaaagcaagacatttcctagttggaatgacctgtttgacatgtacaacctgacagaagcaaaaaatgcttctgcagtagttgatctccagcgtctagagatacttgccggaagctacttctgtgttgctggagcgctcattggcatcataaatcctgggaggatgactttgtttggtacccttttgattatctggggtatggtgaaagaagcactatttgggaagccagtgaacagtgatctgactcaatcaactcatgtctacccaaccattttgattgcacttatctgtgcattcatgtcgataacttacaacgtaaagaagacagcaagaagtagtactcctgtttctatcgctaagccactgataagttctgccaagtcaaaactgaagtagacttacaagtttaatccttgtaactcttttgaaatatttatttatgtgcaaaaaaacaggtttgaggatgacctgatgatgcttttggtgtatatctgactttcaatactgtaacattcagttttctttattgtattaacaattcgcaaggtcacaccgtctgtaatgtttacaaaaaaaaacagataaatcttggttttctccc

SEQ ID NO: 25963 - protein, 240 aa, Zea mays subsp. mays
  peptide (1)..(240): Ceres Seq. ID no. 12345983
  misc_feature (1)..(240): NCBI GI NO: 34913974 NR Description: B1110C07.25
  misc_feature (39)..(240): NCBI GI NO: 18416514 NR Description: putative protein; protein id: At5g11280
  misc_feature (39)..(240): NCBI GI NO: 17064978 NR Description: putative protein [Arabidopsis thaliana]
  misc_feature (87)..(240): NCBI GI NO: 8953390 NR Description: putative protein [Arabidopsis thaliana]
  misc_feature (66)..(229): NCBI GI NO: 15220078 NR Description: hypothetical protein; protein id: At1g80200.1
MAPQTRRERLAGEARPSSSGLTPAKPGAVEVQRRRAGSGWTSRRISIYASRVYFLLIMLQIPLFRVPCRAGTCTTPIQVTSSQLVSNDIFPAAVVKAMLYPGATVSSLTKSKTFPSWNDLFDMYNLTEAKNASAVVDLQRLEILAGSYFCVAGALIGIINPGRMTLFGTLLIIWGMVKEALFGKPVNSDLTQSTHVYPTILIALICAFMSITYNVKKTARSSTPVSIAKPLISSAKSKLK

SEQ ID NO: 25964 - protein, 183 aa, Zea mays subsp. mays
  peptide (1)..(183): Ceres Seq. ID no. 12345984
  misc_feature (1)..(183): NCBI GI NO: 34913974 NR Description: B1110C07.25
  misc_feature (1)..(183): NCBI GI NO: 18416514 NR Description: putative protein; protein id: At5g11280
  misc_feature (1)..(183): NCBI GI NO: 17064978 NR Description: putative protein [Arabidopsis thaliana]
  misc_feature (30)..(183): NCBI GI NO: 8953390 NR Description: putative protein [Arabidopsis thaliana]
  misc_feature (9)..(172): NCBI GI NO: 15220078 NR Description: hypothetical protein; protein id: At1g80200.1
MLQIPLFRVPCRAGTCTTPIQVTSSQLVSNDIFPAAVVKAMLYPGATVSSLTKSKTFPSWNDLFDMYNLTEAKNASAVVDLQRLEILAGSYFCVAGALIGIINPGRMTLFGTLLIIWGMVKEALFGKPVNSDLTQSTHVYPTILIALICAFMSITYNVKKTARSSTPVSIAKPLISSAKSKLK

SEQ ID NO: 25965 - protein, 143 aa, Zea mays subsp. mays
  peptide (1)..(143): Ceres Seq. ID no. 12345985
  misc_feature (1)..(143): NCBI GI NO: 34913974 NR Description: B1110C07.25
  misc_feature (1)..(143): NCBI GI NO: 18416514 NR Description: putative protein; protein id: At5g11280
  misc_feature (1)..(143): NCBI GI NO: 17064978 NR Description: putative protein [Arabidopsis thaliana]
  misc_feature (1)..(143): NCBI GI NO: 8953390 NR Description: putative protein [Arabidopsis thaliana]
  misc_feature (1)..(132): NCBI GI NO: 15220078 NR Description: hypothetical protein; protein id: At1g80200.1
MLYPGATVSSLTKSKTFPSWNDLFDMYNLTEAKNASAVVDLQRLEILAGSYFCVAGALIGIINPGRMTLFGTLLIIWGMVKEALFGKPVNSDLTQSTHVYPTILIALICAFMSITYNVKKTARSSTPVSIAKPLISSAKSKLK

SEQ ID NO: 25966 - DNA, 789 bp, Zea mays subsp. mays; identical to SEQ ID NO: 23396
  misc_feature (1)..(789): Ceres Seq. ID no. 12355957

SEQ ID NO: 25967 - protein, 161 aa, Zea mays subsp. mays; identical to SEQ ID NO: 23397
  peptide (1)..(161): Ceres Seq. ID no. 12355958
  misc_feature (3)..(73): Pfam Name: Pfam Description:  Ribosomal protein L24e
  misc_feature (1)..(161): NCBI GI NO: 1710521 NR Description: 60S RIBOSOMAL PROTEIN L24
  misc_feature (4)..(161): NCBI GI NO: 34900364 NR Description: putative 60S ribosomal protein L24
  misc_feature (1)..(160): NCBI GI NO: 6094040 NR Description: 60S ribosomal protein L24
  misc_feature (1)..(156): NCBI GI NO: 10180025 NR Description: 60S ribosomal protein L24 [Prunus avium]
  misc_feature (1)..(161): NCBI GI NO: 18404176 NR Description: 60S ribosomal protein L24; protein id: At2g36620
  misc_feature (1)..(161): NCBI GI NO: 15231730 NR Description: 60S ribosomal protein - like; protein id:At3g53020
  misc_feature (5)..(161): NCBI GI NO: 25295112 NR Description: 60S ribosomal protein L24
  misc_feature (3)..(150): NCBI GI NO: 19075214 NR Description: 60s ribosomal protein L24
  misc_feature (3)..(150): NCBI GI NO: 19115030 NR Description: 60S ribosomal protein L24
  misc_feature (10)..(154): NCBI GI NO: 40741063 NR Description: conserved hypothetical protein

SEQ ID NO: 25968 - protein, 106 aa, Zea mays subsp. mays; identical to SEQ ID NO: 23398
  peptide (1)..(106): Ceres Seq. ID no. 12355959
  misc_feature (1)..(106): NCBI GI NO: 1710521 NR Description: 60S RIBOSOMAL PROTEIN L24
  misc_feature (1)..(106): NCBI GI NO: 34900364 NR Description: putative 60S ribosomal protein L24
  misc_feature (1)..(105): NCBI GI NO: 6094040 NR Description: 60S ribosomal protein L24
  misc_feature (1)..(101): NCBI GI NO: 10180025 NR Description: 60S ribosomal protein L24 [Prunus avium]
  misc_feature (1)..(106): NCBI GI NO: 18404176 NR Description: 60S ribosomal protein L24; protein id: At2g36620
  misc_feature (1)..(106): NCBI GI NO: 15231730 NR Description: 60S ribosomal protein - like; protein id:At3g53020
  misc_feature (1)..(106): NCBI GI NO: 25295112 NR Description: 60S ribosomal protein L24
  misc_feature (1)..(95): NCBI GI NO: 19075214 NR Description: 60s ribosomal protein L24
  misc_feature (1)..(95): NCBI GI NO: 19115030 NR Description: 60S ribosomal protein L24
  misc_feature (1)..(99): NCBI GI NO: 40741063 NR Description: conserved hypothetical protein

SEQ ID NO: 25969 - DNA, 1424 bp, Zea mays subsp. mays
  misc_feature (1)..(1424): Ceres Seq. ID no. 12365397
aaactttcgcaccaccaactcacactgaccgcaacttcccaacaatctcggtccctccctccctcctccctaaactccccagcaacccgcggccgagccccgtagtccgtgcaccagttgtctcgcgtcgtcgtcgtcgccggggcctgcagcctgcaggcagcgacctagctaggaacgggtgacatggcgcgtgcggcggcgtcggtggccgcggcgctgctcgtcgtgctcggcgtggcagcgtcggtggcgacggcgcagatggagacctgcagcggcgacctcccacccgtgctcgccgccaactactccggcctggcctgccagcctgtctggaacaacttcgtgctccggtaccaccaggacaaggacaacgtgctgcgggtggtgctgtccacgatgtacagcacggggtgggtgggcatggggttctccagggacggcctcatggtcggctccagcgccatggtggggtggatcggcaagaaggggctcccccacgtccggcagttcgcgctgcggggcaagagcagctccaaggtggtggtcgaccgtggcttcctcgtttccaacgaccacgaccacactgtcgtggtgcagcaggccaagatctacctcgccttccagctcaggttctcctaccgcctcacccaccagcacatcgtcatggccttcggcaacagcatccccgtcaagaacaggctcaccaggcaccaggacaagacctccttcaccttcgatttcacaacgggcagagcttcggtggacgggtccttcccatacggcctgcggcgtgcgcacggcgcgctgaacgtgttcgcgtggggagtcctgctgcccatcggcgccatcctggcgcgctacttccggcggatggacccgctctggttctacctccacgtgggcgtccagctcgccggcttcatcatcggcctggccggcgtcgtcgccggggtggcgctgtacaacaagatccaggccgacatccccgcgcacagggggctcggcgtcttcgtcctcttcctcggcatcctgcaggtgctggccttcttcctgcgccccagcgccgactccaagtaccgcaagtactggaactggtaccaccactgggcgggcaggctggcgctcttcttcgccgccgtcaacatcgtgctcgggatccacgtcggcggcgccgacagctcatggaagatcggatacggcttcagcctggccgtcctcctcgtcgccgtcgccgcgctcgagttcatgctgtggacgaggtggtccaagaacagcaccgccaccccgacgtactaggaacctgctgctgcacgtaccttgttgtttttccggggtcggatgatgttttgtgtttgcctttgaccttgtttttttttgttgttggtggtggtggtgtatctatatgatatatcctttgg

SEQ ID NO: 25970 - protein, 371 aa, Zea mays subsp. mays
  peptide (1)..(371): Ceres Seq. ID no. 12365398
  misc_feature (53)..(165): Pfam Name: Pfam Description:  DOMON domain
  misc_feature (9)..(371): NCBI GI NO: 34911180 NR Description: P0019E03.5
  misc_feature (34)..(371): NCBI GI NO: 15233202 NR Description: putative protein; protein id: At3g61750.1
  misc_feature (5)..(363): NCBI GI NO: 6466940 NR Description: unknown protein [Arabidopsis thaliana]
  misc_feature (5)..(354): NCBI GI NO: 30680365 NR Description: auxin-induced protein-related
  misc_feature (1)..(354): NCBI GI NO: 21740784 NR Description: OSJNBa0067K08.25
  misc_feature (6)..(371): NCBI GI NO: 34907602 NR Description: B1078G07.42
  misc_feature (15)..(196): NCBI GI NO: 34907596 NR Description: B1078G07.39
  misc_feature (203)..(360): NCBI GI NO: 34907596 NR Description: B1078G07.39
  misc_feature (75)..(370): NCBI GI NO: 18421491 NR Description: Expressed protein; protein id: At5g35735
  misc_feature (13)..(371): NCBI GI NO: 24414270 NR Description: Putative membrane protein
MARAAASVAAALLVVLGVAASVATAQMETCSGDLPPVLAANYSGLACQPVWNNFVLRYHQDKDNVLRVVLSTMYSTGWVGMGFSRDGLMVGSSAMVGWIGKKGLPHVRQFALRGKSSSKVVVDRGFLVSNDHDHTVVVQQAKIYLAFQLRFSYRLTHQHIVMAFGNSIPVKNRLTRHQDKTSFTFDFTTGRASVDGSFPYGLRRAHGALNVFAWGVLLPIGAILARYFRRMDPLWFYLHVGVQLAGFIIGLAGVVAGVALYNKIQADIPAHRGLGVFVLFLGILQVLAFFLRPSADSKYRKYWNWYHHWAGRLALFFAAVNIVLGIHVGGADSSWKIGYGFSLAVLLVAVAALEFMLWTRWSKNSTATPTY

SEQ ID NO: 25971 - protein, 345 aa, Zea mays subsp. mays
  peptide (1)..(345): Ceres Seq. ID no. 12365399
  misc_feature (27)..(139): Pfam Name: Pfam Description:  DOMON domain
  misc_feature (1)..(345): NCBI GI NO: 34911180 NR Description: P0019E03.5
  misc_feature (8)..(345): NCBI GI NO: 15233202 NR Description: putative protein; protein id: At3g61750.1
  misc_feature (1)..(337): NCBI GI NO: 6466940 NR Description: unknown protein [Arabidopsis thaliana]
  misc_feature (1)..(328): NCBI GI NO: 30680365 NR Description: auxin-induced protein-related
  misc_feature (1)..(328): NCBI GI NO: 21740784 NR Description: OSJNBa0067K08.25
  misc_feature (1)..(345): NCBI GI NO: 34907602 NR Description: B1078G07.42
  misc_feature (1)..(170): NCBI GI NO: 34907596 NR Description: B1078G07.39
  misc_feature (177)..(334): NCBI GI NO: 34907596 NR Description: B1078G07.39
  misc_feature (49)..(344): NCBI GI NO: 18421491 NR Description: Expressed protein; protein id: At5g35735
  misc_feature (1)..(345): NCBI GI NO: 24414270 NR Description: Putative membrane protein
METCSGDLPPVLAANYSGLACQPVWNNFVLRYHQDKDNVLRVVLSTMYSTGWVGMGFSRDGLMVGSSAMVGWIGKKGLPHVRQFALRGKSSSKVVVDRGFLVSNDHDHTVVVQQAKIYLAFQLRFSYRLTHQHIVMAFGNSIPVKNRLTRHQDKTSFTFDFTTGRASVDGSFPYGLRRAHGALNVFAWGVLLPIGAILARYFRRMDPLWFYLHVGVQLAGFIIGLAGVVAGVALYNKIQADIPAHRGLGVFVLFLGILQVLAFFLRPSADSKYRKYWNWYHHWAGRLALFFAAVNIVLGIHVGGADSSWKIGYGFSLAVLLVAVAALEFMLWTRWSKNSTATPTY

SEQ ID NO: 25972 - protein, 299 aa, Zea mays subsp. mays
  peptide (1)..(299): Ceres Seq. ID no. 12365400
  misc_feature (1)..(93): Pfam Name: Pfam Description:  DOMON domain
  misc_feature (1)..(299): NCBI GI NO: 34911180 NR Description: P0019E03.5
  misc_feature (1)..(299): NCBI GI NO: 15233202 NR Description: putative protein; protein id: At3g61750.1
  misc_feature (1)..(291): NCBI GI NO: 6466940 NR Description: unknown protein [Arabidopsis thaliana]
  misc_feature (1)..(282): NCBI GI NO: 30680365 NR Description: auxin-induced protein-related
  misc_feature (1)..(282): NCBI GI NO: 21740784 NR Description: OSJNBa0067K08.25
  misc_feature (1)..(299): NCBI GI NO: 34907602 NR Description: B1078G07.42
  misc_feature (1)..(124): NCBI GI NO: 34907596 NR Description: B1078G07.39
  misc_feature (131)..(288): NCBI GI NO: 34907596 NR Description: B1078G07.39
  misc_feature (3)..(298): NCBI GI NO: 18421491 NR Description: Expressed protein; protein id: At5g35735
  misc_feature (1)..(299): NCBI GI NO: 24414270 NR Description: Putative membrane protein
MYSTGWVGMGFSRDGLMVGSSAMVGWIGKKGLPHVRQFALRGKSSSKVVVDRGFLVSNDHDHTVVVQQAKIYLAFQLRFSYRLTHQHIVMAFGNSIPVKNRLTRHQDKTSFTFDFTTGRASVDGSFPYGLRRAHGALNVFAWGVLLPIGAILARYFRRMDPLWFYLHVGVQLAGFIIGLAGVVAGVALYNKIQADIPAHRGLGVFVLFLGILQVLAFFLRPSADSKYRKYWNWYHHWAGRLALFFAAVNIVLGIHVGGADSSWKIGYGFSLAVLLVAVAALEFMLWTRWSKNSTATPTY

SEQ ID NO: 25973 - DNA, 1344 bp, Zea mays subsp. mays
  misc_feature (1)..(1344): Ceres Seq. ID no. 12347927
actcgaaaagaaaactagccgggcacgttacgctcaccaccataccgtcccacgcggcctccccaactaaccctatcccccggcgaccgggaactgcaaccgatggaccgcctcgtcgtcttctcccgccgccgccgccgctggatcctcctcgctgcggccggtgcggcggcggccgtcggcgcgtacaagatctaccaccaccctgccgtcgcggaacgtcgccgccgcctcgtgcgcctagccgccgccatcgcggccttcgctgatgccgccgcatcatccgccgacgccgtggccctggtgacatccgatctcgccgactttgtccgttccgacgcggacgaggtcccccgcagcgtcaagcagctggccaagctcgcctcctcccctgaggtatccgccaccgtctccaccctatccgaggcagtaacctccgggatcctccgcgggtcgggatcctctagctccgggcccgcatccggcggtaccgtggccctctccgatcgtctcgtagacaggctcttctctgactcaggcgagcgcctcgcgtccgcggttgccggcagcttcgcccgccatctcgtcctcgccttttactccgctccttcaccacaaggggaggcgtcctcctccccgacgatgtgggtcaacgtggttgcgactggaaagtgccggaaggcgataagcaactgggttgaggtcttcgtggggactgctgtgagggagttcattgacaagaccatccacatcaacacctacgagcagctcttcgaagggctcaccaatccgagacatgacgctaaggtcaaggaattgcttgtttcagtgtgcaatgctgcggttgagactttggtgaagaccactcaccatgccctgtacagtactaatggcaacttgggtgcaaatggtagtgtcagtggcaatgccaatgaagctggggaagggtgggtggagacggtgtcgagctcgttggcagttcctagcaacaggaagtttgtgcttgatgttacagggagggtcacatttgagacagtgcggtcatttctggagtttgttctttggaagctgcaggatggggcaaggaagggcggtggctccgtggttgacagtggcctccgtgtcgtgaggtatatgagcgataagtcgatggttatcgccacaatctgtattacgttgtgcttgcatgtgttgaatgggactaggctcttggtaacagcctaatagtgtacttgtttggttttcctattttttgcacattgtttgtgtaaaactgtaggaatcatactgaaactgtaaatccaaaaggaatggaaataatagaaataacatgaattgtgctgt

SEQ ID NO: 25974 - protein, 373 aa, Zea mays subsp. mays
  peptide (1)..(373): Ceres Seq. ID no. 12347928
  misc_feature (1)..(373): NCBI GI NO: 40539064 NR Description: expressed protein
  misc_feature (1)..(370): NCBI GI NO: 22093613 NR Description: hypothetical protein~similar to Arabidopsisthaliana chromosome 1
  misc_feature (9)..(365): NCBI GI NO: 21553547 NR Description: unknown [Arabidopsis thaliana]
  misc_feature (9)..(365): NCBI GI NO: 14475940 NR Description: unknown protein [Arabidopsis thaliana]
  misc_feature (9)..(365): NCBI GI NO: 18406365 NR Description: expressed protein; protein id: At1g59510
  misc_feature (7)..(370): NCBI GI NO: 15229610 NR Description: putative protein; protein id: At3g49790.1
  misc_feature (17)..(371): NCBI GI NO: 37530342 NR Description: hypothetical protein
  misc_feature (1)..(262): NCBI GI NO: 18391117 NR Description: expressed protein; protein id: At1g10150
  misc_feature (1)..(262): NCBI GI NO: 21554418 NR Description: unknown [Arabidopsis thaliana]
  misc_feature (172)..(366): NCBI GI NO: 18391117 NR Description: expressed protein; protein id: At1g10150
MDRLVVFSRRRRRWILLAAAGAAAAVGAYKIYHHPAVAERRRRLVRLAAAIAAFADAAASSADAVALVTSDLADFVRSDADEVPRSVKQLAKLASSPEVSATVSTLSEAVTSGILRGSGSSSSGPASGGTVALSDRLVDRLFSDSGERLASAVAGSFARHLVLAFYSAPSPQGEASSSPTMWVNVVATGKCRKAISNWVEVFVGTAVREFIDKTIHINTYEQLFEGLTNPRHDAKVKELLVSVCNAAVETLVKTTHHALYSTNGNLGANGSVSGNANEAGEGWVETVSSSLAVPSNRKFVLDVTGRVTFETVRSFLEFVLWKLQDGARKGGGSVVDSGLRVVRYMSDKSMVIATICITLCLHVLNGTRLLVTA

SEQ ID NO: 25975 - protein, 193 aa, Zea mays subsp. mays
  peptide (1)..(193): Ceres Seq. ID no. 12347929
  misc_feature (1)..(193): NCBI GI NO: 40539064 NR Description: expressed protein
  misc_feature (1)..(190): NCBI GI NO: 22093613 NR Description: hypothetical protein~similar to Arabidopsisthaliana chromosome 1
  misc_feature (1)..(185): NCBI GI NO: 21553547 NR Description: unknown [Arabidopsis thaliana]
  misc_feature (1)..(185): NCBI GI NO: 14475940 NR Description: unknown protein [Arabidopsis thaliana]
  misc_feature (1)..(185): NCBI GI NO: 18406365 NR Description: expressed protein; protein id: At1g59510
  misc_feature (1)..(190): NCBI GI NO: 15229610 NR Description: putative protein; protein id: At3g49790.1
  misc_feature (1)..(191): NCBI GI NO: 37530342 NR Description: hypothetical protein
  misc_feature (1)..(82): NCBI GI NO: 18391117 NR Description: expressed protein; protein id: At1g10150
  misc_feature (1)..(82): NCBI GI NO: 21554418 NR Description: unknown [Arabidopsis thaliana]
  misc_feature (1)..(186): NCBI GI NO: 18391117 NR Description: expressed protein; protein id: At1g10150
MWVNVVATGKCRKAISNWVEVFVGTAVREFIDKTIHINTYEQLFEGLTNPRHDAKVKELLVSVCNAAVETLVKTTHHALYSTNGNLGANGSVSGNANEAGEGWVETVSSSLAVPSNRKFVLDVTGRVTFETVRSFLEFVLWKLQDGARKGGGSVVDSGLRVVRYMSDKSMVIATICITLCLHVLNGTRLLVTA

SEQ ID NO: 25976 - DNA, 1428 bp, Zea mays subsp. mays
  misc_feature (1)..(1428): Ceres Seq. ID no. 12434949
gcacgagaccattacctagaacatcctaatcaaaagccaaggaaaggaaacacaattcagcagcacacgcaccaccaaaaagagggagaagagtcttcgcctcgcggagagacgtgctgcctagcataatatatagccacgaaatagagtgctgggtctagctatagctaactagccagcagcagcagcagcgtgcgtgcgttcaaggcagcagaggtagagaggttttgagagagaatggcaagcaggcaaggtgtagccgcctccatgttcgccacggcattgctcctcggcgtctttgcatccatcccacaaagtgctgaggccatcggcgtatgctacggcatgagcgccaacaacctgccggcggcgagcacggtggtgagcatgtacaaggcgaacggcatctcggcgatgcggctgtacgcgccggaccagggcgcgctgcaggcggtgggcggcacgggcatcagcgtggccgtgggcgcccccaacgacgtgctgtcgaacatcgcggctagccccgcggcggccgcgtcgtgggtgcgcaacaacatccaggcgtacccgtccgtgtcgttccgctacgtgtgcgtgggcaacgaggtggccggcggcgcggcgcaggacctggcgccggccatggagaacgtgcacgcggcgctggcggcggccgggctgggccacatcaaggtgacgacgtcggtgtcgcaggccatcctgggcgtgtacagcccgccgtccgccgcggagttcaccggcgaggcgcgcgggtacatgggccccgtgctgcagttcctggcccgcaccgggtcgccgctcatggccaacatctacccgtacctggcctgggcatacaaccccagcgccatggacatgagctacgcgctcttcacctcctccggcaccgtcgtgcaggacggcgcctacgggtaccagaacctcttcgacaccaccgtcgacgccttctacgtcgccatgggaaagaacggcggctccggcgtgccgctcgtggtgtcggagagcgggtggccgtccggcggcggcgtccaggccacgccggccaacgcgagggtgtacaaccagtacctcatcaaccacgtcggccgcgggacgccgcgccaccccggcgccatcgagacctacctcttctccatgttcaacgagaaccagaaggagagcggcgtggagcagaactgggggctcttctaccccaacatgcagcacgtctgccccatcagcttctgaagaaccgttaaccgtaccgatccaagctagctgctagctggccctggaccctggtggtggctccgaccgacgacggacgacgacgatcgacctgcagccgtatgtgtcgatccggccggccgtatacggatagtacgtagcatgtatgtatatatatggtatatgtgggcttgctttgcg

SEQ ID NO: 25977 - protein, 336 aa, Zea mays subsp. mays
  peptide (1)..(336): Ceres Seq. ID no. 12434950
  misc_feature (31)..(336): Pfam Name: Pfam Description:  Glycosyl hydrolases family 17
  misc_feature (1)..(336): NCBI GI NO: 486849 NR Description: licheninase (EC 3.2.1.73) precursor - wheat
  misc_feature (1)..(336): NCBI GI NO: 288654 NR Description: (1-3, 1-4)-beta-glucanase [Avena sativa]
  misc_feature (5)..(336): NCBI GI NO: 100591 NR Description: licheninase (EC 3
  misc_feature (1)..(336): NCBI GI NO: 228411 NR Description: beta glucanase:ISOTYPE=II
  misc_feature (29)..(336): NCBI GI NO: 840908 NR Description: beta glucanase [Triticum aestivum]
  misc_feature (1)..(336): NCBI GI NO: 13249140 NR Description: glucanase [Oryza sativa]
  misc_feature (23)..(336): NCBI GI NO: 100592 NR Description: licheninase (EC 3
  misc_feature (1)..(336): NCBI GI NO: 854361 NR Description: beta-glucanase
  misc_feature (25)..(336): NCBI GI NO: 121773 NR Description: LICHENASE II PRECURSOR
  misc_feature (25)..(336): NCBI GI NO: 224995 NR Description: glucan glucohydrolase
MASRQGVAASMFATALLLGVFASIPQSAEAIGVCYGMSANNLPAASTVVSMYKANGISAMRLYAPDQGALQAVGGTGISVAVGAPNDVLSNIAASPAAAASWVRNNIQAYPSVSFRYVCVGNEVAGGAAQDLAPAMENVHAALAAAGLGHIKVTTSVSQAILGVYSPPSAAEFTGEARGYMGPVLQFLARTGSPLMANIYPYLAWAYNPSAMDMSYALFTSSGTVVQDGAYGYQNLFDTTVDAFYVAMGKNGGSGVPLVVSESGWPSGGGVQATPANARVYNQYLINHVGRGTPRHPGAIETYLFSMFNENQKESGVEQNWGLFYPNMQHVCPISF

SEQ ID NO: 25978 - protein, 326 aa, Zea mays subsp. mays
  peptide (1)..(326): Ceres Seq. ID no. 12434951
  misc_feature (21)..(326): Pfam Name: Pfam Description:  Glycosyl hydrolases family 17
  misc_feature (1)..(326): NCBI GI NO: 486849 NR Description: licheninase (EC 3.2.1.73) precursor - wheat
  misc_feature (1)..(326): NCBI GI NO: 288654 NR Description: (1-3, 1-4)-beta-glucanase [Avena sativa]
  misc_feature (1)..(326): NCBI GI NO: 100591 NR Description: licheninase (EC 3
  misc_feature (1)..(326): NCBI GI NO: 228411 NR Description: beta glucanase:ISOTYPE=II
  misc_feature (19)..(326): NCBI GI NO: 840908 NR Description: beta glucanase [Triticum aestivum]
  misc_feature (1)..(326): NCBI GI NO: 13249140 NR Description: glucanase [Oryza sativa]
  misc_feature (13)..(326): NCBI GI NO: 100592 NR Description: licheninase (EC 3
  misc_feature (1)..(326): NCBI GI NO: 854361 NR Description: beta-glucanase
  misc_feature (15)..(326): NCBI GI NO: 121773 NR Description: LICHENASE II PRECURSOR
  misc_feature (15)..(326): NCBI GI NO: 224995 NR Description: glucan glucohydrolase
MFATALLLGVFASIPQSAEAIGVCYGMSANNLPAASTVVSMYKANGISAMRLYAPDQGALQAVGGTGISVAVGAPNDVLSNIAASPAAAASWVRNNIQAYPSVSFRYVCVGNEVAGGAAQDLAPAMENVHAALAAAGLGHIKVTTSVSQAILGVYSPPSAAEFTGEARGYMGPVLQFLARTGSPLMANIYPYLAWAYNPSAMDMSYALFTSSGTVVQDGAYGYQNLFDTTVDAFYVAMGKNGGSGVPLVVSESGWPSGGGVQATPANARVYNQYLINHVGRGTPRHPGAIETYLFSMFNENQKESGVEQNWGLFYPNMQHVCPISF

SEQ ID NO: 25979 - protein, 300 aa, Zea mays subsp. mays
  peptide (1)..(300): Ceres Seq. ID no. 12434952
  misc_feature (1)..(300): Pfam Name: Pfam Description:  Glycosyl hydrolases family 17
  misc_feature (1)..(300): NCBI GI NO: 486849 NR Description: licheninase (EC 3.2.1.73) precursor - wheat
  misc_feature (1)..(300): NCBI GI NO: 288654 NR Description: (1-3, 1-4)-beta-glucanase [Avena sativa]
  misc_feature (1)..(300): NCBI GI NO: 100591 NR Description: licheninase (EC 3
  misc_feature (1)..(300): NCBI GI NO: 228411 NR Description: beta glucanase:ISOTYPE=II
  misc_feature (1)..(300): NCBI GI NO: 840908 NR Description: beta glucanase [Triticum aestivum]
  misc_feature (1)..(300): NCBI GI NO: 13249140 NR Description: glucanase [Oryza sativa]
  misc_feature (1)..(300): NCBI GI NO: 100592 NR Description: licheninase (EC 3
  misc_feature (1)..(300): NCBI GI NO: 854361 NR Description: beta-glucanase
  misc_feature (1)..(300): NCBI GI NO: 121773 NR Description: LICHENASE II PRECURSOR
  misc_feature (1)..(300): NCBI GI NO: 224995 NR Description: glucan glucohydrolase
MSANNLPAASTVVSMYKANGISAMRLYAPDQGALQAVGGTGISVAVGAPNDVLSNIAASPAAAASWVRNNIQAYPSVSFRYVCVGNEVAGGAAQDLAPAMENVHAALAAAGLGHIKVTTSVSQAILGVYSPPSAAEFTGEARGYMGPVLQFLARTGSPLMANIYPYLAWAYNPSAMDMSYALFTSSGTVVQDGAYGYQNLFDTTVDAFYVAMGKNGGSGVPLVVSESGWPSGGGVQATPANARVYNQYLINHVGRGTPRHPGAIETYLFSMFNENQKESGVEQNWGLFYPNMQHVCPISF

SEQ ID NO: 25980 - DNA, 1592 bp, Zea mays subsp. mays
  misc_feature (1)..(1592): Ceres Seq. ID no. 12365401
aaagccagcattgctgcatgccagcatccacgtagcatctgaggctctgagctcatggttcagatagcagcggtgaagcggatgaaggggcgggccccgctgtcagtggtggtggcaatcatcggcgggctggctctcgcgggcgtcatcttcaccgacgacctccgctcacttactgagatcatggagaagaaggggaaagcgaaggagcacaagaggacgacgtctctacatgccgggacgaggacgaggaagatgccgctaacgccgccgccgccgccgcagccggcgaaggcagcgttcgacccgagccggtgcagcgtgacggagggctactgggcgtacaacaggtccaaggagctgctttacacggaccaaacatgcccgttcatcgacaggcaggtctcttgccagaggaacggcaggccggacagcgactacctgcgctgggattggcacctagacgactgcagtctcccaaggttcgacccggtggcgttgctggagacgctgcgggggaagcggatgatgttcgttggcgactcgctgcagatggggcagtggctctccatggtctgcctcgtcaactccgccgtgccctacaccgcgcggtccatggagcgcagcaccaccctgtccgtcttcaccgccacggagtacaacgcgacgatcgagttctactgggcgccgtacctggtggaggccaactccgaccgcaacatccggctgggggccgacggccgcgtgctccacgtcgacgccgtcgagctgcacgctaggcactggaagggcgtggacatcctcgtcttcgacagctacgtgtggtggatgaccggcagcaggatcaaatcagtgtgggggtcgttcggggacgacgggtacgaggagctggacgcctgggtcgcgttccggcttggactcaagacatgggccaactgggtggacgccaacatcgatcccaacgccacaagggtcttcttcatgtcgatctccaccacgcacatgaggagcgaggactggggccgggagggcggcatacggtgccacaacgagacgtggcccgtcacgcggaaggggtactggggcagcggcgcggaccggcggatgatggaggtgatgtccgacgtggtgggccggatgcgggtgcccgtcacgctgctcaacgtcacgcagctcacggagcaccgcgtcgacgcccacgtctccgtgtacaccgagaccggcggcgagctgctcaccgacgcgcagagggccgacccgcagacgcacacggactgcatccactggtgcgtgcccggcgtgccggacacgtggaaccagatcctctacgcgcacttgtagcagcaggttcggtcacagtcacagccgcgagaacgaacaacggggacacgtaccgaaatccagctgggaataattttagttacggtaggtcgtcgtccggccgagttcaattcagacatgatagatccagttcaaatcatcgctcggacagaaaatgcctgagcttgtactgctctgctttgtcacacaggcagagcgcgtcacgcacgcttgctcacacacatacaatacacacggacacaccttttcct

SEQ ID NO: 25981 - protein, 428 aa, Zea mays subsp. mays
  peptide (1)..(428): Ceres Seq. ID no. 12365402
  misc_feature (258)..(428): Pfam Name: Pfam Description:  Arabidopsis proteins of unknown function
  misc_feature (13)..(428): NCBI GI NO: 18412850 NR Description: putative protein; protein id: At5g01360
  misc_feature (201)..(428): NCBI GI NO: 11291874 NR Description: hypothetical protein T10O8
  misc_feature (13)..(143): NCBI GI NO: 11291874 NR Description: hypothetical protein T10O8
  misc_feature (69)..(428): NCBI GI NO: 15228429 NR Description: unknown protein; protein id: At3g11030.1
  misc_feature (85)..(428): NCBI GI NO: 15228789 NR Description: putative protein; protein id: At3g55990.1
  misc_feature (85)..(428): NCBI GI NO: 26452343 NR Description: unknown protein [Arabidopsis thaliana]
  misc_feature (88)..(428): NCBI GI NO: 15219382 NR Description: hypothetical protein; protein id: At1g73140.1
  misc_feature (75)..(428): NCBI GI NO: 28876013 NR Description: unknown protein
  misc_feature (71)..(428): NCBI GI NO: 28393743 NR Description: unknown protein [Arabidopsis thaliana]
  misc_feature (85)..(428): NCBI GI NO: 18405283 NR Description: expressed protein; protein id: At2g40150
MVQIAAVKRMKGRAPLSVVVAIIGGLALAGVIFTDDLRSLTEIMEKKGKAKEHKRTTSLHAGTRTRKMPLTPPPPPQPAKAAFDPSRCSVTEGYWAYNRSKELLYTDQTCPFIDRQVSCQRNGRPDSDYLRWDWHLDDCSLPRFDPVALLETLRGKRMMFVGDSLQMGQWLSMVCLVNSAVPYTARSMERSTTLSVFTATEYNATIEFYWAPYLVEANSDRNIRLGADGRVLHVDAVELHARHWKGVDILVFDSYVWWMTGSRIKSVWGSFGDDGYEELDAWVAFRLGLKTWANWVDANIDPNATRVFFMSISTTHMRSEDWGREGGIRCHNETWPVTRKGYWGSGADRRMMEVMSDVVGRMRVPVTLLNVTQLTEHRVDAHVSVYTETGGELLTDAQRADPQTHTDCIHWCVPGVPDTWNQILYAHL

SEQ ID NO: 25982 - protein, 419 aa, Zea mays subsp. mays
  peptide (1)..(419): Ceres Seq. ID no. 12365403
  misc_feature (249)..(419): Pfam Name: Pfam Description:  Arabidopsis proteins of unknown function
  misc_feature (4)..(419): NCBI GI NO: 18412850 NR Description: putative protein; protein id: At5g01360
  misc_feature (192)..(419): NCBI GI NO: 11291874 NR Description: hypothetical protein T10O8
  misc_feature (4)..(134): NCBI GI NO: 11291874 NR Description: hypothetical protein T10O8
  misc_feature (60)..(419): NCBI GI NO: 15228429 NR Description: unknown protein; protein id: At3g11030.1
  misc_feature (76)..(419): NCBI GI NO: 15228789 NR Description: putative protein; protein id: At3g55990.1
  misc_feature (76)..(419): NCBI GI NO: 26452343 NR Description: unknown protein [Arabidopsis thaliana]
  misc_feature (79)..(419): NCBI GI NO: 15219382 NR Description: hypothetical protein; protein id: At1g73140.1
  misc_feature (66)..(419): NCBI GI NO: 28876013 NR Description: unknown protein
  misc_feature (62)..(419): NCBI GI NO: 28393743 NR Description: unknown protein [Arabidopsis thaliana]
  misc_feature (76)..(419): NCBI GI NO: 18405283 NR Description: expressed protein; protein id: At2g40150
MKGRAPLSVVVAIIGGLALAGVIFTDDLRSLTEIMEKKGKAKEHKRTTSLHAGTRTRKMPLTPPPPPQPAKAAFDPSRCSVTEGYWAYNRSKELLYTDQTCPFIDRQVSCQRNGRPDSDYLRWDWHLDDCSLPRFDPVALLETLRGKRMMFVGDSLQMGQWLSMVCLVNSAVPYTARSMERSTTLSVFTATEYNATIEFYWAPYLVEANSDRNIRLGADGRVLHVDAVELHARHWKGVDILVFDSYVWWMTGSRIKSVWGSFGDDGYEELDAWVAFRLGLKTWANWVDANIDPNATRVFFMSISTTHMRSEDWGREGGIRCHNETWPVTRKGYWGSGADRRMMEVMSDVVGRMRVPVTLLNVTQLTEHRVDAHVSVYTETGGELLTDAQRADPQTHTDCIHWCVPGVPDTWNQILYAHL

SEQ ID NO: 25983 - protein, 385 aa, Zea mays subsp. mays
  peptide (1)..(385): Ceres Seq. ID no. 12365404
  misc_feature (215)..(385): Pfam Name: Pfam Description:  Arabidopsis proteins of unknown function
  misc_feature (1)..(385): NCBI GI NO: 18412850 NR Description: putative protein; protein id: At5g01360
  misc_feature (158)..(385): NCBI GI NO: 11291874 NR Description: hypothetical protein T10O8
  misc_feature (1)..(100): NCBI GI NO: 11291874 NR Description: hypothetical protein T10O8
  misc_feature (26)..(385): NCBI GI NO: 15228429 NR Description: unknown protein; protein id: At3g11030.1
  misc_feature (42)..(385): NCBI GI NO: 15228789 NR Description: putative protein; protein id: At3g55990.1
  misc_feature (42)..(385): NCBI GI NO: 26452343 NR Description: unknown protein [Arabidopsis thaliana]
  misc_feature (45)..(385): NCBI GI NO: 15219382 NR Description: hypothetical protein; protein id: At1g73140.1
  misc_feature (32)..(385): NCBI GI NO: 28876013 NR Description: unknown protein
  misc_feature (28)..(385): NCBI GI NO: 28393743 NR Description: unknown protein [Arabidopsis thaliana]
  misc_feature (42)..(385): NCBI GI NO: 18405283 NR Description: expressed protein; protein id: At2g40150
MEKKGKAKEHKRTTSLHAGTRTRKMPLTPPPPPQPAKAAFDPSRCSVTEGYWAYNRSKELLYTDQTCPFIDRQVSCQRNGRPDSDYLRWDWHLDDCSLPRFDPVALLETLRGKRMMFVGDSLQMGQWLSMVCLVNSAVPYTARSMERSTTLSVFTATEYNATIEFYWAPYLVEANSDRNIRLGADGRVLHVDAVELHARHWKGVDILVFDSYVWWMTGSRIKSVWGSFGDDGYEELDAWVAFRLGLKTWANWVDANIDPNATRVFFMSISTTHMRSEDWGREGGIRCHNETWPVTRKGYWGSGADRRMMEVMSDVVGRMRVPVTLLNVTQLTEHRVDAHVSVYTETGGELLTDAQRADPQTHTDCIHWCVPGVPDTWNQILYAHL

SEQ ID NO: 25984 - DNA, 1372 bp, Zea mays subsp. mays
  misc_feature (1)..(1372): Ceres Seq. ID no. 12345991
gtgcgtgcgttacccgcgctcgagacaaggcgttgtctcactctcatcatccgtgcagtgctggacgatcgcttcttgtccccgtctcggcttctcgcctcttcggcggcagcggggcatcgattgcaatggacgcgcccttcttccacgagctcaggcggcaggcctcctcctacctgaccggcaagatccgctccgcgcggctggcgctcaccgacgtcaccccgacgcagctcttgacggaggaggcgacgaacggggacgcgtcgccgccgaacgtcaggacgatggggcgcatagcccggcaggcgttcgacgtcgacgagtacgtcaggatcacgggcgtcctgcacgggcgcctcgcgagcttcgaccgcaggcagtggcgggaggcgtacaaggcgctcctcctcctcgagcacctcctcacgcacgggccccgcagcgtcgcggtggagttccacaaggacagggaggccatcgaccggatggccaccttccaacacgtcgacgagaaaggcttcaactggggcctgacggtgaggagcaagtcggagcgcgtgctcaagctgctggagcgcggcccgttcctggaggaggagcgcgagcgggcgcgcaagatcgcgcgcgagatcacgggcttcggcagcttcagcctcagcgcaggcgcctcccaccacgccgtgtcgcagtcgcagccacccggtgacgacgggaaccgcggcgacggccggagcagctccaagcgcgaggagcggcagaggcacgacgacggcggccgattcgggcggagccactcgcagttcgaggagcggtggtggaagcacaaggacggtgacgacggcgacaaggagaatctgatacagagcccggagccgacagcacgggtcgcgccgcgggaagtggatgcggaggcggaggaggaggagctgcaccaccaccagctccatccgttccacgggttggggcaaaaacagcggccggaggcgacgctgctcctgagccagtgacgggatcagtcggttcgtgtcatggtgacgtgaaaagaaccgtgtgcttttctcccttcctccaaggctgcagggtcagtattttactgacactgcttggtgcatcaggcatctcatgcgccatgaatggccgcttgcttggcctcgtaaaatttctttccttcagttcggaacttcggatgccagaatgtactagagaccaccacatacaggcatgtctcaagcttccagtaactctctagaaaccacgtattctaggagtgcgagaatgggatcctcctgcccaagtgcagctgtgctaatcttttactctgaacctgtgaaccatctactgaaggaaagcaaaaggcagtagttattcc

SEQ ID NO: 25985 - protein, 335 aa, Zea mays subsp. mays
  peptide (1)..(335): Ceres Seq. ID no. 12345992
  misc_feature (73)..(173): Pfam Name: Pfam Description:  ENTH domain
  misc_feature (43)..(173): NCBI GI NO: 34908158 NR Description: P0408C03.22
  misc_feature (174)..(260): NCBI GI NO: 34908158 NR Description: P0408C03.22
  misc_feature (261)..(335): NCBI GI NO: 34908158 NR Description: P0408C03.22
  misc_feature (39)..(230): NCBI GI NO: 15231451 NR Description: putative protein; protein id: At3g46540
  misc_feature (39)..(230): NCBI GI NO: 21536910 NR Description: unknown [Arabidopsis thaliana]
  misc_feature (43)..(218): NCBI GI NO: 22329424 NR Description: hypothetical protein; protein id: At1g08670
  misc_feature (43)..(231): NCBI GI NO: 11994320 NR Description: gene_id:MLM24.8~unknown protein
  misc_feature (123)..(218): NCBI GI NO: 7485982 NR Description: hypothetical protein F22O13
  misc_feature (43)..(79): NCBI GI NO: 7485982 NR Description: hypothetical protein F22O13
  misc_feature (62)..(282): NCBI GI NO: 24648991 NR Description: CG31170-PA [Drosophila melanogaster]
ACVTRARDKALSHSHHPCSAGRSLLVPVSASRLFGGSGASIAMDAPFFHELRRQASSYLTGKIRSARLALTDVTPTQLLTEEATNGDASPPNVRTMGRIARQAFDVDEYVRITGVLHGRLASFDRRQWREAYKALLLLEHLLTHGPRSVAVEFHKDREAIDRMATFQHVDEKGFNWGLTVRSKSERVLKLLERGPFLEEERERARKIAREITGFGSFSLSAGASHHAVSQSQPPGDDGNRGDGRSSSKREERQRHDDGGRFGRSHSQFEERWWKHKDGDDGDKENLIQSPEPTARVAPREVDAEAEEEELHHHQLHPFHGLGQKQRPEATLLLSQ

SEQ ID NO: 25986 - protein, 293 aa, Zea mays subsp. mays
  peptide (1)..(293): Ceres Seq. ID no. 12345993
  misc_feature (31)..(131): Pfam Name: Pfam Description:  ENTH domain
  misc_feature (1)..(131): NCBI GI NO: 34908158 NR Description: P0408C03.22
  misc_feature (132)..(218): NCBI GI NO: 34908158 NR Description: P0408C03.22
  misc_feature (219)..(293): NCBI GI NO: 34908158 NR Description: P0408C03.22
  misc_feature (1)..(188): NCBI GI NO: 15231451 NR Description: putative protein; protein id: At3g46540
  misc_feature (1)..(188): NCBI GI NO: 21536910 NR Description: unknown [Arabidopsis thaliana]
  misc_feature (1)..(176): NCBI GI NO: 22329424 NR Description: hypothetical protein; protein id: At1g08670
  misc_feature (1)..(189): NCBI GI NO: 11994320 NR Description: gene_id:MLM24.8~unknown protein
  misc_feature (81)..(176): NCBI GI NO: 7485982 NR Description: hypothetical protein F22O13
  misc_feature (1)..(37): NCBI GI NO: 7485982 NR Description: hypothetical protein F22O13
  misc_feature (20)..(240): NCBI GI NO: 24648991 NR Description: CG31170-PA [Drosophila melanogaster]
MDAPFFHELRRQASSYLTGKIRSARLALTDVTPTQLLTEEATNGDASPPNVRTMGRIARQAFDVDEYVRITGVLHGRLASFDRRQWREAYKALLLLEHLLTHGPRSVAVEFHKDREAIDRMATFQHVDEKGFNWGLTVRSKSERVLKLLERGPFLEEERERARKIAREITGFGSFSLSAGASHHAVSQSQPPGDDGNRGDGRSSSKREERQRHDDGGRFGRSHSQFEERWWKHKDGDDGDKENLIQSPEPTARVAPREVDAEAEEEELHHHQLHPFHGLGQKQRPEATLLLSQ

SEQ ID NO: 25987 - protein, 240 aa, Zea mays subsp. mays
  peptide (1)..(240): Ceres Seq. ID no. 12345994
  misc_feature (1)..(78): Pfam Name: Pfam Description:  ENTH domain
  misc_feature (1)..(78): NCBI GI NO: 34908158 NR Description: P0408C03.22
  misc_feature (79)..(165): NCBI GI NO: 34908158 NR Description: P0408C03.22
  misc_feature (166)..(240): NCBI GI NO: 34908158 NR Description: P0408C03.22
  misc_feature (1)..(135): NCBI GI NO: 15231451 NR Description: putative protein; protein id: At3g46540
  misc_feature (1)..(135): NCBI GI NO: 21536910 NR Description: unknown [Arabidopsis thaliana]
  misc_feature (1)..(123): NCBI GI NO: 22329424 NR Description: hypothetical protein; protein id: At1g08670
  misc_feature (1)..(136): NCBI GI NO: 11994320 NR Description: gene_id:MLM24.8~unknown protein
  misc_feature (28)..(123): NCBI GI NO: 7485982 NR Description: hypothetical protein F22O13
  misc_feature (1)..(187): NCBI GI NO: 24648991 NR Description: CG31170-PA [Drosophila melanogaster]
  misc_feature (1)..(216): NCBI GI NO: 7243706 NR Description: epsin-like protein [Drosophila melanogaster]
MGRIARQAFDVDEYVRITGVLHGRLASFDRRQWREAYKALLLLEHLLTHGPRSVAVEFHKDREAIDRMATFQHVDEKGFNWGLTVRSKSERVLKLLERGPFLEEERERARKIAREITGFGSFSLSAGASHHAVSQSQPPGDDGNRGDGRSSSKREERQRHDDGGRFGRSHSQFEERWWKHKDGDDGDKENLIQSPEPTARVAPREVDAEAEEEELHHHQLHPFHGLGQKQRPEATLLLSQ

SEQ ID NO: 25988 - DNA, 1313 bp, Zea mays subsp. mays; identical to SEQ ID NO: 24894
  misc_feature (1)..(1313): Ceres Seq. ID no. 13564341

SEQ ID NO: 25989 - protein, 377 aa, Zea mays subsp. mays; identical to SEQ ID NO: 24895
  peptide (1)..(377): Ceres Seq. ID no. 13564342
  misc_feature (83)..(247): Pfam Name: Pfam Description:  Radical SAM superfamily
  misc_feature (3)..(377): NCBI GI NO: 38175566 NR Description: putative biotin synthase
  misc_feature (4)..(376): NCBI GI NO: 15224273 NR Description: biotin synthase (BioB) (BIO2)
  misc_feature (4)..(376): NCBI GI NO: 28392925 NR Description: putative biotin synthase (Bio B)
  misc_feature (40)..(360): NCBI GI NO: 23135112 NR Description: hypothetical protein [Cytophaga hutchinsonii]
  misc_feature (17)..(367): NCBI GI NO: 40738982 NR Description: hypothetical protein AN6643.2
  misc_feature (40)..(348): NCBI GI NO: 19075228 NR Description: biotin synthase (EC 2.8.1.6)
  misc_feature (40)..(348): NCBI GI NO: 2961328 NR Description: Biotin synthase [Schizosaccharomyces pombe]
  misc_feature (38)..(364): NCBI GI NO: 23127772 NR Description: hypothetical protein [Nostoc punctiforme]
  misc_feature (40)..(354): NCBI GI NO: 17229413 NR Description: biotin synthase [Nostoc sp. PCC 7120]
  misc_feature (39)..(350): NCBI GI NO: 11596107 NR Description: biotin synthase long form [Pichia jadinii]

SEQ ID NO: 25990 - protein, 374 aa, Zea mays subsp. mays; identical to SEQ ID NO: 24896
  peptide (1)..(374): Ceres Seq. ID no. 13564343
  misc_feature (80)..(244): Pfam Name: Pfam Description:  Radical SAM superfamily
  misc_feature (1)..(374): NCBI GI NO: 38175566 NR Description: putative biotin synthase
  misc_feature (1)..(373): NCBI GI NO: 15224273 NR Description: biotin synthase (BioB) (BIO2)
  misc_feature (1)..(373): NCBI GI NO: 28392925 NR Description: putative biotin synthase (Bio B)
  misc_feature (37)..(357): NCBI GI NO: 23135112 NR Description: hypothetical protein [Cytophaga hutchinsonii]
  misc_feature (14)..(364): NCBI GI NO: 40738982 NR Description: hypothetical protein AN6643.2
  misc_feature (37)..(345): NCBI GI NO: 19075228 NR Description: biotin synthase (EC 2.8.1.6)
  misc_feature (37)..(345): NCBI GI NO: 2961328 NR Description: Biotin synthase [Schizosaccharomyces pombe]
  misc_feature (35)..(361): NCBI GI NO: 23127772 NR Description: hypothetical protein [Nostoc punctiforme]
  misc_feature (37)..(351): NCBI GI NO: 17229413 NR Description: biotin synthase [Nostoc sp. PCC 7120]
  misc_feature (36)..(347): NCBI GI NO: 11596107 NR Description: biotin synthase long form [Pichia jadinii]

SEQ ID NO: 25991 - protein, 266 aa, Zea mays subsp. mays; identical to SEQ ID NO: 24897
  peptide (1)..(266): Ceres Seq. ID no. 13564344
  misc_feature (1)..(136): Pfam Name: Pfam Description:  Radical SAM superfamily
  misc_feature (1)..(266): NCBI GI NO: 38175566 NR Description: putative biotin synthase
  misc_feature (1)..(265): NCBI GI NO: 15224273 NR Description: biotin synthase (BioB) (BIO2)
  misc_feature (1)..(265): NCBI GI NO: 28392925 NR Description: putative biotin synthase (Bio B)
  misc_feature (1)..(249): NCBI GI NO: 23135112 NR Description: hypothetical protein [Cytophaga hutchinsonii]
  misc_feature (1)..(256): NCBI GI NO: 40738982 NR Description: hypothetical protein AN6643.2
  misc_feature (1)..(237): NCBI GI NO: 19075228 NR Description: biotin synthase (EC 2.8.1.6)
  misc_feature (1)..(237): NCBI GI NO: 2961328 NR Description: Biotin synthase [Schizosaccharomyces pombe]
  misc_feature (1)..(253): NCBI GI NO: 23127772 NR Description: hypothetical protein [Nostoc punctiforme]
  misc_feature (1)..(243): NCBI GI NO: 17229413 NR Description: biotin synthase [Nostoc sp. PCC 7120]
  misc_feature (1)..(239): NCBI GI NO: 11596107 NR Description: biotin synthase long form [Pichia jadinii]

SEQ ID NO: 25992 - DNA, 1104 bp, Zea mays subsp. mays
  misc_feature (1)..(1104): Ceres Seq. ID no. 12402575
gtcctccatcaaaagaaggcagggaaagatctgatctggggggtgagagagcaggaggagaaagccaagccattgccctcccctcttgaaggcttggagcttggttctacatcctcttctcttcccctccgtctctctctctctctctatttggtttgcttgcttgcctctactagactctagtcgtcgggtccggccatggccaccatcctggagaacatccagaaggcgaggttcctgccgaccaggccgctcaaggacgagctgcccaccttccagggcggcggcaagagcaaggaggagagccacctcatgggcctgaggaagcggctgtccagcttctccggcaagatccagcccatctcctccgcgtcggccgccgagtgggcgttccgccgctccaagtcggcgccctccctcggcgccgccttcgccgcggggggcggctccctgaggcagtggtggcagtggggcgtcggctggctcctgtccaagaagcccgggttcgcgggcgacctcgagatgaacgaggaggaggtcgccgcgctgggccgccagagcaggggcacctgggcccacgtcctcttcaagatgcggtccggcgtccgccgcctcgtcgcgtccgcgcactcgctccccaccacgcacaagcagcagtccctgccgtcgtcgtcggcctcggcggcgcacagcgtccagtgcaagccggcggcgtcgttcgcctacgcgcagcggcagagcttccaccacaccggccacgccatggcgcactaggcagcgtctcgcggttgccggtgccgtctgcggccggtctcctccagatccagagatggagggcgatgagaggcgcgggaagaagaagattcaggttacaggtgcgtgagatcgacggtgaagatgtcgttgaattgatgatgaatgaaatggaatgtaggattaccattctgttgtctgtgtagatctagtgcccctgtagaggtgaacaagtgttatactacatgctcgttctttatattattcttttgggttcgttcgttggacgatgtaaatgtaaaatgtttggttgatcttgtactgttcaataaaactgatgcaaattgtgcc

SEQ ID NO: 25993 - protein, 191 aa, Zea mays subsp. mays
  peptide (1)..(191): Ceres Seq. ID no. 12402576
  misc_feature (1)..(175): NCBI GI NO: 28411879 NR Description: OSJNBa0016N23.32
  misc_feature (1)..(151): NCBI GI NO: 21593793 NR Description: unknown [Arabidopsis thaliana]
  misc_feature (1)..(151): NCBI GI NO: 18418660 NR Description: putative protein; protein id: At4g35320
  misc_feature (41)..(151): NCBI GI NO: 7486016 NR Description: hypothetical protein F23E12
  misc_feature (41)..(151): NCBI GI NO: 15227807 NR Description: unknown protein; protein id: At2g17300.1
MATILENIQKARFLPTRPLKDELPTFQGGGKSKEESHLMGLRKRLSSFSGKIQPISSASAAEWAFRRSKSAPSLGAAFAAGGGSLRQWWQWGVGWLLSKKPGFAGDLEMNEEEVAALGRQSRGTWAHVLFKMRSGVRRLVASAHSLPTTHKQQSLPSSSASAAHSVQCKPAASFAYAQRQSFHHTGHAMAH

SEQ ID NO: 25994 - protein, 153 aa, Zea mays subsp. mays
  peptide (1)..(153): Ceres Seq. ID no. 12402577
  misc_feature (1)..(137): NCBI GI NO: 28411879 NR Description: OSJNBa0016N23.32
  misc_feature (1)..(113): NCBI GI NO: 21593793 NR Description: unknown [Arabidopsis thaliana]
  misc_feature (1)..(113): NCBI GI NO: 18418660 NR Description: putative protein; protein id: At4g35320
  misc_feature (3)..(113): NCBI GI NO: 7486016 NR Description: hypothetical protein F23E12
  misc_feature (3)..(113): NCBI GI NO: 15227807 NR Description: unknown protein; protein id: At2g17300.1
MGLRKRLSSFSGKIQPISSASAAEWAFRRSKSAPSLGAAFAAGGGSLRQWWQWGVGWLLSKKPGFAGDLEMNEEEVAALGRQSRGTWAHVLFKMRSGVRRLVASAHSLPTTHKQQSLPSSSASAAHSVQCKPAASFAYAQRQSFHHTGHAMAH

SEQ ID NO: 25995 - DNA, 847 bp, Zea mays subsp. mays
  misc_feature (1)..(847): Ceres Seq. ID no. 12372571
aagtaggtgaaggtcagatcagagtatcaccacttggcaatttctcccccggcacaagcgcatggctaccgtcgggggcaatcgtgctctctatgcagtcgtcgcgctgccacttctcgcgacccttcttcacggaccaatgcggctgtcgcatgccttcccataccgttccctactccagacctgccagcccagcggctccatccagggccgttccggcaactgcaacacggagaacggctccgagtgctgcaagaacgggcgtcgctacaccacatacggctgctccccgcccgtcacgggtagcacccgcgccgtactgactctcaacagcttcgccgagggcggggacggcggcggcgcggccgcctgcacggggaagttctacgacgacagcaagaaggtggtggcgctgtcaactggctggtacaacggcggtagccggtgcagaaagcacatcatgatccacgcgggcaacgggaattccgtgagcgcgttggtcgtcgacgagtgtgactccaccgtgggctgcgacaaggaccacaactttgagccgccgtgccgcaacaacatcgtcgacgggtcgccggcggtgtgggacgctctggggctcaacaaggacgacggccaggcacagatcacctggtccgacgagtgagcgactgtaccaccgctgcaccggccgggtgcgctcgtgcaagtgcaccggccggcacgtctcatgttgccaatatataataagtagtagggtacagtggtacaccctctaaataatcatgcatgaagcagctgttcatctttagacgtgtttaaccatttgcaaaattaaataactgttggccccccg

SEQ ID NO: 25996 - protein, 198 aa, Zea mays subsp. mays
  peptide (1)..(198): Ceres Seq. ID no. 12372572
  misc_feature (7)..(197): NCBI GI NO: 37535592 NR Description: hypothetical protein
  misc_feature (42)..(198): NCBI GI NO: 37535604 NR Description: hypothetical protein
  misc_feature (59)..(196): NCBI GI NO: 7406671 NR Description: putative ripening-related protein [Vitis vinifera]
  misc_feature (42)..(197): NCBI GI NO: 38346744 NR Description: OSJNBa0081G05.7
  misc_feature (42)..(198): NCBI GI NO: 37535588 NR Description: hypothetical protein
  misc_feature (75)..(197): NCBI GI NO: 37535576 NR Description: hypothetical protein
  misc_feature (81)..(197): NCBI GI NO: 37535578 NR Description: hypothetical protein
  misc_feature (80)..(196): NCBI GI NO: 37535604 NR Description: hypothetical protein
  misc_feature (29)..(183): NCBI GI NO: 34897980 NR Description: hypothetical protein~predicted by FGENESH etc.
MATVGGNRALYAVVALPLLATLLHGPMRLSHAFPYRSLLQTCQPSGSIQGRSGNCNTENGSECCKNGRRYTTYGCSPPVTGSTRAVLTLNSFAEGGDGGGAAACTGKFYDDSKKVVALSTGWYNGGSRCRKHIMIHAGNGNSVSALVVDECDSTVGCDKDHNFEPPCRNNIVDGSPAVWDALGLNKDDGQAQITWSDE

SEQ ID NO: 25997 - protein, 172 aa, Zea mays subsp. mays
  peptide (1)..(172): Ceres Seq. ID no. 12372573
  misc_feature (1)..(171): NCBI GI NO: 37535592 NR Description: hypothetical protein
  misc_feature (16)..(172): NCBI GI NO: 37535604 NR Description: hypothetical protein
  misc_feature (33)..(170): NCBI GI NO: 7406671 NR Description: putative ripening-related protein [Vitis vinifera]
  misc_feature (16)..(171): NCBI GI NO: 38346744 NR Description: OSJNBa0081G05.7
  misc_feature (16)..(172): NCBI GI NO: 37535588 NR Description: hypothetical protein
  misc_feature (49)..(171): NCBI GI NO: 37535576 NR Description: hypothetical protein
  misc_feature (55)..(171): NCBI GI NO: 37535578 NR Description: hypothetical protein
  misc_feature (54)..(170): NCBI GI NO: 37535604 NR Description: hypothetical protein
  misc_feature (3)..(157): NCBI GI NO: 34897980 NR Description: hypothetical protein~predicted by FGENESH etc.
MRLSHAFPYRSLLQTCQPSGSIQGRSGNCNTENGSECCKNGRRYTTYGCSPPVTGSTRAVLTLNSFAEGGDGGGAAACTGKFYDDSKKVVALSTGWYNGGSRCRKHIMIHAGNGNSVSALVVDECDSTVGCDKDHNFEPPCRNNIVDGSPAVWDALGLNKDDGQAQITWSDE

SEQ ID NO: 25998 - protein, 106 aa, Zea mays subsp. mays
  peptide (1)..(106): Ceres Seq. ID no. 12372574
  misc_feature (52)..(106): NCBI GI NO: 11360494 NR Description: antifreeze glycopeptide AFGP polyprotein precursor
VGEGQIRVSPLGNFSPGTSAWLPSGAIVLSMQSSRCHFSRPFFTDQCGCRMPSHTVPYSRPASPAAPSRAVPATATRRTAPSAARTGVATPHTAAPRPSRVAPAPY

SEQ ID NO: 25999 - DNA, 872 bp, Zea mays subsp. mays
  misc_feature (1)..(872): Ceres Seq. ID no. 12353745
gcgtcggttttatgcacgactccttttcgcacccggctggccggctccccacctgctcgcctctcgcgcatcctaccaggagggtgggagacccaggcagcggaggtgtgcgaagctcgcttcgcaccacgcgctgcggcctgcggggcgagagatcgaggcctgagctagggtctggtggcggagatgtcgacgccggcgaggaagcgcctgatgcgggacttcaagcgccttcagcaggacccgcccgccggcatcagcggcgcgccgtacgacaacaatatcatgctctggaactccgtcatattcgggccggatgacacgccgtgggatggaggcacgttcaagctgactctgcaatttacagaagattaccccaacaaacctccaactgttcggtttgtttcgaggatgtttcatccaaacatctatgcggatggaagcatctgtttggacatcctacaaaaccagtggagccctatatatgatgttgcggcaatattgacctctattcagtccctgctgtgtgacccaaacccaaattctcctgctaactctgaagcagccagaatgttcagcgagaacaagcgtgagtacaaccgcaaagttcgtgaggttgtggagcagagctggacagccgactaaaactttatccgcttcgccaggcggtgtaaataaagcatctgtctttcctacttggccggtctgttttaccgttagaaatcctcagctatcgttgtgttcttgtggttcagtcccttgttgtagtgatgcctgcgggttttcctaatgtagtgctgaacggtttcataaactcggatattggtgcatatgtaacagatatagctaagtcaagttgttgcttggtttgc

SEQ ID NO: 26000 - protein, 152 aa, Zea mays subsp. mays
  peptide (1)..(152): Ceres Seq. ID no. 12353746
  misc_feature (1)..(152): NCBI GI NO: 13516451 NR Description: ubiquitin-conjugating enzyme (E2)
  misc_feature (1)..(152): NCBI GI NO: 33146810 NR Description: OsRad6 [Oryza sativa (japonica cultivar-group)]
  misc_feature (1)..(152): NCBI GI NO: 13516453 NR Description: ubiquitin-conjugating enzyme (E2)
  misc_feature (1)..(152): NCBI GI NO: 8118527 NR Description: ubiquitin conjugating protein [Avicennia marina]
  misc_feature (1)..(152): NCBI GI NO: 136640 NR Description: Ubiquitin-conjugating enzyme E2-17 kDa
  misc_feature (1)..(152): NCBI GI NO: 18844990 NR Description: Rad6 [Oryza sativa (japonica cultivar-group)]
  misc_feature (1)..(152): NCBI GI NO: 464980 NR Description: Ubiquitin-conjugating enzyme E2-17 kDa
  misc_feature (1)..(152): NCBI GI NO: 18395424 NR Description: E2, ubiquitin-conjugating enzyme 2
  misc_feature (1)..(152): NCBI GI NO: 18394114 NR Description: E2, ubiquitin-conjugating enzyme 1
  misc_feature (1)..(149): NCBI GI NO: 18424601 NR Description: E2, ubiquitin-conjugating enzyme 3
MSTPARKRLMRDFKRLQQDPPAGISGAPYDNNIMLWNSVIFGPDDTPWDGGTFKLTLQFTEDYPNKPPTVRFVSRMFHPNIYADGSICLDILQNQWSPIYDVAAILTSIQSLLCDPNPNSPANSEAARMFSENKREYNRKVREVVEQSWTAD

SEQ ID NO: 26001 - protein, 143 aa, Zea mays subsp. mays
  peptide (1)..(143): Ceres Seq. ID no. 12353747
  misc_feature (1)..(143): NCBI GI NO: 13516451 NR Description: ubiquitin-conjugating enzyme (E2)
  misc_feature (1)..(143): NCBI GI NO: 33146810 NR Description: OsRad6 [Oryza sativa (japonica cultivar-group)]
  misc_feature (1)..(143): NCBI GI NO: 13516453 NR Description: ubiquitin-conjugating enzyme (E2)
  misc_feature (1)..(143): NCBI GI NO: 8118527 NR Description: ubiquitin conjugating protein [Avicennia marina]
  misc_feature (1)..(143): NCBI GI NO: 136640 NR Description: Ubiquitin-conjugating enzyme E2-17 kDa
  misc_feature (1)..(143): NCBI GI NO: 18844990 NR Description: Rad6 [Oryza sativa (japonica cultivar-group)]
  misc_feature (1)..(143): NCBI GI NO: 464980 NR Description: Ubiquitin-conjugating enzyme E2-17 kDa
  misc_feature (1)..(143): NCBI GI NO: 18395424 NR Description: E2, ubiquitin-conjugating enzyme 2
  misc_feature (1)..(143): NCBI GI NO: 18394114 NR Description: E2, ubiquitin-conjugating enzyme 1
  misc_feature (1)..(140): NCBI GI NO: 18424601 NR Description: E2, ubiquitin-conjugating enzyme 3
MRDFKRLQQDPPAGISGAPYDNNIMLWNSVIFGPDDTPWDGGTFKLTLQFTEDYPNKPPTVRFVSRMFHPNIYADGSICLDILQNQWSPIYDVAAILTSIQSLLCDPNPNSPANSEAARMFSENKREYNRKVREVVEQSWTAD

SEQ ID NO: 26002 - protein, 119 aa, Zea mays subsp. mays
  peptide (1)..(119): Ceres Seq. ID no. 12353748
  misc_feature (1)..(119): NCBI GI NO: 13516451 NR Description: ubiquitin-conjugating enzyme (E2)
  misc_feature (1)..(119): NCBI GI NO: 33146810 NR Description: OsRad6 [Oryza sativa (japonica cultivar-group)]
  misc_feature (1)..(119): NCBI GI NO: 13516453 NR Description: ubiquitin-conjugating enzyme (E2)
  misc_feature (1)..(119): NCBI GI NO: 8118527 NR Description: ubiquitin conjugating protein [Avicennia marina]
  misc_feature (1)..(119): NCBI GI NO: 136640 NR Description: Ubiquitin-conjugating enzyme E2-17 kDa
  misc_feature (1)..(119): NCBI GI NO: 18844990 NR Description: Rad6 [Oryza sativa (japonica cultivar-group)]
  misc_feature (1)..(119): NCBI GI NO: 464980 NR Description: Ubiquitin-conjugating enzyme E2-17 kDa
  misc_feature (1)..(119): NCBI GI NO: 18395424 NR Description: E2, ubiquitin-conjugating enzyme 2
  misc_feature (1)..(119): NCBI GI NO: 18394114 NR Description: E2, ubiquitin-conjugating enzyme 1
  misc_feature (1)..(116): NCBI GI NO: 18424601 NR Description: E2, ubiquitin-conjugating enzyme 3
MLWNSVIFGPDDTPWDGGTFKLTLQFTEDYPNKPPTVRFVSRMFHPNIYADGSICLDILQNQWSPIYDVAAILTSIQSLLCDPNPNSPANSEAARMFSENKREYNRKVREVVEQSWTAD

SEQ ID NO: 26003 - DNA, 1073 bp, Zea mays subsp. mays
  misc_feature (1)..(1073): Ceres Seq. ID no. 13496658
tcshatcgaaaaagggattattcattttccgaccaaaaaacgaaaaaggcaaatccaaagacggagaagaagaagagtcgcgaaggaatggggaagggcaaggtgcatccctcgccgccgccagctgccgcggccgcggccgcgggcggcggagccggggagacgacggcggaggcggtgctgatgcggctgatgccggcggcggtgctcgcgdccgcggcgccgctmggggccgaggggaaggaggtgctggcgtacctggtgctggcgtcgctgcggtcctcggccccgccgacgccggcgcgcggggacgggcaccgcccggagctcgggtgcggctgcttcgggtgctacacggcctactggtcccgctgggacgggtcccccgagggcgaccgcgaggccatccaccgcgccatcgaggcgttcgaggagcacctggcggaggaggagaagggccgcgggaagggaggcgggccccgccgcgggcggaagaagcgcgccgagggcaaggggaggtggaaggtgaagaaggaaaaggaggtggaggtcggcgtcgatccactcccgcccccgtccgatctccccgccccggaggaggcccccaaggcggaggacggcgcggagtacctgacggcggaggacgagaaggaggaggacgctccgactgcggccgccggcgccgaggatgagaagcggcggcgctggtggggctccgtgmtgagctggaaggcgtggggcctctgggggtcccactagtcaggtccctcccctcgctacgsttcgccctgttcagttagttaggtttggtgctttctttgcttgctgctatctytggggtttagctgctgctgctcaggtggattagttggtgatggttagtactcctacgctatttggcagtytggatggggaygttgtgttttagtatctgttggtgcggtgtgtcacgtgttaggctcttctcttgtgtactgkacatacacgcaggcatggagtgtgtggtttggttggtgtaaattatcattgtaatgtaatgtactcctactaatgtaaatgcggcagtagttgtg

SEQ ID NO: 26004 - protein, 252 aa, Zea mays subsp. mays
  peptide (1)..(252): Ceres Seq. ID no. 15222999
  misc_feature (20)..(169): NCBI GI NO: 15221709 NR Description: hypothetical protein [Arabidopsis thaliana]
  misc_feature (32)..(171): NCBI GI NO: 13430564 NR Description: unknown protein [Arabidopsis thaliana]
  misc_feature (32)..(171): NCBI GI NO: 9955553 NR Description: putative protein [Arabidopsis thaliana]
  misc_feature (32)..(171): NCBI GI NO: 18416955 NR Description: expressed protein [Arabidopsis thaliana]
  misc_feature (20)..(169): NCBI GI NO: 7486369 NR Description: hypothetical protein F3I6
  misc_feature (32)..(250): NCBI GI NO: 15221172 NR Description: expressed protein [Arabidopsis thaliana]
  misc_feature (32)..(164): NCBI GI NO: 7486149 NR Description: hypothetical protein F25O1
  misc_feature (32)..(164): NCBI GI NO: 7940288 NR Description: F2401.15 [Arabidopsis thaliana]
  misc_feature (37)..(171): NCBI GI NO: 21554382 NR Description: unknown [Arabidopsis thaliana]
  misc_feature (32)..(164): NCBI GI NO: 15220778 NR Description: expressed protein [Arabidopsis thaliana]
  misc_feature (1)..(1): Xaa is any aa, unknown or other
  misc_feature (2)..(2): Xaa is any aa, unknown or other
  misc_feature (72)..(72): Xaa is any aa, unknown or other
  misc_feature (76)..(76): Xaa is any aa, unknown or other
  misc_feature (241)..(241): Xaa is any aa, unknown or other
XXRKRDYSFSDQKTKKANPKTEKKKSREGMGKGKVHPSPPPAAAAAAAGGGAGETTAEAVLMRLMPAAVLAXAAPXGAEGKEVLAYLVLASLRSSAPPTPARGDGHRPELGCGCFGCYTAYWSRWDGSPEGDREAIHRAIEAFEEHLAEEEKGRGKGGGPRRGRKKRAEGKGRWKVKKEKEVEVGVDPLPPPSDLPAPEEAPKAEDGAEYLTAEDEKEEDAPTAAAGAEDEKRRRWWGSVXSWKAWGLWGSH

SEQ ID NO: 26005 - protein, 229 aa, Zea mays subsp. mays
  peptide (1)..(229): Ceres Seq. ID no. 15223000
  misc_feature (12)..(212): Pfam Name: Pfam Description:  Sporozoite P67 surface antigen
  misc_feature (32)..(201): NCBI GI NO: 9625624 NR Description: nuclear antigen EBNA1 [Human herpesvirus 4]
  misc_feature (30)..(229): NCBI GI NO: 2911274 NR Description: spidroin 1 [Nephila clavipes]
  misc_feature (30)..(219): NCBI GI NO: 24652652 NR Description: CG13214-PA [Drosophila melanogaster]
  misc_feature (30)..(229): NCBI GI NO: 9625624 NR Description: nuclear antigen EBNA1 [Human herpesvirus 4]
  misc_feature (30)..(229): NCBI GI NO: 9453857 NR Description: EBNA-1 [Cynomolgus Epstein-Barr Virus TsB-B6]
  misc_feature (20)..(229): NCBI GI NO: 15224564 NR Description: glycine-rich protein [Arabidopsis thaliana]
  misc_feature (30)..(229): NCBI GI NO: 9625624 NR Description: nuclear antigen EBNA1 [Human herpesvirus 4]
  misc_feature (10)..(222): NCBI GI NO: 15705840 NR Description: latency associated antigen [Ovine herpesvirus 2]
  misc_feature (20)..(224): NCBI GI NO: 30793991 NR Description: unknown protein [Arabidopsis thaliana]
  misc_feature (12)..(225): NCBI GI NO: 15224564 NR Description: glycine-rich protein [Arabidopsis thaliana]
  misc_feature (1)..(1): Xaa is any aa, unknown or other
  misc_feature (71)..(71): Xaa is any aa, unknown or other
  misc_feature (76)..(76): Xaa is any aa, unknown or other
XSKKGLFIFRPKNEKGKSKDGEEEESRRNGEGQGASLAAASCRGRGRGRRSRGDDGGGGADAADAGGGARXRGAAXGRGEGGAGVPGAGVAAVLGPADAGARGRAPPGARVRLLRVLHGLLVPLGRVPRGRPRGHPPRHRGVRGAPGGGGEGPREGRRAPPRAEEARRGQGEVEGEEGKGGGGRRRSTPAPVRSPRPGGGPQGGGRRGVPDGGGREGGGRSDCGRRRRG

SEQ ID NO: 26006 - protein, 223 aa, Zea mays subsp. mays
  peptide (1)..(223): Ceres Seq. ID no. 15223001
  misc_feature (1)..(140): NCBI GI NO: 15221709 NR Description: hypothetical protein [Arabidopsis thaliana]
  misc_feature (3)..(142): NCBI GI NO: 13430564 NR Description: unknown protein [Arabidopsis thaliana]
  misc_feature (3)..(142): NCBI GI NO: 9955553 NR Description: putative protein [Arabidopsis thaliana]
  misc_feature (3)..(142): NCBI GI NO: 18416955 NR Description: expressed protein [Arabidopsis thaliana]
  misc_feature (1)..(140): NCBI GI NO: 7486369 NR Description: hypothetical protein F3I6
  misc_feature (3)..(221): NCBI GI NO: 15221172 NR Description: expressed protein [Arabidopsis thaliana]
  misc_feature (3)..(135): NCBI GI NO: 7486149 NR Description: hypothetical protein F25O1
  misc_feature (3)..(135): NCBI GI NO: 7940288 NR Description: F2401.15 [Arabidopsis thaliana]
  misc_feature (8)..(142): NCBI GI NO: 21554382 NR Description: unknown [Arabidopsis thaliana]
  misc_feature (3)..(135): NCBI GI NO: 15220778 NR Description: expressed protein [Arabidopsis thaliana]
  misc_feature (43)..(43): Xaa is any aa, unknown or other
  misc_feature (47)..(47): Xaa is any aa, unknown or other
  misc_feature (212)..(212): Xaa is any aa, unknown or other
MGKGKVHPSPPPAAAAAAAGGGAGETTAEAVLMRLMPAAVLAXAAPXGAEGKEVLAYLVLASLRSSAPPTPARGDGHRPELGCGCFGCYTAYWSRWDGSPEGDREAIHRAIEAFEEHLAEEEKGRGKGGGPRRGRKKRAEGKGRWKVKKEKEVEVGVDPLPPPSDLPAPEEAPKAEDGAEYLTAEDEKEEDAPTAAAGAEDEKRRRWWGSVXSWKAWGLWGSH

SEQ ID NO: 26007 - DNA, 1782 bp, Zea mays subsp. mays
  misc_feature (1)..(1782): Ceres Seq. ID no. 12367381
accgttccttttctccaccattgaaacactctctgaccctcactcgctccctgtcacacacactacactcgcaattcatccgcagtcacaagctcggctgctgctcccgcctaacggttgaggcgttgctggtgcacacaggaagggaagggaagggagagctgcacacagctttgctctggctcttggctcccctgtccacctgtcctgtccgtccatcatggaggaaacgcccagcccgcagctctagccgccgtcaatctcgtctcgtatcggagtcgaaggaagtaagaggcgggatggcatgaagcgacctaccaagaatgagaggctgggcaacccccggcacaagtaggaggaagaacccgagcaaccgagccacagggaggaggaggagatgggcaactgcggcacacgggaggagaatgccgtcgtcgctgcgcacgcgcaagttcagcaactccacttgttacaacagccttccaagaacgccaatgcagataggaagcacacctgcatgtcatcagatataagtgacccttccacacctaggaaagttgaagatgccaagaacatttccatatacaacgatgtgattgccttcacattgtttgagctagagacaatcacaaagagcttccgtgttgattatgttcttggcgaaggaggatttgggaccgtttacaagggttacatagatgaaaatgtcagggttgggctgaagtcactgcctgttgcagtcaaggtgctcaacaaagatggacatcaagggcacagagaatggcttaccgaggttaactgcctggggcagttgaggcatccaaatttggtgaagttgatcggatattgctgcgaagatgaccatcggctgcttgtctacgagttcatgtttcgaggaagtctagaaaaccacttattccgaaagacagctacgccattgccctggggtactaggatgtcaatcgcgctgggagccgctaaagggctcgcttgcctccacaacgctcaaaggcccgtcatctacagagatttcaagacatcaaacattctgctggactccgattatactgccaaactgtctgactttggcctcgcaaaagatggccctgaaggtgatcagacgcatgtgtcgacacgggtgatgggaacctacggttatgctgcccctgaatatgtgatgaccggtcacttgactgctcggagtgacgtgtacagcttcggcgtggtcctgctggagctcctgacggggcgcaagtcgatcgacaagtcgcggcccagcagggagcagagcctggtggactgggcgctcccgaagctcaacgacaagaggaggctcctccagatcatcgacccgaggctggaggggcagtactcggccagagccgctcacaagtcctgcagcctcgcgttctactgcctgagccagaaccccaaggccaggccgctcatgagcgacgtcgtcgagaccctcgcgccgttgcagcagggcggcggcggcggcagcgacgcgtcctccggccttcctgactgcagaggccgccgcaggctgaccggcaacagcgtcgtccacttcagggccatccccaaccccaagtgcacgcctgttgtcccggcttgcagagtgcggtgatgttgctgcgcttcggttgaagctgctgggataggttcaggtgtgtactgtgaccatgggtggtggtgcgttttgatgatctgcatgttggattaatgtgggcttggcccaaattaatattcaataatagtcaatgctaatggcccactttt

SEQ ID NO: 26008 - protein, 410 aa, Zea mays subsp. mays
  peptide (1)..(410): Ceres Seq. ID no. 12367382
  misc_feature (81)..(358): Pfam Name: Pfam Description:  Protein kinase domain
  misc_feature (1)..(410): NCBI GI NO: 30679085 NR Description: protein kinase family [Arabidopsis thaliana]
  misc_feature (1)..(410): NCBI GI NO: 9542860 NR Description: protein kinase-like protein [Arabidopsis thaliana]
  misc_feature (1)..(362): NCBI GI NO: 15241220 NR Description: protein kinase-like protein; protein id:At5g56460
  misc_feature (48)..(363): NCBI GI NO: 22773239 NR Description: Putative protein kinase
  misc_feature (44)..(362): NCBI GI NO: 15225019 NR Description: putative protein kinase; protein id: At2g05940
  misc_feature (48)..(381): NCBI GI NO: 22325532 NR Description: putative protein kinase; protein id: At2g07180
  misc_feature (48)..(381): NCBI GI NO: 25287636 NR Description: probable protein kinase
  misc_feature (45)..(362): NCBI GI NO: 30013675 NR Description: Avr9/Cf-9 rapidly elicited protein 264
  misc_feature (48)..(381): NCBI GI NO: 19423982 NR Description: putative protein kinase [Arabidopsis thaliana]
  misc_feature (44)..(362): NCBI GI NO: 10176804 NR Description: serine/threonine protein kinase-like
MGNCGTREENAVVAAHAQVQQLHLLQQPSKNANADRKHTCMSSDISDPSTPRKVEDAKNISIYNDVIAFTLFELETITKSFRVDYVLGEGGFGTVYKGYIDENVRVGLKSLPVAVKVLNKDGHQGHREWLTEVNCLGQLRHPNLVKLIGYCCEDDHRLLVYEFMFRGSLENHLFRKTATPLPWGTRMSIALGAAKGLACLHNAQRPVIYRDFKTSNILLDSDYTAKLSDFGLAKDGPEGDQTHVSTRVMGTYGYAAPEYVMTGHLTARSDVYSFGVVLLELLTGRKSIDKSRPSREQSLVDWALPKLNDKRRLLQIIDPRLEGQYSARAAHKSCSLAFYCLSQNPKARPLMSDVVETLAPLQQGGGGGSDASSGLPDCRGRRRLTGNSVVHFRAIPNPKCTPVVPACRVR

SEQ ID NO: 26009 - protein, 370 aa, Zea mays subsp. mays
  peptide (1)..(370): Ceres Seq. ID no. 12367383
  misc_feature (41)..(318): Pfam Name: Pfam Description:  Protein kinase domain
  misc_feature (1)..(370): NCBI GI NO: 30679085 NR Description: protein kinase family [Arabidopsis thaliana]
  misc_feature (1)..(370): NCBI GI NO: 9542860 NR Description: protein kinase-like protein [Arabidopsis thaliana]
  misc_feature (1)..(322): NCBI GI NO: 15241220 NR Description: protein kinase-like protein; protein id:At5g56460
  misc_feature (8)..(323): NCBI GI NO: 22773239 NR Description: Putative protein kinase
  misc_feature (4)..(322): NCBI GI NO: 15225019 NR Description: putative protein kinase; protein id: At2g05940
  misc_feature (8)..(341): NCBI GI NO: 22325532 NR Description: putative protein kinase; protein id: At2g07180
  misc_feature (8)..(341): NCBI GI NO: 25287636 NR Description: probable protein kinase
  misc_feature (5)..(322): NCBI GI NO: 30013675 NR Description: Avr9/Cf-9 rapidly elicited protein 264
  misc_feature (8)..(341): NCBI GI NO: 19423982 NR Description: putative protein kinase [Arabidopsis thaliana]
  misc_feature (4)..(322): NCBI GI NO: 10176804 NR Description: serine/threonine protein kinase-like
MSSDISDPSTPRKVEDAKNISIYNDVIAFTLFELETITKSFRVDYVLGEGGFGTVYKGYIDENVRVGLKSLPVAVKVLNKDGHQGHREWLTEVNCLGQLRHPNLVKLIGYCCEDDHRLLVYEFMFRGSLENHLFRKTATPLPWGTRMSIALGAAKGLACLHNAQRPVIYRDFKTSNILLDSDYTAKLSDFGLAKDGPEGDQTHVSTRVMGTYGYAAPEYVMTGHLTARSDVYSFGVVLLELLTGRKSIDKSRPSREQSLVDWALPKLNDKRRLLQIIDPRLEGQYSARAAHKSCSLAFYCLSQNPKARPLMSDVVETLAPLQQGGGGGSDASSGLPDCRGRRRLTGNSVVHFRAIPNPKCTPVVPACRVR

SEQ ID NO: 26010 - protein, 247 aa, Zea mays subsp. mays
  peptide (1)..(247): Ceres Seq. ID no. 12367384
  misc_feature (1)..(195): Pfam Name: Pfam Description:  Protein kinase domain
  misc_feature (1)..(247): NCBI GI NO: 30679085 NR Description: protein kinase family [Arabidopsis thaliana]
  misc_feature (1)..(247): NCBI GI NO: 9542860 NR Description: protein kinase-like protein [Arabidopsis thaliana]
  misc_feature (1)..(199): NCBI GI NO: 15241220 NR Description: protein kinase-like protein; protein id:At5g56460
  misc_feature (1)..(200): NCBI GI NO: 22773239 NR Description: Putative protein kinase
  misc_feature (1)..(199): NCBI GI NO: 15225019 NR Description: putative protein kinase; protein id: At2g05940
  misc_feature (1)..(218): NCBI GI NO: 22325532 NR Description: putative protein kinase; protein id: At2g07180
  misc_feature (1)..(218): NCBI GI NO: 25287636 NR Description: probable protein kinase
  misc_feature (1)..(199): NCBI GI NO: 30013675 NR Description: Avr9/Cf-9 rapidly elicited protein 264
  misc_feature (1)..(218): NCBI GI NO: 19423982 NR Description: putative protein kinase [Arabidopsis thaliana]
  misc_feature (1)..(199): NCBI GI NO: 10176804 NR Description: serine/threonine protein kinase-like
MFRGSLENHLFRKTATPLPWGTRMSIALGAAKGLACLHNAQRPVIYRDFKTSNILLDSDYTAKLSDFGLAKDGPEGDQTHVSTRVMGTYGYAAPEYVMTGHLTARSDVYSFGVVLLELLTGRKSIDKSRPSREQSLVDWALPKLNDKRRLLQIIDPRLEGQYSARAAHKSCSLAFYCLSQNPKARPLMSDVVETLAPLQQGGGGGSDASSGLPDCRGRRRLTGNSVVHFRAIPNPKCTPVVPACRVR

SEQ ID NO: 26011 - DNA, 1919 bp, Zea mays subsp. mays
  misc_feature (1)..(1919): Ceres Seq. ID no. 12406508
gactatgcatgcatacgttcggggtcgagatcgagctgaccaatgatccaatagccgccgccttgtggttgtgtcatatatgggggccgaccagtggccgtggccgtggccgtgggcgacgccgccgccgccggccctgctgcttctggcctcactactgccggcgctgctgctcgcgctgtggcgcctggtgtggcaaccgcgggccgtggcgcggtcgttcgcgaggcagggcatccgggggccgccctactgtttcctggccggatccttgtcggaggcgaagcggctggcgcgtgccagccggagaagggttccgcagctggacgtcgcttcacatgacatcatgcccatcttgctgccaccgttccaccgatgggtcgtcgagtatgggaggacattcctgtactggatcgggccaacacctgcaatcttctccgttgatttagagttgattaaggaagtgctcacagacaggacgggcctgtttggcaaggacttcatgatccccgttttcaaagtcctgttgggcaacgggctcatcttagcaaacggcgacgactggaaacggcacaggaaagttgtccttccagccttcaaccacgagaggatcaagagcatgtcggcagtgacggcggaagctacggaacagatggcacagcgatggtgcgagcagctaatactgcacagtggtgcccgtcaagcagcggaaatacaagtggaccgcgccatctgcgacctgactgccgaaatcatcggccgcgccgctttcggcaccagcctccaggaagccggtgaggtcctcctcctgatgcacgagatgcagaagatgggcgccgcggccatggtggatgctcccatactctggtatctgccgacgcggcgcaacctaacggtgcgacgtctggacaagctgttgagggccaagatcactgcgatgatggcagcgcgggtggccgccaattgcggcggtggctacggcgacgacctgctcggcctcctgctggaggcgtggtcgccggagcctgggcggcgccatgctgggagcgacgacgaagggacgacgacgacgacgctgaccaccggagaggtgatcgacgagtgcaagaccttcttcggcgccgggcaggagaccaccgccaccctcctcgtgtggaccatgttcctgctgagcacgcacccgcagtggcaggacaaggtcagggaggaggtcctccgcgaattccgcggcgacgtccccaccaccgacaccctctccagactgaagctgcttcacatggttctgctggagacactgaggctctacccgccgatcgtgtacatacaacggaggactgcctcagacgtcgtgctcaggggcatgctgcaggtcccgaggggaccgtggtatcgatccccatcggcctgctgcaacgggacagggaggtgtggggctccgacgccgacgagttcaaccccttgaggtttagcaatggcgtcgccagggccgccacggatccacacgcgctgctgtctttctcgctcggcccgagagcctgcaccggcaagagcttcggcatcatagaagcacagatcgtcatggcggtcatcctcaggaacttctccttctcgctctcccccacctacgttcacaagccaaagtatgtcgtctccctcactcccaaatgtgggatgcctctcatcttaaagaacatccatgcttgagaaaagattactggcggcactgtaacttgctaatattatattgtacgttgtgtggcatcgacagatcatatatatatactagaactagtcatgtgcccgtgcgttgctacggattctatatatcacatagataaactctgtttaattgggatatatagttgttcaaacatgtttcaaacatgtacaataatattaattcgacatatttcagtggc

SEQ ID NO: 26012 - protein, 460 aa, Zea mays subsp. mays
  peptide (1)..(460): Ceres Seq. ID no. 12406509
  misc_feature (18)..(442): NCBI GI NO: 34895168 NR Description: putative cytochrome P450
  misc_feature (33)..(442): NCBI GI NO: 34913354 NR Description: putative cytochrome P450
  misc_feature (20)..(442): NCBI GI NO: 38112707 NR Description: cytochrome P450 [Triticum aestivum]
  misc_feature (20)..(442): NCBI GI NO: 22324446 NR Description: putative cytochrome P450
  misc_feature (29)..(442): NCBI GI NO: 34913346 NR Description: putative cytochrome P450
  misc_feature (23)..(442): NCBI GI NO: 34913362 NR Description: putative cytochrome P450
  misc_feature (20)..(434): NCBI GI NO: 34896952 NR Description: putative cytochrome P450-related protein
  misc_feature (21)..(442): NCBI GI NO: 14719280 NR Description: cytochrome P450 [Zea mays]
  misc_feature (19)..(434): NCBI GI NO: 15226472 NR Description: cytochrome p450, putative; protein id: At2g46950.1
  misc_feature (20)..(434): NCBI GI NO: 15234248 NR Description: cytochrome P450 - like protein
MGADQWPWPWPWATPPPPALLLLASLLPALLLALWRLVWQPRAVARSFARQGIRGPPYCFLAGSLSEAKRLARASRRRVPQLDVASHDIMPILLPPFHRWVVEYGRTFLYWIGPTPAIFSVDLELIKEVLTDRTGLFGKDFMIPVFKVLLGNGLILANGDDWKRHRKVVLPAFNHERIKSMSAVTAEATEQMAQRWCEQLILHSGARQAAEIQVDRAICDLTAEIIGRAAFGTSLQEAGEVLLLMHEMQKMGAAAMVDAPILWYLPTRRNLTVRRLDKLLRAKITAMMAARVAANCGGGYGDDLLGLLLEAWSPEPGRRHAGSDDEGTTTTTLTTGEVIDECKTFFGAGQETTATLLVWTMFLLSTHPQWQDKVREEVLREFRGDVPTTDTLSRLKLLHMVLLETLRLYPPIVYIQRRTASDVVLRGMLQVPRGPWYRSPSACCNGTGRCGAPTPTSSTP

SEQ ID NO: 26013 - protein, 371 aa, Zea mays subsp. mays
  peptide (1)..(371): Ceres Seq. ID no. 12406510
  misc_feature (1)..(353): NCBI GI NO: 34895168 NR Description: putative cytochrome P450
  misc_feature (1)..(353): NCBI GI NO: 34913354 NR Description: putative cytochrome P450
  misc_feature (1)..(353): NCBI GI NO: 38112707 NR Description: cytochrome P450 [Triticum aestivum]
  misc_feature (1)..(353): NCBI GI NO: 22324446 NR Description: putative cytochrome P450
  misc_feature (1)..(353): NCBI GI NO: 34913346 NR Description: putative cytochrome P450
  misc_feature (1)..(353): NCBI GI NO: 34913362 NR Description: putative cytochrome P450
  misc_feature (1)..(345): NCBI GI NO: 34896952 NR Description: putative cytochrome P450-related protein
  misc_feature (1)..(353): NCBI GI NO: 14719280 NR Description: cytochrome P450 [Zea mays]
  misc_feature (1)..(345): NCBI GI NO: 15226472 NR Description: cytochrome p450, putative; protein id: At2g46950.1
  misc_feature (1)..(345): NCBI GI NO: 15234248 NR Description: cytochrome P450 - like protein
MPILLPPFHRWVVEYGRTFLYWIGPTPAIFSVDLELIKEVLTDRTGLFGKDFMIPVFKVLLGNGLILANGDDWKRHRKVVLPAFNHERIKSMSAVTAEATEQMAQRWCEQLILHSGARQAAEIQVDRAICDLTAEIIGRAAFGTSLQEAGEVLLLMHEMQKMGAAAMVDAPILWYLPTRRNLTVRRLDKLLRAKITAMMAARVAANCGGGYGDDLLGLLLEAWSPEPGRRHAGSDDEGTTTTTLTTGEVIDECKTFFGAGQETTATLLVWTMFLLSTHPQWQDKVREEVLREFRGDVPTTDTLSRLKLLHMVLLETLRLYPPIVYIQRRTASDVVLRGMLQVPRGPWYRSPSACCNGTGRCGAPTPTSSTP

SEQ ID NO: 26014 - protein, 319 aa, Zea mays subsp. mays
  peptide (1)..(319): Ceres Seq. ID no. 12406511
  misc_feature (1)..(301): NCBI GI NO: 34895168 NR Description: putative cytochrome P450
  misc_feature (1)..(301): NCBI GI NO: 34913354 NR Description: putative cytochrome P450
  misc_feature (1)..(301): NCBI GI NO: 38112707 NR Description: cytochrome P450 [Triticum aestivum]
  misc_feature (1)..(301): NCBI GI NO: 22324446 NR Description: putative cytochrome P450
  misc_feature (1)..(301): NCBI GI NO: 34913346 NR Description: putative cytochrome P450
  misc_feature (1)..(301): NCBI GI NO: 34913362 NR Description: putative cytochrome P450
  misc_feature (1)..(293): NCBI GI NO: 34896952 NR Description: putative cytochrome P450-related protein
  misc_feature (1)..(301): NCBI GI NO: 14719280 NR Description: cytochrome P450 [Zea mays]
  misc_feature (1)..(293): NCBI GI NO: 15226472 NR Description: cytochrome p450, putative; protein id: At2g46950.1
  misc_feature (1)..(293): NCBI GI NO: 15234248 NR Description: cytochrome P450 - like protein
MIPVFKVLLGNGLILANGDDWKRHRKVVLPAFNHERIKSMSAVTAEATEQMAQRWCEQLILHSGARQAAEIQVDRAICDLTAEIIGRAAFGTSLQEAGEVLLLMHEMQKMGAAAMVDAPILWYLPTRRNLTVRRLDKLLRAKITAMMAARVAANCGGGYGDDLLGLLLEAWSPEPGRRHAGSDDEGTTTTTLTTGEVIDECKTFFGAGQETTATLLVWTMFLLSTHPQWQDKVREEVLREFRGDVPTTDTLSRLKLLHMVLLETLRLYPPIVYIQRRTASDVVLRGMLQVPRGPWYRSPSACCNGTGRCGAPTPTSSTP

SEQ ID NO: 26015 - DNA, 1320 bp, Zea mays subsp. mays
  misc_feature (1)..(1320): Ceres Seq. ID no. 12347913
agggttgttggagacggcctaaacccttctccatccgacggcgaacaccagcttccctccgcccgcccacatccctgctgtcagctgcgcctccccgcctgatcttgtcgcgcccgagagaccgcgggccagggaacgtcggccgccggagcctggcctgcattccgggggcagcgagaggatgttgcgttgcgcatacacgcagcggcggtgggcgcaccgccgggggggcttcgtaaccggcagcaccggttggtccaagccgccaccgccgagcctcggccgcgccgcgggggttggtacgaagaagtcggagtggtggacggtggacggggagatgcacgagatcggggaaagcgtgccgcatcgcgagcgcttcgccatcccgcgggacaacctccctaaccgccgccgcaagcagatgcgggagcaattcatgcgccgcacccgcctcgttctcaaagactcggaacacgaaacatggtgcaaaaagtacatggaattataccaagaacttagagaaaactgggaaaggttgtactgggacgaaggttattcaaaaaagattgctgaatctcatgctaattatgactctgccgaagaagatgatattgacttctcgccatacagcaggagaaggcagtccaatgtagaaccaaacaaggaccttggcttcggggtgaacaaacgaggtgaaacgtgggaaagggttactcaaattcgtgacaaatttgaatatgacagagaaaggagaatgagagaacgagcatttgctcccatgaacacggagaacaattttgctcggcgtgacccaagatttagaagccaggatgattcaagttttgctcatacgaacttgagtgatgattttggcttgcatgatcaaacttttggaaaccgttctgatcaaagttatgaaaatgagtcaaatttcaggaataagcgtgattcaagtttccaacatgaaccaagtgtcagaaaccagcgtaatttaaatatccaaaacgaaccaagtttcagaaaccaccgatatccagatttccaaaaccaaggtggcacaagaagtcagacatttgatgagtagagggtgaaaaaaaaagtggctgctgatttgctggcaacgtgagcatgctggttctgctgatttctgtggtggctcgtatgagatgttgtaatttcttctaaaatgattggtgtaagaaattatctcttgtggtagctggttgcaacaaaatagaaaggaagagatctgctgttgtaatcttgtaatatacgttggctacttactaagccaaaaaccgtaagcatcggattttgggc

SEQ ID NO: 26016 - protein, 300 aa, Zea mays subsp. mays
  peptide (1)..(300): Ceres Seq. ID no. 12347914
  misc_feature (42)..(216): NCBI GI NO: 15231465 NR Description: unknown protein; protein id: At3g07440.1
  misc_feature (1)..(187): NCBI GI NO: 26452083 NR Description: unknown protein [Arabidopsis thaliana]
MLRCAYTQRRWAHRRGGFVTGSTGWSKPPPPSLGRAAGVGTKKSEWWTVDGEMHEIGESVPHRERFAIPRDNLPNRRRKQMREQFMRRTRLVLKDSEHETWCKKYMELYQELRENWERLYWDEGYSKKIAESHANYDSAEEDDIDFSPYSRRRQSNVEPNKDLGFGVNKRGETWERVTQIRDKFEYDRERRMRERAFAPMNTENNFARRDPRFRSQDDSSFAHTNLSDDFGLHDQTFGNRSDQSYENESNFRNKRDSSFQHEPSVRNQRNLNIQNEPSFRNHRYPDFQNQGGTRSQTFDE

SEQ ID NO: 26017 - protein, 248 aa, Zea mays subsp. mays
  peptide (1)..(248): Ceres Seq. ID no. 12347915
  misc_feature (1)..(164): NCBI GI NO: 15231465 NR Description: unknown protein; protein id: At3g07440.1
  misc_feature (1)..(135): NCBI GI NO: 26452083 NR Description: unknown protein [Arabidopsis thaliana]
MHEIGESVPHRERFAIPRDNLPNRRRKQMREQFMRRTRLVLKDSEHETWCKKYMELYQELRENWERLYWDEGYSKKIAESHANYDSAEEDDIDFSPYSRRRQSNVEPNKDLGFGVNKRGETWERVTQIRDKFEYDRERRMRERAFAPMNTENNFARRDPRFRSQDDSSFAHTNLSDDFGLHDQTFGNRSDQSYENESNFRNKRDSSFQHEPSVRNQRNLNIQNEPSFRNHRYPDFQNQGGTRSQTFDE

SEQ ID NO: 26018 - protein, 220 aa, Zea mays subsp. mays
  peptide (1)..(220): Ceres Seq. ID no. 12347916
  misc_feature (1)..(136): NCBI GI NO: 15231465 NR Description: unknown protein; protein id: At3g07440.1
  misc_feature (1)..(107): NCBI GI NO: 26452083 NR Description: unknown protein [Arabidopsis thaliana]
MREQFMRRTRLVLKDSEHETWCKKYMELYQELRENWERLYWDEGYSKKIAESHANYDSAEEDDIDFSPYSRRRQSNVEPNKDLGFGVNKRGETWERVTQIRDKFEYDRERRMRERAFAPMNTENNFARRDPRFRSQDDSSFAHTNLSDDFGLHDQTFGNRSDQSYENESNFRNKRDSSFQHEPSVRNQRNLNIQNEPSFRNHRYPDFQNQGGTRSQTFDE

SEQ ID NO: 26019 - DNA, 1000 bp, Zea mays subsp. mays
  misc_feature (1)..(1000): Ceres Seq. ID no. 12409957
acacgctcggctgagcactttcccgccgtcttcagaccgtcacaccctcggtcgtgacaggtttctgcctccactgccttccccgccgccgccatgccctcctccgccgcccgggccctcacatccgtctcccgcgcagccttctcctggaagccgacggggcggccgcagcaaacgctggcggcggcggtgagcaggtcgggcgtggggctccactcgggagcgcgcgtcaccgccacgctgtttccgacgcaagctggagagggtaggtatttcctcgtggagggtgatgaggaggcgagggtggcggcagaggtggggaacgccgagccactgtcgcagctctgcacgacgcttcgtcggggcgatggcgcccacacgcgggtccggacggtggaacaccttctttcggcgatggaggcgcttggcgtcgacaactgccgtatcgaggttagcggcggggatgagattcctttgcttgatggatcagcgcaagagtgggtagaggcagtacaaggcgttggcttgtgtgcggcagaggatgccaatggggaaaagttggataaactggcgcctgaaattcaggagcctgtttacctacggaaacacgattgctttatagctgcattccctagcccacaaatccacataacctgtggcattgatttcccaaaggtgccagcgattgagtgtcaatgggtttctacattcctggatgataatatatactcaagcaagattgcgcctgcaagaactttctgtatatttgaagaggttgaaaaaatgcgtgctgctggactcatcaaaggagggtcactagaaaatgctatggtttgcagcatatctggtggctggctgaatccaccactgcggttcgaggatgagcttccgccacaagattttagatcttattggtgacttctcgctgtttgcacagaatggtaaccagggctttccaattgctcatataattgcctataaggctggtcacgcgctgcac

SEQ ID NO: 26020 - protein, 274 aa, Zea mays subsp. mays
  peptide (1)..(274): Ceres Seq. ID no. 12409958
  misc_feature (25)..(264): Pfam Name: Pfam Description:  UDP-3-O-acyl N-acetylglycosamine deacetylase
  misc_feature (1)..(264): NCBI GI NO: 34902272 NR Description: Hypothetical protein
  misc_feature (1)..(248): NCBI GI NO: 35190846 NR Description: OJ1743A09.22
  misc_feature (7)..(264): NCBI GI NO: 26451306 NR Description: unknown protein [Arabidopsis thaliana]
  misc_feature (7)..(264): NCBI GI NO: 30689101 NR Description: expressed protein [Arabidopsis thaliana]
  misc_feature (7)..(264): NCBI GI NO: 25518507 NR Description: hypothetical protein F4F7.4
  misc_feature (7)..(264): NCBI GI NO: 25518320 NR Description: hypothetical protein F4F7.1
  misc_feature (7)..(264): NCBI GI NO: 15221839 NR Description: F5A9.8; protein id: At1g25054.1
  misc_feature (7)..(260): NCBI GI NO: 15221809 NR Description: F5A9.18; protein id: At1g24793.1
  misc_feature (7)..(251): NCBI GI NO: 20453133 NR Description: At1g25190/F4F7_4 [Arabidopsis thaliana]
  misc_feature (26)..(264): NCBI GI NO: 17229762 NR Description: UDP-3-O-acyl N-acetylglucosamine deacetylase
MPSSAARALTSVSRAAFSWKPTGRPQQTLAAAVSRSGVGLHSGARVTATLFPTQAGEGRYFLVEGDEEARVAAEVGNAEPLSQLCTTLRRGDGAHTRVRTVEHLLSAMEALGVDNCRIEVSGGDEIPLLDGSAQEWVEAVQGVGLCAAEDANGEKLDKLAPEIQEPVYLRKHDCFIAAFPSPQIHITCGIDFPKVPAIECQWVSTFLDDNIYSSKIAPARTFCIFEEVEKMRAAGLIKGGSLENAMVCSISGGWLNPPLRFEDELPPQDFRSYW

SEQ ID NO: 26021 - protein, 167 aa, Zea mays subsp. mays
  peptide (1)..(167): Ceres Seq. ID no. 12409959
  misc_feature (1)..(157): Pfam Name: Pfam Description:  UDP-3-O-acyl N-acetylglycosamine deacetylase
  misc_feature (1)..(157): NCBI GI NO: 34902272 NR Description: Hypothetical protein
  misc_feature (1)..(141): NCBI GI NO: 35190846 NR Description: OJ1743A09.22
  misc_feature (1)..(157): NCBI GI NO: 26451306 NR Description: unknown protein [Arabidopsis thaliana]
  misc_feature (1)..(157): NCBI GI NO: 30689101 NR Description: expressed protein [Arabidopsis thaliana]
  misc_feature (1)..(157): NCBI GI NO: 25518507 NR Description: hypothetical protein F4F7.4
  misc_feature (1)..(157): NCBI GI NO: 25518320 NR Description: hypothetical protein F4F7.1
  misc_feature (1)..(157): NCBI GI NO: 15221839 NR Description: F5A9.8; protein id: At1g25054.1
  misc_feature (1)..(153): NCBI GI NO: 15221809 NR Description: F5A9.18; protein id: At1g24793.1
  misc_feature (1)..(144): NCBI GI NO: 20453133 NR Description: At1g25190/F4F7_4 [Arabidopsis thaliana]
  misc_feature (1)..(157): NCBI GI NO: 17229762 NR Description: UDP-3-O-acyl N-acetylglucosamine deacetylase
MEALGVDNCRIEVSGGDEIPLLDGSAQEWVEAVQGVGLCAAEDANGEKLDKLAPEIQEPVYLRKHDCFIAAFPSPQIHITCGIDFPKVPAIECQWVSTFLDDNIYSSKIAPARTFCIFEEVEKMRAAGLIKGGSLENAMVCSISGGWLNPPLRFEDELPPQDFRSYW

SEQ ID NO: 26022 - DNA, 1391 bp, Zea mays subsp. mays
  misc_feature (1)..(1391): Ceres Seq. ID no. 12348999
atcctgaacccgaaagctgaactaccacacacaacaaataactgacgcaggcgatccatcactccacacaccggtcggaaccgaggccaaccaacgacgccgccgccaatgtcgtcccctgcagcgccggtgcagccgccgccgccgcgcgcggtgcgcttcggcgtcctgggatgcgctgacattgcgcgtaagatctcgcgcgcaatgctgatgctccctccgggcgccgccaccatcgccgccgtaggcagtcgctccgatgacaaggcccgccgcttcatctccgaaatcggcttccccgcggcgcgcgtccacgggtcctacgagtctctcctagaggacccggacgtggaggccgtgtacctcccgctccccaccagtctccacgtgccctgggccacagccgtcgctgcgcgtggcaagcacctgctcctcgagaagcccaccgcgctctgcactgccgaactcgacgccatcctcggcgcctgcgacgcctccggggtccagttcatggacaccaccatgtggatccacaacccgcgcaccgccaagatgcgggagatcgtcagcgacaaggacgcctttggcgacgtcagagtgataaacagtatgtgcagctttcgggcatccgaggaattcctcaagaatgacatcagggtaaagccagaccttgacgccttgggtgtcctcggtgatgttggatggtactgcatccgctcaatcctgtgggctgttgactatgagctgcctgagaccgtgatcgctcaccgccatcctgtcaagaaccaggctggcgtgctccttgcttgcggtgcgaccttgtactgggcagatggcaagactgcaaacttcaactgctcgtttcttgctaacctcgcctttgacgtgaccgtctatggcacaaacggcactctccatgtcactgacctggtcattccgtacgaagagagctctgcggagttcagtgtggcctcgaagtcaagcttcgtcaaacccaccatcggatgggatccattgccagagaagcatgttgttactactgatctgccacaggaggcactcatgatccaggaattcacaaggcttgtgcagaacgtccgcgccggtggcaggcctgagggtaagtggccggctatcacccggaagacgcaggtggtactggatgccgtgaaagcttctattgacaagggatctgaaccagttgaggttgccagctaaatacaacaaatgccagctccttgtgctaggtttgtacttaatggcttctactcgtatttgctgtcgcgcaaatgaaggtagtaattgtaatactgtcacgtaaattgaaactggtaattgtaataatcttaaggaatctggtcaaattgaggagaacatttttacagttt

SEQ ID NO: 26023 - protein, 370 aa, Zea mays subsp. mays
  peptide (1)..(370): Ceres Seq. ID no. 12349000
  misc_feature (151)..(263): Pfam Name: Pfam Description:  Oxidoreductase family
  misc_feature (2)..(325): NCBI GI NO: 37534168 NR Description: putative oxidoreductase
  misc_feature (16)..(369): NCBI GI NO: 15233990 NR Description: AX110P -like protein; protein id: At4g09670
  misc_feature (16)..(359): NCBI GI NO: 7488933 NR Description: protein AX110P - carrot
  misc_feature (37)..(369): NCBI GI NO: 21954073 NR Description: putative AX110P protein [Arabidopsis thaliana]
  misc_feature (16)..(366): NCBI GI NO: 18399170 NR Description: expressed protein; protein id: At1g34200
  misc_feature (16)..(366): NCBI GI NO: 25518452 NR Description: hypothetical protein F23M19.12
  misc_feature (14)..(368): NCBI GI NO: 15218937 NR Description: oxidoreductase, putative; protein id: At1g66130.1
  misc_feature (1)..(366): NCBI GI NO: 17549134 NR Description: CONSERVED HYPOTHETICAL PROTEIN
  misc_feature (17)..(358): NCBI GI NO: 32474689 NR Description: putative oxidoreductase [Pirellula sp.]
  misc_feature (16)..(279): NCBI GI NO: 15616405 NR Description: oxidoreductase [Bacillus halodurans]
MSSPAAPVQPPPPRAVRFGVLGCADIARKISRAMLMLPPGAATIAAVGSRSDDKARRFISEIGFPAARVHGSYESLLEDPDVEAVYLPLPTSLHVPWATAVAARGKHLLLEKPTALCTAELDAILGACDASGVQFMDTTMWIHNPRTAKMREIVSDKDAFGDVRVINSMCSFRASEEFLKNDIRVKPDLDALGVLGDVGWYCIRSILWAVDYELPETVIAHRHPVKNQAGVLLACGATLYWADGKTANFNCSFLANLAFDVTVYGTNGTLHVTDLVIPYEESSAEFSVASKSSFVKPTIGWDPLPEKHVVTTDLPQEALMIQEFTRLVQNVRAGGRPEGKWPAITRKTQVVLDAVKASIDKGSEPVEVAS

SEQ ID NO: 26024 - protein, 337 aa, Zea mays subsp. mays
  peptide (1)..(337): Ceres Seq. ID no. 12349001
  misc_feature (118)..(230): Pfam Name: Pfam Description:  Oxidoreductase family
  misc_feature (1)..(292): NCBI GI NO: 37534168 NR Description: putative oxidoreductase
  misc_feature (1)..(336): NCBI GI NO: 15233990 NR Description: AX110P -like protein; protein id: At4g09670
  misc_feature (1)..(326): NCBI GI NO: 7488933 NR Description: protein AX110P - carrot
  misc_feature (4)..(336): NCBI GI NO: 21954073 NR Description: putative AX110P protein [Arabidopsis thaliana]
  misc_feature (1)..(333): NCBI GI NO: 18399170 NR Description: expressed protein; protein id: At1g34200
  misc_feature (1)..(333): NCBI GI NO: 25518452 NR Description: hypothetical protein F23M19.12
  misc_feature (1)..(335): NCBI GI NO: 15218937 NR Description: oxidoreductase, putative; protein id: At1g66130.1
  misc_feature (1)..(333): NCBI GI NO: 17549134 NR Description: CONSERVED HYPOTHETICAL PROTEIN
  misc_feature (1)..(325): NCBI GI NO: 32474689 NR Description: putative oxidoreductase [Pirellula sp.]
  misc_feature (1)..(246): NCBI GI NO: 15616405 NR Description: oxidoreductase [Bacillus halodurans]
MLMLPPGAATIAAVGSRSDDKARRFISEIGFPAARVHGSYESLLEDPDVEAVYLPLPTSLHVPWATAVAARGKHLLLEKPTALCTAELDAILGACDASGVQFMDTTMWIHNPRTAKMREIVSDKDAFGDVRVINSMCSFRASEEFLKNDIRVKPDLDALGVLGDVGWYCIRSILWAVDYELPETVIAHRHPVKNQAGVLLACGATLYWADGKTANFNCSFLANLAFDVTVYGTNGTLHVTDLVIPYEESSAEFSVASKSSFVKPTIGWDPLPEKHVVTTDLPQEALMIQEFTRLVQNVRAGGRPEGKWPAITRKTQVVLDAVKASIDKGSEPVEVAS

SEQ ID NO: 26025 - protein, 335 aa, Zea mays subsp. mays
  peptide (1)..(335): Ceres Seq. ID no. 12349002
  misc_feature (116)..(228): Pfam Name: Pfam Description:  Oxidoreductase family
  misc_feature (1)..(290): NCBI GI NO: 37534168 NR Description: putative oxidoreductase
  misc_feature (1)..(334): NCBI GI NO: 15233990 NR Description: AX110P -like protein; protein id: At4g09670
  misc_feature (1)..(324): NCBI GI NO: 7488933 NR Description: protein AX110P - carrot
  misc_feature (2)..(334): NCBI GI NO: 21954073 NR Description: putative AX110P protein [Arabidopsis thaliana]
  misc_feature (1)..(331): NCBI GI NO: 18399170 NR Description: expressed protein; protein id: At1g34200
  misc_feature (1)..(331): NCBI GI NO: 25518452 NR Description: hypothetical protein F23M19.12
  misc_feature (1)..(333): NCBI GI NO: 15218937 NR Description: oxidoreductase, putative; protein id: At1g66130.1
  misc_feature (1)..(331): NCBI GI NO: 17549134 NR Description: CONSERVED HYPOTHETICAL PROTEIN
  misc_feature (1)..(323): NCBI GI NO: 32474689 NR Description: putative oxidoreductase [Pirellula sp.]
  misc_feature (1)..(244): NCBI GI NO: 15616405 NR Description: oxidoreductase [Bacillus halodurans]
MLPPGAATIAAVGSRSDDKARRFISEIGFPAARVHGSYESLLEDPDVEAVYLPLPTSLHVPWATAVAARGKHLLLEKPTALCTAELDAILGACDASGVQFMDTTMWIHNPRTAKMREIVSDKDAFGDVRVINSMCSFRASEEFLKNDIRVKPDLDALGVLGDVGWYCIRSILWAVDYELPETVIAHRHPVKNQAGVLLACGATLYWADGKTANFNCSFLANLAFDVTVYGTNGTLHVTDLVIPYEESSAEFSVASKSSFVKPTIGWDPLPEKHVVTTDLPQEALMIQEFTRLVQNVRAGGRPEGKWPAITRKTQVVLDAVKASIDKGSEPVEVAS

SEQ ID NO: 26026 - DNA, 1374 bp, Zea mays subsp. mays
  misc_feature (1)..(1374): Ceres Seq. ID no. 12435065
  misc_feature (275)..(275): n is a, c, t, g, unknown, or other
  misc_feature (280)..(280): n is a, c, t, g, unknown, or other
  misc_feature (299)..(299): n is a, c, t, g, unknown, or other
  misc_feature (302)..(302): n is a, c, t, g, unknown, or other
  misc_feature (296)..(296): n is a, c, t, g, unknown, or other
  misc_feature (224)..(224): n is a, c, t, g, unknown, or other
  misc_feature (293)..(293): n is a, c, t, g, unknown, or other
acgaccgactccctcaattacctgcccgtcccaattgtttccgcaagtcgcccagaccagatttgccagaacgcaacctcggctccgaaaccctagccgcacgcagctgtccacttctactcccctcgcctcgccacacccgccgcgcggcacgatcagacgccatggccgccgagaactactggaggtacgctgatgcgcggcagcagcagcaggcgatggtngccgccgcggcggcgcagcggggatggctcccgcggcgaccgtcgccgcgncccanacggtcgggagtncgncgncgnctatgaaccagcaggctgccgccgccgccatggcgcagcaggccgccgctgcgccgcctctcaagcgcgcgcgccccgacttcggtgatgtgtctggtgggcaagacatgacaggatattatccacgtgaaactgacaggtcaggataccattccctcagagagaacgacacacttggggcatcttatgaccgttacttgcgcaatgggatggcctccgtcggtgcaaatgacacttctagggctgccgggatgggtgctggattggctgcagggatgactgcagggatgggtgctggaatggctgcagggatggctggctatggtgttgatggtcagcgtatgatgggtgttgttggtatggacagcagagggatgggatatggtggcagacctgagccacctcttccgcctgatgcatcaagcactctatatattgagggcttacctgcaaactgcacacgacgggaggtttcacatatatttcgcccatttgttggttttcgtgaagttcgtcttgtcaacaaggagtccagacatcctggtggagatccacatgtgttgtgtttcgtcgattttgacaaccctgctcaggctacaattgctctggaagcattacaaggttataagtttgacgaacacgagcgtgattcagcccatttgcgtctgcaattctcacgctttcccggtccaaggtcagctggtgggcctcgcggtaggcgttaagacgtgcggacctcgtggttgccgaacctatcgtttatacgagcgatccaactacggtgggctaacgcttcgatatgcgctgaatttcggggcggtggctttttagggttcgtcagctcatttcgtgaatgcgtgaaagggacaatgcaataagtgatattctgccatatgttattagatgccgtataatgtgttaggcatggaaagttattcgacatactgtatctgctgccttagctattgtggtctactgtaacttcattaccttgcttcacatccgagacaatttgagtttgttatcatgtggattatctgttttgaaaatgaaaactagatgatgttagcct

SEQ ID NO: 26027 - protein, 259 aa, Zea mays subsp. mays
  peptide (1)..(259): Ceres Seq. ID no. 12435066
  misc_feature (162)..(236): Pfam Name: a.k.a. RRM, RBD, or RNP domain Pfam Description: RNA recognition motif.
  misc_feature (24)..(186): NCBI GI NO: 25553563 NR Description: OSJNBa0038F22.13
  misc_feature (179)..(259): NCBI GI NO: 25553563 NR Description: OSJNBa0038F22.13
  misc_feature (40)..(256): NCBI GI NO: 23304837 NR Description: RNA-binding protein [Medicago truncatula]
  misc_feature (38)..(259): NCBI GI NO: 30699215 NR Description: expressed protein [Arabidopsis thaliana]
  misc_feature (110)..(259): NCBI GI NO: 26450151 NR Description: unknown protein [Arabidopsis thaliana]
  misc_feature (39)..(162): NCBI GI NO: 15218968 NR Description: hypothetical protein; protein id: At1g21320.1
  misc_feature (201)..(259): NCBI GI NO: 15218968 NR Description: hypothetical protein; protein id: At1g21320.1
  misc_feature (39)..(259): NCBI GI NO: 25513502 NR Description: F16F4.3 protein - Arabidopsis thaliana
  misc_feature (10)..(10): Xaa is any aa, unknown or other
  misc_feature (11)..(11): Xaa is any aa, unknown or other
  misc_feature (16)..(16): Xaa is any aa, unknown or other
  misc_feature (17)..(17): Xaa is any aa, unknown or other
  misc_feature (18)..(18): Xaa is any aa, unknown or other
  misc_feature (19)..(19): Xaa is any aa, unknown or other
MAPAATVAAXXTVGSXXXXMNQQAAAAAMAQQAAAAPPLKRARPDFGDVSGGQDMTGYYPRETDRSGYHSLRENDTLGASYDRYLRNGMASVGANDTSRAAGMGAGLAAGMTAGMGAGMAAGMAGYGVDGQRMMGVVGMDSRGMGYGGRPEPPLPPDASSTLYIEGLPANCTRREVSHIFRPFVGFREVRLVNKESRHPGGDPHVLCFVDFDNPAQATIALEALQGYKFDEHERDSAHLRLQFSRFPGPRSAGGPRGRR

SEQ ID NO: 26028 - protein, 240 aa, Zea mays subsp. mays
  peptide (1)..(240): Ceres Seq. ID no. 12435067
  misc_feature (143)..(217): Pfam Name: a.k.a. RRM, RBD, or RNP domain Pfam Description: RNA recognition motif.
  misc_feature (5)..(167): NCBI GI NO: 25553563 NR Description: OSJNBa0038F22.13
  misc_feature (160)..(240): NCBI GI NO: 25553563 NR Description: OSJNBa0038F22.13
  misc_feature (21)..(237): NCBI GI NO: 23304837 NR Description: RNA-binding protein [Medicago truncatula]
  misc_feature (19)..(240): NCBI GI NO: 30699215 NR Description: expressed protein [Arabidopsis thaliana]
  misc_feature (91)..(240): NCBI GI NO: 26450151 NR Description: unknown protein [Arabidopsis thaliana]
  misc_feature (20)..(143): NCBI GI NO: 15218968 NR Description: hypothetical protein; protein id: At1g21320.1
  misc_feature (182)..(240): NCBI GI NO: 15218968 NR Description: hypothetical protein; protein id: At1g21320.1
  misc_feature (20)..(240): NCBI GI NO: 25513502 NR Description: F16F4.3 protein - Arabidopsis thaliana
MNQQAAAAAMAQQAAAAPPLKRARPDFGDVSGGQDMTGYYPRETDRSGYHSLRENDTLGASYDRYLRNGMASVGANDTSRAAGMGAGLAAGMTAGMGAGMAAGMAGYGVDGQRMMGVVGMDSRGMGYGGRPEPPLPPDASSTLYIEGLPANCTRREVSHIFRPFVGFREVRLVNKESRHPGGDPHVLCFVDFDNPAQATIALEALQGYKFDEHERDSAHLRLQFSRFPGPRSAGGPRGRR

SEQ ID NO: 26029 - protein, 231 aa, Zea mays subsp. mays
  peptide (1)..(231): Ceres Seq. ID no. 12435068
  misc_feature (134)..(208): Pfam Name: a.k.a. RRM, RBD, or RNP domain Pfam Description: RNA recognition motif.
  misc_feature (1)..(158): NCBI GI NO: 25553563 NR Description: OSJNBa0038F22.13
  misc_feature (151)..(231): NCBI GI NO: 25553563 NR Description: OSJNBa0038F22.13
  misc_feature (12)..(228): NCBI GI NO: 23304837 NR Description: RNA-binding protein [Medicago truncatula]
  misc_feature (10)..(231): NCBI GI NO: 30699215 NR Description: expressed protein [Arabidopsis thaliana]
  misc_feature (82)..(231): NCBI GI NO: 26450151 NR Description: unknown protein [Arabidopsis thaliana]
  misc_feature (11)..(134): NCBI GI NO: 15218968 NR Description: hypothetical protein; protein id: At1g21320.1
  misc_feature (173)..(231): NCBI GI NO: 15218968 NR Description: hypothetical protein; protein id: At1g21320.1
  misc_feature (11)..(231): NCBI GI NO: 25513502 NR Description: F16F4.3 protein - Arabidopsis thaliana
MAQQAAAAPPLKRARPDFGDVSGGQDMTGYYPRETDRSGYHSLRENDTLGASYDRYLRNGMASVGANDTSRAAGMGAGLAAGMTAGMGAGMAAGMAGYGVDGQRMMGVVGMDSRGMGYGGRPEPPLPPDASSTLYIEGLPANCTRREVSHIFRPFVGFREVRLVNKESRHPGGDPHVLCFVDFDNPAQATIALEALQGYKFDEHERDSAHLRLQFSRFPGPRSAGGPRGRR

SEQ ID NO: 26030 - DNA, 1097 bp, Zea mays subsp. mays
  misc_feature (1)..(1097): Ceres Seq. ID no. 12367604
gctcccctccgcatctccgttcgccatggcatcctcctccgagccctcggcgctgccgacgctcctggtgttccgcgtccgagagctgcggttcctcgcggcgctgcgcgagcggtaccgcgtcctcgacttcttcacgtcgggctcgccgctcgccgccttcctggccgcggcggccggcggcgcggacccgccccgcgcgttggtgaccgtggggggcgactccgtccgcgtggacgccgcgctcctggacgccgtcccgtcgctccgcttcgtccacagcacgggggccgggctggaccacatcgacctcggcgagtgcgcgcgccgcggcgtgggcgtcgccagctccggcacggtctactccaccgacgtcgccgaccacgccgtcggcttgctcgtcgacgtgctccgccgcgtgtccgccgccgaccggttcgtccgccgcgggctctggccgctccacggcgactatcccctcggcagcaagctgggcggcaagcgcgtgggcatcatcggcctgggcaacatcggcacgctgatcgcgaagaggctggcagccttcggctgcgtcatctgctacagctccagaaagcccaaggaatccgtctcctactggtacttccctagcgtccacgacctcgcgtcggaatcggacgtgctcgtcgtcgcgtgcgcgctgaccagggagacgcgccacatcgtgaacaaggacgtgctggcggcgctcgggaaggacggggtcgtggtaaacatcggccggggcccgaacatcgacgaggcggagctggtcgcggcgctcaaggaggggaggatcgccggagccagcctggatgtctttgataaggagcctaaggtgccggcagaggctcttctccatggacaatgtggtgctgacgcatcacgtcgcggtcttcacgacagagtccaggtccgacctccgtgacgtcaccatcagtaaccttgaagctttcttcgccggtaggccgctgcttaacccggtgcttcactcttgatggtttgttcgtgttattgcagcaggtcgatccatgtacgtgtaggaatgtgatttgttgaatacattttattttcgaccc

SEQ ID NO: 26031 - protein, 314 aa, Zea mays subsp. mays
  peptide (1)..(314): Ceres Seq. ID no. 12367605
  misc_feature (125)..(291): Pfam Name: Pfam Description:  D-isomer specific 2-hydroxyacid dehydrogenase
  misc_feature (9)..(289): NCBI GI NO: 38345306 NR Description: OSJNBb0085F13.6
  misc_feature (32)..(291): NCBI GI NO: 21636166 NR Description: unknown [Aegilops tauschii]
  misc_feature (9)..(289): NCBI GI NO: 38345308 NR Description: OSJNBb0085F13.13
  misc_feature (9)..(289): NCBI GI NO: 7485630 NR Description: probable glycerate dehydrogenase
  misc_feature (9)..(289): NCBI GI NO: 15222015 NR Description: hypothetical protein; protein id: At1g12550.1
  misc_feature (35)..(289): NCBI GI NO: 15220005 NR Description: putative D-isomer specific 2-hydroxyaciddehydrogenase
  misc_feature (78)..(292): NCBI GI NO: 34904262 NR Description: putative Caulobacter crescentus D-isomer specific2-hydroxyacid dehydrogenases family
  misc_feature (33)..(291): NCBI GI NO: 22979887 NR Description: hypothetical protein [Ralstonia metallidurans]
  misc_feature (39)..(286): NCBI GI NO: 23104708 NR Description: hypothetical protein [Azotobacter vinelandii]
  misc_feature (35)..(291): NCBI GI NO: 15890302 NR Description: AGR_L_379p [Agrobacterium tumefaciens]
LPSASPFAMASSSEPSALPTLLVFRVRELRFLAALRERYRVLDFFTSGSPLAAFLAAAAGGADPPRALVTVGGDSVRVDAALLDAVPSLRFVHSTGAGLDHIDLGECARRGVGVASSGTVYSTDVADHAVGLLVDVLRRVSAADRFVRRGLWPLHGDYPLGSKLGGKRVGIIGLGNIGTLIAKRLAAFGCVICYSSRKPKESVSYWYFPSVHDLASESDVLVVACALTRETRHIVNKDVLAALGKDGVVVNIGRGPNIDEAELVAALKEGRIAGASLDVFDKEPKVPAEALLHGQCGADASRRGLHDRVQVRPP

SEQ ID NO: 26032 - protein, 306 aa, Zea mays subsp. mays
  peptide (1)..(306): Ceres Seq. ID no. 12367606
  misc_feature (117)..(283): Pfam Name: Pfam Description:  D-isomer specific 2-hydroxyacid dehydrogenase
  misc_feature (1)..(281): NCBI GI NO: 38345306 NR Description: OSJNBb0085F13.6
  misc_feature (24)..(283): NCBI GI NO: 21636166 NR Description: unknown [Aegilops tauschii]
  misc_feature (1)..(281): NCBI GI NO: 38345308 NR Description: OSJNBb0085F13.13
  misc_feature (1)..(281): NCBI GI NO: 7485630 NR Description: probable glycerate dehydrogenase
  misc_feature (1)..(281): NCBI GI NO: 15222015 NR Description: hypothetical protein; protein id: At1g12550.1
  misc_feature (27)..(281): NCBI GI NO: 15220005 NR Description: putative D-isomer specific 2-hydroxyaciddehydrogenase
  misc_feature (70)..(284): NCBI GI NO: 34904262 NR Description: putative Caulobacter crescentus D-isomer specific2-hydroxyacid dehydrogenases family
  misc_feature (25)..(283): NCBI GI NO: 22979887 NR Description: hypothetical protein [Ralstonia metallidurans]
  misc_feature (31)..(278): NCBI GI NO: 23104708 NR Description: hypothetical protein [Azotobacter vinelandii]
  misc_feature (27)..(283): NCBI GI NO: 15890302 NR Description: AGR_L_379p [Agrobacterium tumefaciens]
MASSSEPSALPTLLVFRVRELRFLAALRERYRVLDFFTSGSPLAAFLAAAAGGADPPRALVTVGGDSVRVDAALLDAVPSLRFVHSTGAGLDHIDLGECARRGVGVASSGTVYSTDVADHAVGLLVDVLRRVSAADRFVRRGLWPLHGDYPLGSKLGGKRVGIIGLGNIGTLIAKRLAAFGCVICYSSRKPKESVSYWYFPSVHDLASESDVLVVACALTRETRHIVNKDVLAALGKDGVVVNIGRGPNIDEAELVAALKEGRIAGASLDVFDKEPKVPAEALLHGQCGADASRRGLHDRVQVRPP

SEQ ID NO: 26033 - protein, 209 aa, Zea mays subsp. mays
  peptide (1)..(209): Ceres Seq. ID no. 12367607
  misc_feature (19)..(179): Pfam Name: Pfam Description:  HlyD family secretion protein
APLRISVRHGILLRALGAADAPGVPRPRAAVPRGAARAVPRPRLLHVGLAARRLPGRGGRRRGPAPRVGDRGGRLRPRGRRAPGRRPVAPLRPQHGGRAGPHRPRRVRAPRRGRRQLRHGLLHRRRRPRRRLARRRAPPRVRRRPVRPPRALAAPRRLSPRQQAGRQARGHHRPGQHRHADREEAGSLRLRHLLQLQKAQGIRLLLVLP

SEQ ID NO: 26034 - DNA, 1017 bp, Zea mays subsp. mays
  misc_feature (1)..(1017): Ceres Seq. ID no. 12409953
aaaccctaacccctctctttcgttgcccatcctcgtgacggctcctcgccagtcgcctcgtctctccctgccgcgtcgcctccagttccgacgccagcgcgcctcccgcctccgccgcgcctgacgaacgcagtgtaggactgtgcaggtagagaggaggagggtccggcgagatggggatgcgagataagaagcggaaccagaagcgagtgctcgcgcgccgtaccgcggtaccgcgcccaggcgagggcaaggacttcctgccgctggaaggaggccccggtaagaagctgcggaaggtgcagcagcctgaagagcccgaaaacacagccacagtcgtctacattgggcatgtcccccatggtttctacgaggacgagatgaaagggttctttaagcagtttggggatattaagaggcttaggatcgctcgtaaccgcaagacaggaaagtccaagcactatggattcattgagtttgagaaccctgctgtggcaaaggttgtagcagatgagatgaataactatctcttgtttgagcgcaccttgcaagttgcacttgttgagccggagaaagttcatcctaaattatggaaaggggtgcgaaggggatttatacctgttgatcgagtagcaattgaacggaagagacacaacaaggataagactgtagcagagcacaaaaagatggttgaaggaattgtaaagcgggatggaaagcgtcgcaaaagaatcaaggcagctggtattgactatgagtgtccagctcttatagggagcattcgaccatcagcgaaaaagatcaagttcgatgaggcatagtattttactctaatttactctaatgggctgttggatccttagtagacgaggcggtggaatggttgagcaatatattcaccttttgaggagacggcagacaactatgtatttcacttttgaatttctctatgttttatgaatgacaccgacacagatgttacaacttaagtatgaaaatgcaatgagctgtgttctt

SEQ ID NO: 26035 - protein, 215 aa, Zea mays subsp. mays
  peptide (1)..(215): Ceres Seq. ID no. 12409954
  misc_feature (56)..(127): Pfam Name: a.k.a. RRM, RBD, or RNP domain Pfam Description: RNA recognition motif.
  misc_feature (1)..(214): NCBI GI NO: 18652180 NR Description: RNA binding protein [Elaeis oleifera]
  misc_feature (1)..(214): NCBI GI NO: 15238220 NR Description: RRM-containing protein; protein id: At5g04600
  misc_feature (39)..(199): NCBI GI NO: 40741317 NR Description: hypothetical protein AN4346.2
  misc_feature (38)..(208): NCBI GI NO: 27545352 NR Description: mki67
  misc_feature (28)..(215): NCBI GI NO: 20302745 NR Description: unknown [Branchiostoma floridae]
  misc_feature (41)..(195): NCBI GI NO: 19076051 NR Description: putative RNA-binding protein
  misc_feature (41)..(200): NCBI GI NO: 21314753 NR Description: MKI67
  misc_feature (41)..(200): NCBI GI NO: 13699902 NR Description: nucleolar phosphoprotein Nopp34 [Homo sapiens]
  misc_feature (39)..(215): NCBI GI NO: 38111220 NR Description: hypothetical protein MG07186.4
  misc_feature (39)..(200): NCBI GI NO: 13774097 NR Description: RNA binding protein [Mus musculus]
MGMRDKKRNQKRVLARRTAVPRPGEGKDFLPLEGGPGKKLRKVQQPEEPENTATVVYIGHVPHGFYEDEMKGFFKQFGDIKRLRIARNRKTGKSKHYGFIEFENPAVAKVVADEMNNYLLFERTLQVALVEPEKVHPKLWKGVRRGFIPVDRVAIERKRHNKDKTVAEHKKMVEGIVKRDGKRRKRIKAAGIDYECPALIGSIRPSAKKIKFDEA

SEQ ID NO: 26036 - protein, 213 aa, Zea mays subsp. mays
  peptide (1)..(213): Ceres Seq. ID no. 12409955
  misc_feature (54)..(125): Pfam Name: a.k.a. RRM, RBD, or RNP domain Pfam Description: RNA recognition motif.
  misc_feature (1)..(212): NCBI GI NO: 18652180 NR Description: RNA binding protein [Elaeis oleifera]
  misc_feature (1)..(212): NCBI GI NO: 15238220 NR Description: RRM-containing protein; protein id: At5g04600
  misc_feature (37)..(197): NCBI GI NO: 40741317 NR Description: hypothetical protein AN4346.2
  misc_feature (36)..(206): NCBI GI NO: 27545352 NR Description: mki67
  misc_feature (26)..(213): NCBI GI NO: 20302745 NR Description: unknown [Branchiostoma floridae]
  misc_feature (39)..(193): NCBI GI NO: 19076051 NR Description: putative RNA-binding protein
  misc_feature (39)..(198): NCBI GI NO: 21314753 NR Description: MKI67
  misc_feature (39)..(198): NCBI GI NO: 13699902 NR Description: nucleolar phosphoprotein Nopp34 [Homo sapiens]
  misc_feature (37)..(213): NCBI GI NO: 38111220 NR Description: hypothetical protein MG07186.4
  misc_feature (37)..(198): NCBI GI NO: 13774097 NR Description: RNA binding protein [Mus musculus]
MRDKKRNQKRVLARRTAVPRPGEGKDFLPLEGGPGKKLRKVQQPEEPENTATVVYIGHVPHGFYEDEMKGFFKQFGDIKRLRIARNRKTGKSKHYGFIEFENPAVAKVVADEMNNYLLFERTLQVALVEPEKVHPKLWKGVRRGFIPVDRVAIERKRHNKDKTVAEHKKMVEGIVKRDGKRRKRIKAAGIDYECPALIGSIRPSAKKIKFDEA

SEQ ID NO: 26037 - protein, 146 aa, Zea mays subsp. mays
  peptide (1)..(146): Ceres Seq. ID no. 12409956
  misc_feature (1)..(58): Pfam Name: a.k.a. RRM, RBD, or RNP domain Pfam Description: RNA recognition motif.
  misc_feature (1)..(145): NCBI GI NO: 18652180 NR Description: RNA binding protein [Elaeis oleifera]
  misc_feature (1)..(145): NCBI GI NO: 15238220 NR Description: RRM-containing protein; protein id: At5g04600
  misc_feature (1)..(130): NCBI GI NO: 40741317 NR Description: hypothetical protein AN4346.2
  misc_feature (1)..(139): NCBI GI NO: 27545352 NR Description: mki67
  misc_feature (1)..(146): NCBI GI NO: 20302745 NR Description: unknown [Branchiostoma floridae]
  misc_feature (1)..(126): NCBI GI NO: 19076051 NR Description: putative RNA-binding protein
  misc_feature (1)..(131): NCBI GI NO: 21314753 NR Description: MKI67
  misc_feature (1)..(131): NCBI GI NO: 13699902 NR Description: nucleolar phosphoprotein Nopp34 [Homo sapiens]
  misc_feature (1)..(146): NCBI GI NO: 38111220 NR Description: hypothetical protein MG07186.4
  misc_feature (1)..(131): NCBI GI NO: 13774097 NR Description: RNA binding protein [Mus musculus]
MKGFFKQFGDIKRLRIARNRKTGKSKHYGFIEFENPAVAKVVADEMNNYLLFERTLQVALVEPEKVHPKLWKGVRRGFIPVDRVAIERKRHNKDKTVAEHKKMVEGIVKRDGKRRKRIKAAGIDYECPALIGSIRPSAKKIKFDEA

SEQ ID NO: 26038 - DNA, 1276 bp, Zea mays subsp. mays
  misc_feature (1)..(1276): Ceres Seq. ID no. 12405671
tctctctctctctctctcgtgcgtgtcgaagactcgaagtcgaactcaaaacacgcaacacgcaagtcacgaacgcacgacaaaaggaagaaaaacccaagaaatatctctgcggccctgctcgtcccgagccgagccggcgagatggcggggatgtctcgcgcgatccgcaacttcgccgccgcgtcccggcgaaccctgaccgctgcttcggggccggcgctgccgaaggaggcggcggcgcgggtgagggcgggggcgcccgggcgcatggggcgggatcaggaggacgggaggcgcgtgcagtgggtgttcctcgggtgccccggggtggggaagggcacctacgccagccgcctctcgcagctgctcggcgtcccgcacatcgccaccggcgacctcgtccgcgacgccctggccacccctggccccttctccaacaagcttgctgagattgtcaatcatggaaaactggtgtctgatgagatcatcataaatctgctgtcaagacgtctggaagagggagaggaaaagggtgaattggggttcatccttgatggctttcctcgaaccataggacaagcggagatacttgaaggagtcacagacattgatttggtgatcaatctcaaactccgagaagaagctctgcttgcgaaatgccttggcaggaggatgtgcagccagtgtggagggaacttcaatgtggcctccattgatattgagggtgaagacggcgggcctcgaatgtacatgcccccactgttgcctcctccacagtgtgaatcgaagctgattgctagagcagacgatactgaagaagtggtaaaagagcggctgcgtgtgtaccatgatttgactgaaccagtggaggagttctacagagcacgtgggaaactgctggagttcaatctgcctggtgggatacccgaatcatggccgaagttactgcaggccctgaacatagaagaccccgacaataagcgatctgcagcagcatgattcttgttttgttataggaatgcacattctaaattgaacatctgtagactatgtcaaagctagtcaaattggtgggcattccttacatctttgggaagcctactccattctggatccagattattgtggcatggcactcaactgtacagtagattgatcatcgattggcaaggtcgatcgatggatgtgctgactgtgatcctcgaacgtaaggtgtgtaaaaaggcaagaaaataattgttgggcgtcgagacattcacttgtaggtcgtacc

SEQ ID NO: 26039 - protein, 333 aa, Zea mays subsp. mays
  peptide (1)..(333): Ceres Seq. ID no. 12405672
  misc_feature (146)..(223): Pfam Name: Pfam Description:  Adenylate kinase
  misc_feature (56)..(333): NCBI GI NO: 30687836 NR Description: adenylate kinase -related [Arabidopsis thaliana]
  misc_feature (146)..(333): NCBI GI NO: 6063552 NR Description: ESTs AU065232
  misc_feature (45)..(146): NCBI GI NO: 6063552 NR Description: ESTs AU065232
  misc_feature (38)..(333): NCBI GI NO: 15228109 NR Description: putative adenylate kinase; protein id: At2g37250
  misc_feature (49)..(333): NCBI GI NO: 29427816 NR Description: Adenylate kinase, chloroplast precursor
  misc_feature (104)..(324): NCBI GI NO: 15644227 NR Description: adenylate kinase [Thermotoga maritima]
  misc_feature (104)..(320): NCBI GI NO: 11498284 NR Description: adenylate kinase (adk) [Archaeoglobus fulgidus]
  misc_feature (104)..(309): NCBI GI NO: 23510140 NR Description: adenylate kinase 1 [Plasmodium falciparum 3D7]
  misc_feature (104)..(304): NCBI GI NO: 23112485 NR Description: hypothetical protein
  misc_feature (104)..(324): NCBI GI NO: 26985214 NR Description: adenylate kinase [Thermotoga neapolitana]
SLSLSLVRVEDSKSNSKHATRKSRTHDKRKKNPRNISAALLVPSRAGEMAGMSRAIRNFAAASRRTLTAASGPALPKEAAARVRAGAPGRMGRDQEDGRRVQWVFLGCPGVGKGTYASRLSQLLGVPHIATGDLVRDALATPGPFSNKLAEIVNHGKLVSDEIIINLLSRRLEEGEEKGELGFILDGFPRTIGQAEILEGVTDIDLVINLKLREEALLAKCLGRRMCSQCGGNFNVASIDIEGEDGGPRMYMPPLLPPPQCESKLIARADDTEEVVKERLRVYHDLTEPVEEFYRARGKLLEFNLPGGIPESWPKLLQALNIEDPDNKRSAAA

SEQ ID NO: 26040 - protein, 285 aa, Zea mays subsp. mays
  peptide (1)..(285): Ceres Seq. ID no. 12405673
  misc_feature (98)..(175): Pfam Name: Pfam Description:  Adenylate kinase
  misc_feature (8)..(285): NCBI GI NO: 30687836 NR Description: adenylate kinase -related [Arabidopsis thaliana]
  misc_feature (98)..(285): NCBI GI NO: 6063552 NR Description: ESTs AU065232
  misc_feature (1)..(98): NCBI GI NO: 6063552 NR Description: ESTs AU065232
  misc_feature (1)..(285): NCBI GI NO: 15228109 NR Description: putative adenylate kinase; protein id: At2g37250
  misc_feature (1)..(285): NCBI GI NO: 29427816 NR Description: Adenylate kinase, chloroplast precursor
  misc_feature (56)..(276): NCBI GI NO: 15644227 NR Description: adenylate kinase [Thermotoga maritima]
  misc_feature (56)..(272): NCBI GI NO: 11498284 NR Description: adenylate kinase (adk) [Archaeoglobus fulgidus]
  misc_feature (56)..(261): NCBI GI NO: 23510140 NR Description: adenylate kinase 1 [Plasmodium falciparum 3D7]
  misc_feature (56)..(256): NCBI GI NO: 23112485 NR Description: hypothetical protein
  misc_feature (56)..(276): NCBI GI NO: 26985214 NR Description: adenylate kinase [Thermotoga neapolitana]
MAGMSRAIRNFAAASRRTLTAASGPALPKEAAARVRAGAPGRMGRDQEDGRRVQWVFLGCPGVGKGTYASRLSQLLGVPHIATGDLVRDALATPGPFSNKLAEIVNHGKLVSDEIIINLLSRRLEEGEEKGELGFILDGFPRTIGQAEILEGVTDIDLVINLKLREEALLAKCLGRRMCSQCGGNFNVASIDIEGEDGGPRMYMPPLLPPPQCESKLIARADDTEEVVKERLRVYHDLTEPVEEFYRARGKLLEFNLPGGIPESWPKLLQALNIEDPDNKRSAAA

SEQ ID NO: 26041 - protein, 282 aa, Zea mays subsp. mays
  peptide (1)..(282): Ceres Seq. ID no. 12405674
  misc_feature (95)..(172): Pfam Name: Pfam Description:  Adenylate kinase
  misc_feature (5)..(282): NCBI GI NO: 30687836 NR Description: adenylate kinase -related [Arabidopsis thaliana]
  misc_feature (95)..(282): NCBI GI NO: 6063552 NR Description: ESTs AU065232
  misc_feature (1)..(95): NCBI GI NO: 6063552 NR Description: ESTs AU065232
  misc_feature (1)..(282): NCBI GI NO: 15228109 NR Description: putative adenylate kinase; protein id: At2g37250
  misc_feature (1)..(282): NCBI GI NO: 29427816 NR Description: Adenylate kinase, chloroplast precursor
  misc_feature (53)..(273): NCBI GI NO: 15644227 NR Description: adenylate kinase [Thermotoga maritima]
  misc_feature (53)..(269): NCBI GI NO: 11498284 NR Description: adenylate kinase (adk) [Archaeoglobus fulgidus]
  misc_feature (53)..(258): NCBI GI NO: 23510140 NR Description: adenylate kinase 1 [Plasmodium falciparum 3D7]
  misc_feature (53)..(253): NCBI GI NO: 23112485 NR Description: hypothetical protein
  misc_feature (53)..(273): NCBI GI NO: 26985214 NR Description: adenylate kinase [Thermotoga neapolitana]
MSRAIRNFAAASRRTLTAASGPALPKEAAARVRAGAPGRMGRDQEDGRRVQWVFLGCPGVGKGTYASRLSQLLGVPHIATGDLVRDALATPGPFSNKLAEIVNHGKLVSDEIIINLLSRRLEEGEEKGELGFILDGFPRTIGQAEILEGVTDIDLVINLKLREEALLAKCLGRRMCSQCGGNFNVASIDIEGEDGGPRMYMPPLLPPPQCESKLIARADDTEEVVKERLRVYHDLTEPVEEFYRARGKLLEFNLPGGIPESWPKLLQALNIEDPDNKRSAAA

SEQ ID NO: 26042 - DNA, 422 bp, Zea mays subsp. mays
  misc_feature (1)..(422): Ceres Seq. ID no. 13564422
  misc_feature (417)..(417): n is a, c, t, g, unknown, or other
ggccggcaactcgacagggaaaaggaagacgcaccgctagagctgagatgtccttcttcttccgcatggcgtcgcggctgcggccgtcgacgccggaggaggtggtgcgctccatcaaggactccttcctcgcgctccacacgcgcacccacgccaaggctctggaagaggtcgagaaaaatatgtcatctttgagattgttgatctttggtgatggagaagtcgaaccaaatgaagagcaggtcctgcaaataaccctcgagatttgcaaggaggacgtcatttccctgatcgtccaggatctgccttccttgggctggggagtaagaaaagatctggctatctgctggtgcatcttgcttargcagaargttgatgaaacttattgctgtgtgcagtatcttgaaaatcatctgnagctt

SEQ ID NO: 26043 - protein, 140 aa, Zea mays subsp. mays
  peptide (1)..(140): Ceres Seq. ID no. 13564423
  misc_feature (49)..(139): Pfam Name: Pfam Description:  Mo25 protein family
  misc_feature (16)..(139): NCBI GI NO: 33146499 NR Description: unknown protein
  misc_feature (16)..(139): NCBI GI NO: 34898912 NR Description: hypothetical protein
  misc_feature (16)..(139): NCBI GI NO: 18419772 NR Description: expressed protein [Arabidopsis thaliana]
  misc_feature (16)..(137): NCBI GI NO: 19115597 NR Description: similarity to mo25 [Schizosaccharomyces pombe]
  misc_feature (27)..(135): NCBI GI NO: 34901086 NR Description: putative MO25 protein (CGI-66)
  misc_feature (27)..(139): NCBI GI NO: 15236013 NR Description: MO25 protein family [Arabidopsis thaliana]
  misc_feature (30)..(134): NCBI GI NO: 17537411 NR Description: Mouse Mo25 protein like (39.4 kD)
  misc_feature (27)..(139): NCBI GI NO: 15214076 NR Description: Hypothetical MO25-like protein At5g47540
  misc_feature (27)..(139): NCBI GI NO: 15238126 NR Description: MO25 protein family [Arabidopsis thaliana]
  misc_feature (30)..(134): NCBI GI NO: 39589256 NR Description: Hypothetical protein CBG01052
  misc_feature (121)..(121): Xaa is any aa, unknown or other
  misc_feature (123)..(123): Xaa is any aa, unknown or other
  misc_feature (139)..(139): Xaa is any aa, unknown or other
PATRQGKGRRTARAEMSFFFRMASRLRPSTPEEVVRSIKDSFLALHTRTHAKALEEVEKNMSSLRLLIFGDGEVEPNEEQVLQITLEICKEDVISLIVQDLPSLGWGVRKDLAICWCILLXQXVDETYCCVQYLENHLXL

SEQ ID NO: 26044 - protein, 125 aa, Zea mays subsp. mays
  peptide (1)..(125): Ceres Seq. ID no. 13564424
  misc_feature (34)..(124): Pfam Name: Pfam Description:  Mo25 protein family
  misc_feature (1)..(124): NCBI GI NO: 33146499 NR Description: unknown protein
  misc_feature (1)..(124): NCBI GI NO: 34898912 NR Description: hypothetical protein
  misc_feature (1)..(124): NCBI GI NO: 18419772 NR Description: expressed protein [Arabidopsis thaliana]
  misc_feature (1)..(122): NCBI GI NO: 19115597 NR Description: similarity to mo25 [Schizosaccharomyces pombe]
  misc_feature (12)..(120): NCBI GI NO: 34901086 NR Description: putative MO25 protein (CGI-66)
  misc_feature (12)..(124): NCBI GI NO: 15236013 NR Description: MO25 protein family [Arabidopsis thaliana]
  misc_feature (15)..(119): NCBI GI NO: 17537411 NR Description: Mouse Mo25 protein like (39.4 kD)
  misc_feature (12)..(124): NCBI GI NO: 15214076 NR Description: Hypothetical MO25-like protein At5g47540
  misc_feature (12)..(124): NCBI GI NO: 15238126 NR Description: MO25 protein family [Arabidopsis thaliana]
  misc_feature (15)..(119): NCBI GI NO: 39589256 NR Description: Hypothetical protein CBG01052
  misc_feature (106)..(106): Xaa is any aa, unknown or other
  misc_feature (108)..(108): Xaa is any aa, unknown or other
  misc_feature (124)..(124): Xaa is any aa, unknown or other
MSFFFRMASRLRPSTPEEVVRSIKDSFLALHTRTHAKALEEVEKNMSSLRLLIFGDGEVEPNEEQVLQITLEICKEDVISLIVQDLPSLGWGVRKDLAICWCILLXQXVDETYCCVQYLENHLXL

SEQ ID NO: 26045 - protein, 119 aa, Zea mays subsp. mays
  peptide (1)..(119): Ceres Seq. ID no. 13564425
  misc_feature (28)..(118): Pfam Name: Pfam Description:  Mo25 protein family
  misc_feature (1)..(118): NCBI GI NO: 33146499 NR Description: unknown protein
  misc_feature (1)..(118): NCBI GI NO: 34898912 NR Description: hypothetical protein
  misc_feature (1)..(118): NCBI GI NO: 18419772 NR Description: expressed protein [Arabidopsis thaliana]
  misc_feature (1)..(116): NCBI GI NO: 19115597 NR Description: similarity to mo25 [Schizosaccharomyces pombe]
  misc_feature (6)..(114): NCBI GI NO: 34901086 NR Description: putative MO25 protein (CGI-66)
  misc_feature (6)..(118): NCBI GI NO: 15236013 NR Description: MO25 protein family [Arabidopsis thaliana]
  misc_feature (9)..(113): NCBI GI NO: 17537411 NR Description: Mouse Mo25 protein like (39.4 kD)
  misc_feature (6)..(118): NCBI GI NO: 15214076 NR Description: Hypothetical MO25-like protein At5g47540
  misc_feature (6)..(118): NCBI GI NO: 15238126 NR Description: MO25 protein family [Arabidopsis thaliana]
  misc_feature (9)..(113): NCBI GI NO: 39589256 NR Description: Hypothetical protein CBG01052
  misc_feature (100)..(100): Xaa is any aa, unknown or other
  misc_feature (102)..(102): Xaa is any aa, unknown or other
  misc_feature (118)..(118): Xaa is any aa, unknown or other
MASRLRPSTPEEVVRSIKDSFLALHTRTHAKALEEVEKNMSSLRLLIFGDGEVEPNEEQVLQITLEICKEDVISLIVQDLPSLGWGVRKDLAICWCILLXQXVDETYCCVQYLENHLXL

SEQ ID NO: 26046 - DNA, 1622 bp, Zea mays subsp. mays
  misc_feature (1)..(1622): Ceres Seq. ID no. 12351540
aattccttcctctcctctcgccccacgcccctctccatctgctcccgctccgcctcgcctagggttttgcccccaaacctagcctcccccgaatctcccacgccatggacgtcgagggcgaggtccccgccgccgccgcggcggcggtggcgaacggcctgggcggcgcgggcgcggaggaggcctctccggcgccggtctcggctgagcagctcgacgtggaggcgtacgcggcgcagtactcggggcggacccgcctcgtgcgcctcctctttgtcgccgaccggtgcggggtggaggcgatgcagctcgaggcgctgcggatggcttacgacgagatcaagcgcggggaggacgtgcagctccaccgcgacgtcgtcaccaagatcggcggccgcctcggtccgcgctacggcctcgaccaggcgtgggtcttcagcgtctcccgccgcgccgaccagcgcaaggagaagctcgagagcgagctcaatggatacaggactaacttaatcaaagagagcatcagaatgggctacaatgacattggtgatttcttctatgcccatggccaactttcagatgctttcaaaagctacatcaggactcgggactattgcaccacttccaaacatatagttcagatgtgcatgaatgtgattctggttagcattgagctggggcaatatgcacatgtttcaaactatgtcagcaaagcagagcaaacccccgactctctggatcctaccattgttgcaaagctgaaggcagctgcaggattagccaacttggaaacaaagaaatacaaatttgctgctcgtaagtttgttgagacaggaattgaactaggaaacaacttctctgaagtcatagctcctcaagacgtggcagtctatggtgccctttgtgcacttgcttcttttgaccgttcagacctgaagagcaaagtcattgacaatatcaacttccgtaactttctggacctggtgcctgaagtaagggagctggttaatgatttttatgcaagtcgctatggatcttgcttgggtcatcttgagaagctaaagcctaacctgctcctggatatccatttgcatcagcatgtagagactctgtatatggagattcgccacaaagcgatcatacagtacacacttccttttatatctgttgacctcaacacgatggcagccgcctttaagacttcggtctccatgctgcagaaggagctggccgcactgattactgaggacaaaatacaggcccggatagactcccacaacaagatcctttacgcaaggcatgctgaccagagaaatgcaactttccagcgtgtccttcaaaccggcaatgactttgagagagatgtcaagtccatgcttctgcgtgccaacctcctcaagcatgattacattcagaagacaagcggaccaaggaagatgtaaagattgcgggcgtcgctgctaggcaaggcttcctgctgcatgcctctccacttttttttttgaagaattgttctgtgacataaaagggaccgaagtctgtctaaatgccctccccctctttctttttattggttgatgaaagttattgtcgaagtaatgtatggttgagcatctggatgt

SEQ ID NO: 26047 - protein, 445 aa, Zea mays subsp. mays
  peptide (1)..(445): Ceres Seq. ID no. 12351541
  misc_feature (295)..(399): Pfam Name: Pfam Description:  PCI domain
  misc_feature (1)..(445): NCBI GI NO: 7208213 NR Description: constitutive photomorphogenic 11
  misc_feature (1)..(445): NCBI GI NO: 10443485 NR Description: rCOP11 protein [Oryza sativa]
  misc_feature (23)..(445): NCBI GI NO: 432446 NR Description: FUS6
  misc_feature (23)..(445): NCBI GI NO: 18411857 NR Description: COP9 complex subunit, FUS6; protein id:At3g61140
  misc_feature (23)..(445): NCBI GI NO: 26450149 NR Description: putative FUSCA protein FUS6 [Arabidopsis thaliana]
  misc_feature (23)..(445): NCBI GI NO: 11282867 NR Description: FUSCA PROTEIN FUS6 - Arabidopsis thaliana
  misc_feature (103)..(440): NCBI GI NO: 24666528 NR Description: COP9 complex homolog subunit 1 CG3889-PA
  misc_feature (32)..(89): NCBI GI NO: 24666528 NR Description: COP9 complex homolog subunit 1 CG3889-PA
  misc_feature (103)..(440): NCBI GI NO: 4732103 NR Description: COP9 signalosome subunit 1 CSN1
  misc_feature (32)..(89): NCBI GI NO: 4732103 NR Description: COP9 signalosome subunit 1 CSN1
MDVEGEVPAAAAAAVANGLGGAGAEEASPAPVSAEQLDVEAYAAQYSGRTRLVRLLFVADRCGVEAMQLEALRMAYDEIKRGEDVQLHRDVVTKIGGRLGPRYGLDQAWVFSVSRRADQRKEKLESELNGYRTNLIKESIRMGYNDIGDFFYAHGQLSDAFKSYIRTRDYCTTSKHIVQMCMNVILVSIELGQYAHVSNYVSKAEQTPDSLDPTIVAKLKAAAGLANLETKKYKFAARKFVETGIELGNNFSEVIAPQDVAVYGALCALASFDRSDLKSKVIDNINFRNFLDLVPEVRELVNDFYASRYGSCLGHLEKLKPNLLLDIHLHQHVETLYMEIRHKAIIQYTLPFISVDLNTMAAAFKTSVSMLQKELAALITEDKIQARIDSHNKILYARHADQRNATFQRVLQTGNDFERDVKSMLLRANLLKHDYIQKTSGPRKM

SEQ ID NO: 26048 - protein, 379 aa, Zea mays subsp. mays
  peptide (1)..(379): Ceres Seq. ID no. 12351542
  misc_feature (229)..(333): Pfam Name: Pfam Description:  PCI domain
  misc_feature (1)..(379): NCBI GI NO: 7208213 NR Description: constitutive photomorphogenic 11
  misc_feature (1)..(379): NCBI GI NO: 10443485 NR Description: rCOP11 protein [Oryza sativa]
  misc_feature (1)..(379): NCBI GI NO: 432446 NR Description: FUS6
  misc_feature (1)..(379): NCBI GI NO: 18411857 NR Description: COP9 complex subunit, FUS6; protein id:At3g61140
  misc_feature (1)..(379): NCBI GI NO: 26450149 NR Description: putative FUSCA protein FUS6 [Arabidopsis thaliana]
  misc_feature (1)..(379): NCBI GI NO: 11282867 NR Description: FUSCA PROTEIN FUS6 - Arabidopsis thaliana
  misc_feature (37)..(374): NCBI GI NO: 24666528 NR Description: COP9 complex homolog subunit 1 CG3889-PA
  misc_feature (1)..(23): NCBI GI NO: 24666528 NR Description: COP9 complex homolog subunit 1 CG3889-PA
  misc_feature (37)..(374): NCBI GI NO: 4732103 NR Description: COP9 signalosome subunit 1 CSN1
  misc_feature (1)..(23): NCBI GI NO: 4732103 NR Description: COP9 signalosome subunit 1 CSN1
MQLEALRMAYDEIKRGEDVQLHRDVVTKIGGRLGPRYGLDQAWVFSVSRRADQRKEKLESELNGYRTNLIKESIRMGYNDIGDFFYAHGQLSDAFKSYIRTRDYCTTSKHIVQMCMNVILVSIELGQYAHVSNYVSKAEQTPDSLDPTIVAKLKAAAGLANLETKKYKFAARKFVETGIELGNNFSEVIAPQDVAVYGALCALASFDRSDLKSKVIDNINFRNFLDLVPEVRELVNDFYASRYGSCLGHLEKLKPNLLLDIHLHQHVETLYMEIRHKAIIQYTLPFISVDLNTMAAAFKTSVSMLQKELAALITEDKIQARIDSHNKILYARHADQRNATFQRVLQTGNDFERDVKSMLLRANLLKHDYIQKTSGPRKM

SEQ ID NO: 26049 - protein, 372 aa, Zea mays subsp. mays
  peptide (1)..(372): Ceres Seq. ID no. 12351543
  misc_feature (222)..(326): Pfam Name: Pfam Description:  PCI domain
  misc_feature (1)..(372): NCBI GI NO: 7208213 NR Description: constitutive photomorphogenic 11
  misc_feature (1)..(372): NCBI GI NO: 10443485 NR Description: rCOP11 protein [Oryza sativa]
  misc_feature (1)..(372): NCBI GI NO: 432446 NR Description: FUS6
  misc_feature (1)..(372): NCBI GI NO: 18411857 NR Description: COP9 complex subunit, FUS6; protein id:At3g61140
  misc_feature (1)..(372): NCBI GI NO: 26450149 NR Description: putative FUSCA protein FUS6 [Arabidopsis thaliana]
  misc_feature (1)..(372): NCBI GI NO: 11282867 NR Description: FUSCA PROTEIN FUS6 - Arabidopsis thaliana
  misc_feature (30)..(367): NCBI GI NO: 24666528 NR Description: COP9 complex homolog subunit 1 CG3889-PA
  misc_feature (1)..(16): NCBI GI NO: 24666528 NR Description: COP9 complex homolog subunit 1 CG3889-PA
  misc_feature (30)..(367): NCBI GI NO: 4732103 NR Description: COP9 signalosome subunit 1 CSN1
  misc_feature (1)..(16): NCBI GI NO: 4732103 NR Description: COP9 signalosome subunit 1 CSN1
MAYDEIKRGEDVQLHRDVVTKIGGRLGPRYGLDQAWVFSVSRRADQRKEKLESELNGYRTNLIKESIRMGYNDIGDFFYAHGQLSDAFKSYIRTRDYCTTSKHIVQMCMNVILVSIELGQYAHVSNYVSKAEQTPDSLDPTIVAKLKAAAGLANLETKKYKFAARKFVETGIELGNNFSEVIAPQDVAVYGALCALASFDRSDLKSKVIDNINFRNFLDLVPEVRELVNDFYASRYGSCLGHLEKLKPNLLLDIHLHQHVETLYMEIRHKAIIQYTLPFISVDLNTMAAAFKTSVSMLQKELAALITEDKIQARIDSHNKILYARHADQRNATFQRVLQTGNDFERDVKSMLLRANLLKHDYIQKTSGPRKM

SEQ ID NO: 26050 - DNA, 1181 bp, Zea mays subsp. mays
  misc_feature (1)..(1181): Ceres Seq. ID no. 12413563
  misc_feature (384)..(384): n is a, c, t, g, unknown, or other
  misc_feature (387)..(387): n is a, c, t, g, unknown, or other
  misc_feature (385)..(385): n is a, c, t, g, unknown, or other
  misc_feature (390)..(390): n is a, c, t, g, unknown, or other
aaatttccccacacgcgcccacctcctccgggtcctcccctctagtcctctctcccgaccccacctctgccgtccgtgcgtccgtccggcaaccgcgacgcaacaatggcggccgggcgagagctggtggtgagtttcggcgagatgctgatagacttcgtgccgaccgtggcgggggtctcgctggccgaggcgccggccttcctcaaggcggccgggggcgcgcccgccaacgtcgccatcgcggtctcgcgcctcggtggcggggccgccttcgttggcaagctcggcgacgacgagttcggccgcatgctcgccgccatcctccgcgacaacggcgtcgacggcggcggcgtcgtcttcgacgcgggcgcgcgcaccggnntnttnccttcgtcaccctgcgcgccgacggcgagcgcgagttcatgttctaccgcaaccccagcgccgacatgctcctcactgccgacgagctcaacgtcgggctcatccggagggctgcggtctttcactacggatcaataagcttgattgctgagccttgccggacagcacatctccgtgccatggaaattgccaaagaggctggtgcactgctctcttacgacccaaacctgagggaggcactttggccatcccgtgaggaggcccgcacccagatcttgagcatctgggaccaggcagatatcgtcaaggtcagcgaagtcgagcttgagttcttgacaggcatcaactcagtggaggacgatgttgtcatgaagctgtggcgacctaccatgaagctgctcctggtgactcttggagatcaaggatgcaagtactataccagggatttccatggagctgtcccttccttcaaagtacaacaagtcgatacgactggcgcaggcgatgcgtttgttggtgcgctgctccgaaggatcgttaaagatccatcctcgctacaagacgagaagaagcttgtagagtctattaaattcgctaatgcgtgtggagcaatcaccgccacgaagaagggtgcgatcccgtctttgcccactgaaactgaggtcttgcagctaatagagaaggcatagatagatcactgtaattgctttggttttcactagcttccacttctgcaaattgcaaaatgtattgtattctgatctggaacagaagaagtgggtgctccatcc

SEQ ID NO: 26051 - protein, 358 aa, Zea mays subsp. mays
  peptide (1)..(358): Ceres Seq. ID no. 12413564
  misc_feature (125)..(348): Pfam Name: Pfam Description:  pfkB family carbohydrate kinase
  misc_feature (125)..(358): NCBI GI NO: 34907582 NR Description: putative fructokinase I
  misc_feature (125)..(357): NCBI GI NO: 15224669 NR Description: putative fructokinase; protein id: At2g31390
  misc_feature (125)..(357): NCBI GI NO: 14423528 NR Description: putative fructokinase [Arabidopsis thaliana]
  misc_feature (125)..(357): NCBI GI NO: 33329200 NR Description: putative fructokinase 2
  misc_feature (125)..(357): NCBI GI NO: 33329198 NR Description: putative fructokinase
  misc_feature (125)..(357): NCBI GI NO: 7434223 NR Description: fructokinase (EC 2.7.1.4) - beet
  misc_feature (125)..(356): NCBI GI NO: 15221364 NR Description: fructokinase, putative; protein id: At1g06020.1
  misc_feature (125)..(356): NCBI GI NO: 15221365 NR Description: fructokinase, putative; protein id: At1g06030
  misc_feature (125)..(356): NCBI GI NO: 1915974 NR Description: fructokinase [Lycopersicon esculentum]
  misc_feature (125)..(356): NCBI GI NO: 32765547 NR Description: fructokinase 2 [Lycopersicon hirsutum]
  misc_feature (128)..(128): Xaa is any aa, unknown or other
  misc_feature (129)..(129): Xaa is any aa, unknown or other
  misc_feature (130)..(130): Xaa is any aa, unknown or other
ISPHAPTSSGSSPLVLSPDPTSAVRASVRQPRRNNGGRARAGGEFRRDADRLRADRGGGLAGRGAGLPQGGRGRARQRRHRGLAPRWRGRLRWQARRRRVRPHARRHPPRQRRRRRRRRLRRGRAHRXXXFVTLRADGEREFMFYRNPSADMLLTADELNVGLIRRAAVFHYGSISLIAEPCRTAHLRAMEIAKEAGALLSYDPNLREALWPSREEARTQILSIWDQADIVKVSEVELEFLTGINSVEDDVVMKLWRPTMKLLLVTLGDQGCKYYTRDFHGAVPSFKVQQVDTTGAGDAFVGALLRRIVKDPSSLQDEKKLVESIKFANACGAITATKKGAIPSLPTETEVLQLIEKA

SEQ ID NO: 26052 - protein, 216 aa, Zea mays subsp. mays
  peptide (1)..(216): Ceres Seq. ID no. 12413565
  misc_feature (1)..(206): Pfam Name: Pfam Description:  pfkB family carbohydrate kinase
  misc_feature (1)..(216): NCBI GI NO: 34907582 NR Description: putative fructokinase I
  misc_feature (1)..(215): NCBI GI NO: 15224669 NR Description: putative fructokinase; protein id: At2g31390
  misc_feature (1)..(215): NCBI GI NO: 14423528 NR Description: putative fructokinase [Arabidopsis thaliana]
  misc_feature (1)..(215): NCBI GI NO: 33329200 NR Description: putative fructokinase 2
  misc_feature (1)..(215): NCBI GI NO: 33329198 NR Description: putative fructokinase
  misc_feature (1)..(215): NCBI GI NO: 7434223 NR Description: fructokinase (EC 2.7.1.4) - beet
  misc_feature (1)..(214): NCBI GI NO: 15221364 NR Description: fructokinase, putative; protein id: At1g06020.1
  misc_feature (1)..(214): NCBI GI NO: 15221365 NR Description: fructokinase, putative; protein id: At1g06030
  misc_feature (1)..(214): NCBI GI NO: 1915974 NR Description: fructokinase [Lycopersicon esculentum]
  misc_feature (1)..(214): NCBI GI NO: 32765547 NR Description: fructokinase 2 [Lycopersicon hirsutum]
MFYRNPSADMLLTADELNVGLIRRAAVFHYGSISLIAEPCRTAHLRAMEIAKEAGALLSYDPNLREALWPSREEARTQILSIWDQADIVKVSEVELEFLTGINSVEDDVVMKLWRPTMKLLLVTLGDQGCKYYTRDFHGAVPSFKVQQVDTTGAGDAFVGALLRRIVKDPSSLQDEKKLVESIKFANACGAITATKKGAIPSLPTETEVLQLIEKA

SEQ ID NO: 26053 - protein, 207 aa, Zea mays subsp. mays
  peptide (1)..(207): Ceres Seq. ID no. 12413566
  misc_feature (1)..(197): Pfam Name: Pfam Description:  pfkB family carbohydrate kinase
  misc_feature (1)..(207): NCBI GI NO: 34907582 NR Description: putative fructokinase I
  misc_feature (1)..(206): NCBI GI NO: 15224669 NR Description: putative fructokinase; protein id: At2g31390
  misc_feature (1)..(206): NCBI GI NO: 14423528 NR Description: putative fructokinase [Arabidopsis thaliana]
  misc_feature (1)..(206): NCBI GI NO: 33329200 NR Description: putative fructokinase 2
  misc_feature (1)..(206): NCBI GI NO: 33329198 NR Description: putative fructokinase
  misc_feature (1)..(206): NCBI GI NO: 7434223 NR Description: fructokinase (EC 2.7.1.4) - beet
  misc_feature (1)..(205): NCBI GI NO: 15221364 NR Description: fructokinase, putative; protein id: At1g06020.1
  misc_feature (1)..(205): NCBI GI NO: 15221365 NR Description: fructokinase, putative; protein id: At1g06030
  misc_feature (1)..(205): NCBI GI NO: 1915974 NR Description: fructokinase [Lycopersicon esculentum]
  misc_feature (1)..(205): NCBI GI NO: 32765547 NR Description: fructokinase 2 [Lycopersicon hirsutum]
MLLTADELNVGLIRRAAVFHYGSISLIAEPCRTAHLRAMEIAKEAGALLSYDPNLREALWPSREEARTQILSIWDQADIVKVSEVELEFLTGINSVEDDVVMKLWRPTMKLLLVTLGDQGCKYYTRDFHGAVPSFKVQQVDTTGAGDAFVGALLRRIVKDPSSLQDEKKLVESIKFANACGAITATKKGAIPSLPTETEVLQLIEKA

SEQ ID NO: 26054 - DNA, 710 bp, Zea mays subsp. mays
  misc_feature (1)..(710): Ceres Seq. ID no. 12343668
atgtgatagcccggcccaacactacaactgcctctcctcggcgtcgccactactccttgcctcacgccgccgctcaaacagcagaagggagaagagaagcacgcccaaaaattccaaggtttttcacctcttggagcgcaccaacaccacccggagaccggagcgactcgccaccggcgcggaaaaggagggcggaggttcgatggcggatgagaatcaggctggaaagaaagaggaggaggaatttagcacaggccctctgtcagtcctaatgatgagtgttaagaacaacacccaggtcctcatcaattgtcgcaacaacaagaagctgcttggccgtgttcgtgcttttgatcgccactgtaacatggtgctcgaaaacgtgcgtgagatgtggacagagatccccaagactggcaagggcaaaaagaaggctctgcctgtgaacaaggatagattcatcagtaagatgttcctcaggggcgactcggtcatcatagtgctgaggaacccgaagtgatcgcccaaccagtcacattgcagcagttatgccctttctctgggttcacggaatccgtgcctctattgaaaaaactgtagcttatgtgtgtcttggcggattagctggttatcttgaactgacgttcatgtgacatggcaatggcacatgaacatacgtttcatgagtttggttgttaattggcgcttgc

SEQ ID NO: 26055 - protein, 172 aa, Zea mays subsp. mays
  peptide (1)..(172): Ceres Seq. ID no. 12343669
  misc_feature (90)..(169): Pfam Name: Pfam Description:  LSM domain
  misc_feature (70)..(172): NCBI GI NO: 18407411 NR Description: putative small nuclear ribonucleoprotein D2
  misc_feature (70)..(172): NCBI GI NO: 21554692 NR Description: small nuclear ribonucleoprotein-like protein
  misc_feature (70)..(172): NCBI GI NO: 30690747 NR Description: small nuclear ribonucleo protein D2 -related
  misc_feature (73)..(172): NCBI GI NO: 31230450 NR Description: ENSANGP00000002741 [Anopheles gambiae]
  misc_feature (76)..(171): NCBI GI NO: 4759158 NR Description: small nuclear ribonucleoprotein polypeptide D2
  misc_feature (73)..(171): NCBI GI NO: 21357623 NR Description: CG1249-PA [Drosophila melanogaster]
  misc_feature (76)..(171): NCBI GI NO: 26337731 NR Description: unnamed protein product [Mus musculus]
  misc_feature (76)..(171): NCBI GI NO: 22203734 NR Description: small nuclear ribonucleoprotein D2-like protein
  misc_feature (76)..(171): NCBI GI NO: 27677236 NR Description: similar to Small nuclear ribonucleoprotein Sm D2
  misc_feature (60)..(171): NCBI GI NO: 17558868 NR Description: Small nuclear ribonucleoprotein (13.3 kD)
CDSPAQHYNCLSSASPLLLASRRRSNSRREKRSTPKNSKVFHLLERTNTTRRPERLATGAEKEGGGSMADENQAGKKEEEEFSTGPLSVLMMSVKNNTQVLINCRNNKKLLGRVRAFDRHCNMVLENVREMWTEIPKTGKGKKKALPVNKDRFISKMFLRGDSVIIVLRNPK

SEQ ID NO: 26056 - protein, 105 aa, Zea mays subsp. mays
  peptide (1)..(105): Ceres Seq. ID no. 12343670
  misc_feature (23)..(102): Pfam Name: Pfam Description:  LSM domain
  misc_feature (3)..(105): NCBI GI NO: 18407411 NR Description: putative small nuclear ribonucleoprotein D2
  misc_feature (3)..(105): NCBI GI NO: 21554692 NR Description: small nuclear ribonucleoprotein-like protein
  misc_feature (3)..(105): NCBI GI NO: 30690747 NR Description: small nuclear ribonucleo protein D2 -related
  misc_feature (6)..(105): NCBI GI NO: 31230450 NR Description: ENSANGP00000002741 [Anopheles gambiae]
  misc_feature (9)..(104): NCBI GI NO: 4759158 NR Description: small nuclear ribonucleoprotein polypeptide D2
  misc_feature (6)..(104): NCBI GI NO: 21357623 NR Description: CG1249-PA [Drosophila melanogaster]
  misc_feature (9)..(104): NCBI GI NO: 26337731 NR Description: unnamed protein product [Mus musculus]
  misc_feature (9)..(104): NCBI GI NO: 22203734 NR Description: small nuclear ribonucleoprotein D2-like protein
  misc_feature (9)..(104): NCBI GI NO: 27677236 NR Description: similar to Small nuclear ribonucleoprotein Sm D2
  misc_feature (1)..(104): NCBI GI NO: 17558868 NR Description: Small nuclear ribonucleoprotein (13.3 kD)
MADENQAGKKEEEEFSTGPLSVLMMSVKNNTQVLINCRNNKKLLGRVRAFDRHCNMVLENVREMWTEIPKTGKGKKKALPVNKDRFISKMFLRGDSVIIVLRNPK

SEQ ID NO: 26057 - protein, 89 aa, Zea mays subsp. mays
  peptide (1)..(89): Ceres Seq. ID no. 12343671
VIARPNTTTASPRRRHYSLPHAAAQTAEGRREARPKIPRFFTSWSAPTPPGDRSDSPPARKRRAEVRWRMRIRLERKRRRNLAQALCQS

SEQ ID NO: 26058 - DNA, 1572 bp, Zea mays subsp. mays
  misc_feature (1)..(1572): Ceres Seq. ID no. 12373300
gaatatccgggcatccggcccaggcatgaacggtcggttaaaccggccaatcttcctctcaagcctcgacgcagcacggcgcgccggcgcgggacgacggcatgacgccgccgtccatcttccaccaccatcgctgcctcgtctccctcccctccgcttccccgacctggacctcgtcccgtcgtctcatccatcaactcgcaaaacccacagtcctgtccctacatctgcgtccagtcttatcctcttccttcgcggttgccgccgtcggcgacgacgaggatgtcgtagtcggggattgcctcgtgttcgacgacgacgctttcgaggaaccggacctggacctcccctcgtccccgtggccgtcggctagcgcctcacgccacggccggaggtcggaggcaggcgagagcgacagcctggtgccggagaggtggaggcatgccgaggaggagatcaacctgacgaagaaggataagcgccgcatcgcgcacgggctgcggttcgggagccgcctcgagcggcgggcgcccccagctgttgctgctcctgatgaattccgcgcgtaccgcaaggggatgctgagcgctgagcgtgagcatgtttctcatgtataccgggggccgctggagaggactcctccgccggaagtgaaggaacatccaccgccggagccggagcctgggacgcgtgtggccccgaggaatccgaggatggggatgggcgttggcacccttgacgacattgatgagtttttcagaagtagggaatatgttcaggatgagatggaggacagcaagagtcctaagggccgtcagaagttgttctcaaatgaggagaagattcttctgaacaagcgagtgcctgatctggaaacagctacttctagtaaatggcttccacttcacacccttgctgcatctggtgatttctatctattgaatagccttttaaaacataacgtggacataaatgcgcttgataaggatggcttaccagcgatccacaaagcaattctttcaaagaaggctgctattatcaattatcttttaaggaactcagcaaatccattcatccaagataaagatggtgcgactctaatgcattatgcggtccaaacagcatgtagtcagaccataaagacacttttactgtacaatgttgacatcaaccgtccagatgattatggatggacacctttgcatcttgcggtacaaacacagaggactgacattgtgaagctgcttttaataaagggcgctgatagaactattagaacccaagatggattgaccccgttggagttgtgcctccggttgggtcatgatgtgcggacgtatgagcttatcaaactacttaaaagtttccgaggacaaaagcagcatgatttagtttagcaactggagggtgtgtgaccctctttgaaccagtgaggttaaccagtgtggtggccttctgggaggccagttttcaatgtaccattcatgattcatggaatcgctcctggtttgagataggtacatgccaacttcattgtatttgtatcatttatatatttcattggcctaaacc

SEQ ID NO: 26059 - protein, 431 aa, Zea mays subsp. mays
  peptide (1)..(431): Ceres Seq. ID no. 12373301
  misc_feature (329)..(361): Pfam Name: Pfam Description:  Ankyrin repeat
  misc_feature (3)..(431): NCBI GI NO: 22758264 NR Description: Putative ankyrin-repeat protein
  misc_feature (10)..(422): NCBI GI NO: 30698188 NR Description: expressed protein [Arabidopsis thaliana]
  misc_feature (10)..(422): NCBI GI NO: 26450056 NR Description: unknown protein [Arabidopsis thaliana]
  misc_feature (10)..(400): NCBI GI NO: 322461 NR Description: ankyrin-repeat protein - Arabidopsis thaliana
  misc_feature (178)..(420): NCBI GI NO: 15242597 NR Description: ankyrin repeat protein EMB506
  misc_feature (284)..(409): NCBI GI NO: 26354919 NR Description: unnamed protein product [Mus musculus]
  misc_feature (267)..(409): NCBI GI NO: 28274852 NR Description: ankyrin repeat protein E4_2 [synthetic construct]
  misc_feature (247)..(402): NCBI GI NO: 25990817 NR Description: gankyrin oncoprotein [Mesocricetus auratus]
  misc_feature (247)..(402): NCBI GI NO: 16758980 NR Description: proteasome
  misc_feature (248)..(416): NCBI GI NO: 27369638 NR Description: cDNA sequence BC025474
MTPPSIFHHHRCLVSLPSASPTWTSSRRLIHQLAKPTVLSLHLRPVLSSSFAVAAVGDDEDVVVGDCLVFDDDAFEEPDLDLPSSPWPSASASRHGRRSEAGESDSLVPERWRHAEEEINLTKKDKRRIAHGLRFGSRLERRAPPAVAAPDEFRAYRKGMLSAEREHVSHVYRGPLERTPPPEVKEHPPPEPEPGTRVAPRNPRMGMGVGTLDDIDEFFRSREYVQDEMEDSKSPKGRQKLFSNEEKILLNKRVPDLETATSSKWLPLHTLAASGDFYLLNSLLKHNVDINALDKDGLPAIHKAILSKKAAIINYLLRNSANPFIQDKDGATLMHYAVQTACSQTIKTLLLYNVDINRPDDYGWTPLHLAVQTQRTDIVKLLLIKGADRTIRTQDGLTPLELCLRLGHDVRTYELIKLLKSFRGQKQHDLV

SEQ ID NO: 26060 - protein, 272 aa, Zea mays subsp. mays
  peptide (1)..(272): Ceres Seq. ID no. 12373302
  misc_feature (170)..(202): Pfam Name: Pfam Description:  Ankyrin repeat
  misc_feature (1)..(272): NCBI GI NO: 22758264 NR Description: Putative ankyrin-repeat protein
  misc_feature (1)..(263): NCBI GI NO: 30698188 NR Description: expressed protein [Arabidopsis thaliana]
  misc_feature (1)..(263): NCBI GI NO: 26450056 NR Description: unknown protein [Arabidopsis thaliana]
  misc_feature (1)..(241): NCBI GI NO: 322461 NR Description: ankyrin-repeat protein - Arabidopsis thaliana
  misc_feature (19)..(261): NCBI GI NO: 15242597 NR Description: ankyrin repeat protein EMB506
  misc_feature (125)..(250): NCBI GI NO: 26354919 NR Description: unnamed protein product [Mus musculus]
  misc_feature (108)..(250): NCBI GI NO: 28274852 NR Description: ankyrin repeat protein E4_2 [synthetic construct]
  misc_feature (88)..(243): NCBI GI NO: 25990817 NR Description: gankyrin oncoprotein [Mesocricetus auratus]
  misc_feature (88)..(243): NCBI GI NO: 16758980 NR Description: proteasome
  misc_feature (89)..(257): NCBI GI NO: 27369638 NR Description: cDNA sequence BC025474
MLSAEREHVSHVYRGPLERTPPPEVKEHPPPEPEPGTRVAPRNPRMGMGVGTLDDIDEFFRSREYVQDEMEDSKSPKGRQKLFSNEEKILLNKRVPDLETATSSKWLPLHTLAASGDFYLLNSLLKHNVDINALDKDGLPAIHKAILSKKAAIINYLLRNSANPFIQDKDGATLMHYAVQTACSQTIKTLLLYNVDINRPDDYGWTPLHLAVQTQRTDIVKLLLIKGADRTIRTQDGLTPLELCLRLGHDVRTYELIKLLKSFRGQKQHDLV

SEQ ID NO: 26061 - protein, 227 aa, Zea mays subsp. mays
  peptide (1)..(227): Ceres Seq. ID no. 12373303
  misc_feature (125)..(157): Pfam Name: Pfam Description:  Ankyrin repeat
  misc_feature (1)..(227): NCBI GI NO: 22758264 NR Description: Putative ankyrin-repeat protein
  misc_feature (1)..(218): NCBI GI NO: 30698188 NR Description: expressed protein [Arabidopsis thaliana]
  misc_feature (1)..(218): NCBI GI NO: 26450056 NR Description: unknown protein [Arabidopsis thaliana]
  misc_feature (1)..(196): NCBI GI NO: 322461 NR Description: ankyrin-repeat protein - Arabidopsis thaliana
  misc_feature (1)..(216): NCBI GI NO: 15242597 NR Description: ankyrin repeat protein EMB506
  misc_feature (80)..(205): NCBI GI NO: 26354919 NR Description: unnamed protein product [Mus musculus]
  misc_feature (63)..(205): NCBI GI NO: 28274852 NR Description: ankyrin repeat protein E4_2 [synthetic construct]
  misc_feature (43)..(198): NCBI GI NO: 25990817 NR Description: gankyrin oncoprotein [Mesocricetus auratus]
  misc_feature (43)..(198): NCBI GI NO: 16758980 NR Description: proteasome
  misc_feature (44)..(212): NCBI GI NO: 27369638 NR Description: cDNA sequence BC025474
MGMGVGTLDDIDEFFRSREYVQDEMEDSKSPKGRQKLFSNEEKILLNKRVPDLETATSSKWLPLHTLAASGDFYLLNSLLKHNVDINALDKDGLPAIHKAILSKKAAIINYLLRNSANPFIQDKDGATLMHYAVQTACSQTIKTLLLYNVDINRPDDYGWTPLHLAVQTQRTDIVKLLLIKGADRTIRTQDGLTPLELCLRLGHDVRTYELIKLLKSFRGQKQHDLV

SEQ ID NO: 26062 - DNA, 999 bp, Zea mays subsp. mays
  misc_feature (1)..(999): Ceres Seq. ID no. 12373297
tgcgaggtgcgacaaaccgacaagccaacaatggcgtcgtcagctgctacgaccgcgaagccgatcgcgctcccgccggcgccaacccgcggcggctgctgctgctggaggacacgcaggcccgcgatccccgcggcggcggcacgcctcaaggtctccgcctccgccgcctcgtcggacgtgccggacttcctctcgtccaattggcttgaaacccgcaagagaaagcccttcggtcccaggttgaattttagtgcagaagaagcagtcgaataccagcttgagtccttaaagtacaatgatctgccccgcccagattatgggatagaggtcatgtaccggtttgcaggctttgaccctttcgagaggtcaacttactttggacgacagtttgatctaggacagttcgagcgcttccggcgtctgttttcaccactcaacctacagagtgctgctgggccacagagagagaagaatattgagcagtttatgggttgaagagaaccagttcaagcaaagagtttgggtacaaggagcccgtcccgaggaagaagagatatttcaattcacaatggttcagagggtcggaggatcatgggatggttactggctgacagagagcttaataaacgatggagacgcgttctcgggtgggattgcttactgatgtagtgatgattggtgtaaatcgatcaggtgcagactagcaggtggcgtgaaaaagctgagagacatgttggtgtgtagaatttgccctggctttctggagatgtttggcagtgtcggacacgctagtattgtacaggaagagacctctcacggcgcccatagcaccagatggccaagcatgctgtcatggaccttcggtccatgagatagctgtcttctccggcgaggttatacccctctgccgcaggcttggttctagggtagcagccctaggcgcttgagagggtcattgcaagggagagagattggtttgataatgatcttgcttgc

SEQ ID NO: 26063 - protein, 165 aa, Zea mays subsp. mays
  peptide (1)..(165): Ceres Seq. ID no. 12373298
  misc_feature (56)..(143): NCBI GI NO: 30682820 NR Description: expressed protein [Arabidopsis thaliana]
CEVRQTDKPTMASSAATTAKPIALPPAPTRGGCCCWRTRRPAIPAAAARLKVSASAASSDVPDFLSSNWLETRKRKPFGPRLNFSAEEAVEYQLESLKYNDLPRPDYGIEVMYRFAGFDPFERSTYFGRQFDLGQFERFRRLFSPLNLQSAAGPQREKNIEQFMG

SEQ ID NO: 26064 - protein, 155 aa, Zea mays subsp. mays
  peptide (1)..(155): Ceres Seq. ID no. 12373299
  misc_feature (46)..(133): NCBI GI NO: 30682820 NR Description: expressed protein [Arabidopsis thaliana]
MASSAATTAKPIALPPAPTRGGCCCWRTRRPAIPAAAARLKVSASAASSDVPDFLSSNWLETRKRKPFGPRLNFSAEEAVEYQLESLKYNDLPRPDYGIEVMYRFAGFDPFERSTYFGRQFDLGQFERFRRLFSPLNLQSAAGPQREKNIEQFMG

SEQ ID NO: 26065 - DNA, 1896 bp, Zea mays subsp. mays
  misc_feature (1)..(1896): Ceres Seq. ID no. 12566503
accccggaccgacaaagcagagcacgcgctggcagccaagtgcacacagacacgtctctctgttcgttctcagcttgctatagcaacctctagtaggtagccatggagatggtcctggactggcgctcgctgggctccctgctggcgaccgtcgtggtgttccgcaccgcgctgcgtaacttcctgccgccggaggccgagatgctcctgcgccgcttcctcgcgtgggtcgccgccgcgttccgcccgcccagcgacaccatcctcatcgacgaggcggacgggcccacggggagcgccaacgacctctacgagtcggcgcagctctacctcagcgcgcgctgcctcgccaccgcgcccgccgtgcgcctgcacaagccgcgccagtcgccgcgccccgtggcgtcgctcccggactcgcacaccaccgacgacaccttccgcggggtccgcgtcaagtggacctccaccacgcgcaccgtcgaccgcagcggcagcggcggcggcggtaacccgtacaacatattcggccgcggcggcgaccagcgcggcctcgagctccagttcccgcgccagcaccgggacctcgtccaccaccactacatcccgcacctcatcgacgaggccacccggatgcggctcaagtcgcgggagcgccgcctctacaccaaccgcggccacggggccctgcgacgaccaccaccgcctctggacgtcgcacgccttcgcgcacccgtccacgttcgacacgctggcgctcgacccggcgctgcgcgacgaggtccgcgccgacctgctgcgcttcgccgcgcgccgggaccactacgcgcgcgtcggccgcgcctggaagcgggggtacctgctccacggcccgcccggcacgggcaagaccagcctcgtcgctgccatcgccaacctgctcgacttcgacgtctacgacctggagctcaccacggtgcccaccaactcccacctccgccgcctgctcgtctccaccacgcccaagtccgtcgtcgtcgtcgaggacatcgactgctccctcgacctctccgaccgcaacaagaagacaaagaagggtgctggcgtcggcgtcggcatcggcaccgccggcgacgaagacgccgcagcacagctcgccgtcatgtcggtgtcgccggtcgcggcggccgtgatggggcgcgagtccgtcagcctctccggggtgctcaacttcgtcgacgggctctggtcgtcctgcgtcggcgagcgcctgatggtgttcacgaccaaccacccggagcggctcgacccggcgctgctccgcccgggccgcatggaccgcaagatcgagctcggctactgcacgccgcccgcgctgcgtgtgctcgccaagaactacctcggcgtcggcgacgagggctgcgacgacgccgacgcggaccccgacacggtcaacgccctcatggcggaggccgagggcctgctcgccgccgccgaggtgcaaatcacacccgccgacatcgccgaggtgttcatgggctgcgacggcgcgggcgccgccgccgcgctgaggaagctcgtgggcgagctgcggcggaggcgggatgctgctgcccttgccacggccgtagcaccgccggaataaaaccagccagggatcctacgtagcgcgccaccatgcatagctgcctagtcagcttccattactttgatgctaggtggtttatttattgagtcgtgacggtgcaatgcgaagtgtcgtgtgtcaggtgtttcccttctcatttagtttgggttcgtgtttttgtgtcgtgctagtacgtacggatcccgtaggctaggcagccaataagccaataatggacgctgattacccaggcacaacaatactgttatatgacagagctcgcccattgc

SEQ ID NO: 26066 - protein, 514 aa, Zea mays subsp. mays
  peptide (1)..(514): Ceres Seq. ID no. 12566504
  misc_feature (7)..(194): NCBI GI NO: 15233037 NR Description: hypothetical protein; protein id: At3g28580
  misc_feature (9)..(189): NCBI GI NO: 30693380 NR Description: AAA-type ATPase family [Arabidopsis thaliana]
  misc_feature (9)..(189): NCBI GI NO: 7485704 NR Description: hypothetical protein F18B3
  misc_feature (7)..(194): NCBI GI NO: 34894444 NR Description: OSJNBa0025P13.17
  misc_feature (12)..(197): NCBI GI NO: 30686502 NR Description: BCS1 - like protein [Arabidopsis thaliana]
  misc_feature (7)..(190): NCBI GI NO: 15242536 NR Description: putative protein; protein id: At5g40010.1
  misc_feature (9)..(189): NCBI GI NO: 39104562 NR Description: putative BCS1 protein [Arabidopsis thaliana]
  misc_feature (7)..(211): NCBI GI NO: 15242143 NR Description: putative protein; protein id: At5g57480.1
  misc_feature (7)..(196): NCBI GI NO: 18416629 NR Description: putative mitochondrial protein
  misc_feature (7)..(190): NCBI GI NO: 15233010 NR Description: hypothetical protein; protein id: At3g28510
MEMVLDWRSLGSLLATVVVFRTALRNFLPPEAEMLLRRFLAWVAAAFRPPSDTILIDEADGPTGSANDLYESAQLYLSARCLATAPAVRLHKPRQSPRPVASLPDSHTTDDTFRGVRVKWTSTTRTVDRSGSGGGGNPYNIFGRGGDQRGLELQFPRQHRDLVHHHYIPHLIDEATRMRLKSRERRLYTNRGHGALRRPPPPLDVARLRAPVHVRHAGARPGAARRGPRRPAALRRAPGPLRARRPRLEAGVPAPRPARHGQDQPRRCHRQPARLRRLRPGAHHGAHQLPPPPPARLHHAQVRRRRRGHRLLPRPLRPQQEDKEGCWRRRRHRHRRRRRRRSTARRHVGVAGRGGRDGARVRQPLRGAQLRRRALVVLRRRAPDGVHDQPPGAARPGAAPPGPHGPQDRARLLHAARAACARQELPRRRRRGLRRRRRGPRHGQRPHGGGRGPARRRRGANHTRRHRRGVHGLRRRGRRRRAEEARGRAAAEAGCCCPCHGRSTAGIKPARDPT

SEQ ID NO: 26067 - protein, 512 aa, Zea mays subsp. mays
  peptide (1)..(512): Ceres Seq. ID no. 12566505
  misc_feature (5)..(192): NCBI GI NO: 15233037 NR Description: hypothetical protein; protein id: At3g28580
  misc_feature (7)..(187): NCBI GI NO: 30693380 NR Description: AAA-type ATPase family [Arabidopsis thaliana]
  misc_feature (7)..(187): NCBI GI NO: 7485704 NR Description: hypothetical protein F18B3
  misc_feature (5)..(192): NCBI GI NO: 34894444 NR Description: OSJNBa0025P13.17
  misc_feature (10)..(195): NCBI GI NO: 30686502 NR Description: BCS1 - like protein [Arabidopsis thaliana]
  misc_feature (5)..(188): NCBI GI NO: 15242536 NR Description: putative protein; protein id: At5g40010.1
  misc_feature (7)..(187): NCBI GI NO: 39104562 NR Description: putative BCS1 protein [Arabidopsis thaliana]
  misc_feature (5)..(209): NCBI GI NO: 15242143 NR Description: putative protein; protein id: At5g57480.1
  misc_feature (5)..(194): NCBI GI NO: 18416629 NR Description: putative mitochondrial protein
  misc_feature (5)..(188): NCBI GI NO: 15233010 NR Description: hypothetical protein; protein id: At3g28510
MVLDWRSLGSLLATVVVFRTALRNFLPPEAEMLLRRFLAWVAAAFRPPSDTILIDEADGPTGSANDLYESAQLYLSARCLATAPAVRLHKPRQSPRPVASLPDSHTTDDTFRGVRVKWTSTTRTVDRSGSGGGGNPYNIFGRGGDQRGLELQFPRQHRDLVHHHYIPHLIDEATRMRLKSRERRLYTNRGHGALRRPPPPLDVARLRAPVHVRHAGARPGAARRGPRRPAALRRAPGPLRARRPRLEAGVPAPRPARHGQDQPRRCHRQPARLRRLRPGAHHGAHQLPPPPPARLHHAQVRRRRRGHRLLPRPLRPQQEDKEGCWRRRRHRHRRRRRRRSTARRHVGVAGRGGRDGARVRQPLRGAQLRRRALVVLRRRAPDGVHDQPPGAARPGAAPPGPHGPQDRARLLHAARAACARQELPRRRRRGLRRRRRGPRHGQRPHGGGRGPARRRRGANHTRRHRRGVHGLRRRGRRRRAEEARGRAAAEAGCCCPCHGRSTAGIKPARDPT

SEQ ID NO: 26068 - protein, 481 aa, Zea mays subsp. mays
  peptide (1)..(481): Ceres Seq. ID no. 12566506
  misc_feature (1)..(161): NCBI GI NO: 15233037 NR Description: hypothetical protein; protein id: At3g28580
  misc_feature (1)..(156): NCBI GI NO: 30693380 NR Description: AAA-type ATPase family [Arabidopsis thaliana]
  misc_feature (1)..(156): NCBI GI NO: 7485704 NR Description: hypothetical protein F18B3
  misc_feature (1)..(161): NCBI GI NO: 34894444 NR Description: OSJNBa0025P13.17
  misc_feature (1)..(164): NCBI GI NO: 30686502 NR Description: BCS1 - like protein [Arabidopsis thaliana]
  misc_feature (1)..(157): NCBI GI NO: 15242536 NR Description: putative protein; protein id: At5g40010.1
  misc_feature (1)..(156): NCBI GI NO: 39104562 NR Description: putative BCS1 protein [Arabidopsis thaliana]
  misc_feature (1)..(178): NCBI GI NO: 15242143 NR Description: putative protein; protein id: At5g57480.1
  misc_feature (1)..(163): NCBI GI NO: 18416629 NR Description: putative mitochondrial protein
  misc_feature (1)..(157): NCBI GI NO: 15233010 NR Description: hypothetical protein; protein id: At3g28510
MLLRRFLAWVAAAFRPPSDTILIDEADGPTGSANDLYESAQLYLSARCLATAPAVRLHKPRQSPRPVASLPDSHTTDDTFRGVRVKWTSTTRTVDRSGSGGGGNPYNIFGRGGDQRGLELQFPRQHRDLVHHHYIPHLIDEATRMRLKSRERRLYTNRGHGALRRPPPPLDVARLRAPVHVRHAGARPGAARRGPRRPAALRRAPGPLRARRPRLEAGVPAPRPARHGQDQPRRCHRQPARLRRLRPGAHHGAHQLPPPPPARLHHAQVRRRRRGHRLLPRPLRPQQEDKEGCWRRRRHRHRRRRRRRSTARRHVGVAGRGGRDGARVRQPLRGAQLRRRALVVLRRRAPDGVHDQPPGAARPGAAPPGPHGPQDRARLLHAARAACARQELPRRRRRGLRRRRRGPRHGQRPHGGGRGPARRRRGANHTRRHRRGVHGLRRRGRRRRAEEARGRAAAEAGCCCPCHGRSTAGIKPARDPT

SEQ ID NO: 26069 - DNA, 1772 bp, Zea mays subsp. mays
  misc_feature (1)..(1772): Ceres Seq. ID no. 12367879
aaagcaagtcctccccatgctcctcccgctcctcctcctcgccgccttcctccatggcttggcggaggcgcagggcggcctcccgtcgctgccgatcggggtgaactacggcgcgaacgcagacaacctaccctcgcccgccgccgtggcggcgttcctggccaagagcacgaccatcgaccgcgtgaagctgttcgacgcgaacccggccttcctcgacgcgttcgccgccaacgcgccctccatcgccctcgccgtctccatccccaactccgccctcccgtccttcgccgacagatccacgggcctggacgcggcgcgcgggtgggtccgcgacaacctgtccccgcacgtgtccgcgggcgccaacatcaccctcctcatggcggggaacgaggtgctgggccccaccgtggtgcccgacctcgtcgtggcgctgctcccggccatgcgccgcctgtaccaggcgctgcagctggagggcctgcccaaggtccgcgtcaccacgccgcactacctcggcatcctggcgccctcggacgggatcccctccaacgcgagcttccgcccggggctggacgccaaggtgctggcgcccatgctcaggttccacaacgacaccggctcccccttcatggtgaacgcctacccctacttcagctacaacgccgccacgctggactacgcggtgttccgccccaacgccggcgtgtacgacccggcgacgcggctcaactacaccagcatgttcgacgcgcagatggacgccatccacacggcgatgaagaagctcgggtacggcggcgtgcagatcgcggtgggcgaggccgggtggcccaccaaggcggaggccgggcaggtcggcgtaggccccgaggaggccagggatttcaacgccggcatgatccgggtgtgcagcggcgggaagggcacgccgctgatgcctgggaggacgttcgagacgtacgtcttctcgctgttcgacgagaaccagaagcccgggccggtcgcggagcggaacttcggcatcttcaacacggatctcacacccaaatacgacctggggctgctccgccaaggaccgcagtctggatctccaaccccatctccggagccctcgccgtcggtcggcggaggcaagtggtgcgtggccaagtccggcgcgagcgcaaccgacctgcagaacaacattaactacgcctgtgcctacgtcgactgtaggccgatccagagcggcggcgcgtgcttggaccccaacaacatccactcacatgcctcgtacgtcatgaacgcgtactaccaggccaatggcatgcacgactatgactgcgacttcaagggcaccggcgtggtcacctccagtgaccccagttacgggagctgcaaatacaacgcctcctcctgacggcgcgcagcaagtccagctggcactactgcaccagcctccagtccacatcgtcctccagctccaggctccagccatggccacgctggggacgggaggaggtccgtactgccgccgggcttgcgccacatacttgtatactcatgtctcacacccatgcttcttgttgctctcaaccactactagcactactatttgtctagttccataattacaagtccctctcccctcatgttaacttgatcattgtccgtgtgtagtggactagtggtggtgaataaaatagcttccattccatgtagacaaacaaacaaattgtaacatctgttatccttgggttatttgatatatttatttttcatatagt

SEQ ID NO: 26070 - protein, 467 aa, Zea mays subsp. mays
  peptide (1)..(467): Ceres Seq. ID no. 12367880
  misc_feature (32)..(356): Pfam Name: Pfam Description:  Glycosyl hydrolases family 17
  misc_feature (4)..(463): NCBI GI NO: 1706551 NR Description: GLUCAN ENDO-1,3-BETA-GLUCOSIDASE PRECURSOR ((1-
  misc_feature (9)..(462): NCBI GI NO: 11279328 NR Description: glucan endo-1,3-beta-D-glucosidase (EC 3.2.1.39)
  misc_feature (32)..(463): NCBI GI NO: 21617932 NR Description: beta-1,3-glucanase-like protein
  misc_feature (32)..(463): NCBI GI NO: 15028379 NR Description: putative beta-1,3-glucanase [Arabidopsis thaliana]
  misc_feature (32)..(463): NCBI GI NO: 15233271 NR Description: glycosyl hydrolase family 17
  misc_feature (32)..(463): NCBI GI NO: 31126737 NR Description: putative beta 1,3-glucanase
  misc_feature (1)..(461): NCBI GI NO: 15225516 NR Description: glycosyl hydrolase family 17; protein id:At2g39640
  misc_feature (32)..(467): NCBI GI NO: 14279169 NR Description: beta-1,3-glucanase-like protein [Olea europaea]
  misc_feature (27)..(378): NCBI GI NO: 34395169 NR Description: putative glucan endo-1
  misc_feature (27)..(414): NCBI GI NO: 34900642 NR Description: putative glucan endo-1
KQVLPMLLPLLLLAAFLHGLAEAQGGLPSLPIGVNYGANADNLPSPAAVAAFLAKSTTIDRVKLFDANPAFLDAFAANAPSIALAVSIPNSALPSFADRSTGLDAARGWVRDNLSPHVSAGANITLLMAGNEVLGPTVVPDLVVALLPAMRRLYQALQLEGLPKVRVTTPHYLGILAPSDGIPSNASFRPGLDAKVLAPMLRFHNDTGSPFMVNAYPYFSYNAATLDYAVFRPNAGVYDPATRLNYTSMFDAQMDAIHTAMKKLGYGGVQIAVGEAGWPTKAEAGQVGVGPEEARDFNAGMIRVCSGGKGTPLMPGRTFETYVFSLFDENQKPGPVAERNFGIFNTDLTPKYDLGLLRQGPQSGSPTPSPEPSPSVGGGKWCVAKSGASATDLQNNINYACAYVDCRPIQSGGACLDPNNIHSHASYVMNAYYQANGMHDYDCDFKGTGVVTSSDPSYGSCKYNASS

SEQ ID NO: 26071 - protein, 462 aa, Zea mays subsp. mays
  peptide (1)..(462): Ceres Seq. ID no. 12367881
  misc_feature (27)..(351): Pfam Name: Pfam Description:  Glycosyl hydrolases family 17
  misc_feature (1)..(458): NCBI GI NO: 1706551 NR Description: GLUCAN ENDO-1,3-BETA-GLUCOSIDASE PRECURSOR ((1-
  misc_feature (4)..(457): NCBI GI NO: 11279328 NR Description: glucan endo-1,3-beta-D-glucosidase (EC 3.2.1.39)
  misc_feature (27)..(458): NCBI GI NO: 21617932 NR Description: beta-1,3-glucanase-like protein
  misc_feature (27)..(458): NCBI GI NO: 15028379 NR Description: putative beta-1,3-glucanase [Arabidopsis thaliana]
  misc_feature (27)..(458): NCBI GI NO: 15233271 NR Description: glycosyl hydrolase family 17
  misc_feature (27)..(458): NCBI GI NO: 31126737 NR Description: putative beta 1,3-glucanase
  misc_feature (1)..(456): NCBI GI NO: 15225516 NR Description: glycosyl hydrolase family 17; protein id:At2g39640
  misc_feature (27)..(462): NCBI GI NO: 14279169 NR Description: beta-1,3-glucanase-like protein [Olea europaea]
  misc_feature (22)..(373): NCBI GI NO: 34395169 NR Description: putative glucan endo-1
  misc_feature (22)..(409): NCBI GI NO: 34900642 NR Description: putative glucan endo-1
MLLPLLLLAAFLHGLAEAQGGLPSLPIGVNYGANADNLPSPAAVAAFLAKSTTIDRVKLFDANPAFLDAFAANAPSIALAVSIPNSALPSFADRSTGLDAARGWVRDNLSPHVSAGANITLLMAGNEVLGPTVVPDLVVALLPAMRRLYQALQLEGLPKVRVTTPHYLGILAPSDGIPSNASFRPGLDAKVLAPMLRFHNDTGSPFMVNAYPYFSYNAATLDYAVFRPNAGVYDPATRLNYTSMFDAQMDAIHTAMKKLGYGGVQIAVGEAGWPTKAEAGQVGVGPEEARDFNAGMIRVCSGGKGTPLMPGRTFETYVFSLFDENQKPGPVAERNFGIFNTDLTPKYDLGLLRQGPQSGSPTPSPEPSPSVGGGKWCVAKSGASATDLQNNINYACAYVDCRPIQSGGACLDPNNIHSHASYVMNAYYQANGMHDYDCDFKGTGVVTSSDPSYGSCKYNASS

SEQ ID NO: 26072 - protein, 397 aa, Zea mays subsp. mays
  peptide (1)..(397): Ceres Seq. ID no. 12367882
  misc_feature (1)..(294): NCBI GI NO: 23018055 NR Description: hypothetical protein [Thermobifida fusca]
KASPPHAPPAPPPRRLPPWLGGGAGRPPVAADRGELRRERRQPTLARRRGGVPGQEHDHRPREAVRREPGLPRRVRRQRALHRPRRLHPQLRPPVLRRQIHGPGRGARVGPRQPVPARVRGRQHHPPHGGERGAGPHRGARPRRGAAPGHAPPVPGAAAGGPAQGPRHHAALPRHPGALGRDPLQRELPPGAGRQGAGAHAQVPQRHRLPLHGERLPLLQLQRRHAGLRGVPPQRRRVRPGDAAQLHQHVRRADGRHPHGDEEARVRRRADRGGRGRVAHQGGGRAGRRRPRGGQGFQRRHDPGVQRREGHAADAWEDVRDVRLLAVRREPEARAGRGAELRHLQHGSHTQIRPGAAPPRTAVWISNPISGALAVGRRRQVVRGQVRRERNRPAEQH

SEQ ID NO: 26073 - DNA, 1652 bp, Zea mays subsp. mays
  misc_feature (1)..(1652): Ceres Seq. ID no. 12566507
aacaaccacatctgcatctcccgtcatctactcgaactcaactcatcgcctcatccgtgtctcacccattccgtctccgtctccgtctccgtctgaactctccatctataaagcttctctgaggcacaagacgagaaggccacagcccacaagcatgcccggcgagttggaaaagcgcagaatctgcgagacaagaaagcactaggaagggagaaacagggagagaggttgcgtcccagccccacctgccatcgcctcttcttccgctccctcggcggctttccaggattcagattcagattgggggccttttgctgctgcgcggcaattctcgtcgctccagtccccacttcgctgttcctgagcgggaggcgccggccggactcgcgatggggcaggacggccagcagatccgccgcgacaagctcatcatcgacacggatcccggcatcgatgatagcatgacgatcctaatggcgttcagagcacctagtgtggaaatcattgggctcacgaccatattcggcaacgtcgacacaaagggtgcaacacgtaacgcgctattgctgtgtgagagagcaggatgccctgaagttccagtagcagagggcagccatgagcccctaaagggaggaaagccccgtgttgctgatttcgttcatgggtcagatggcattgggaatctgtttcttcctgcaccctctgctaagaaggttgaggaaagtgctgctgatttcctgattaataaggtctctgagtttccaggagaggtctctgtgcttgcgttgggacccctgacaaatgtagcattggccatcaaaagagacccttcctttgcaagcaaggttaagaaaatagttgtactgggtggagctttctttgcggctggaaatgtcaaccctgctgctgaagcaaatatccatggagacccagaagcagctgacatagtttttacttcaggagcagatatcgttgtggttggcattaacataacaacacaagtctgcctgacagatgaggatctcttggagctaagaaactcgaaggggaagcatgcagcgttcttatatgagatgtgcaagttctacagagattggcatgccaagtctgatggttttcatggaattttccttcatgatcctgtgagcttcactgccgtacttcatccagagtacttcacattcaagaagggtgtggtgagagtagagacccagggcatttgcactggccacactttgatggatcagggattgaaaaagtggaattcagagaacccatggtcagggtataaaccgatttcagttgcatggacggttgatgtgccaaaggtcatcagctttataaagaagctgctcatggcaccatgagcaaagtacaaccatttaacgacatgtcaacatcagcgctctctgatgtccaagaaaatttgacgagtacagatgctctttcttagctgcactgtaattagttcctggacctaggatggttcctattcctccaatagtaagaggaacctttcattgtgaaaggtcatgcagcagtctcgaataccatgaagcaaattctggcatacgacatcatgtctcacacatttgtatcaatacatttagaatcaataaagtttccctcactctttactgtgcacttttccc

SEQ ID NO: 26074 - protein, 325 aa, Zea mays subsp. mays
  peptide (1)..(325): Ceres Seq. ID no. 12566508
  misc_feature (11)..(322): Pfam Name: Pfam Description:  Inosine-uridine preferring nucleoside hydrolase
  misc_feature (9)..(325): NCBI GI NO: 18404099 NR Description: expressed protein; protein id: At2g36310
  misc_feature (25)..(245): NCBI GI NO: 25321061 NR Description: hypothetical protein At2g36310
  misc_feature (245)..(291): NCBI GI NO: 25321061 NR Description: hypothetical protein At2g36310
  misc_feature (10)..(322): NCBI GI NO: 30089728 NR Description: putative inosine-uridine preferring nucleosidehydrolase
  misc_feature (10)..(323): NCBI GI NO: 18390550 NR Description: expressed protein; protein id: At1g05620
  misc_feature (10)..(242): NCBI GI NO: 25321071 NR Description: hypothetical protein
  misc_feature (210)..(323): NCBI GI NO: 25321071 NR Description: hypothetical protein
  misc_feature (12)..(322): NCBI GI NO: 22984963 NR Description: hypothetical protein [Burkholderia fungorum]
  misc_feature (12)..(318): NCBI GI NO: 15966659 NR Description: PUTATIVE NUCLEOSIDE HYDROLASE PROTEIN
  misc_feature (12)..(323): NCBI GI NO: 15888904 NR Description: AGR_C_2923p [Agrobacterium tumefaciens]
MGQDGQQIRRDKLIIDTDPGIDDSMTILMAFRAPSVEIIGLTTIFGNVDTKGATRNALLLCERAGCPEVPVAEGSHEPLKGGKPRVADFVHGSDGIGNLFLPAPSAKKVEESAADFLINKVSEFPGEVSVLALGPLTNVALAIKRDPSFASKVKKIVVLGGAFFAAGNVNPAAEANIHGDPEAADIVFTSGADIVVVGINITTQVCLTDEDLLELRNSKGKHAAFLYEMCKFYRDWHAKSDGFHGIFLHDPVSFTAVLHPEYFTFKKGVVRVETQGICTGHTLMDQGLKKWNSENPWSGYKPISVAWTVDVPKVISFIKKLLMAP

SEQ ID NO: 26075 - protein, 301 aa, Zea mays subsp. mays
  peptide (1)..(301): Ceres Seq. ID no. 12566509
  misc_feature (1)..(298): Pfam Name: Pfam Description:  Inosine-uridine preferring nucleoside hydrolase
  misc_feature (1)..(301): NCBI GI NO: 18404099 NR Description: expressed protein; protein id: At2g36310
  misc_feature (1)..(221): NCBI GI NO: 25321061 NR Description: hypothetical protein At2g36310
  misc_feature (221)..(267): NCBI GI NO: 25321061 NR Description: hypothetical protein At2g36310
  misc_feature (1)..(298): NCBI GI NO: 30089728 NR Description: putative inosine-uridine preferring nucleosidehydrolase
  misc_feature (1)..(299): NCBI GI NO: 18390550 NR Description: expressed protein; protein id: At1g05620
  misc_feature (1)..(218): NCBI GI NO: 25321071 NR Description: hypothetical protein
  misc_feature (186)..(299): NCBI GI NO: 25321071 NR Description: hypothetical protein
  misc_feature (1)..(298): NCBI GI NO: 22984963 NR Description: hypothetical protein [Burkholderia fungorum]
  misc_feature (1)..(294): NCBI GI NO: 15966659 NR Description: PUTATIVE NUCLEOSIDE HYDROLASE PROTEIN
  misc_feature (1)..(299): NCBI GI NO: 15888904 NR Description: AGR_C_2923p [Agrobacterium tumefaciens]
MTILMAFRAPSVEIIGLTTIFGNVDTKGATRNALLLCERAGCPEVPVAEGSHEPLKGGKPRVADFVHGSDGIGNLFLPAPSAKKVEESAADFLINKVSEFPGEVSVLALGPLTNVALAIKRDPSFASKVKKIVVLGGAFFAAGNVNPAAEANIHGDPEAADIVFTSGADIVVVGINITTQVCLTDEDLLELRNSKGKHAAFLYEMCKFYRDWHAKSDGFHGIFLHDPVSFTAVLHPEYFTFKKGVVRVETQGICTGHTLMDQGLKKWNSENPWSGYKPISVAWTVDVPKVISFIKKLLMAP

SEQ ID NO: 26076 - protein, 297 aa, Zea mays subsp. mays
  peptide (1)..(297): Ceres Seq. ID no. 12566510
  misc_feature (1)..(294): Pfam Name: Pfam Description:  Inosine-uridine preferring nucleoside hydrolase
  misc_feature (1)..(297): NCBI GI NO: 18404099 NR Description: expressed protein; protein id: At2g36310
  misc_feature (1)..(217): NCBI GI NO: 25321061 NR Description: hypothetical protein At2g36310
  misc_feature (217)..(263): NCBI GI NO: 25321061 NR Description: hypothetical protein At2g36310
  misc_feature (1)..(294): NCBI GI NO: 30089728 NR Description: putative inosine-uridine preferring nucleosidehydrolase
  misc_feature (1)..(295): NCBI GI NO: 18390550 NR Description: expressed protein; protein id: At1g05620
  misc_feature (1)..(214): NCBI GI NO: 25321071 NR Description: hypothetical protein
  misc_feature (182)..(295): NCBI GI NO: 25321071 NR Description: hypothetical protein
  misc_feature (1)..(294): NCBI GI NO: 22984963 NR Description: hypothetical protein [Burkholderia fungorum]
  misc_feature (1)..(290): NCBI GI NO: 15966659 NR Description: PUTATIVE NUCLEOSIDE HYDROLASE PROTEIN
  misc_feature (1)..(295): NCBI GI NO: 15888904 NR Description: AGR_C_2923p [Agrobacterium tumefaciens]
MAFRAPSVEIIGLTTIFGNVDTKGATRNALLLCERAGCPEVPVAEGSHEPLKGGKPRVADFVHGSDGIGNLFLPAPSAKKVEESAADFLINKVSEFPGEVSVLALGPLTNVALAIKRDPSFASKVKKIVVLGGAFFAAGNVNPAAEANIHGDPEAADIVFTSGADIVVVGINITTQVCLTDEDLLELRNSKGKHAAFLYEMCKFYRDWHAKSDGFHGIFLHDPVSFTAVLHPEYFTFKKGVVRVETQGICTGHTLMDQGLKKWNSENPWSGYKPISVAWTVDVPKVISFIKKLLMAP

SEQ ID NO: 26077 - DNA, 1549 bp, Zea mays subsp. mays
  misc_feature (1)..(1549): Ceres Seq. ID no. 12345645
agtccgcccctcccgcctcgttctctccgccatcgtcgccgccgcctccattcctccaccagtccaccatcgccacctacgcccaaccaaacccaactccatctcttccgactataaacgcaacccaccaccgctgccgcgaacctctgcgctccgaataccccagacccccgatcctcccaatggccaccgcattttcgctgcgcgctgcggccccggccaccactccccgcgccgtctcccgatccacctccgcggcgagggtcgtgcccgtggcctcggcactggcgggacgcggaaggctggtggcgcgtgcagcagttacagcaaaggcggatgtgccatcgagcacgtccgacggccatgaggtcttgctgtttgaagctcttcgtgaggccttgatggaagagatggaattagatccaacagtgtgtgtatttggtgaagatgttggccattacggtggttcttacaaggtgacaaaaggtttggctgatacgtttggagaccttcgagttctggacacccctattgcggagaactcgtttactggcatgggagttggagcgggaatgaaagggttgagacccgtcgttgaaggcatgaacatgggattcctgctccttgcttacaaccagatctcaaataactgtggcatgcttcattacacttccggcggccagttcaaaatcccacttgtgatccgtggccccggtggtgtgggtcgtcagcttggagcagagcactcgcagcgcctggaatcgtatttccagtccatcccaggcctgcagatggtcgcctgctcgactccttacaacgctaagggcctgatgaaagctgccatcaggagcgagaaccctgtggtgctgtttgagcacgtccttctgtacaacctgaaggagaaaatcccggacgaggagtacgtgctctgcttggaggaggccgagatggtgcggcctggggagcacgtgactatactcacatactcgcgcatgaggtaccacgtgatgcaggcagcgaagacgctggtgaacaaagggtacgatcccgaggtcatcgacatcaggtcgttgaagccgtttgatctgcacactattggcaactccatcaagaagacccaccgcgtgctgatcgtggaggagtgcatgcgcacgggtgggatcggcgccagccttaggtcggccatcgtcgacaatttctgggactaccttgacgcccccatcatgtgcctgtcatctcaggatgtgcctacgccatatgctgcgactctggaggatgcaaccgttgtgcagcctgcccagatcgtggctgcggtggaacaactatgtgcatagattgtggcctgggacgtttgggagactgttgttgccatgaaaaagccttccgtttgttagttttgtgctgtaacaagcattctttggagacttaaggtgtaggcttatagtcgttttgttcttgttttaagaagtataatccagcttcgtagctgcacggactcgatcttcttgttcctaaatctgcgctatgcaatgccgaatttgatggttcg

SEQ ID NO: 26078 - protein, 443 aa, Zea mays subsp. mays
  peptide (1)..(443): Ceres Seq. ID no. 12345646
  misc_feature (312)..(434): Pfam Name: Pfam Description:  Transketolase, C-terminal domain
  misc_feature (100)..(442): NCBI GI NO: 15220670 NR Description: pyruvate dehydrogenase E1 beta subunit, putative
  misc_feature (100)..(442): NCBI GI NO: 2454184 NR Description: pyruvate dehydrogenase E1 beta subunit
  misc_feature (92)..(442): NCBI GI NO: 15226781 NR Description: putative pyruvate dehydrogenase E1 beta subunit
  misc_feature (92)..(442): NCBI GI NO: 21593379 NR Description: putative pyruvate dehydrogenase E1 beta subunit
  misc_feature (157)..(442): NCBI GI NO: 2982328 NR Description: pyruvate dehydrogenase E1 beta subunit
  misc_feature (122)..(442): NCBI GI NO: 22711921 NR Description: pyruvate dehydrogenase E1 component beta subunit
  misc_feature (122)..(441): NCBI GI NO: 22297748 NR Description: pyruvate dehydrogenase E1 component beta subunit
  misc_feature (122)..(443): NCBI GI NO: 23041427 NR Description: hypothetical protein
  misc_feature (122)..(443): NCBI GI NO: 17227618 NR Description: pyruvate dehydrogenase E1 beta subunit
  misc_feature (122)..(443): NCBI GI NO: 23124048 NR Description: hypothetical protein [Nostoc punctiforme]
SAPPASFSPPSSPPPPFLHQSTIATYAQPNPTPSLPTINATHHRCREPLRSEYPRPPILPMATAFSLRAAAPATTPRAVSRSTSAARVVPVASALAGRGRLVARAAVTAKADVPSSTSDGHEVLLFEALREALMEEMELDPTVCVFGEDVGHYGGSYKVTKGLADTFGDLRVLDTPIAENSFTGMGVGAGMKGLRPVVEGMNMGFLLLAYNQISNNCGMLHYTSGGQFKIPLVIRGPGGVGRQLGAEHSQRLESYFQSIPGLQMVACSTPYNAKGLMKAAIRSENPVVLFEHVLLYNLKEKIPDEEYVLCLEEAEMVRPGEHVTILTYSRMRYHVMQAAKTLVNKGYDPEVIDIRSLKPFDLHTIGNSIKKTHRVLIVEECMRTGGIGASLRSAIVDNFWDYLDAPIMCLSSQDVPTPYAATLEDATVVQPAQIVAAVEQLCA

SEQ ID NO: 26079 - protein, 383 aa, Zea mays subsp. mays
  peptide (1)..(383): Ceres Seq. ID no. 12345647
  misc_feature (252)..(374): Pfam Name: Pfam Description:  Transketolase, C-terminal domain
  misc_feature (40)..(382): NCBI GI NO: 15220670 NR Description: pyruvate dehydrogenase E1 beta subunit, putative
  misc_feature (40)..(382): NCBI GI NO: 2454184 NR Description: pyruvate dehydrogenase E1 beta subunit
  misc_feature (32)..(382): NCBI GI NO: 15226781 NR Description: putative pyruvate dehydrogenase E1 beta subunit
  misc_feature (32)..(382): NCBI GI NO: 21593379 NR Description: putative pyruvate dehydrogenase E1 beta subunit
  misc_feature (97)..(382): NCBI GI NO: 2982328 NR Description: pyruvate dehydrogenase E1 beta subunit
  misc_feature (62)..(382): NCBI GI NO: 22711921 NR Description: pyruvate dehydrogenase E1 component beta subunit
  misc_feature (62)..(381): NCBI GI NO: 22297748 NR Description: pyruvate dehydrogenase E1 component beta subunit
  misc_feature (62)..(383): NCBI GI NO: 23041427 NR Description: hypothetical protein
  misc_feature (62)..(383): NCBI GI NO: 17227618 NR Description: pyruvate dehydrogenase E1 beta subunit
  misc_feature (62)..(383): NCBI GI NO: 23124048 NR Description: hypothetical protein [Nostoc punctiforme]
MATAFSLRAAAPATTPRAVSRSTSAARVVPVASALAGRGRLVARAAVTAKADVPSSTSDGHEVLLFEALREALMEEMELDPTVCVFGEDVGHYGGSYKVTKGLADTFGDLRVLDTPIAENSFTGMGVGAGMKGLRPVVEGMNMGFLLLAYNQISNNCGMLHYTSGGQFKIPLVIRGPGGVGRQLGAEHSQRLESYFQSIPGLQMVACSTPYNAKGLMKAAIRSENPVVLFEHVLLYNLKEKIPDEEYVLCLEEAEMVRPGEHVTILTYSRMRYHVMQAAKTLVNKGYDPEVIDIRSLKPFDLHTIGNSIKKTHRVLIVEECMRTGGIGASLRSAIVDNFWDYLDAPIMCLSSQDVPTPYAATLEDATVVQPAQIVAAVEQLCA

SEQ ID NO: 26080 - protein, 310 aa, Zea mays subsp. mays
  peptide (1)..(310): Ceres Seq. ID no. 12345648
  misc_feature (179)..(301): Pfam Name: Pfam Description:  Transketolase, C-terminal domain
  misc_feature (1)..(309): NCBI GI NO: 15220670 NR Description: pyruvate dehydrogenase E1 beta subunit, putative
  misc_feature (1)..(309): NCBI GI NO: 2454184 NR Description: pyruvate dehydrogenase E1 beta subunit
  misc_feature (1)..(309): NCBI GI NO: 15226781 NR Description: putative pyruvate dehydrogenase E1 beta subunit
  misc_feature (1)..(309): NCBI GI NO: 21593379 NR Description: putative pyruvate dehydrogenase E1 beta subunit
  misc_feature (24)..(309): NCBI GI NO: 2982328 NR Description: pyruvate dehydrogenase E1 beta subunit
  misc_feature (1)..(309): NCBI GI NO: 22711921 NR Description: pyruvate dehydrogenase E1 component beta subunit
  misc_feature (1)..(308): NCBI GI NO: 22297748 NR Description: pyruvate dehydrogenase E1 component beta subunit
  misc_feature (1)..(310): NCBI GI NO: 23041427 NR Description: hypothetical protein
  misc_feature (1)..(310): NCBI GI NO: 17227618 NR Description: pyruvate dehydrogenase E1 beta subunit
  misc_feature (1)..(310): NCBI GI NO: 23124048 NR Description: hypothetical protein [Nostoc punctiforme]
MEEMELDPTVCVFGEDVGHYGGSYKVTKGLADTFGDLRVLDTPIAENSFTGMGVGAGMKGLRPVVEGMNMGFLLLAYNQISNNCGMLHYTSGGQFKIPLVIRGPGGVGRQLGAEHSQRLESYFQSIPGLQMVACSTPYNAKGLMKAAIRSENPVVLFEHVLLYNLKEKIPDEEYVLCLEEAEMVRPGEHVTILTYSRMRYHVMQAAKTLVNKGYDPEVIDIRSLKPFDLHTIGNSIKKTHRVLIVEECMRTGGIGASLRSAIVDNFWDYLDAPIMCLSSQDVPTPYAATLEDATVVQPAQIVAAVEQLCA

SEQ ID NO: 26081 - DNA, 1250 bp, Zea mays subsp. mays
  misc_feature (1)..(1250): Ceres Seq. ID no. 12566511
gcacgagaccattacctagaacatcctaatcgaaaaacagaacagcccgtcgcgcgccgctgcgttgagccaaggcgcaatggcaacctccacctcagttcccgtcctcctgctcctcgccgccgccgccggcctcctcctgctccccggctcgctggcgtggcagagcagcaactgtgcaccgggcgcgcccggcagtggctcgccgacgtggccttcacccggctccggctccggcggcggccacagcaagccgcccaagcaccaccatggcaagccgcccaagtgcccgccgtgcaaccctccgtacgtgcctccgacgcctcggccgtcaccgccgtacgtgccaccgtatgtcccgccgacgcctcggccgtcaccgccctacgtgccaccatacgtccccgtcccgccgacgcctcggccctcaccgccgtacgtgccaccatacgtccccgtccccccgacgcctcggccctcaccgccctacgtgccaccatacgtccccgtcccgccgacgcctcggccgtcaccgccgtacgtacccccgacgccacggccgccgactccgccctacgtcccaccgacgccgccctacgtcccaccgacgcctcggccatcaccaccaccgtacgtgccaccctacgtccccccgacgcctcggccatcaccaccctacgtgccaccgtacgttccgccgacgccgccggcggtgcggacgtgcccgatcgacacgctgaagctgaacgcgtgcgtggacgtgctgagcgggctgatccacctggtgatcgggcaggaggccaggtccaagtgctgcccgctggtgcagggggtggcggacctggacgcggcgctgtgcctctgcaccaccatccgcgcgcgcctgctcaacatcaacatctacctccccatcgcgctcaacctgctcatcacctgcggcaagcacgcgccgtcgggcttccagtgcccgccgctctacgactgatgagcaccaccaccagccaacacttctatacgcgccgccatgcatgcatgatgtgatggcatcctgtgcaagctagcgctagcgctagtagtagcatgtccgtaatttctctagttcttgctctcgcgagtatgcgtacgtaatgcgttgcttctcgtcagtactcgggatcgatcgggaacttttccaactccgatgctaagcgtgtagcttgcttaatcagtcgatgtaccatgttaatcaagtgctagccctttctctgctc

SEQ ID NO: 26082 - protein, 346 aa, Zea mays subsp. mays
  peptide (1)..(346): Ceres Seq. ID no. 12566512
ARDHYLEHPNRKTEQPVARRCVEPRRNGNLHLSSRPPAPRRRRRPPPAPRLAGVAEQQLCTGRARQWLADVAFTRLRLRRRPQQAAQAPPWQAAQVPAVQPSVRASDASAVTAVRATVCPADASAVTALRATIRPRPADASALTAVRATIRPRPPDASALTALRATIRPRPADASAVTAVRTPDATAADSALRPTDAALRPTDASAITTTVRATLRPPDASAITTLRATVRSADAAGGADVPDRHAEAERVRGRAERADPPGDRAGGQVQVLPAGAGGGGPGRGAVPLHHHPRAPAQHQHLPPHRAQPAHHLRQARAVGLPVPAALRLMSTTTSQHFYTRRHACMM

SEQ ID NO: 26083 - protein, 301 aa, Zea mays subsp. mays
  peptide (1)..(301): Ceres Seq. ID no. 12566513
  misc_feature (215)..(296): Pfam Name: Pfam Description:  Protease inhibitor/seed storage/LTP family
  misc_feature (1)..(301): NCBI GI NO: 283044 NR Description: hybrid proline-rich protein - maize
  misc_feature (101)..(300): NCBI GI NO: 34898430 NR Description: Similar to Zea mays PRP gene.(X60432)
  misc_feature (58)..(297): NCBI GI NO: 1076501 NR Description: cell wall protein - alfalfa
  misc_feature (59)..(297): NCBI GI NO: 19521 NR Description: proline rich protein [Lycopersicon esculentum]
  misc_feature (59)..(297): NCBI GI NO: 1709767 NR Description: 36.4 KD PROLINE-RICH PROTEIN
  misc_feature (59)..(297): NCBI GI NO: 7446483 NR Description: probable cell wall protein - garden pea
  misc_feature (38)..(297): NCBI GI NO: 7446482 NR Description: probable cell wall-plasma membrane linker proteinPRP precursor - rape
  misc_feature (57)..(299): NCBI GI NO: 15233717 NR Description: cell wall protein like; protein id: At4g15160.1
  misc_feature (38)..(297): NCBI GI NO: 11994732 NR Description: contains similarity to cell wall-plasma membranelinker protein~gene_id:MKA23
  misc_feature (38)..(297): NCBI GI NO: 15233282 NR Description: unknown protein; protein id: At3g22120.1
MATSTSVPVLLLLAAAAGLLLLPGSLAWQSSNCAPGAPGSGSPTWPSPGSGSGGGHSKPPKHHHGKPPKCPPCNPPYVPPTPRPSPPYVPPYVPPTPRPSPPYVPPYVPVPPTPRPSPPYVPPYVPVPPTPRPSPPYVPPYVPVPPTPRPSPPYVPPTPRPPTPPYVPPTPPYVPPTPRPSPPPYVPPYVPPTPRPSPPYVPPYVPPTPPAVRTCPIDTLKLNACVDVLSGLIHLVIGQEARSKCCPLVQGVADLDAALCLCTTIRARLLNINIYLPIALNLLITCGKHAPSGFQCPPLYD

SEQ ID NO: 26084 - DNA, 1421 bp, Zea mays subsp. mays
  misc_feature (1)..(1421): Ceres Seq. ID no. 12566476
aaacgaggatgtactaatgttgtggtaaataatatggacgatagtcgataacgtgaccagtggtggtgtggtgtatggtctgtattgattacatgcagcctaactaatttgccagcgagtgatgcggtgacgtgctgctgctgttgtagtaggtggtggagcaagcccagtccccaatcccaccctgccacccaaccttgcttcttctccgatagctatttctctggtttctccccaatcttcccgggtttccctgattaaagatggctgagtcctttgttctcaataccggctcgaggatcccatcggttgggcttggcgtatggcaaatacaacctgacgctgccaacgacgccatctacgctgctgtcaaggctgggtatcggcatattgactgtgcagcagcatacaacaatgagaaggaggtgggcctggctttgaagaaattatttgaagatggtgtggttaagcgtgatgatttgtttatcacctctaagctatgggctgctaatcatgcacctgaagatgtggaagagggaatcgacaccacacttcaagatttgcagcttgactacttggacttgtacctcatccatggtccaatccgcatcaaaaaaggaactagcacgatgacccctgaaaactttctccctacagatatccctgctacatgggcagcgatggagaagttatacgactctggcaaagctcgtgcaatcggcgtgagtaacttctcttgtaagaagctgcatgatttgcttgccgttgcacgagtgcctccagcagtcaaccaggttgagtgtcatccggtttggcagcaagacaagctccggaagctatgccaatccaatggtgttcatctttctgcattctcgcctttaggctcacctggatctccttggatcaatgggccaagtgtcctcaagaaccccattgtggtctctgttgcagacaagttgcagaaaacgcctgcccaggtcgctctacgctggggaatccaaatgggccatagtgtactcccgaaaagcgccaatgagtccaggattaaggagaacattgacatatttggctggtctattcctgaagatttgatggccaagttctctgaaatcaaacaggtcaggctgctgacagctgagtttgtagttcaccctcaggccggctacaatacattggaggacttttgggatggtgaaatataaaagcatacaaatttgttcagaataaaagagccaggcgaggaaacaaccacaaaaaaggggagatcgaatgcataggccccaatacgatgaatttgggggtttacgtgattgctgaacacaagtattgtgtgactaatctgtgttttgatgtggttcattggttgaagcatgatgtaaaccgtaaaggatattcatgaaaactaaggacgctatagagcg

SEQ ID NO: 26085 - protein, 312 aa, Zea mays subsp. mays
  peptide (1)..(312): Ceres Seq. ID no. 12566477
  misc_feature (1)..(312): NCBI GI NO: 34908280 NR Description: putative aldose reductase
  misc_feature (1)..(312): NCBI GI NO: 34908276 NR Description: putative aldose reductase
  misc_feature (1)..(312): NCBI GI NO: 13160397 NR Description: aldose reductase [Digitalis purpurea]
  misc_feature (1)..(312): NCBI GI NO: 13160399 NR Description: aldose reductase [Digitalis purpurea]
  misc_feature (5)..(312): NCBI GI NO: 30687247 NR Description: aldo/keto reductase family [Arabidopsis thaliana]
  misc_feature (1)..(312): NCBI GI NO: 30687261 NR Description: aldo/keto reductase family [Arabidopsis thaliana]
  misc_feature (9)..(312): NCBI GI NO: 28393400 NR Description: putative aldo/keto reductase
  misc_feature (5)..(312): NCBI GI NO: 15232354 NR Description: aldo/keto reductase family; protein id:At3g53880
  misc_feature (5)..(287): NCBI GI NO: 7431114 NR Description: aldehyde dehydrogenase homolog At2g37770 -Arabidopsis thaliana
  misc_feature (1)..(296): NCBI GI NO: 25283479 NR Description: probable alcohol dehydrogenase
MAESFVLNTGSRIPSVGLGVWQIQPDAANDAIYAAVKAGYRHIDCAAAYNNEKEVGLALKKLFEDGVVKRDDLFITSKLWAANHAPEDVEEGIDTTLQDLQLDYLDLYLIHGPIRIKKGTSTMTPENFLPTDIPATWAAMEKLYDSGKARAIGVSNFSCKKLHDLLAVARVPPAVNQVECHPVWQQDKLRKLCQSNGVHLSAFSPLGSPGSPWINGPSVLKNPIVVSVADKLQKTPAQVALRWGIQMGHSVLPKSANESRIKENIDIFGWSIPEDLMAKFSEIKQVRLLTAEFVVHPQAGYNTLEDFWDGEI

SEQ ID NO: 26086 - protein, 190 aa, Zea mays subsp. mays
  peptide (1)..(190): Ceres Seq. ID no. 12566478
  misc_feature (1)..(190): NCBI GI NO: 34908280 NR Description: putative aldose reductase
  misc_feature (1)..(190): NCBI GI NO: 34908276 NR Description: putative aldose reductase
  misc_feature (1)..(190): NCBI GI NO: 13160397 NR Description: aldose reductase [Digitalis purpurea]
  misc_feature (1)..(190): NCBI GI NO: 13160399 NR Description: aldose reductase [Digitalis purpurea]
  misc_feature (1)..(190): NCBI GI NO: 30687247 NR Description: aldo/keto reductase family [Arabidopsis thaliana]
  misc_feature (1)..(190): NCBI GI NO: 30687261 NR Description: aldo/keto reductase family [Arabidopsis thaliana]
  misc_feature (1)..(190): NCBI GI NO: 28393400 NR Description: putative aldo/keto reductase
  misc_feature (1)..(190): NCBI GI NO: 15232354 NR Description: aldo/keto reductase family; protein id:At3g53880
  misc_feature (1)..(165): NCBI GI NO: 7431114 NR Description: aldehyde dehydrogenase homolog At2g37770 -Arabidopsis thaliana
  misc_feature (1)..(174): NCBI GI NO: 25283479 NR Description: probable alcohol dehydrogenase
MTPENFLPTDIPATWAAMEKLYDSGKARAIGVSNFSCKKLHDLLAVARVPPAVNQVECHPVWQQDKLRKLCQSNGVHLSAFSPLGSPGSPWINGPSVLKNPIVVSVADKLQKTPAQVALRWGIQMGHSVLPKSANESRIKENIDIFGWSIPEDLMAKFSEIKQVRLLTAEFVVHPQAGYNTLEDFWDGEI

SEQ ID NO: 26087 - protein, 173 aa, Zea mays subsp. mays
  peptide (1)..(173): Ceres Seq. ID no. 12566479
  misc_feature (1)..(173): NCBI GI NO: 34908280 NR Description: putative aldose reductase
  misc_feature (1)..(173): NCBI GI NO: 34908276 NR Description: putative aldose reductase
  misc_feature (1)..(173): NCBI GI NO: 13160397 NR Description: aldose reductase [Digitalis purpurea]
  misc_feature (1)..(173): NCBI GI NO: 13160399 NR Description: aldose reductase [Digitalis purpurea]
  misc_feature (1)..(173): NCBI GI NO: 30687247 NR Description: aldo/keto reductase family [Arabidopsis thaliana]
  misc_feature (1)..(173): NCBI GI NO: 30687261 NR Description: aldo/keto reductase family [Arabidopsis thaliana]
  misc_feature (1)..(173): NCBI GI NO: 28393400 NR Description: putative aldo/keto reductase
  misc_feature (1)..(173): NCBI GI NO: 15232354 NR Description: aldo/keto reductase family; protein id:At3g53880
  misc_feature (1)..(148): NCBI GI NO: 7431114 NR Description: aldehyde dehydrogenase homolog At2g37770 -Arabidopsis thaliana
  misc_feature (1)..(157): NCBI GI NO: 25283479 NR Description: probable alcohol dehydrogenase
MEKLYDSGKARAIGVSNFSCKKLHDLLAVARVPPAVNQVECHPVWQQDKLRKLCQSNGVHLSAFSPLGSPGSPWINGPSVLKNPIVVSVADKLQKTPAQVALRWGIQMGHSVLPKSANESRIKENIDIFGWSIPEDLMAKFSEIKQVRLLTAEFVVHPQAGYNTLEDFWDGEI

SEQ ID NO: 26088 - DNA, 1990 bp, Zea mays subsp. mays
  misc_feature (1)..(1990): Ceres Seq. ID no. 12566790
gcacgagaccattacctagaacatcctaatcgaaaaattaaaccaccgagctgggcgcctccccgtggcgctcgcggccgcattagcgcggagatcgagagacaagagagggaaggcggcggcttgccggcttaagccttctctccctccgtcgtcgcctcctccttacgtccgcttcttcctcctgaatggagacgtcagcgccgcccaatgcccccgctccgccggcgcagccacggaggcggttgccggacttccagcagtcagtgcggctcaagtacgtgaagctggggtaccactacctcatatcccacgggatgtacctgctgctgtcgccgctgatggcgctcgtcgccgtgcagctctccaccgtctccccgcatgacctcgccgacctgtgggagcagctccgcttcaacctcctctccgtcgtcgcctgctccacgctgctcgtcttcctctccaccgtttacttcctcacccgcccgcgccccgtgtacctgctcgacttcgcctgctacaagccggagtcggagcgcaagtgcacgcgcgagaccttcatgcactgctccaagctcaccggatccttcacggacgagaacctcgagttccagcgcaagatcctcgagcgctccggcctcggcgaggacacgtaccttccccccgccgtgctccgggtgccccctaacccgtgcatggacgaggcgcgtaaggaggcgcgcgccttcatgttcggcgccatcgaccagctgctcgagaagaccggtgtcaggcccaaggacattggcgtcctagtggtcaactgcagcttgttcaacccgacgccgtcgctgtcagccatggtggtgaaccattacaagctgagggggaatattgtgagctacaacctcggcgggatgggctgcagcgccgggcttctgtccatcgacctcgccaaggatctgctgcaggtgcaccccaactcttacgccctggtgatcagcatggagaacatcacactgaattggtactttgggaacaaccggtccatgcttgtgtcgaattgcctgttccggatgggtggcgcggccatcctgctctcgaacaggcggtctgacaggcggaggtccaagtatgagctggtgcacacggtgcgcacgcacaagggcgccgacgacaagtgctttggctgcgtgacacaggaggaagatgatattggcaagattggcgtgtcactgtccaaggacctcatggcagtggccggagacgcacttaagaccaacatcaccacgctggggccgttggtgctcccattatcagagcaacttctcttcatgggcacattgattgccaagaaggtgctcaagatgaagatcaagccatacatccctgacttcaagctggctttcgagcacttctgcatccacgctggcggacgcgccgtgctggatgagctggagaagaacctggagctcaccgactggcacatggagccatcgaggatgaccctgtacaggtttagcaacacatcaagcagctcactctggtacgagctggcgtacactgaggcaaagggtaggatcaggaagcgcgacaggatctggcagatcgcattcggttctggattcaagtgcaacagcgccgtctggaaggcactccggacggtgaacccggccaaggagaagagcccctggatggatgagattgacaacttcccggtggatgttccaaagatttcaaaggttggtggcgcttgaagaaccattcttcttattattaggtggcaagtggagttgggtgattgtcaggggctgggcagagatttattccatcgtttccaccgttggttcttgtattcagttgtagcatggcatctgtgaaggaacttgagtagatgattcggttaggtagaaagggtgtgttcttcggctcgctagggttgtctgaatgcctgatatgtcctatttattcagattggagagagcaatcgatttgcattctttgctgcctg

SEQ ID NO: 26089 - protein, 515 aa, Zea mays subsp. mays
  peptide (1)..(515): Ceres Seq. ID no. 12566791
  misc_feature (341)..(484): Pfam Name: Pfam Description:  Chalcone and stilbene synthases
  misc_feature (1)..(515): NCBI GI NO: 9714501 NR Description: putative fatty acid elongase [Zea mays]
  misc_feature (18)..(512): NCBI GI NO: 15225767 NR Description: putative beta-ketoacyl-CoA synthase
  misc_feature (1)..(512): NCBI GI NO: 29417540 NR Description: beta-ketoacyl-CoA-synthase [Marchantia polymorpha]
  misc_feature (10)..(506): NCBI GI NO: 11066477 NR Description: fatty acid elongase 1-like protein
  misc_feature (3)..(512): NCBI GI NO: 14334714 NR Description: putative beta-ketoacyl-CoA synthase
  misc_feature (3)..(512): NCBI GI NO: 15239981 NR Description: beta-ketoacyl-CoA synthase; protein id:At5g43760
  misc_feature (18)..(512): NCBI GI NO: 15219676 NR Description: putative beta-ketoacyl-CoA synthase
  misc_feature (18)..(512): NCBI GI NO: 18377979 NR Description: putative beta-ketoacyl-CoA synthase
  misc_feature (20)..(512): NCBI GI NO: 1045614 NR Description: beta-ketoacyl-CoA synthase
  misc_feature (20)..(507): NCBI GI NO: 19908404 NR Description: putative fatty acid elongase [Tropaeolum majus]
METSAPPNAPAPPAQPRRRLPDFQQSVRLKYVKLGYHYLISHGMYLLLSPLMALVAVQLSTVSPHDLADLWEQLRFNLLSVVACSTLLVFLSTVYFLTRPRPVYLLDFACYKPESERKCTRETFMHCSKLTGSFTDENLEFQRKILERSGLGEDTYLPPAVLRVPPNPCMDEARKEARAFMFGAIDQLLEKTGVRPKDIGVLVVNCSLFNPTPSLSAMVVNHYKLRGNIVSYNLGGMGCSAGLLSIDLAKDLLQVHPNSYALVISMENITLNWYFGNNRSMLVSNCLFRMGGAAILLSNRRSDRRRSKYELVHTVRTHKGADDKCFGCVTQEEDDIGKIGVSLSKDLMAVAGDALKTNITTLGPLVLPLSEQLLFMGTLIAKKVLKMKIKPYIPDFKLAFEHFCIHAGGRAVLDELEKNLELTDWHMEPSRMTLYRFSNTSSSSLWYELAYTEAKGRIRKRDRIWQIAFGSGFKCNSAVWKALRTVNPAKEKSPWMDEIDNFPVDVPKISKVGGA

SEQ ID NO: 26090 - protein, 472 aa, Zea mays subsp. mays
  peptide (1)..(472): Ceres Seq. ID no. 12566792
  misc_feature (298)..(441): Pfam Name: Pfam Description:  Chalcone and stilbene synthases
  misc_feature (1)..(472): NCBI GI NO: 9714501 NR Description: putative fatty acid elongase [Zea mays]
  misc_feature (1)..(469): NCBI GI NO: 15225767 NR Description: putative beta-ketoacyl-CoA synthase
  misc_feature (1)..(469): NCBI GI NO: 29417540 NR Description: beta-ketoacyl-CoA-synthase [Marchantia polymorpha]
  misc_feature (1)..(463): NCBI GI NO: 11066477 NR Description: fatty acid elongase 1-like protein
  misc_feature (1)..(469): NCBI GI NO: 14334714 NR Description: putative beta-ketoacyl-CoA synthase
  misc_feature (1)..(469): NCBI GI NO: 15239981 NR Description: beta-ketoacyl-CoA synthase; protein id:At5g43760
  misc_feature (1)..(469): NCBI GI NO: 15219676 NR Description: putative beta-ketoacyl-CoA synthase
  misc_feature (1)..(469): NCBI GI NO: 18377979 NR Description: putative beta-ketoacyl-CoA synthase
  misc_feature (1)..(469): NCBI GI NO: 1045614 NR Description: beta-ketoacyl-CoA synthase
  misc_feature (1)..(464): NCBI GI NO: 19908404 NR Description: putative fatty acid elongase [Tropaeolum majus]
MYLLLSPLMALVAVQLSTVSPHDLADLWEQLRFNLLSVVACSTLLVFLSTVYFLTRPRPVYLLDFACYKPESERKCTRETFMHCSKLTGSFTDENLEFQRKILERSGLGEDTYLPPAVLRVPPNPCMDEARKEARAFMFGAIDQLLEKTGVRPKDIGVLVVNCSLFNPTPSLSAMVVNHYKLRGNIVSYNLGGMGCSAGLLSIDLAKDLLQVHPNSYALVISMENITLNWYFGNNRSMLVSNCLFRMGGAAILLSNRRSDRRRSKYELVHTVRTHKGADDKCFGCVTQEEDDIGKIGVSLSKDLMAVAGDALKTNITTLGPLVLPLSEQLLFMGTLIAKKVLKMKIKPYIPDFKLAFEHFCIHAGGRAVLDELEKNLELTDWHMEPSRMTLYRFSNTSSSSLWYELAYTEAKGRIRKRDRIWQIAFGSGFKCNSAVWKALRTVNPAKEKSPWMDEIDNFPVDVPKISKVGGA

SEQ ID NO: 26091 - protein, 464 aa, Zea mays subsp. mays
  peptide (1)..(464): Ceres Seq. ID no. 12566793
  misc_feature (290)..(433): Pfam Name: Pfam Description:  Chalcone and stilbene synthases
  misc_feature (1)..(464): NCBI GI NO: 9714501 NR Description: putative fatty acid elongase [Zea mays]
  misc_feature (1)..(461): NCBI GI NO: 15225767 NR Description: putative beta-ketoacyl-CoA synthase
  misc_feature (1)..(461): NCBI GI NO: 29417540 NR Description: beta-ketoacyl-CoA-synthase [Marchantia polymorpha]
  misc_feature (1)..(455): NCBI GI NO: 11066477 NR Description: fatty acid elongase 1-like protein
  misc_feature (1)..(461): NCBI GI NO: 14334714 NR Description: putative beta-ketoacyl-CoA synthase
  misc_feature (1)..(461): NCBI GI NO: 15239981 NR Description: beta-ketoacyl-CoA synthase; protein id:At5g43760
  misc_feature (1)..(461): NCBI GI NO: 15219676 NR Description: putative beta-ketoacyl-CoA synthase
  misc_feature (1)..(461): NCBI GI NO: 18377979 NR Description: putative beta-ketoacyl-CoA synthase
  misc_feature (1)..(461): NCBI GI NO: 1045614 NR Description: beta-ketoacyl-CoA synthase
  misc_feature (1)..(456): NCBI GI NO: 19908404 NR Description: putative fatty acid elongase [Tropaeolum majus]
MALVAVQLSTVSPHDLADLWEQLRFNLLSVVACSTLLVFLSTVYFLTRPRPVYLLDFACYKPESERKCTRETFMHCSKLTGSFTDENLEFQRKILERSGLGEDTYLPPAVLRVPPNPCMDEARKEARAFMFGAIDQLLEKTGVRPKDIGVLVVNCSLFNPTPSLSAMVVNHYKLRGNIVSYNLGGMGCSAGLLSIDLAKDLLQVHPNSYALVISMENITLNWYFGNNRSMLVSNCLFRMGGAAILLSNRRSDRRRSKYELVHTVRTHKGADDKCFGCVTQEEDDIGKIGVSLSKDLMAVAGDALKTNITTLGPLVLPLSEQLLFMGTLIAKKVLKMKIKPYIPDFKLAFEHFCIHAGGRAVLDELEKNLELTDWHMEPSRMTLYRFSNTSSSSLWYELAYTEAKGRIRKRDRIWQIAFGSGFKCNSAVWKALRTVNPAKEKSPWMDEIDNFPVDVPKISKVGGA

SEQ ID NO: 26092 - DNA, 1831 bp, Zea mays subsp. mays
  misc_feature (1)..(1831): Ceres Seq. ID no. 12344017
agcgtggcctcccgttctgacttcggagtccctcggtctcaacgactagttgagagctcgcggctccgttcgggcgaggggaggaggttcatgaggctgctgtaggctccgttgcagccgccgcgggcgggagtccgtgattttggacgccccaccgcggcaagatccggaagcgcgttggctgttgtgccgtgagtttcagtttcggtggtcgattgcttcagcctgctgagaagtaggaggggcggccatggcggggtcgaggttcgggtcgttcaagtcggagaagggcgactccgcctccgcagcggcggcagcgggtggagcggcgcagaggagggacccgtacgaggtgctcggggtgggccgcaccgccaccgaccaggagatcaagagtgcgttccgacgcatggcgctcaagtaccatccggacaagaatggcgatgaccctgttgcatcagacaggttccaggaagtcacattctcctataacatcctgtcagatcccgataagaggcggcagtacgatacatcaggatttgatgcaatcgaatctgatagtcaggaactggagctggacttgtcgagtctcaacactgtaaacacggtgtttgcagctctttttagtaagcttggtgtgccaattaaaacaactgtttcagctacagttttagaggaggcattgaatggttcggttatggtttctcaactccagctaggaaactcagtgcagagaaaggtggaaaagcaatcggcccatttctattctgtggatataactgaaaaacaagctaaaatggggctagtttgtcgtgttcactcaaacgataaaagcaaattcaagttgctatattttgagcttgaagaaaatggcgggcttagtcttgcactacaggaagacagtgtgaaggttgggaaagttactgctgcagggatgtatttccttggttttcctgtgtaccgttttgaacaaaataacctggcagctgctgcaaaagattctgatggtgcattctttaaaagattggatagctttcagccatgtgacatacatgaactgaaacctggaacacacttctttgctgtctacggtgacaacttcttcaagagcgctagttatactatagaggttgtatgtggtgaatcttttcctgccgaaaaggagatgctacgaaatgtggaggccaagatactcacaaaacgagctgaactttccaaatttgagtcagagtatagggaggttttggcgaagttcactgaaatgaccagcaaatacacacaagaaatgcaagcgattgatggccttctgaaggaaaggaatgagatccatgcttcctataccaacaatccacctctaaaacggagttccagcaggaataaagccaagtcgccttcgaaagtggccaaaactggtacagaaaaacatcatcagaaggaaaagaaggtgaaggatcactgcatggagggatgtggaagtgacagcgataactcaagtgaaaagaaatcaaaagagcggttcccaaggaagaaatggctgaaccttccattcaaacttgacaggagaaagacgtgctgagcaatgtattatatgttccgttgctattctatcctgttatgcataatcctgagctgaactcacatttcttctctttctcatgcttttataggaagtccctctcggcccaacactagattgatatacagagaatttccactgtggcctcccgaaccaagccctctcccactgctaccaccttccttcgttgtacccggattatttcgtgtaaagatcacatgtgatcctaagaattaaaacgtgagtcgttttagc

SEQ ID NO: 26093 - protein, 441 aa, Zea mays subsp. mays
  peptide (1)..(441): Ceres Seq. ID no. 12344018
  misc_feature (31)..(96): Pfam Name: Pfam Description:  DnaJ domain
  misc_feature (29)..(441): NCBI GI NO: 22329767 NR Description: DNAJ-like heatshock protein; protein id:At1g24120
  misc_feature (28)..(383): NCBI GI NO: 34583424 NR Description: ARG1-like protein 2 [Arabidopsis thaliana]
  misc_feature (28)..(383): NCBI GI NO: 30696376 NR Description: Altered Response to Gravity
  misc_feature (16)..(418): NCBI GI NO: 15221381 NR Description: ARG1 protein
  misc_feature (27)..(396): NCBI GI NO: 34914630 NR Description: putative ARG1 protein
  misc_feature (246)..(441): NCBI GI NO: 7433053 NR Description: hypothetical protein F3I6.4 - Arabidopsis thaliana
  misc_feature (29)..(180): NCBI GI NO: 7433053 NR Description: hypothetical protein F3I6.4 - Arabidopsis thaliana
  misc_feature (28)..(215): NCBI GI NO: 25296041 NR Description: hypothetical protein T2K10.3
  misc_feature (246)..(383): NCBI GI NO: 25296041 NR Description: hypothetical protein T2K10.3
  misc_feature (31)..(383): NCBI GI NO: 17554644 NR Description: DNaJ domain
MAGSRFGSFKSEKGDSASAAAAAGGAAQRRDPYEVLGVGRTATDQEIKSAFRRMALKYHPDKNGDDPVASDRFQEVTFSYNILSDPDKRRQYDTSGFDAIESDSQELELDLSSLNTVNTVFAALFSKLGVPIKTTVSATVLEEALNGSVMVSQLQLGNSVQRKVEKQSAHFYSVDITEKQAKMGLVCRVHSNDKSKFKLLYFELEENGGLSLALQEDSVKVGKVTAAGMYFLGFPVYRFEQNNLAAAAKDSDGAFFKRLDSFQPCDIHELKPGTHFFAVYGDNFFKSASYTIEVVCGESFPAEKEMLRNVEAKILTKRAELSKFESEYREVLAKFTEMTSKYTQEMQAIDGLLKERNEIHASYTNNPPLKRSSSRNKAKSPSKVAKTGTEKHHQKEKKVKDHCMEGCGSDSDNSSEKKSKERFPRKKWLNLPFKLDRRKTC

SEQ ID NO: 26094 - protein, 388 aa, Zea mays subsp. mays
  peptide (1)..(388): Ceres Seq. ID no. 12344019
  misc_feature (1)..(388): NCBI GI NO: 22329767 NR Description: DNAJ-like heatshock protein; protein id:At1g24120
  misc_feature (1)..(330): NCBI GI NO: 34583424 NR Description: ARG1-like protein 2 [Arabidopsis thaliana]
  misc_feature (1)..(330): NCBI GI NO: 30696376 NR Description: Altered Response to Gravity
  misc_feature (1)..(365): NCBI GI NO: 15221381 NR Description: ARG1 protein
  misc_feature (1)..(343): NCBI GI NO: 34914630 NR Description: putative ARG1 protein
  misc_feature (193)..(388): NCBI GI NO: 7433053 NR Description: hypothetical protein F3I6.4 - Arabidopsis thaliana
  misc_feature (1)..(127): NCBI GI NO: 7433053 NR Description: hypothetical protein F3I6.4 - Arabidopsis thaliana
  misc_feature (1)..(162): NCBI GI NO: 25296041 NR Description: hypothetical protein T2K10.3
  misc_feature (193)..(330): NCBI GI NO: 25296041 NR Description: hypothetical protein T2K10.3
  misc_feature (1)..(330): NCBI GI NO: 17554644 NR Description: DNaJ domain
MALKYHPDKNGDDPVASDRFQEVTFSYNILSDPDKRRQYDTSGFDAIESDSQELELDLSSLNTVNTVFAALFSKLGVPIKTTVSATVLEEALNGSVMVSQLQLGNSVQRKVEKQSAHFYSVDITEKQAKMGLVCRVHSNDKSKFKLLYFELEENGGLSLALQEDSVKVGKVTAAGMYFLGFPVYRFEQNNLAAAAKDSDGAFFKRLDSFQPCDIHELKPGTHFFAVYGDNFFKSASYTIEVVCGESFPAEKEMLRNVEAKILTKRAELSKFESEYREVLAKFTEMTSKYTQEMQAIDGLLKERNEIHASYTNNPPLKRSSSRNKAKSPSKVAKTGTEKHHQKEKKVKDHCMEGCGSDSDNSSEKKSKERFPRKKWLNLPFKLDRRKTC

SEQ ID NO: 26095 - protein, 292 aa, Zea mays subsp. mays
  peptide (1)..(292): Ceres Seq. ID no. 12344020
  misc_feature (1)..(292): NCBI GI NO: 22329767 NR Description: DNAJ-like heatshock protein; protein id:At1g24120
  misc_feature (1)..(234): NCBI GI NO: 34583424 NR Description: ARG1-like protein 2 [Arabidopsis thaliana]
  misc_feature (1)..(234): NCBI GI NO: 30696376 NR Description: Altered Response to Gravity
  misc_feature (1)..(269): NCBI GI NO: 15221381 NR Description: ARG1 protein
  misc_feature (1)..(247): NCBI GI NO: 34914630 NR Description: putative ARG1 protein
  misc_feature (97)..(292): NCBI GI NO: 7433053 NR Description: hypothetical protein F3I6.4 - Arabidopsis thaliana
  misc_feature (1)..(31): NCBI GI NO: 7433053 NR Description: hypothetical protein F3I6.4 - Arabidopsis thaliana
  misc_feature (1)..(66): NCBI GI NO: 25296041 NR Description: hypothetical protein T2K10.3
  misc_feature (97)..(234): NCBI GI NO: 25296041 NR Description: hypothetical protein T2K10.3
  misc_feature (1)..(234): NCBI GI NO: 17554644 NR Description: DNaJ domain
MVSQLQLGNSVQRKVEKQSAHFYSVDITEKQAKMGLVCRVHSNDKSKFKLLYFELEENGGLSLALQEDSVKVGKVTAAGMYFLGFPVYRFEQNNLAAAAKDSDGAFFKRLDSFQPCDIHELKPGTHFFAVYGDNFFKSASYTIEVVCGESFPAEKEMLRNVEAKILTKRAELSKFESEYREVLAKFTEMTSKYTQEMQAIDGLLKERNEIHASYTNNPPLKRSSSRNKAKSPSKVAKTGTEKHHQKEKKVKDHCMEGCGSDSDNSSEKKSKERFPRKKWLNLPFKLDRRKTC

SEQ ID NO: 26096 - DNA, 1812 bp, Zea mays subsp. mays
  misc_feature (1)..(1812): Ceres Seq. ID no. 13498787
attaaaaaagggttccccacagcaccaagcgcgacgtgagcgaggaggcaggcgcgcacggcgtgtcggcgtcgcaccgaacccgacacggctcggcctacggcccccacacatccggctgggccgttccgttccgtttcgttcccttcccattcttctcgtacgcggccgattgctgaccctcgctcgccctcgcttccccaccacagcaccgaaactgccccgcctccgcagccgccgcccgcgcccgctcgtcctccccgcgccgcctcggggacgccccggtcggcgatgtggcgggagcatgctaggcccgctcctcaggctcctctcggcgtgcggcggggtctggcccacctcgccggcccccggcgccgcggcctcctcttccgcctcctccggggacgactctgagggccgcgacggccttctctggtggcgcgacctcgcgcgctgccacgccggcgacgtctccgtcgccgtcgcccaggccaaccaggtgctcgaggaccagtgccgcctcgactccgccccgtccatcggcaccgtcgtcggcgtcttcgacggccacggcggccccgacgccgcccgcttcgcctgcgaccaccttgtccccaacctccgagaggcgtcctccggcccgcggggcgtcaccgcagacgccatcagggaggccttcctggccacggaggaaggattcctcgcgctcgtgtcaagcctctgggaggcccagccggacatcgccacggccgggacatgctgccttgtcggcgtcgtgcacaacaggacccttttcgtcgccaacctcggcgactcccgggccgtcctcgggaagaaggcgggccgcgctggccagatcgccgcggagcagttgtccagcgagcacaatgccaaccaggaggctgtcaggcaggagctcatggcgcaacacccagatgatgctcagattgttgcgctcaagcatggggtctggagagtgaggggcctcatacaggtgtctagatcaatcggtgatgtatacctgaaacatgcaaagtataacacagaccagatcaaacccaagttcaggcttcccgaatcattcagcaagccactattgagtgccgatccatctatcatctcccgcgatcttgaaccaaatgactgtttcatcatattcgcatcagatggattgtgggagcacctcagcaatcaagaagccgttgagattgttcacagccatcaacgtgctggaagcgcaagaagactcattaaagccgctctacaagaagcagcgcggaagcgtgagatgcgttactcggatcttacaaagatcgataagaaagttcgcaggcatttccatgatgacattactgtcatcgtcttatttataaactatgacctattattgaaaggtgctccgcagggacaacccctctccatcagatgtgccctagattattgacagtgagctagttcacccactggtattcaagctcctgcgggcagccatatccagagtcagctgacatggtcaaccggttgtgaaaagcgcacaacctccggcaccagtttccttttcgtttccccttttttgcacataaaattgacaagtcgctgaaattgccagttttcccctcttggattatgtcggataaaatgcgtatactcttcggttttggagatatatgtctagactctagagcgtgagggaaggttataaagtcttgtatgtctttgttctcttgcagtcttgcttacagttacagctagctctttttgtatgtaacaattgtcagcaatcagcatgtttaaccacctccgtgacgtttt

SEQ ID NO: 26097 - protein, 480 aa, Zea mays subsp. mays
  peptide (1)..(480): Ceres Seq. ID no. 13498788
  misc_feature (147)..(429): Pfam Name: Pfam Description:  Protein phosphatase 2C
  misc_feature (102)..(480): NCBI GI NO: 18401370 NR Description: protein phosphatase-2c -related
  misc_feature (107)..(480): NCBI GI NO: 7670033 NR Description: protein phosphatase 2C-like protein
  misc_feature (102)..(480): NCBI GI NO: 21537406 NR Description: protein phosphatase-2c, putative
  misc_feature (102)..(475): NCBI GI NO: 11282001 NR Description: protein phosphatase 2C-like protein
  misc_feature (102)..(475): NCBI GI NO: 11282004 NR Description: protein phosphatase 2C homolog
  misc_feature (102)..(475): NCBI GI NO: 15239244 NR Description: protein phosphatase 2C-related protein
  misc_feature (102)..(475): NCBI GI NO: 18855039 NR Description: putative protein phosphatase [Oryza sativa]
  misc_feature (102)..(475): NCBI GI NO: 20340237 NR Description: protein phosphatase 2c-like protein
  misc_feature (102)..(477): NCBI GI NO: 22329238 NR Description: protein phosphatase-2c -related
  misc_feature (102)..(477): NCBI GI NO: 17064756 NR Description: putative protein phosphatase-2c
LKKGSPQHQARRERGGRRARRVGVAPNPTRLGLRPPHIRLGRSVPFRSLPILLVRGRLLTLARPRFPTTAPKLPRLRSRRPRPLVLPAPPRGRPGRRCGGSMLGPLLRLLSACGGVWPTSPAPGAAASSSASSGDDSEGRDGLLWWRDLARCHAGDVSVAVAQANQVLEDQCRLDSAPSIGTVVGVFDGHGGPDAARFACDHLVPNLREASSGPRGVTADAIREAFLATEEGFLALVSSLWEAQPDIATAGTCCLVGVVHNRTLFVANLGDSRAVLGKKAGRAGQIAAEQLSSEHNANQEAVRQELMAQHPDDAQIVALKHGVWRVRGLIQVSRSIGDVYLKHAKYNTDQIKPKFRLPESFSKPLLSADPSIISRDLEPNDCFIIFASDGLWEHLSNQEAVEIVHSHQRAGSARRLIKAALQEAARKREMRYSDLTKIDKKVRRHFHDDITVIVLFINYDLLLKGAPQGQPLSIRCALDY

SEQ ID NO: 26098 - protein, 379 aa, Zea mays subsp. mays
  peptide (1)..(379): Ceres Seq. ID no. 13498789
  misc_feature (46)..(328): Pfam Name: Pfam Description:  Protein phosphatase 2C
  misc_feature (1)..(379): NCBI GI NO: 18401370 NR Description: protein phosphatase-2c -related
  misc_feature (6)..(379): NCBI GI NO: 7670033 NR Description: protein phosphatase 2C-like protein
  misc_feature (1)..(379): NCBI GI NO: 21537406 NR Description: protein phosphatase-2c, putative
  misc_feature (1)..(374): NCBI GI NO: 11282001 NR Description: protein phosphatase 2C-like protein
  misc_feature (1)..(374): NCBI GI NO: 11282004 NR Description: protein phosphatase 2C homolog
  misc_feature (1)..(374): NCBI GI NO: 15239244 NR Description: protein phosphatase 2C-related protein
  misc_feature (1)..(374): NCBI GI NO: 18855039 NR Description: putative protein phosphatase [Oryza sativa]
  misc_feature (1)..(374): NCBI GI NO: 20340237 NR Description: protein phosphatase 2c-like protein
  misc_feature (1)..(376): NCBI GI NO: 22329238 NR Description: protein phosphatase-2c -related
  misc_feature (1)..(376): NCBI GI NO: 17064756 NR Description: putative protein phosphatase-2c
MLGPLLRLLSACGGVWPTSPAPGAAASSSASSGDDSEGRDGLLWWRDLARCHAGDVSVAVAQANQVLEDQCRLDSAPSIGTVVGVFDGHGGPDAARFACDHLVPNLREASSGPRGVTADAIREAFLATEEGFLALVSSLWEAQPDIATAGTCCLVGVVHNRTLFVANLGDSRAVLGKKAGRAGQIAAEQLSSEHNANQEAVRQELMAQHPDDAQIVALKHGVWRVRGLIQVSRSIGDVYLKHAKYNTDQIKPKFRLPESFSKPLLSADPSIISRDLEPNDCFIIFASDGLWEHLSNQEAVEIVHSHQRAGSARRLIKAALQEAARKREMRYSDLTKIDKKVRRHFHDDITVIVLFINYDLLLKGAPQGQPLSIRCALDY

SEQ ID NO: 26099 - DNA, 1181 bp, Zea mays subsp. mays
  misc_feature (1)..(1181): Ceres Seq. ID no. 12419652
  misc_feature (486)..(486): n is a, c, t, g, unknown, or other
  misc_feature (529)..(529): n is a, c, t, g, unknown, or other
  misc_feature (478)..(478): n is a, c, t, g, unknown, or other
ggcacgtactcacagctctcaggcaggctttcttcataccacacacacacacaaagagaacacagtcgtcgtccgctccgaaatggcctacgcgacgcagcatcggcgccgagccattcttaccctggccgccatcgccctcctcctggcgtctcccatggcagccgccgccgccgccgccgccgggtgcgagggcgacaagctccccgcgggccggatctacgcgcactgcgcggcgctcccgtccctcggcgccaggctgcactggacgtacgacgccaagacggggtcgctgtccgtggcgttcgtggccaagccggcgggcgcgggcggcgccgggtgggtgtcgtgggcgatcaacccggcgggcgagggcatgaagggcgcgcaggcgctgctggccctcaagagccccgccgccccctcgtcgtcctacgtagtcaacacctacaacgtgaccgggtacaccgcgctcggngccgcgtncacgcccatcgcgtacagggccgcggagctcgccgccgacganagcggcggcggggaggtgcgcatctacgggaagctgcagctggcacccggcctggagaaggtgagccacatctggcaggtgggatccacggtggccaacggcgcgccggtcaagcacgcgttcgacacggccaacctccaggccaagggcacgctcgtcctctccggcgccgcgctgcccgtggaggcggcgccggctcccgccccggtgggctctggtggtgcctcgcccgcgaagggaggaggcgatagtggagccgccccgtctactggcgggagcagcaactcggcggctgctaaggccaccacctacgtgtctgtttcagtgctcacgctgctggcggcggcattggcaggtgcaggttcctttgcgatgtaacaaacagctccgagtcatacggccaagtagttcctgccttcttagcggtggcacgtacgtacgctgacaagcgggagagagatgacacaatcacacaacacacacatgagattaagattattagcatcctcttgtcttgctagctgatgcatatgcctgcgcgcaatcctgttctcgttagctgttggcacgcgttcggtttcgccatctgatttaccctgtatgttgtgttgttgttccgagtgttgtctcgttcttaaatacgtagtacggc

SEQ ID NO: 26100 - protein, 301 aa, Zea mays subsp. mays
  peptide (1)..(301): Ceres Seq. ID no. 12419653
  misc_feature (126)..(245): Pfam Name: DUF568 Pfam Description: Protein of unknown function
  misc_feature (34)..(295): NCBI GI NO: 29647484 NR Description: OJ1191_A10.2
  misc_feature (40)..(291): NCBI GI NO: 11357190 NR Description: auxin-induced protein AIR12
  misc_feature (40)..(291): NCBI GI NO: 30680258 NR Description: auxin-induced protein (AIR12)
  misc_feature (37)..(255): NCBI GI NO: 15235545 NR Description: putative protein; protein id: At4g12980
  misc_feature (37)..(255): NCBI GI NO: 21593814 NR Description: unknown [Arabidopsis thaliana]
  misc_feature (37)..(232): NCBI GI NO: 18404500 NR Description: expressed protein; protein id: At3g25290
  misc_feature (36)..(231): NCBI GI NO: 38424013 NR Description: auxin-induced protein-like
  misc_feature (44)..(228): NCBI GI NO: 18421491 NR Description: Expressed protein; protein id: At5g35735
  misc_feature (44)..(228): NCBI GI NO: 21592781 NR Description: putative membrane protein [Arabidopsis thaliana]
  misc_feature (47)..(224): NCBI GI NO: 24414271 NR Description: Unknown protein
  misc_feature (159)..(159): Xaa is any aa, unknown or other
  misc_feature (162)..(162): Xaa is any aa, unknown or other
  misc_feature (176)..(176): Xaa is any aa, unknown or other
ARTHSSQAGFLHTTHTHKENTVVVRSEMAYATQHRRRAILTLAAIALLLASPMAAAAAAAAGCEGDKLPAGRIYAHCAALPSLGARLHWTYDAKTGSLSVAFVAKPAGAGGAGWVSWAINPAGEGMKGAQALLALKSPAAPSSSYVVNTYNVTGYTALXAAXTPIAYRAAELAADXSGGGEVRIYGKLQLAPGLEKVSHIWQVGSTVANGAPVKHAFDTANLQAKGTLVLSGAALPVEAAPAPAPVGSGGASPAKGGGDSGAAPSTGGSSNSAAAKATTYVSVSVLTLLAAALAGAGSFAM

SEQ ID NO: 26101 - protein, 274 aa, Zea mays subsp. mays
  peptide (1)..(274): Ceres Seq. ID no. 12419654
  misc_feature (99)..(218): Pfam Name: DUF568 Pfam Description: Protein of unknown function
  misc_feature (7)..(268): NCBI GI NO: 29647484 NR Description: OJ1191_A10.2
  misc_feature (13)..(264): NCBI GI NO: 11357190 NR Description: auxin-induced protein AIR12
  misc_feature (13)..(264): NCBI GI NO: 30680258 NR Description: auxin-induced protein (AIR12)
  misc_feature (10)..(228): NCBI GI NO: 15235545 NR Description: putative protein; protein id: At4g12980
  misc_feature (10)..(228): NCBI GI NO: 21593814 NR Description: unknown [Arabidopsis thaliana]
  misc_feature (10)..(205): NCBI GI NO: 18404500 NR Description: expressed protein; protein id: At3g25290
  misc_feature (9)..(204): NCBI GI NO: 38424013 NR Description: auxin-induced protein-like
  misc_feature (17)..(201): NCBI GI NO: 18421491 NR Description: Expressed protein; protein id: At5g35735
  misc_feature (17)..(201): NCBI GI NO: 21592781 NR Description: putative membrane protein [Arabidopsis thaliana]
  misc_feature (20)..(197): NCBI GI NO: 24414271 NR Description: Unknown protein
  misc_feature (132)..(132): Xaa is any aa, unknown or other
  misc_feature (135)..(135): Xaa is any aa, unknown or other
  misc_feature (149)..(149): Xaa is any aa, unknown or other
MAYATQHRRRAILTLAAIALLLASPMAAAAAAAAGCEGDKLPAGRIYAHCAALPSLGARLHWTYDAKTGSLSVAFVAKPAGAGGAGWVSWAINPAGEGMKGAQALLALKSPAAPSSSYVVNTYNVTGYTALXAAXTPIAYRAAELAADXSGGGEVRIYGKLQLAPGLEKVSHIWQVGSTVANGAPVKHAFDTANLQAKGTLVLSGAALPVEAAPAPAPVGSGGASPAKGGGDSGAAPSTGGSSNSAAAKATTYVSVSVLTLLAAALAGAGSFAM

SEQ ID NO: 26102 - protein, 259 aa, Zea mays subsp. mays
  peptide (1)..(259): Ceres Seq. ID no. 12419655
  misc_feature (5)..(242): NCBI GI NO: 17027049 NR Description: elongation factor-1 alpha [Chimarra rossi]
  misc_feature (9)..(242): NCBI GI NO: 17027071 NR Description: elongation factor-1 alpha
  misc_feature (160)..(160): Xaa is any aa, unknown or other
  misc_feature (162)..(162): Xaa is any aa, unknown or other
  misc_feature (177)..(177): Xaa is any aa, unknown or other
GTYSQLSGRLSSYHTHTQREHSRRPLRNGLRDAASAPSHSYPGRHRPPPGVSHGSRRRRRRRVRGRQAPRGPDLRALRGAPVPRRQAALDVRRQDGVAVRGVRGQAGGRGRRRVGVVGDQPGGRGHEGRAGAAGPQEPRRPLVVLRSQHLQRDRVHRARXRXHAHRVQGRGARRRRXRRRGGAHLREAAAGTRPGEGEPHLAGGIHGGQRRAGQARVRHGQPPGQGHARPLRRRAARGGGAGSRPGGLWWCLAREGRRR

SEQ ID NO: 26103 - DNA, 1564 bp, Zea mays subsp. mays
  misc_feature (1)..(1564): Ceres Seq. ID no. 12369436
  misc_feature (149)..(149): n is a, c, t, g, unknown, or other
aaccttttgtttgttcttttgttgccttccttttctccgcactcatcgcttgttgcggttcgctctctacaaggaggcggcttgcgcggggggcatcgtgcaatggcgcggcggtgcccgtgcaggctgctgctagccgtggcggcggnggccgtgctcgtggccgcggcagcgcaggcgcaggagacgtgctcggggaccgtccccgcgccgccgcgccgcggggcgcgggtgtccgtggccagcttcggcggcgcgggcgacggacggacgctcaacacggcggcgttcgcgcgcgccgtcgccagcatcgagcgccgcgccgcgccgggcggggcggagctctacgtgccgcccggggtgtggctcacggggcccttcaacctcacctcgcgcatgacgctcttcctcgcgcgcggcgccgtcatccgcgccacgcaggacacatcaagctggcctctgattgaaccgctgccctcatacgggagaggacgtgagctgcccggcggaagatacataggtttaatccatggcaatgggcttcaggatgttgtcatcacaggcgagaatggaactattgatggtcaaggcagcgcgtggtgggatatgtggaagaacaggacactgctctacacaaggcctcaccttcttgagctgatgagctcttctgatatcattgtctccaatgtcgtctttcaggattcgccattctggaacatccatcctgtttattgcagcaatgttgtgatcagaaacgtgactatcctagctccacatgactcccccaacacggatggaattgatccagattccagcagcaacatctgcatcgaggattgctacatttcgactggtgacgattccatcgccatcaagagtggctgggatgagtatggaatcgcctatggccgccccagttctggaatcaccgtgcggcggatcacaggctcctccccgtttgctggcttcgcggtcggaagcgagacatcaggtggcgtggagaacgtccttgcagaacacttgaacttcttcaactcagggtttgggatccatgtcaagaccaacacaggcaggggaggcttcatcaggaacatcactgtctcggatgtgacgctggataacgtccggtacggcctgcggatcgttggcgatgtcggcaatcaccccgacaacagctacaaccagagtgcgctcccgatcgtcgacacccttatggtaaagaatgtccagggccagaacgtcagggaggctgggctgatcaagggcatcgccaactcggccttctcccggatctgcctgtcgaacgtcaagttcactggtggtgcgcctgtccggccgtggaagtgcgaggctgtcagcggtggcgctctcgacgtgcagccgtccccgtgcacagaactgacttccacgtctgggacgagcttctgtacaaattcgctttgatgctttgccagctagctgagcctgagctgctgctatgcttctgtatctacgagtatgtatactggtgctttaaagcttgggcacccaagtatttatcttcccgaaaattaatttggtttcc

SEQ ID NO: 26104 - protein, 480 aa, Zea mays subsp. mays
  peptide (1)..(480): Ceres Seq. ID no. 12369437
  misc_feature (191)..(464): Pfam Name: Pfam Description:  Glycosyl hydrolases family 28
  misc_feature (43)..(480): NCBI GI NO: 34912726 NR Description: putative polygalacturonase
  misc_feature (55)..(479): NCBI GI NO: 15236625 NR Description: polygalacturonase, putative; protein id:At4g23820
  misc_feature (63)..(478): NCBI GI NO: 15238207 NR Description: polygalacturonase, putative; protein id:At5g41870
  misc_feature (63)..(473): NCBI GI NO: 22329119 NR Description: polygalacturonase, putative; protein id:At4g33440
  misc_feature (78)..(476): NCBI GI NO: 40714685 NR Description: putative polygalacturonase
  misc_feature (43)..(467): NCBI GI NO: 18412253 NR Description: polygalacturonase, putative; protein id:At3g62110
  misc_feature (43)..(467): NCBI GI NO: 11263971 NR Description: hypothetical protein T17J13
  misc_feature (102)..(472): NCBI GI NO: 34393209 NR Description: putative polygalacturonase
  misc_feature (38)..(467): NCBI GI NO: 34897760 NR Description: ESTs AU029388
  misc_feature (38)..(480): NCBI GI NO: 15228881 NR Description: polygalacturonase, putative; protein id:At3g16850
  misc_feature (50)..(50): Xaa is any aa, unknown or other
NLLFVLLLPSFSPHSSLVAVRSLQGGGLRGGHRAMARRCPCRLLLAVAAXAVLVAAAAQAQETCSGTVPAPPRRGARVSVASFGGAGDGRTLNTAAFARAVASIERRAAPGGAELYVPPGVWLTGPFNLTSRMTLFLARGAVIRATQDTSSWPLIEPLPSYGRGRELPGGRYIGLIHGNGLQDVVITGENGTIDGQGSAWWDMWKNRTLLYTRPHLLELMSSSDIIVSNVVFQDSPFWNIHPVYCSNVVIRNVTILAPHDSPNTDGIDPDSSSNICIEDCYISTGDDSIAIKSGWDEYGIAYGRPSSGITVRRITGSSPFAGFAVGSETSGGVENVLAEHLNFFNSGFGIHVKTNTGRGGFIRNITVSDVTLDNVRYGLRIVGDVGNHPDNSYNQSALPIVDTLMVKNVQGQNVREAGLIKGIANSAFSRICLSNVKFTGGAPVRPWKCEAVSGGALDVQPSPCTELTSTSGTSFCTNSL

SEQ ID NO: 26105 - protein, 446 aa, Zea mays subsp. mays
  peptide (1)..(446): Ceres Seq. ID no. 12369438
  misc_feature (157)..(430): Pfam Name: Pfam Description:  Glycosyl hydrolases family 28
  misc_feature (9)..(446): NCBI GI NO: 34912726 NR Description: putative polygalacturonase
  misc_feature (21)..(445): NCBI GI NO: 15236625 NR Description: polygalacturonase, putative; protein id:At4g23820
  misc_feature (29)..(444): NCBI GI NO: 15238207 NR Description: polygalacturonase, putative; protein id:At5g41870
  misc_feature (29)..(439): NCBI GI NO: 22329119 NR Description: polygalacturonase, putative; protein id:At4g33440
  misc_feature (44)..(442): NCBI GI NO: 40714685 NR Description: putative polygalacturonase
  misc_feature (9)..(433): NCBI GI NO: 18412253 NR Description: polygalacturonase, putative; protein id:At3g62110
  misc_feature (9)..(433): NCBI GI NO: 11263971 NR Description: hypothetical protein T17J13
  misc_feature (68)..(438): NCBI GI NO: 34393209 NR Description: putative polygalacturonase
  misc_feature (4)..(433): NCBI GI NO: 34897760 NR Description: ESTs AU029388
  misc_feature (4)..(446): NCBI GI NO: 15228881 NR Description: polygalacturonase, putative; protein id:At3g16850
  misc_feature (16)..(16): Xaa is any aa, unknown or other
MARRCPCRLLLAVAAXAVLVAAAAQAQETCSGTVPAPPRRGARVSVASFGGAGDGRTLNTAAFARAVASIERRAAPGGAELYVPPGVWLTGPFNLTSRMTLFLARGAVIRATQDTSSWPLIEPLPSYGRGRELPGGRYIGLIHGNGLQDVVITGENGTIDGQGSAWWDMWKNRTLLYTRPHLLELMSSSDIIVSNVVFQDSPFWNIHPVYCSNVVIRNVTILAPHDSPNTDGIDPDSSSNICIEDCYISTGDDSIAIKSGWDEYGIAYGRPSSGITVRRITGSSPFAGFAVGSETSGGVENVLAEHLNFFNSGFGIHVKTNTGRGGFIRNITVSDVTLDNVRYGLRIVGDVGNHPDNSYNQSALPIVDTLMVKNVQGQNVREAGLIKGIANSAFSRICLSNVKFTGGAPVRPWKCEAVSGGALDVQPSPCTELTSTSGTSFCTNSL

SEQ ID NO: 26106 - protein, 348 aa, Zea mays subsp. mays
  peptide (1)..(348): Ceres Seq. ID no. 12369439
  misc_feature (59)..(332): Pfam Name: Pfam Description:  Glycosyl hydrolases family 28
  misc_feature (1)..(348): NCBI GI NO: 34912726 NR Description: putative polygalacturonase
  misc_feature (1)..(347): NCBI GI NO: 15236625 NR Description: polygalacturonase, putative; protein id:At4g23820
  misc_feature (1)..(346): NCBI GI NO: 15238207 NR Description: polygalacturonase, putative; protein id:At5g41870
  misc_feature (1)..(341): NCBI GI NO: 22329119 NR Description: polygalacturonase, putative; protein id:At4g33440
  misc_feature (1)..(344): NCBI GI NO: 40714685 NR Description: putative polygalacturonase
  misc_feature (1)..(335): NCBI GI NO: 18412253 NR Description: polygalacturonase, putative; protein id:At3g62110
  misc_feature (1)..(335): NCBI GI NO: 11263971 NR Description: hypothetical protein T17J13
  misc_feature (1)..(340): NCBI GI NO: 34393209 NR Description: putative polygalacturonase
  misc_feature (1)..(335): NCBI GI NO: 34897760 NR Description: ESTs AU029388
  misc_feature (1)..(348): NCBI GI NO: 15228881 NR Description: polygalacturonase, putative; protein id:At3g16850
MTLFLARGAVIRATQDTSSWPLIEPLPSYGRGRELPGGRYIGLIHGNGLQDVVITGENGTIDGQGSAWWDMWKNRTLLYTRPHLLELMSSSDIIVSNVVFQDSPFWNIHPVYCSNVVIRNVTILAPHDSPNTDGIDPDSSSNICIEDCYISTGDDSIAIKSGWDEYGIAYGRPSSGITVRRITGSSPFAGFAVGSETSGGVENVLAEHLNFFNSGFGIHVKTNTGRGGFIRNITVSDVTLDNVRYGLRIVGDVGNHPDNSYNQSALPIVDTLMVKNVQGQNVREAGLIKGIANSAFSRICLSNVKFTGGAPVRPWKCEAVSGGALDVQPSPCTELTSTSGTSFCTNSL

SEQ ID NO: 26107 - DNA, 1740 bp, Zea mays subsp. mays
  misc_feature (1)..(1740): Ceres Seq. ID no. 13498786
gggctgcctgctcacacttcgccactactgctgctgcgcgttggcgagcgcgcgtggttcacgagcgagctccaccacaagcccagtcgcgcacggcagccgttttgcttgttttgtttgctttccgcctcttccgtgcttcctcttttgggcggcctggctgggctagctagctgttctgttcattccgagttcccggcatagaacacgaggttggagttagaggcttaccgagggagcagacagcagaggtcactagcgatttcacagtcacgcacctgcatttcttcttttttttcttcttcttttctttagcaagctctctttcttttcttgctcttgttttgtttgtcctccctgtaataactcttgcctgccttcccctaccctggtctctttccttcttcctgcactgcaggacactataagagtagctagccctacccaatatcttcagccgtgcttgccaacttggagagagagagagagagagagagagagagagagagagagagagagagagagagagagagagagagagagagagagagagagagagagagagagagaagagaagagaagagragagaagggagtgagtgatcgcaggaaggaggatcggagtgatgggagacgcagcagagaccaacaagactcttcacaactggatgggcgagccgaggccgaggtcgagcgaccagcgcgacgaggaggagacgcttcagctcagcctcggcctccccggaggaggagcaagtgcgggtggtggggtagcacccgccgcctggagaatgctgccggccagagacgaggagatgcgctctgctgctgctgtcgtcgacacctccctgctctctctcggctactccgccccagctttctcgccccgctcaccaggcaaggcaaaggggtccccagcagcagctacagagaatgcccttgcatccaccaacaacgcctcccagagaagatctccaaataccccggttattgggtggcctccagttcgtgccttcagaagaaatctggccacctctagcagagcatcccttgaacatcagaatgggaagaaggaagacaaacctgaacagaccacaaaaagagctccatttgtaaagatcaacatggacggcatccctattggtagaaaaatcgatctgagtgccctcggtagttacgatgagctgtctctgtctgtcgacaagctattccgggggcttsttgcagcacaacaagaccctctggctgccggcgcaaaggagtgttcacaggaagaggtggcgatatcgggtttactagatggaactggggagtacactctggtttatgaggattatgaaggcgatagggtgctggttggcgatgtcccctgggggatgtttgtttcttcggtgaagagstgcgcgttctgaagacatctgacctctcttcatctctaacagcacctcctggccagaagaggacggtaactgagtgtccagtgtttacctcttagacacttccttgcagtgatgttggtgtgctgtgaagaagaaaacgtcttctgagcttgtatcatctttcttcgtggtttcttcctcttcttttccctactttctcttggaagggatcatcaaagaaccgaaccgaccttttgggttttcctgctcttgtttattttgtttctctttccgggaagcgatgtgaccttttgggttgtatgtaaatgttcagacgaaccagctctatgtttatgcagcc

SEQ ID NO: 26108 - protein, 261 aa, Zea mays subsp. mays
  peptide (1)..(261): Ceres Seq. ID no. 15223050
  misc_feature (58)..(257): Pfam Name: Pfam Description:  AUX/IAA family
  misc_feature (58)..(257): NCBI GI NO: 15228226 NR Description: auxin-responsive protein
  misc_feature (58)..(257): NCBI GI NO: 21593333 NR Description: phytochrome-associated protein 1 (PAP1)
  misc_feature (103)..(257): NCBI GI NO: 4093155 NR Description: phytochrome-associated protein 1
  misc_feature (53)..(257): NCBI GI NO: 34906394 NR Description: P0710E05.9
  misc_feature (90)..(257): NCBI GI NO: 34909384 NR Description: putative phytochrome-associated protein
  misc_feature (106)..(257): NCBI GI NO: 15218080 NR Description: auxin-responsive protein IAA18
  misc_feature (106)..(257): NCBI GI NO: 21594025 NR Description: auxin regulated protein IAA18, putative
  misc_feature (106)..(257): NCBI GI NO: 25296228 NR Description: auxin-induced protein IAA18
  misc_feature (76)..(195): NCBI GI NO: 18420964 NR Description: auxin-responsive protein IAA28
  misc_feature (229)..(257): NCBI GI NO: 18420964 NR Description: auxin-responsive protein IAA28
  misc_feature (199)..(199): Xaa is any aa, unknown or other
  misc_feature (258)..(258): Xaa is any aa, unknown or other
MGDAAETNKTLHNWMGEPRPRSSDQRDEEETLQLSLGLPGGGASAGGGVAPAAWRMLPARDEEMRSAAAVVDTSLLSLGYSAPAFSPRSPGKAKGSPAAATENALASTNNASQRRSPNTPVIGWPPVRAFRRNLATSSRASLEHQNGKKEDKPEQTTKRAPFVKINMDGIPIGRKIDLSALGSYDELSLSVDKLFRGLXAAQQDPLAAGAKECSQEEVAISGLLDGTGEYTLVYEDYEGDRVLVGDVPWGMFVSSVKXCAF

SEQ ID NO: 26109 - protein, 247 aa, Zea mays subsp. mays
  peptide (1)..(247): Ceres Seq. ID no. 15223051
  misc_feature (44)..(243): Pfam Name: Pfam Description:  AUX/IAA family
  misc_feature (44)..(243): NCBI GI NO: 15228226 NR Description: auxin-responsive protein
  misc_feature (44)..(243): NCBI GI NO: 21593333 NR Description: phytochrome-associated protein 1 (PAP1)
  misc_feature (89)..(243): NCBI GI NO: 4093155 NR Description: phytochrome-associated protein 1
  misc_feature (39)..(243): NCBI GI NO: 34906394 NR Description: P0710E05.9
  misc_feature (76)..(243): NCBI GI NO: 34909384 NR Description: putative phytochrome-associated protein
  misc_feature (92)..(243): NCBI GI NO: 15218080 NR Description: auxin-responsive protein IAA18
  misc_feature (92)..(243): NCBI GI NO: 21594025 NR Description: auxin regulated protein IAA18, putative
  misc_feature (92)..(243): NCBI GI NO: 25296228 NR Description: auxin-induced protein IAA18
  misc_feature (62)..(181): NCBI GI NO: 18420964 NR Description: auxin-responsive protein IAA28
  misc_feature (215)..(243): NCBI GI NO: 18420964 NR Description: auxin-responsive protein IAA28
  misc_feature (185)..(185): Xaa is any aa, unknown or other
  misc_feature (244)..(244): Xaa is any aa, unknown or other
MGEPRPRSSDQRDEEETLQLSLGLPGGGASAGGGVAPAAWRMLPARDEEMRSAAAVVDTSLLSLGYSAPAFSPRSPGKAKGSPAAATENALASTNNASQRRSPNTPVIGWPPVRAFRRNLATSSRASLEHQNGKKEDKPEQTTKRAPFVKINMDGIPIGRKIDLSALGSYDELSLSVDKLFRGLXAAQQDPLAAGAKECSQEEVAISGLLDGTGEYTLVYEDYEGDRVLVGDVPWGMFVSSVKXCAF

SEQ ID NO: 26110 - protein, 206 aa, Zea mays subsp. mays
  peptide (1)..(206): Ceres Seq. ID no. 15223052
  misc_feature (3)..(202): Pfam Name: Pfam Description:  AUX/IAA family
  misc_feature (3)..(202): NCBI GI NO: 15228226 NR Description: auxin-responsive protein
  misc_feature (3)..(202): NCBI GI NO: 21593333 NR Description: phytochrome-associated protein 1 (PAP1)
  misc_feature (48)..(202): NCBI GI NO: 4093155 NR Description: phytochrome-associated protein 1
  misc_feature (1)..(202): NCBI GI NO: 34906394 NR Description: P0710E05.9
  misc_feature (35)..(202): NCBI GI NO: 34909384 NR Description: putative phytochrome-associated protein
  misc_feature (51)..(202): NCBI GI NO: 15218080 NR Description: auxin-responsive protein IAA18
  misc_feature (51)..(202): NCBI GI NO: 21594025 NR Description: auxin regulated protein IAA18, putative
  misc_feature (51)..(202): NCBI GI NO: 25296228 NR Description: auxin-induced protein IAA18
  misc_feature (21)..(140): NCBI GI NO: 18420964 NR Description: auxin-responsive protein IAA28
  misc_feature (174)..(202): NCBI GI NO: 18420964 NR Description: auxin-responsive protein IAA28
  misc_feature (144)..(144): Xaa is any aa, unknown or other
  misc_feature (203)..(203): Xaa is any aa, unknown or other
MLPARDEEMRSAAAVVDTSLLSLGYSAPAFSPRSPGKAKGSPAAATENALASTNNASQRRSPNTPVIGWPPVRAFRRNLATSSRASLEHQNGKKEDKPEQTTKRAPFVKINMDGIPIGRKIDLSALGSYDELSLSVDKLFRGLXAAQQDPLAAGAKECSQEEVAISGLLDGTGEYTLVYEDYEGDRVLVGDVPWGMFVSSVKXCAF

SEQ ID NO: 26111 - DNA, 1715 bp, Zea mays subsp. mays
  misc_feature (1)..(1715): Ceres Seq. ID no. 12347925
acacgcctctcttgctcaccattctcttctaaccagccaagccaaggcgcatctagcgagctgagcagcaatggcggctgctacttcttctaggcgccctgcagctgctctgctggtcctggcagcagccgtcgtggccctggcggccgagggggccaggtacccgccgctggcgccgggcctgtcgttcgacttctacaagaagagctgccccaaggcggagtccatcgtgcgggagttcctggcgtcggcggtccggcagaacgtggggctcgccgcggcgctgatccggctccacttccacgactgcttcgtgcagggctgcgacgcctccatcctgctggacgccacgcccacccagcccagcgagcagcagtcgccgcccaacctcacgctccgccccgccgcgttcaaggccgtcaacgacatccgcgcccgcctcgaccaggcctgcggccgcgtcgtctcctgcgccgacatcgtcgcgctcgccgcacgtgaatccgtcgccctgggtggcggcccggcgtacaagttgccactgggcaggcgcgacgggctggcgccggcatcgaacgccgccgtcctagcggcgctcccaccgccgacgtccaaggtgccgacgctgctgtccttcctggcgaagatcaacctggacgtgacggacctggtggcgctgtcgggcgggcacacggtgggcatcgcgcactgcggctccttcgacaaccggctgttcccgacgcaggacccgacgctgaacaagttcttcgcggggcagctgtaccggacctgcccgaccaacgcgacggtgaacacgacggccaacgacgtccgcacgcccaacgccttcgacaacaagtactacgtggacctgctcaaccgggagggcctcttcacgtcggaccaggacctgctgaccaacgccaccacgcgccccatcgtcacgcgcttcgccgtcgaccaggacgccttcttcgaccagttcgtctactcctacgtcaagatggggcaggtcaacgtgctcacgggctcccagggacaggtccgcgccaactgctccgcgcgcaacggcgccgctgctggtgacagtgacctgccgtggtcgtccgtcgtcatcgagacagtcgccgacgccgccggtagcctcgtgctctagataataagcaaataagtagtttgaagctttcttcgcatgcatgttgcaacaaataagcagctagtagcgttggaaataaagcagctagtagcgatcgttattacagaaacgacgacgacgtcgatggcaatggcagcatgctctgcagggagagcgctggcgcgggcaccagtagatgatccctgtccgcgcgggcccgggctcagccgaccaatcgatgtcaaccgcggcagcagtagcatagctaaggcatccgccgccgcacgccgactcggccacgtgatcgctgtcggactggaacacgatccagcctcgctcgctccatcgtctaataagagggtggcggtggcgaatattggaattggaccttccgggagaaaatatatcttggatgcccgtcaagacatctttcaatggtttccacagaaataatttaaaggaggctgactaatgtcagccacgtgtctcccgggtctgaacctagctaggttggaaccccttgacgcaaggaatcctctaaattgtatactctaaaaaaagaatatttatagttcttttt

SEQ ID NO: 26112 - protein, 361 aa, Zea mays subsp. mays
  peptide (1)..(361): Ceres Seq. ID no. 12347926
  misc_feature (54)..(297): Pfam Name: Pfam Description:  Peroxidase
  misc_feature (1)..(361): NCBI GI NO: 34905826 NR Description: putative peroxidase
  misc_feature (1)..(355): NCBI GI NO: 34905838 NR Description: putative peroxidase
  misc_feature (1)..(361): NCBI GI NO: 34905834 NR Description: putative peroxidase
  misc_feature (7)..(359): NCBI GI NO: 82410 NR Description: peroxidase (EC 1.11.1.7) BP1 precursor - barley
  misc_feature (7)..(356): NCBI GI NO: 22001285 NR Description: peroxidase 1 [Triticum aestivum]
  misc_feature (32)..(333): NCBI GI NO: 2624498 NR Description: Crystal Structure Of Barley Grain Peroxidase 1
  misc_feature (1)..(353): NCBI GI NO: 478409 NR Description: peroxidase (EC 1.11.1.7), cationic - adzuki bean
  misc_feature (1)..(335): NCBI GI NO: 14031049 NR Description: peroxidase [Nicotiana tabacum]
  misc_feature (14)..(348): NCBI GI NO: 7433081 NR Description: probable peroxidase (EC 1
  misc_feature (25)..(333): NCBI GI NO: 1402914 NR Description: peroxidase [Arabidopsis thaliana]
MAAATSSRRPAAALLVLAAAVVALAAEGARYPPLAPGLSFDFYKKSCPKAESIVREFLASAVRQNVGLAAALIRLHFHDCFVQGCDASILLDATPTQPSEQQSPPNLTLRPAAFKAVNDIRARLDQACGRVVSCADIVALAARESVALGGGPAYKLPLGRRDGLAPASNAAVLAALPPPTSKVPTLLSFLAKINLDVTDLVALSGGHTVGIAHCGSFDNRLFPTQDPTLNKFFAGQLYRTCPTNATVNTTANDVRTPNAFDNKYYVDLLNREGLFTSDQDLLTNATTRPIVTRFAVDQDAFFDQFVYSYVKMGQVNVLTGSQGQVRANCSARNGAAAGDSDLPWSSVVIETVADAAGSLVL

SEQ ID NO: 26113 - DNA, 1378 bp, Zea mays subsp. mays
  misc_feature (1)..(1378): Ceres Seq. ID no. 13494429
aaaacacccacttcacctccgaccacttcacctccgatcccgccaccactacccaccctttcctttgacgtcccgatggcacctgtagatctaacccccaagcagcccaggaaggcctacggcggcgacggcggcgcctactacgagtggagccccgccgacctgcccatgctcggcgtcgcctccatcggcgcagccaagctctcgctcgccgccggcgggctcgcgctccccagctactccgactcagccaaggtcgcctacgtcctccaaggcacgggcacctgcggcatcgtcctcccagaggcgacgaaggagaaggtggtggccgtgaaggagggcgacgcgctggcgctgcccttcggcgtggtgacgtggtggcacaacggccccgccgcgccgaccccgctcacggtgctcttcctcggcgacacctccaagggccacaggccggggcaattcaccaacttccagctgacgggcgcgaccggcatcttcacgggcttctccaccgagttcgtgtcgcgcgcgtgggaccttccggaggcggacgcggcggcgctggtgtcgagccagccggcctcgggcatcgtccgggcgtcctcgtccccgctgccggcgccgtcgccgcgggaccgcgagggggtggcgctcaactgcctggaggcgccgctggacgtggacatcccgggcgggggccgcgtcgtggtgctcaacacggccaacctgccgctggtcaaggaggtcgggctgggcgccgacctggtccgcatcgacgcccactccatgtgctccccgggcttctcgtgcgactcggcgtaccaggtcacctacatcgtccgcggcagcggccgcgtccaggtggtcgggcccgacggggtgcgcgtcctggagacgcgcgtcgagggcggcttcctcttcatcgtgccccgcttccacgtcgtctccaagatcgccgacgcgtccggcatggagtggttctccatcatcaccacccccaacccgatcttcagccacctggccgggaagacgtcggtgtggaaggccatctcggcggaggtgctgcaggcgtcgttcaacaccacgccggagatggagaagctgttccggtccaagaggctcgactcggagatcttcttcgctcccccatccaactgagaaaataggccggaagccccacggtggagtcctctcgttaggtcgtcgtgcttagattaggttagctagcttgcctttaataaaaagagagtggtggtcgtcggcgtcggcttcggcggtctgcttcttcttcattcagtgcgtcggtcggtttagagtctgtcacgtgtcccgtcattgaactgcagtttttgttaataaagtattgttattattaggt

SEQ ID NO: 26114 - protein, 385 aa, Zea mays subsp. mays
  peptide (1)..(385): Ceres Seq. ID no. 13494430
  misc_feature (218)..(366): Pfam Name: Pfam Description:  Cupin
  misc_feature (26)..(385): NCBI GI NO: 28950668 NR Description: legumin-like protein [Zea mays]
  misc_feature (26)..(385): NCBI GI NO: 28950670 NR Description: legumin-like protein [Zea mays]
  misc_feature (23)..(385): NCBI GI NO: 37730876 NR Description: legumin-like protein [Zea mays]
  misc_feature (29)..(385): NCBI GI NO: 34906084 NR Description: putative legumin-like protein
  misc_feature (29)..(385): NCBI GI NO: 15226926 NR Description: globulin (seed storage protein) - related
  misc_feature (29)..(385): NCBI GI NO: 21593610 NR Description: globulin-like protein [Arabidopsis thaliana]
  misc_feature (29)..(385): NCBI GI NO: 15223000 NR Description: globulin (seed storage protein) - related
  misc_feature (29)..(208): NCBI GI NO: 7595348 NR Description: globulin-like protein [Cucumis melo]
  misc_feature (226)..(385): NCBI GI NO: 29839254 NR Description: 13S globulin seed storage protein 1 precursor
  misc_feature (31)..(101): NCBI GI NO: 29839254 NR Description: 13S globulin seed storage protein 1 precursor
KTPTSPPTTSPPIPPPLPTLSFDVPMAPVDLTPKQPRKAYGGDGGAYYEWSPADLPMLGVASIGAAKLSLAAGGLALPSYSDSAKVAYVLQGTGTCGIVLPEATKEKVVAVKEGDALALPFGVVTWWHNGPAAPTPLTVLFLGDTSKGHRPGQFTNFQLTGATGIFTGFSTEFVSRAWDLPEADAAALVSSQPASGIVRASSSPLPAPSPRDREGVALNCLEAPLDVDIPGGGRVVVLNTANLPLVKEVGLGADLVRIDAHSMCSPGFSCDSAYQVTYIVRGSGRVQVVGPDGVRVLETRVEGGFLFIVPRFHVVSKIADASGMEWFSIITTPNPIFSHLAGKTSVWKAISAEVLQASFNTTPEMEKLFRSKRLDSEIFFAPPSN

SEQ ID NO: 26115 - protein, 360 aa, Zea mays subsp. mays
  peptide (1)..(360): Ceres Seq. ID no. 13494431
  misc_feature (193)..(341): Pfam Name: Pfam Description:  Cupin
  misc_feature (1)..(360): NCBI GI NO: 28950668 NR Description: legumin-like protein [Zea mays]
  misc_feature (1)..(360): NCBI GI NO: 28950670 NR Description: legumin-like protein [Zea mays]
  misc_feature (1)..(360): NCBI GI NO: 37730876 NR Description: legumin-like protein [Zea mays]
  misc_feature (4)..(360): NCBI GI NO: 34906084 NR Description: putative legumin-like protein
  misc_feature (4)..(360): NCBI GI NO: 15226926 NR Description: globulin (seed storage protein) - related
  misc_feature (4)..(360): NCBI GI NO: 21593610 NR Description: globulin-like protein [Arabidopsis thaliana]
  misc_feature (4)..(360): NCBI GI NO: 15223000 NR Description: globulin (seed storage protein) - related
  misc_feature (4)..(183): NCBI GI NO: 7595348 NR Description: globulin-like protein [Cucumis melo]
  misc_feature (201)..(360): NCBI GI NO: 29839254 NR Description: 13S globulin seed storage protein 1 precursor
  misc_feature (6)..(76): NCBI GI NO: 29839254 NR Description: 13S globulin seed storage protein 1 precursor
MAPVDLTPKQPRKAYGGDGGAYYEWSPADLPMLGVASIGAAKLSLAAGGLALPSYSDSAKVAYVLQGTGTCGIVLPEATKEKVVAVKEGDALALPFGVVTWWHNGPAAPTPLTVLFLGDTSKGHRPGQFTNFQLTGATGIFTGFSTEFVSRAWDLPEADAAALVSSQPASGIVRASSSPLPAPSPRDREGVALNCLEAPLDVDIPGGGRVVVLNTANLPLVKEVGLGADLVRIDAHSMCSPGFSCDSAYQVTYIVRGSGRVQVVGPDGVRVLETRVEGGFLFIVPRFHVVSKIADASGMEWFSIITTPNPIFSHLAGKTSVWKAISAEVLQASFNTTPEMEKLFRSKRLDSEIFFAPPSN

SEQ ID NO: 26116 - protein, 329 aa, Zea mays subsp. mays
  peptide (1)..(329): Ceres Seq. ID no. 13494432
  misc_feature (162)..(310): Pfam Name: Pfam Description:  Cupin
  misc_feature (1)..(329): NCBI GI NO: 28950668 NR Description: legumin-like protein [Zea mays]
  misc_feature (1)..(329): NCBI GI NO: 28950670 NR Description: legumin-like protein [Zea mays]
  misc_feature (1)..(329): NCBI GI NO: 37730876 NR Description: legumin-like protein [Zea mays]
  misc_feature (1)..(329): NCBI GI NO: 34906084 NR Description: putative legumin-like protein
  misc_feature (1)..(329): NCBI GI NO: 15226926 NR Description: globulin (seed storage protein) - related
  misc_feature (1)..(329): NCBI GI NO: 21593610 NR Description: globulin-like protein [Arabidopsis thaliana]
  misc_feature (1)..(329): NCBI GI NO: 15223000 NR Description: globulin (seed storage protein) - related
  misc_feature (1)..(152): NCBI GI NO: 7595348 NR Description: globulin-like protein [Cucumis melo]
  misc_feature (170)..(329): NCBI GI NO: 29839254 NR Description: 13S globulin seed storage protein 1 precursor
  misc_feature (1)..(45): NCBI GI NO: 29839254 NR Description: 13S globulin seed storage protein 1 precursor
MLGVASIGAAKLSLAAGGLALPSYSDSAKVAYVLQGTGTCGIVLPEATKEKVVAVKEGDALALPFGVVTWWHNGPAAPTPLTVLFLGDTSKGHRPGQFTNFQLTGATGIFTGFSTEFVSRAWDLPEADAAALVSSQPASGIVRASSSPLPAPSPRDREGVALNCLEAPLDVDIPGGGRVVVLNTANLPLVKEVGLGADLVRIDAHSMCSPGFSCDSAYQVTYIVRGSGRVQVVGPDGVRVLETRVEGGFLFIVPRFHVVSKIADASGMEWFSIITTPNPIFSHLAGKTSVWKAISAEVLQASFNTTPEMEKLFRSKRLDSEIFFAPPSN

SEQ ID NO: 26117 - DNA, 1597 bp, Zea mays subsp. mays
  misc_feature (1)..(1597): Ceres Seq. ID no. 12566728
gcacgagaccattacctagaacatcctaatcgaaaaggctcgtcggcaacgctagggtttttggctactccgcctccgctctcccccctgctgcgcgctactcgcccgatctcgcggtgctggtagcggtgaaaatatctgagatcgagtgaagctagcttttcatcgatatggcgcttgtactgcatgctggcagtagtaacaaaaatgcattcaaaacactaattgccgcggattacagcggcatcaaggttgagttggtaaaagactttcaaatgggggtttccaacaaaacaccagagttcctcaagatgaaccctattgggaaggttcctgtcctggagacacctgatggtcctgtctttgagagcaatgcaatagcaagatatgttactcgcttgaaggctaacaacccactttacggatcttcactgattgattatgcccatattgagcagtggatggactttgctgcgacagaggttgatgccagcattggaaagtggttgtacccacgtatggggttttatccctatgctgctgtgacagaagaatcagccattgctgctttgaagagagcattcggttccctgaacacccatcttgcatcaaacacattccttgttgggcattcagtgacacttgcggatattgtgctgacatgcaatctttatatgggctttagccgtatcttgactaagagttttacctcagagttccctcatattgagaggtacttctggaccatggttaaccagccaaacttcaaaaaggtcattggtgacgtgaagcaggcagaagctgtgccacttcttccaaagaagattgctccggccaaagagcagaagcctaaggaagccaaaaaggaggccccgaagcctaaggaagctgagaaaccagcagaggaagaggaggctccaaagcctaagccaaagaatccccttgatttgcttcctccgagcaagttgattcttgacgattggaagaggctgtattctaacacgaaaaccaacttccgtgaggttgctattaaaggtttctgggacatgtatgacccagagggctactccctgtggttctgtgactacaagtacaatgacgagaacacagtgtcgtttgtgactatgaacaaggttggtggcttcctgcagcggatggatctgttccgcaaatacgcctttggcaagatgcttgtggttggctctgagccccctttcaaggtcaaggggctctggctcttccgtggccccgaaatccccaagtttgtcatggatgaggtctatgacatggagctctatgagtggaccaaggtcgacctctctgatgaggcccagaaggagcgggtcaatgccatgatcgaggaccaggagccttttgagggcgaggccttgctagatgcaaaatgcttcaagtgagcctcatctctttggagtgctgctcaggaaagagttgtttaggtttttgggtctaattctaaaacagctatgaatgttagttttgatctggggttattttctgtgctgtgttgagacttttggtcatggtaagggaatcggggaaggttttaggcgcgtgcaatattatggattatcgcatt

SEQ ID NO: 26118 - protein, 414 aa, Zea mays subsp. mays
  peptide (1)..(414): Ceres Seq. ID no. 12566729
  misc_feature (253)..(361): Pfam Name: Pfam Description:  Elongation factor 1 gamma, conserved domain
  misc_feature (1)..(414): NCBI GI NO: 13626515 NR Description: Elongation factor 1-gamma
  misc_feature (11)..(414): NCBI GI NO: 29367403 NR Description: elongation factor 1 gamma-like protein
  misc_feature (4)..(414): NCBI GI NO: 29367381 NR Description: elongation factor 1 gamma-like protein
  misc_feature (1)..(414): NCBI GI NO: 13626392 NR Description: Elongation factor 1-gamma
  misc_feature (1)..(414): NCBI GI NO: 14334818 NR Description: putative elongation factor 1B gamma
  misc_feature (1)..(414): NCBI GI NO: 15223649 NR Description: elongation factor 1B-gamma, putative
  misc_feature (3)..(414): NCBI GI NO: 18958499 NR Description: elongation factor 1-gamma [Glycine max]
  misc_feature (1)..(414): NCBI GI NO: 18391048 NR Description: elongation factor 1B-gamma, putative
  misc_feature (70)..(414): NCBI GI NO: 19423960 NR Description: unknown protein [Arabidopsis thaliana]
  misc_feature (5)..(249): NCBI GI NO: 15528539 NR Description: elongation factor-1 gamma [Carassius auratus]
MALVLHAGSSNKNAFKTLIAADYSGIKVELVKDFQMGVSNKTPEFLKMNPIGKVPVLETPDGPVFESNAIARYVTRLKANNPLYGSSLIDYAHIEQWMDFAATEVDASIGKWLYPRMGFYPYAAVTEESAIAALKRAFGSLNTHLASNTFLVGHSVTLADIVLTCNLYMGFSRILTKSFTSEFPHIERYFWTMVNQPNFKKVIGDVKQAEAVPLLPKKIAPAKEQKPKEAKKEAPKPKEAEKPAEEEEAPKPKPKNPLDLLPPSKLILDDWKRLYSNTKTNFREVAIKGFWDMYDPEGYSLWFCDYKYNDENTVSFVTMNKVGGFLQRMDLFRKYAFGKMLVVGSEPPFKVKGLWLFRGPEIPKFVMDEVYDMELYEWTKVDLSDEAQKERVNAMIEDQEPFEGEALLDAKCFK

SEQ ID NO: 26119 - protein, 379 aa, Zea mays subsp. mays
  peptide (1)..(379): Ceres Seq. ID no. 12566730
  misc_feature (218)..(326): Pfam Name: Pfam Description:  Elongation factor 1 gamma, conserved domain
  misc_feature (1)..(379): NCBI GI NO: 13626515 NR Description: Elongation factor 1-gamma
  misc_feature (1)..(379): NCBI GI NO: 29367403 NR Description: elongation factor 1 gamma-like protein
  misc_feature (1)..(379): NCBI GI NO: 29367381 NR Description: elongation factor 1 gamma-like protein
  misc_feature (1)..(379): NCBI GI NO: 13626392 NR Description: Elongation factor 1-gamma
  misc_feature (1)..(379): NCBI GI NO: 14334818 NR Description: putative elongation factor 1B gamma
  misc_feature (1)..(379): NCBI GI NO: 15223649 NR Description: elongation factor 1B-gamma, putative
  misc_feature (1)..(379): NCBI GI NO: 18958499 NR Description: elongation factor 1-gamma [Glycine max]
  misc_feature (1)..(379): NCBI GI NO: 18391048 NR Description: elongation factor 1B-gamma, putative
  misc_feature (35)..(379): NCBI GI NO: 19423960 NR Description: unknown protein [Arabidopsis thaliana]
  misc_feature (1)..(214): NCBI GI NO: 15528539 NR Description: elongation factor-1 gamma [Carassius auratus]
MGVSNKTPEFLKMNPIGKVPVLETPDGPVFESNAIARYVTRLKANNPLYGSSLIDYAHIEQWMDFAATEVDASIGKWLYPRMGFYPYAAVTEESAIAALKRAFGSLNTHLASNTFLVGHSVTLADIVLTCNLYMGFSRILTKSFTSEFPHIERYFWTMVNQPNFKKVIGDVKQAEAVPLLPKKIAPAKEQKPKEAKKEAPKPKEAEKPAEEEEAPKPKPKNPLDLLPPSKLILDDWKRLYSNTKTNFREVAIKGFWDMYDPEGYSLWFCDYKYNDENTVSFVTMNKVGGFLQRMDLFRKYAFGKMLVVGSEPPFKVKGLWLFRGPEIPKFVMDEVYDMELYEWTKVDLSDEAQKERVNAMIEDQEPFEGEALLDAKCFK

SEQ ID NO: 26120 - protein, 367 aa, Zea mays subsp. mays
  peptide (1)..(367): Ceres Seq. ID no. 12566731
  misc_feature (206)..(314): Pfam Name: Pfam Description:  Elongation factor 1 gamma, conserved domain
  misc_feature (1)..(367): NCBI GI NO: 13626515 NR Description: Elongation factor 1-gamma
  misc_feature (1)..(367): NCBI GI NO: 29367403 NR Description: elongation factor 1 gamma-like protein
  misc_feature (1)..(367): NCBI GI NO: 29367381 NR Description: elongation factor 1 gamma-like protein
  misc_feature (1)..(367): NCBI GI NO: 13626392 NR Description: Elongation factor 1-gamma
  misc_feature (1)..(367): NCBI GI NO: 14334818 NR Description: putative elongation factor 1B gamma
  misc_feature (1)..(367): NCBI GI NO: 15223649 NR Description: elongation factor 1B-gamma, putative
  misc_feature (1)..(367): NCBI GI NO: 18958499 NR Description: elongation factor 1-gamma [Glycine max]
  misc_feature (1)..(367): NCBI GI NO: 18391048 NR Description: elongation factor 1B-gamma, putative
  misc_feature (23)..(367): NCBI GI NO: 19423960 NR Description: unknown protein [Arabidopsis thaliana]
  misc_feature (1)..(202): NCBI GI NO: 15528539 NR Description: elongation factor-1 gamma [Carassius auratus]
MNPIGKVPVLETPDGPVFESNAIARYVTRLKANNPLYGSSLIDYAHIEQWMDFAATEVDASIGKWLYPRMGFYPYAAVTEESAIAALKRAFGSLNTHLASNTFLVGHSVTLADIVLTCNLYMGFSRILTKSFTSEFPHIERYFWTMVNQPNFKKVIGDVKQAEAVPLLPKKIAPAKEQKPKEAKKEAPKPKEAEKPAEEEEAPKPKPKNPLDLLPPSKLILDDWKRLYSNTKTNFREVAIKGFWDMYDPEGYSLWFCDYKYNDENTVSFVTMNKVGGFLQRMDLFRKYAFGKMLVVGSEPPFKVKGLWLFRGPEIPKFVMDEVYDMELYEWTKVDLSDEAQKERVNAMIEDQEPFEGEALLDAKCFK

SEQ ID NO: 26121 - DNA, 982 bp, Zea mays subsp. mays
  misc_feature (1)..(982): Ceres Seq. ID no. 12566158
gcacgagaccattacctagaacatcctaatcgaaaaaaaaacgcgggacgcggattgatgatatcggtcgccgacgagcggggccggagcactctctgcttctccccctacttcccctacgtaccaggaagctaccactcccccagagtgaaggaagagagagctctccgcctctctcctccgccttagagcgacgtcgctgccggagctcgatacctatgggtggcttcgggacctcgcgccctgcctccgtcgccctctgcgccttcctcaccttcctcaacctcttcgccgtccttctcgccgtcggcgccgagcgccgccgcagcaccgggaaggtgatgccggacgagtacgacgagcggtcctactgcctctacgacactgacgcctccacggtgtacggcgtctccgctttcttcgtgctcctgctccagcaggccattgtcaacgtcgccacgtggtgcctctgcttcggacccgtgctctcctcccgcggctgtgccgtaacggcattcgtcctctcctggataacattcctcgtcgcagaagcttgtctcataggaggatcggtgaggaatgcaaagcacaccaagtatttaggctactacatgaagcatgatttggtgtcgtgcgccgcccttcgcaagggagtctttgcagcagctgctgcaatgatgatcatcaacctcctggcgtccctggtgtactactggagttactcaaaagctgcgacgggtgggttcatgaagcaccaaaatgaggttggtgtgggcatgacggattacggccttgacaagggtgtttctgggccctgagtgagatggaatcttattggcctctgtgcggtattaatactatcgtcgaaatgtatgtggatgaagttgagttgtttctctacggtgtgctgtgaatgatataccataactgtacaatggcatgggtggtgatattgtagggttcgtgctgtgaaaaatgcggt

SEQ ID NO: 26122 - protein, 199 aa, Zea mays subsp. mays
  peptide (1)..(199): Ceres Seq. ID no. 12566159
  misc_feature (11)..(188): NCBI GI NO: 18408976 NR Description: expressed protein; protein id: At1g68220
  misc_feature (10)..(186): NCBI GI NO: 34394069 NR Description: unknown protein
  misc_feature (10)..(190): NCBI GI NO: 38016521 NR Description: fiber protein Fb34 [Gossypium barbadense]
  misc_feature (10)..(174): NCBI GI NO: 18404242 NR Description: expressed protein; protein id: At1g52910
  misc_feature (10)..(171): NCBI GI NO: 18400781 NR Description: expressed protein; protein id: At3g15480
  misc_feature (10)..(190): NCBI GI NO: 18391509 NR Description: expressed protein; protein id: At1g13380
  misc_feature (10)..(172): NCBI GI NO: 18416991 NR Description: Expressed protein; protein id: At4g27435
  misc_feature (10)..(188): NCBI GI NO: 38344206 NR Description: OSJNBa0064G10.22
  misc_feature (10)..(171): NCBI GI NO: 18407003 NR Description: Expressed protein; protein id: At1g61065
  misc_feature (10)..(170): NCBI GI NO: 21554630 NR Description: unknown [Arabidopsis thaliana]
MGGFGTSRPASVALCAFLTFLNLFAVLLAVGAERRRSTGKVMPDEYDERSYCLYDTDASTVYGVSAFFVLLLQQAIVNVATWCLCFGPVLSSRGCAVTAFVLSWITFLVAEACLIGGSVRNAKHTKYLGYYMKHDLVSCAALRKGVFAAAAAMMIINLLASLVYYWSYSKAATGGFMKHQNEVGVGMTDYGLDKGVSGP

SEQ ID NO: 26123 - protein, 158 aa, Zea mays subsp. mays
  peptide (1)..(158): Ceres Seq. ID no. 12566160
  misc_feature (1)..(147): NCBI GI NO: 18408976 NR Description: expressed protein; protein id: At1g68220
  misc_feature (1)..(145): NCBI GI NO: 34394069 NR Description: unknown protein
  misc_feature (1)..(149): NCBI GI NO: 38016521 NR Description: fiber protein Fb34 [Gossypium barbadense]
  misc_feature (1)..(133): NCBI GI NO: 18404242 NR Description: expressed protein; protein id: At1g52910
  misc_feature (1)..(130): NCBI GI NO: 18400781 NR Description: expressed protein; protein id: At3g15480
  misc_feature (1)..(149): NCBI GI NO: 18391509 NR Description: expressed protein; protein id: At1g13380
  misc_feature (1)..(131): NCBI GI NO: 18416991 NR Description: Expressed protein; protein id: At4g27435
  misc_feature (1)..(147): NCBI GI NO: 38344206 NR Description: OSJNBa0064G10.22
  misc_feature (1)..(130): NCBI GI NO: 18407003 NR Description: Expressed protein; protein id: At1g61065
  misc_feature (1)..(129): NCBI GI NO: 21554630 NR Description: unknown [Arabidopsis thaliana]
MPDEYDERSYCLYDTDASTVYGVSAFFVLLLQQAIVNVATWCLCFGPVLSSRGCAVTAFVLSWITFLVAEACLIGGSVRNAKHTKYLGYYMKHDLVSCAALRKGVFAAAAAMMIINLLASLVYYWSYSKAATGGFMKHQNEVGVGMTDYGLDKGVSGP

SEQ ID NO: 26124 - DNA, 1412 bp, Zea mays subsp. mays
  misc_feature (1)..(1412): Ceres Seq. ID no. 12566951
atctctcatttcccttgcaactggaagcgagctctctgcctcgtacgtcgtcggcgctgcgggagcgtgcattgttgagcgagtgcggccaagcaacgcgggctcgaggagatgatgctgagcgggcacggcggcgagaggcgcctgttcacggcgtcgcagtggcaggagctcgagcaccaggcgctcatcttcaagtacatggcctcgggcgcgcccgtgccgcacgacctcgtcctaccgctccgcctcgccaccggcgtcgacaccgcgccctccctcgccttcccgccgcagccttcgccgtcgctggcgtactggggctgctacggcgcgggggcgccgttcggccgcaaggcggcggaggacacggagccggggcggtgccggcggacggacggcaagaagtggcggtgctccagggaggcccacggcgactccaagtactgcgagaagcacattcaccgcgggaagagccgttcaagaaagcctgtggaagtgacctcctcccccgccgccggcgccgctgcggcgtaccgaccgtccgcgatctccaccatctcgccgccccgcgcggccgacgcgccgccgccgagcctcgcctacccgcagcagcatctcctccacggcgcctcctcctccgcagcagcccgcgcccccgctggcgctctccagctccacctcgacgcgagcctgcacgcggcggcggcggcggcgtcgccatcgccgccgccgtcctaccacaggtacgcccactacacaccgccagcgtcgtcgctcttcccgggcggcggctacggctacgactacgactacgggcagtccaaggagctccgggacgcggcggagctcaggcgacggcacttccacgcgctcggggccgacctgagcctcgacaagccgctgcccgagcccgacaccggctccgacgagaagcagcccctgcggcgtttcctcgacgagtggccgcgggagagcggcgacatggcggcggacgacgccacgcagctttccatctccatccccgcggcctcgccctccgacctcgctgctgcctccgccgccgccgcgcgattccacaacggggagtgatcggtccatctcctagctgcagccctgcaacatcgtggattgaccgctggctgcaactgcaagcctgcaacagcgagcagtaagccagtgacgtggatgcatctcgtagcggcaaaccctgcttctgcctctgcgctgcgcgggacggctcaggctgaggctcaaaaaagtctgaaccgagtcattgagtcaagcagtactagggactctatgacttggtcttttgttcttttgtagcagtacgttactcgtaccaaatgttgtttattttttgtgtgacatttttcatttcttccggttccagtctgtgatgcaagccc

SEQ ID NO: 26125 - protein, 390 aa, Zea mays subsp. mays
  peptide (1)..(390): Ceres Seq. ID no. 12566952
LSFPLQLEASSLPRTSSALRERALLSECGQATRARGDDAERARRREAPVHGVAVAGARAPGAHLQVHGLGRARAARPRPTAPPRHRRRHRALPRLPAAAFAVAGVLGLLRRGGAVRPQGGGGHGAGAVPADGRQEVAVLQGGPRRLQVLREAHSPREEPFKKACGSDLLPRRRRRCGVPTVRDLHHLAAPRGRRAAAEPRLPAAASPPRRLLLRSSPRPRWRSPAPPRREPARGGGGGVAIAAAVLPQVRPLHTASVVALPGRRLRLRLRLRAVQGAPGRGGAQATALPRARGRPEPRQAAARARHRLRREAAPAAFPRRVAAGERRHGGGRRHAAFHLHPRGLALRPRCCLRRRRAIPQRGVIGPSPSCSPATSWIDRWLQLQACNSEQ

SEQ ID NO: 26126 - protein, 326 aa, Zea mays subsp. mays
  peptide (1)..(326): Ceres Seq. ID no. 12566953
  misc_feature (1)..(326): NCBI GI NO: 18390099 NR Description: putative growth-regulating factor 1
  misc_feature (1)..(215): NCBI GI NO: 6573149 NR Description: growth-regulating factor 1 [Oryza sativa]
  misc_feature (3)..(193): NCBI GI NO: 34897962 NR Description: putative growth-regulating factor 1
  misc_feature (1)..(142): NCBI GI NO: 11994367 NR Description: gb|AAF17567
  misc_feature (1)..(142): NCBI GI NO: 30682907 NR Description: transcription activator (GRL5)
  misc_feature (1)..(318): NCBI GI NO: 28273382 NR Description: putative transcription activator
  misc_feature (13)..(213): NCBI GI NO: 38345778 NR Description: OSJNBa0083N12.16
  misc_feature (5)..(133): NCBI GI NO: 32470630 NR Description: putative growth-regulating factor
  misc_feature (5)..(133): NCBI GI NO: 32470646 NR Description: putative growth-regulating factor
  misc_feature (13)..(134): NCBI GI NO: 18396273 NR Description: expressed protein; protein id: At2g06200
MMLSGHGGERRLFTASQWQELEHQALIFKYMASGAPVPHDLVLPLRLATGVDTAPSLAFPPQPSPSLAYWGCYGAGAPFGRKAAEDTEPGRCRRTDGKKWRCSREAHGDSKYCEKHIHRGKSRSRKPVEVTSSPAAGAAAAYRPSAISTISPPRAADAPPPSLAYPQQHLLHGASSSAAARAPAGALQLHLDASLHAAAAAASPSPPPSYHRYAHYTPPASSLFPGGGYGYDYDYGQSKELRDAAELRRRHFHALGADLSLDKPLPEPDTGSDEKQPLRRFLDEWPRESGDMAADDATQLSISIPAASPSDLAAASAAAARFHNGE

SEQ ID NO: 26127 - protein, 325 aa, Zea mays subsp. mays
  peptide (1)..(325): Ceres Seq. ID no. 12566954
  misc_feature (1)..(325): NCBI GI NO: 18390099 NR Description: putative growth-regulating factor 1
  misc_feature (1)..(214): NCBI GI NO: 6573149 NR Description: growth-regulating factor 1 [Oryza sativa]
  misc_feature (2)..(192): NCBI GI NO: 34897962 NR Description: putative growth-regulating factor 1
  misc_feature (1)..(141): NCBI GI NO: 11994367 NR Description: gb|AAF17567
  misc_feature (1)..(141): NCBI GI NO: 30682907 NR Description: transcription activator (GRL5)
  misc_feature (1)..(317): NCBI GI NO: 28273382 NR Description: putative transcription activator
  misc_feature (12)..(212): NCBI GI NO: 38345778 NR Description: OSJNBa0083N12.16
  misc_feature (4)..(132): NCBI GI NO: 32470630 NR Description: putative growth-regulating factor
  misc_feature (4)..(132): NCBI GI NO: 32470646 NR Description: putative growth-regulating factor
  misc_feature (12)..(133): NCBI GI NO: 18396273 NR Description: expressed protein; protein id: At2g06200
MLSGHGGERRLFTASQWQELEHQALIFKYMASGAPVPHDLVLPLRLATGVDTAPSLAFPPQPSPSLAYWGCYGAGAPFGRKAAEDTEPGRCRRTDGKKWRCSREAHGDSKYCEKHIHRGKSRSRKPVEVTSSPAAGAAAAYRPSAISTISPPRAADAPPPSLAYPQQHLLHGASSSAAARAPAGALQLHLDASLHAAAAAASPSPPPSYHRYAHYTPPASSLFPGGGYGYDYDYGQSKELRDAAELRRRHFHALGADLSLDKPLPEPDTGSDEKQPLRRFLDEWPRESGDMAADDATQLSISIPAASPSDLAAASAAAARFHNGE

SEQ ID NO: 26128 - DNA, 1398 bp, Zea mays subsp. mays; identical to SEQ ID NO: 24541
  misc_feature (1)..(1398): Ceres Seq. ID no. 13498659

SEQ ID NO: 26129 - protein, 71 aa, Zea mays subsp. mays; identical to SEQ ID NO: 24542
  peptide (1)..(71): Ceres Seq. ID no. 13498660
  misc_feature (1)..(54): Pfam Name: Pfam Description:  Universal stress protein family
  misc_feature (1)..(62): NCBI GI NO: 34910112 NR Description: B1100D10.31
  misc_feature (1)..(58): NCBI GI NO: 28971968 NR Description: OSJNBb0041B22.10
  misc_feature (1)..(58): NCBI GI NO: 33146953 NR Description: CHP-rich zinc finger protein-like
  misc_feature (1)..(58): NCBI GI NO: 30682187 NR Description: expressed protein [Arabidopsis thaliana]
  misc_feature (1)..(58): NCBI GI NO: 25402657 NR Description: protein T23J18.3 [imported] - Arabidopsis thaliana
  misc_feature (1)..(58): NCBI GI NO: 7486798 NR Description: hypothetical protein M4I22
  misc_feature (1)..(58): NCBI GI NO: 18416966 NR Description: expressed protein [Arabidopsis thaliana]
  misc_feature (1)..(58): NCBI GI NO: 8885586 NR Description: gene_id:F24B18
  misc_feature (1)..(58): NCBI GI NO: 18423628 NR Description: expressed protein [Arabidopsis thaliana]
  misc_feature (1)..(57): NCBI GI NO: 15232490 NR Description: CHP-rich zinc finger protein, putative

SEQ ID NO: 26130 - protein, 59 aa, Zea mays subsp. mays; identical to SEQ ID NO: 24543
  peptide (1)..(59): Ceres Seq. ID no. 13498661

SEQ ID NO: 26131 - protein, 55 aa, Zea mays subsp. mays; identical to SEQ ID NO: 24544
  peptide (1)..(55): Ceres Seq. ID no. 13498662
  misc_feature (1)..(46): NCBI GI NO: 34910112 NR Description: B1100D10.31
  misc_feature (1)..(42): NCBI GI NO: 28971968 NR Description: OSJNBb0041B22.10
  misc_feature (1)..(42): NCBI GI NO: 33146953 NR Description: CHP-rich zinc finger protein-like
  misc_feature (1)..(42): NCBI GI NO: 30682187 NR Description: expressed protein [Arabidopsis thaliana]
  misc_feature (1)..(42): NCBI GI NO: 25402657 NR Description: protein T23J18.3 [imported] - Arabidopsis thaliana
  misc_feature (1)..(42): NCBI GI NO: 7486798 NR Description: hypothetical protein M4I22
  misc_feature (1)..(42): NCBI GI NO: 18416966 NR Description: expressed protein [Arabidopsis thaliana]
  misc_feature (1)..(42): NCBI GI NO: 8885586 NR Description: gene_id:F24B18
  misc_feature (1)..(42): NCBI GI NO: 18423628 NR Description: expressed protein [Arabidopsis thaliana]
  misc_feature (1)..(41): NCBI GI NO: 15232490 NR Description: CHP-rich zinc finger protein, putative

SEQ ID NO: 26132 - DNA, 1060 bp, Zea mays subsp. mays
  misc_feature (1)..(1060): Ceres Seq. ID no. 12566522
ataacaaccccggcctgccatgtgccacaaccgtagcctgtagcttcatccgttgcgctgcgcccggttccctcgcgcggtgcggaatttaacatggccgtgccggaggtggtggtcgacggcgtcgtcttcccgccggtggcccgcccgccgggctccgccggctcgcacttcctcggcggcgcaggcgtgcgaggcgtcgagatcggaggcaacttcatcaagttcacggccatcggcgtgtacctggaggacgcggccgtgcccgcgctggccaagaagtggggcggcaagacggccgacgagctcgcctccgacgccgccttcttccgcgacgtcgtcacgggcgacttcgagaagttcacgagggtgacgatgatcctcccgctgacgggcgagcagtacgcggagaaagtgacggagaactgcgtggcgttctggaaggccgccggcctgtacacggacgccgagggcgtcgccgtggagaagttcagggaggtgttcaagccagagactttcgcgccgggcgcctccatcctcttcacgcactcgcccgccggagtcctcaccgtcgccttctccaaggactcgtcggtgccagcggccggcggcgtggcgatcgagaacaagcgcctctgcgaggccgtgctggagtccatcatcggggagcgcggcgtgtcgccggccgcgaagctgagcctcgccgcgagggtgtcggagctcctcgccaaggagaccgccgcggccgccgacgcgccgcaggcggagcccgtctccatcaccgcctgaggcgaggagcgggcgggcgggcgagcgaacgaaccgcgaggagaaagaaagcaaccagacggttgggcggcacggcgtctcacacctgccgcctgcgcttgcgtgctccggagtccggactggagagacgccgcgcgggtgcagtgcatccgtcgcgtcttgtctgtccgcgctatggcgtcgtgttcctgcctttctggtcgcgtagttgtcttgtgttcgctgttggtcgttctgggtaacatttgaataaaacaagcggatttgttgc

SEQ ID NO: 26133 - protein, 231 aa, Zea mays subsp. mays
  peptide (1)..(231): Ceres Seq. ID no. 12566523
  misc_feature (11)..(212): Pfam Name: Pfam Description:  Chalcone-flavanone isomerase
  misc_feature (11)..(231): NCBI GI NO: 729103 NR Description: CHALCONE--FLAVONONE ISOMERASE (CHALCONE ISOMERASE)
  misc_feature (1)..(230): NCBI GI NO: 20152986 NR Description: chalcone isomerase
  misc_feature (2)..(231): NCBI GI NO: 29124145 NR Description: chalcone isomerase
  misc_feature (2)..(231): NCBI GI NO: 20152984 NR Description: chalcone isomerase
  misc_feature (2)..(228): NCBI GI NO: 1705761 NR Description: CHALCONE--FLAVONONE ISOMERASE (CHALCONE ISOMERASE)
  misc_feature (1)..(228): NCBI GI NO: 5921722 NR Description: Chalcone--flavonone isomerase (Chalcone isomerase)
  misc_feature (1)..(231): NCBI GI NO: 68481 NR Description: chalcone isomerase (EC 5
  misc_feature (1)..(231): NCBI GI NO: 116136 NR Description: CHALCONE--FLAVONONE ISOMERASE A
  misc_feature (1)..(231): NCBI GI NO: 228617 NR Description: chalcone flavanone isomerase
  misc_feature (2)..(211): NCBI GI NO: 4126399 NR Description: chalcone isomerase [Citrus sinensis]
MAVPEVVVDGVVFPPVARPPGSAGSHFLGGAGVRGVEIGGNFIKFTAIGVYLEDAAVPALAKKWGGKTADELASDAAFFRDVVTGDFEKFTRVTMILPLTGEQYAEKVTENCVAFWKAAGLYTDAEGVAVEKFREVFKPETFAPGASILFTHSPAGVLTVAFSKDSSVPAAGGVAIENKRLCEAVLESIIGERGVSPAAKLSLAARVSELLAKETAAAADAPQAEPVSITA

SEQ ID NO: 26134 - protein, 137 aa, Zea mays subsp. mays
  peptide (1)..(137): Ceres Seq. ID no. 12566524
  misc_feature (1)..(118): Pfam Name: Pfam Description:  Chalcone-flavanone isomerase
  misc_feature (1)..(137): NCBI GI NO: 729103 NR Description: CHALCONE--FLAVONONE ISOMERASE (CHALCONE ISOMERASE)
  misc_feature (1)..(136): NCBI GI NO: 20152986 NR Description: chalcone isomerase
  misc_feature (1)..(137): NCBI GI NO: 29124145 NR Description: chalcone isomerase
  misc_feature (1)..(137): NCBI GI NO: 20152984 NR Description: chalcone isomerase
  misc_feature (1)..(134): NCBI GI NO: 1705761 NR Description: CHALCONE--FLAVONONE ISOMERASE (CHALCONE ISOMERASE)
  misc_feature (1)..(134): NCBI GI NO: 5921722 NR Description: Chalcone--flavonone isomerase (Chalcone isomerase)
  misc_feature (1)..(137): NCBI GI NO: 68481 NR Description: chalcone isomerase (EC 5
  misc_feature (1)..(137): NCBI GI NO: 116136 NR Description: CHALCONE--FLAVONONE ISOMERASE A
  misc_feature (1)..(137): NCBI GI NO: 228617 NR Description: chalcone flavanone isomerase
  misc_feature (1)..(117): NCBI GI NO: 4126399 NR Description: chalcone isomerase [Citrus sinensis]
MILPLTGEQYAEKVTENCVAFWKAAGLYTDAEGVAVEKFREVFKPETFAPGASILFTHSPAGVLTVAFSKDSSVPAAGGVAIENKRLCEAVLESIIGERGVSPAAKLSLAARVSELLAKETAAAADAPQAEPVSITA

SEQ ID NO: 26135 - DNA, 1076 bp, Zea mays subsp. mays
  misc_feature (1)..(1076): Ceres Seq. ID no. 12337188
caaaaccccattccgcaatgagacccgcagccgcagcagccaccgctaccaccgccgcgctccgtctccgcgccgcctccctctcgccttctctcgctgcctccctctcgccttctctcgccgccctcctttctcatcgtagatcctccctcattcttcctccgctgcgccgcatctgctcccttgcgcctccccactcctccgccgcccccaattcgcagcccccgccgcagttgctctctcccatcatggacgcgcagttcgagctcttccgcgcgcagctcgacgagtcttccaccctccgcgaccgcatccgtgccgtcgtcgccgagattgagtccgcctcccgcgtcgccaccgccgcgctcctcctagtccaccagcccgtccccctggcagatgtgcttgtgaaagccaaggcgcaggtagaggtgatcaaggggttgtacgcgcgcctggcggaagtcctcaaggaatgccctgggcagtactacaggtaccatgctgattggaggactgagacacatatggtagtgtcgatgcttgcattcatgcactggctggagacaggtggcctactcatgcatgctgaagcccaggagaagctagggttgtgctctggggagtttggccttgatgttgaggactacctgacaggactgtgcttcatgtccaatgaatttcctagatttgtagtaaatcgcgtcactgctggcgactatgactgtcctaaaagggttttgggcttcttgaccgatcttcatgcttcgtttaggatgctgaatctgcgcaatgacttcttgcgtaagaaatttgatgggatgaagtatgatttgaggagggtggaagaggtctactatgatgtgaagatccgtggacttgtacctgcgtagttgaaacaagagacttagaatccttggtaatgttagattgttaacatactgtggtttggcttttgtcatccataacgtgttcatctagctaaaatgtgaaatatattctgttggagcgtatgtgttatggactgaacttgagggcactcgaatgaccttgctcatttcttttactgtggcgcc

SEQ ID NO: 26136 - protein, 296 aa, Zea mays subsp. mays
  peptide (1)..(296): Ceres Seq. ID no. 12337189
  misc_feature (98)..(293): Pfam Name: Pfam Description:  Translin family
  misc_feature (6)..(296): NCBI GI NO: 37534782 NR Description: translin-like protein
  misc_feature (79)..(227): NCBI GI NO: 25408524 NR Description: translin-like protein
  misc_feature (211)..(294): NCBI GI NO: 25408524 NR Description: translin-like protein
  misc_feature (79)..(294): NCBI GI NO: 18404301 NR Description: translin-like protein; protein id: At2g37020
  misc_feature (75)..(293): NCBI GI NO: 31213187 NR Description: ENSANGP00000021806 [Anopheles gambiae]
  misc_feature (87)..(293): NCBI GI NO: 20129859 NR Description: CG11761-PA [Drosophila melanogaster]
  misc_feature (82)..(293): NCBI GI NO: 7648677 NR Description: translin [Xenopus laevis]
  misc_feature (83)..(293): NCBI GI NO: 6136058 NR Description: Translin
  misc_feature (76)..(292): NCBI GI NO: 21730459 NR Description: Chain A
  misc_feature (100)..(292): NCBI GI NO: 6755899 NR Description: translin; testis/brain-RNA-binding protein
KPHSAMRPAAAAATATTAALRLRAASLSPSLAASLSPSLAALLSHRRSSLILPPLRRICSLAPPHSSAAPNSQPPPQLLSPIMDAQFELFRAQLDESSTLRDRIRAVVAEIESASRVATAALLLVHQPVPLADVLVKAKAQVEVIKGLYARLAEVLKECPGQYYRYHADWRTETHMVVSMLAFMHWLETGGLLMHAEAQEKLGLCSGEFGLDVEDYLTGLCFMSNEFPRFVVNRVTAGDYDCPKRVLGFLTDLHASFRMLNLRNDFLRKKFDGMKYDLRRVEEVYYDVKIRGLVPA

SEQ ID NO: 26137 - protein, 291 aa, Zea mays subsp. mays
  peptide (1)..(291): Ceres Seq. ID no. 12337190
  misc_feature (93)..(288): Pfam Name: Pfam Description:  Translin family
  misc_feature (1)..(291): NCBI GI NO: 37534782 NR Description: translin-like protein
  misc_feature (74)..(222): NCBI GI NO: 25408524 NR Description: translin-like protein
  misc_feature (206)..(289): NCBI GI NO: 25408524 NR Description: translin-like protein
  misc_feature (74)..(289): NCBI GI NO: 18404301 NR Description: translin-like protein; protein id: At2g37020
  misc_feature (70)..(288): NCBI GI NO: 31213187 NR Description: ENSANGP00000021806 [Anopheles gambiae]
  misc_feature (82)..(288): NCBI GI NO: 20129859 NR Description: CG11761-PA [Drosophila melanogaster]
  misc_feature (77)..(288): NCBI GI NO: 7648677 NR Description: translin [Xenopus laevis]
  misc_feature (78)..(288): NCBI GI NO: 6136058 NR Description: Translin
  misc_feature (71)..(287): NCBI GI NO: 21730459 NR Description: Chain A
  misc_feature (95)..(287): NCBI GI NO: 6755899 NR Description: translin; testis/brain-RNA-binding protein
MRPAAAAATATTAALRLRAASLSPSLAASLSPSLAALLSHRRSSLILPPLRRICSLAPPHSSAAPNSQPPPQLLSPIMDAQFELFRAQLDESSTLRDRIRAVVAEIESASRVATAALLLVHQPVPLADVLVKAKAQVEVIKGLYARLAEVLKECPGQYYRYHADWRTETHMVVSMLAFMHWLETGGLLMHAEAQEKLGLCSGEFGLDVEDYLTGLCFMSNEFPRFVVNRVTAGDYDCPKRVLGFLTDLHASFRMLNLRNDFLRKKFDGMKYDLRRVEEVYYDVKIRGLVPA

SEQ ID NO: 26138 - protein, 214 aa, Zea mays subsp. mays
  peptide (1)..(214): Ceres Seq. ID no. 12337191
  misc_feature (16)..(211): Pfam Name: Pfam Description:  Translin family
  misc_feature (1)..(214): NCBI GI NO: 37534782 NR Description: translin-like protein
  misc_feature (1)..(145): NCBI GI NO: 25408524 NR Description: translin-like protein
  misc_feature (129)..(212): NCBI GI NO: 25408524 NR Description: translin-like protein
  misc_feature (1)..(212): NCBI GI NO: 18404301 NR Description: translin-like protein; protein id: At2g37020
  misc_feature (1)..(211): NCBI GI NO: 31213187 NR Description: ENSANGP00000021806 [Anopheles gambiae]
  misc_feature (5)..(211): NCBI GI NO: 20129859 NR Description: CG11761-PA [Drosophila melanogaster]
  misc_feature (1)..(211): NCBI GI NO: 7648677 NR Description: translin [Xenopus laevis]
  misc_feature (1)..(211): NCBI GI NO: 6136058 NR Description: Translin
  misc_feature (1)..(210): NCBI GI NO: 21730459 NR Description: Chain A
  misc_feature (18)..(210): NCBI GI NO: 6755899 NR Description: translin; testis/brain-RNA-binding protein
MDAQFELFRAQLDESSTLRDRIRAVVAEIESASRVATAALLLVHQPVPLADVLVKAKAQVEVIKGLYARLAEVLKECPGQYYRYHADWRTETHMVVSMLAFMHWLETGGLLMHAEAQEKLGLCSGEFGLDVEDYLTGLCFMSNEFPRFVVNRVTAGDYDCPKRVLGFLTDLHASFRMLNLRNDFLRKKFDGMKYDLRRVEEVYYDVKIRGLVPA

SEQ ID NO: 26139 - DNA, 1943 bp, Zea mays subsp. mays
  misc_feature (1)..(1943): Ceres Seq. ID no. 12387936
ggaaaaggaaaaaaaaaaaagaaccgcgcacgcttcttcttccctcccccacaaagggaagaaaaaaaatttccgtgtacggtttcgcccggcgccgcctttggcagttgctttgcttgctcttgccctgttgagctccaaaggatctccatttcaccactcccatcgatcccactaccggtccgcatcaagcagccggcgatggggtccgcgtccgcccgcatcgccaccgccgccgtgcacctcgtcaccgcggccgccatcctcctcatgctcgcgcgaggcggcgaggccgtcagtctctggctcccgccgccgaccgccggaggagggggcttcctcggcggcgcggaccgttacctgactcgggaggagcactggatgaaccaaaccctggatcacttcaacccgacggaccatcggcaattcaaacagcggtactacgaatttctcgactactaccgagctccaaatggcccgatcttcctatacatctgtggagaatctacgtgcaatgggattggcaataactacttagctgtggtggcaaagaaatttggtgctgcattggtttctcctgagcatcgatactatggaaagagttctccttttaacagtttgacaacagaaaatctacagttcttgtcatcaaagcaggctttatttgatcttgctgttttccgccaatattatcaggaaaccttaaatgccaagtataatcgctctggggcaaacagttcttggtttgtttttggagggtcatatgctggagcactcagtgcttggttcaggttgaagtttcctcacttgacatgtggaagccttgcaagttcaggggttgttcttgctgtatacaactttaccgattttgacaaacagattgggatctctgctggtcctgaatgcaaggcagcacttcaagaaataacaggacttgttgatggacagcttcagtctggccgtaactcggttaaggagttgtttggagcgacaaagttagaaaatgatggtgacttcctctacttactggcagatgctgctgctattgcgttccaatatggtaatcctgatgtcttgtgctccccactagctgaagcaaagaagaatgggacagatttggtggaaacatttgctagttacgtgaaagattattacattggaaaatttggggcgtcagtagcatcatatgatcagcaatatttgaagaacacaactcctgctgaatcctcatatagactatggtggtaccaagtttgcagtgaggttgcatatttccaggtggcaccaaaaaacgatagtgttcgttccccaaagatcgacacgaggtaccatttggacttgtgcagaaatgttttcggcgaaggagtctaccctgatgtctttatgacaaacttatactatggaggcacaggaattgcaggttctaaaattgtttttgcaaatggatctcaagacccatggcgccacgcttctaagcagaaatcatcagacgaattgccatcatacctaattgagtgcaagaactgcggacactgcagtgatctctctggatgccctcaagctccttcaaacattgaaggtgattcatccaagtgctcacctcccgaagctctgaacaaagtaaggaaggagattgtcgatcacattgacctgtggctatcagaatgccaagagcaaggacatgacaaggagccatggctgggaagcatatggagcatagctgctatttgatcaatctgtgaagctataagcatgtgctgctagagtaaccaaggcaaatatgctttctttttcttgcagcactgtggtttatcgtttcggcaaacaatgtgggctgctgagtaagaggacatatctggtgcaccaatcttccatgtgcattagatatgttctcgctgagtaatccacctgtggcgaataaataaagcagtcagttctcagtc

SEQ ID NO: 26140 - protein, 576 aa, Zea mays subsp. mays
  peptide (1)..(576): Ceres Seq. ID no. 12387937
  misc_feature (139)..(545): Pfam Name: Pfam Description:  Serine carboxypeptidase S28
  misc_feature (139)..(574): NCBI GI NO: 37535976 NR Description: putative serine peptidase
  misc_feature (81)..(558): NCBI GI NO: 37535980 NR Description: putative serine peptidase
  misc_feature (82)..(557): NCBI GI NO: 18419800 NR Description: Expressed protein; protein id: At4g36195
  misc_feature (189)..(557): NCBI GI NO: 18419798 NR Description: putative protein; protein id: At4g36190.1
  misc_feature (114)..(232): NCBI GI NO: 18419798 NR Description: putative protein; protein id: At4g36190.1
  misc_feature (226)..(558): NCBI GI NO: 15227960 NR Description: unknown protein; protein id: At2g18080.1
  misc_feature (151)..(179): NCBI GI NO: 15227960 NR Description: unknown protein; protein id: At2g18080.1
  misc_feature (139)..(374): NCBI GI NO: 15144318 NR Description: putative serine peptidase
  misc_feature (139)..(374): NCBI GI NO: 7486037 NR Description: hypothetical protein F23E13
  misc_feature (497)..(557): NCBI GI NO: 7486037 NR Description: hypothetical protein F23E13
GKGKKKKNRARFFFPPPQREEKKFPCTVSPGAAFGSCFACSCPVELQRISISPLPSIPLPVRIKQPAMGSASARIATAAVHLVTAAAILLMLARGGEAVSLWLPPPTAGGGGFLGGADRYLTREEHWMNQTLDHFNPTDHRQFKQRYYEFLDYYRAPNGPIFLYICGESTCNGIGNNYLAVVAKKFGAALVSPEHRYYGKSSPFNSLTTENLQFLSSKQALFDLAVFRQYYQETLNAKYNRSGANSSWFVFGGSYAGALSAWFRLKFPHLTCGSLASSGVVLAVYNFTDFDKQIGISAGPECKAALQEITGLVDGQLQSGRNSVKELFGATKLENDGDFLYLLADAAAIAFQYGNPDVLCSPLAEAKKNGTDLVETFASYVKDYYIGKFGASVASYDQQYLKNTTPAESSYRLWWYQVCSEVAYFQVAPKNDSVRSPKIDTRYHLDLCRNVFGEGVYPDVFMTNLYYGGTGIAGSKIVFANGSQDPWRHASKQKSSDELPSYLIECKNCGHCSDLSGCPQAPSNIEGDSSKCSPPEALNKVRKEIVDHIDLWLSECQEQGHDKEPWLGSIWSIAAI

SEQ ID NO: 26141 - protein, 509 aa, Zea mays subsp. mays
  peptide (1)..(509): Ceres Seq. ID no. 12387938
  misc_feature (72)..(478): Pfam Name: Pfam Description:  Serine carboxypeptidase S28
  misc_feature (72)..(507): NCBI GI NO: 37535976 NR Description: putative serine peptidase
  misc_feature (14)..(491): NCBI GI NO: 37535980 NR Description: putative serine peptidase
  misc_feature (15)..(490): NCBI GI NO: 18419800 NR Description: Expressed protein; protein id: At4g36195
  misc_feature (122)..(490): NCBI GI NO: 18419798 NR Description: putative protein; protein id: At4g36190.1
  misc_feature (47)..(165): NCBI GI NO: 18419798 NR Description: putative protein; protein id: At4g36190.1
  misc_feature (159)..(491): NCBI GI NO: 15227960 NR Description: unknown protein; protein id: At2g18080.1
  misc_feature (84)..(112): NCBI GI NO: 15227960 NR Description: unknown protein; protein id: At2g18080.1
  misc_feature (72)..(307): NCBI GI NO: 15144318 NR Description: putative serine peptidase
  misc_feature (72)..(307): NCBI GI NO: 7486037 NR Description: hypothetical protein F23E13
  misc_feature (430)..(490): NCBI GI NO: 7486037 NR Description: hypothetical protein F23E13
MGSASARIATAAVHLVTAAAILLMLARGGEAVSLWLPPPTAGGGGFLGGADRYLTREEHWMNQTLDHFNPTDHRQFKQRYYEFLDYYRAPNGPIFLYICGESTCNGIGNNYLAVVAKKFGAALVSPEHRYYGKSSPFNSLTTENLQFLSSKQALFDLAVFRQYYQETLNAKYNRSGANSSWFVFGGSYAGALSAWFRLKFPHLTCGSLASSGVVLAVYNFTDFDKQIGISAGPECKAALQEITGLVDGQLQSGRNSVKELFGATKLENDGDFLYLLADAAAIAFQYGNPDVLCSPLAEAKKNGTDLVETFASYVKDYYIGKFGASVASYDQQYLKNTTPAESSYRLWWYQVCSEVAYFQVAPKNDSVRSPKIDTRYHLDLCRNVFGEGVYPDVFMTNLYYGGTGIAGSKIVFANGSQDPWRHASKQKSSDELPSYLIECKNCGHCSDLSGCPQAPSNIEGDSSKCSPPEALNKVRKEIVDHIDLWLSECQEQGHDKEPWLGSIWSIAAI

SEQ ID NO: 26142 - protein, 486 aa, Zea mays subsp. mays
  peptide (1)..(486): Ceres Seq. ID no. 12387939
  misc_feature (49)..(455): Pfam Name: Pfam Description:  Serine carboxypeptidase S28
  misc_feature (49)..(484): NCBI GI NO: 37535976 NR Description: putative serine peptidase
  misc_feature (1)..(468): NCBI GI NO: 37535980 NR Description: putative serine peptidase
  misc_feature (1)..(467): NCBI GI NO: 18419800 NR Description: Expressed protein; protein id: At4g36195
  misc_feature (99)..(467): NCBI GI NO: 18419798 NR Description: putative protein; protein id: At4g36190.1
  misc_feature (24)..(142): NCBI GI NO: 18419798 NR Description: putative protein; protein id: At4g36190.1
  misc_feature (136)..(468): NCBI GI NO: 15227960 NR Description: unknown protein; protein id: At2g18080.1
  misc_feature (61)..(89): NCBI GI NO: 15227960 NR Description: unknown protein; protein id: At2g18080.1
  misc_feature (49)..(284): NCBI GI NO: 15144318 NR Description: putative serine peptidase
  misc_feature (49)..(284): NCBI GI NO: 7486037 NR Description: hypothetical protein F23E13
  misc_feature (407)..(467): NCBI GI NO: 7486037 NR Description: hypothetical protein F23E13
MLARGGEAVSLWLPPPTAGGGGFLGGADRYLTREEHWMNQTLDHFNPTDHRQFKQRYYEFLDYYRAPNGPIFLYICGESTCNGIGNNYLAVVAKKFGAALVSPEHRYYGKSSPFNSLTTENLQFLSSKQALFDLAVFRQYYQETLNAKYNRSGANSSWFVFGGSYAGALSAWFRLKFPHLTCGSLASSGVVLAVYNFTDFDKQIGISAGPECKAALQEITGLVDGQLQSGRNSVKELFGATKLENDGDFLYLLADAAAIAFQYGNPDVLCSPLAEAKKNGTDLVETFASYVKDYYIGKFGASVASYDQQYLKNTTPAESSYRLWWYQVCSEVAYFQVAPKNDSVRSPKIDTRYHLDLCRNVFGEGVYPDVFMTNLYYGGTGIAGSKIVFANGSQDPWRHASKQKSSDELPSYLIECKNCGHCSDLSGCPQAPSNIEGDSSKCSPPEALNKVRKEIVDHIDLWLSECQEQGHDKEPWLGSIWSIAAI

SEQ ID NO: 26143 - DNA, 1823 bp, Zea mays subsp. mays
  misc_feature (1)..(1823): Ceres Seq. ID no. 12566533
acatgccacattgccaccaagccacagttccacctttcgattcatgcacgctcagtcatgggcgccctccggagtttagccatctcctacccggagttcctcgtggccgggctgtgcttcgtctccctctcggccctgcgccacgcgatgcgtgagcggcggcaacgcgcccccctgagctggcctgtggtgggcatgctcccgttcgtgctcgcgaacctcgggcgcctctacgacgccatcaccgacgccctccacgggtccgggtgcacgctcatgttccgcgggccgtggctcgcccgcgcggacttcctgctgacgtgcgacccggcggccgtccagcactgcctggcgtccaaccacgggggctacgacaggggccgagactttgcggagatgttcgacctcctgggcgacgggctgctggttgcggacgccgcgtcgtgggcgcgccagcggcacgtcgccgccaccgtcttcggcaccccggcgttccggtccttcgtcctgtgcaccatggcgcgccagacggcgcggctgctcgtgccgttcctggactgcgccgccgcggatcaggaaggggacggtggcgtcgttgatctcgaggacgtgttcatgcggtactcgctcgatgtgacctacgcctccgtgttcgatgccgacctggacatgctgtgcgtcgccgccgcctcggcgccggtgccgccgttcggcctggcgaccagggtggccagcgaatctgtgctcttcaggcacatcgtgccggcctggtggtggaggctgctgaggtggctcaatgtcggctccgagaggaggctggccgaggccaaggcggtcctcaacgaattcgtctaccgcgagatcgccaaacgcaagtcacggctcgccaccacaagccaagcaggagaaggctacgacctcctgtcactgtacatggcgtggccgagggaacccggtatgagcgagcggcagagggatcagttcctccgggattccgccgtcagttacttgtttgcggccaaggacctcatcgtcgccgcgctcacctggttcttctacatgctctgcacgcacccgcacgtcgaggccaagatcctcgacgagctgaggtccctgcatcccacagccacggtcgcggccaccggcggcggcgagcatgccgtgttcgactctgacgcgctccagcccgcgtcctacctccacgcggcggtcctcgagacgctgcggctgttcccgccggcgcctttcgaggagaaagaggcagttcgcagcgatgtgctgcctgacggcaccacggtggccaagggcaccagggtcatcttctgcatctacgccatgggcaggatggaagggctatggggtagcgactgccacgagttccgaccggagcggtggctgtccgatattggccgagtccggcacgagcccagccacaagttcgccgtgttcaactgcggacccagaagctgcctcgggaagaacctggggctcagcaacatcaagattgccgccgccgcaatcttatacaactttcgggtggagctcatcgacggccatatcgttgagccacagaactcagtggtgcttctcaccaagaacgggatgagggttaggatcaagaggaggcacgcagcatgatgcactgtgctacttctacctttacatcagttaaactccaaaaaatggtggggaaacgaacaaaaggtgatagggcatatagaataaaaacgcagcacaaattttattccagattaatctgctcatgtgatttcagccatattggatacaagttctgaactttgatgcttctgattcggaaaatt

SEQ ID NO: 26144 - protein, 545 aa, Zea mays subsp. mays
  peptide (1)..(545): Ceres Seq. ID no. 12566534
  misc_feature (58)..(538): Pfam Name: Pfam Description:  Cytochrome P450
  misc_feature (20)..(545): NCBI GI NO: 34906256 NR Description: putative cytochrome P450
  misc_feature (32)..(542): NCBI GI NO: 15227116 NR Description: cytochrome P450, putative; protein id: At2g21910.1
  misc_feature (19)..(542): NCBI GI NO: 37535524 NR Description: putative cytochrome P450 protein
  misc_feature (28)..(545): NCBI GI NO: 30692374 NR Description: cytochrome P450 family [Arabidopsis thaliana]
  misc_feature (28)..(542): NCBI GI NO: 7430717 NR Description: cytochrome P450 homolog F23K16
  misc_feature (50)..(542): NCBI GI NO: 15220272 NR Description: cytochrome P450, putative; protein id: At1g47620.1
  misc_feature (32)..(542): NCBI GI NO: 15237250 NR Description: cytochrome P450-like protein; protein id:At5g23190
  misc_feature (60)..(542): NCBI GI NO: 15227788 NR Description: cytochrome P450, putative; protein id: At2g23180
  misc_feature (25)..(541): NCBI GI NO: 15218645 NR Description: cytochrome P450, putative; protein id: At1g65340.1
  misc_feature (70)..(542): NCBI GI NO: 30692374 NR Description: cytochrome P450 family [Arabidopsis thaliana]
TCHIATKPQFHLSIHARSVMGALRSLAISYPEFLVAGLCFVSLSALRHAMRERRQRAPLSWPVVGMLPFVLANLGRLYDAITDALHGSGCTLMFRGPWLARADFLLTCDPAAVQHCLASNHGGYDRGRDFAEMFDLLGDGLLVADAASWARQRHVAATVFGTPAFRSFVLCTMARQTARLLVPFLDCAAADQEGDGGVVDLEDVFMRYSLDVTYASVFDADLDMLCVAAASAPVPPFGLATRVASESVLFRHIVPAWWWRLLRWLNVGSERRLAEAKAVLNEFVYREIAKRKSRLATTSQAGEGYDLLSLYMAWPREPGMSERQRDQFLRDSAVSYLFAAKDLIVAALTWFFYMLCTHPHVEAKILDELRSLHPTATVAATGGGEHAVFDSDALQPASYLHAAVLETLRLFPPAPFEEKEAVRSDVLPDGTTVAKGTRVIFCIYAMGRMEGLWGSDCHEFRPERWLSDIGRVRHEPSHKFAVFNCGPRSCLGKNLGLSNIKIAAAAILYNFRVELIDGHIVEPQNSVVLLTKNGMRVRIKRRHAA

SEQ ID NO: 26145 - protein, 526 aa, Zea mays subsp. mays
  peptide (1)..(526): Ceres Seq. ID no. 12566535
  misc_feature (39)..(519): Pfam Name: Pfam Description:  Cytochrome P450
  misc_feature (1)..(526): NCBI GI NO: 34906256 NR Description: putative cytochrome P450
  misc_feature (13)..(523): NCBI GI NO: 15227116 NR Description: cytochrome P450, putative; protein id: At2g21910.1
  misc_feature (1)..(523): NCBI GI NO: 37535524 NR Description: putative cytochrome P450 protein
  misc_feature (9)..(526): NCBI GI NO: 30692374 NR Description: cytochrome P450 family [Arabidopsis thaliana]
  misc_feature (9)..(523): NCBI GI NO: 7430717 NR Description: cytochrome P450 homolog F23K16
  misc_feature (31)..(523): NCBI GI NO: 15220272 NR Description: cytochrome P450, putative; protein id: At1g47620.1
  misc_feature (13)..(523): NCBI GI NO: 15237250 NR Description: cytochrome P450-like protein; protein id:At5g23190
  misc_feature (41)..(523): NCBI GI NO: 15227788 NR Description: cytochrome P450, putative; protein id: At2g23180
  misc_feature (6)..(522): NCBI GI NO: 15218645 NR Description: cytochrome P450, putative; protein id: At1g65340.1
  misc_feature (51)..(523): NCBI GI NO: 30692374 NR Description: cytochrome P450 family [Arabidopsis thaliana]
MGALRSLAISYPEFLVAGLCFVSLSALRHAMRERRQRAPLSWPVVGMLPFVLANLGRLYDAITDALHGSGCTLMFRGPWLARADFLLTCDPAAVQHCLASNHGGYDRGRDFAEMFDLLGDGLLVADAASWARQRHVAATVFGTPAFRSFVLCTMARQTARLLVPFLDCAAADQEGDGGVVDLEDVFMRYSLDVTYASVFDADLDMLCVAAASAPVPPFGLATRVASESVLFRHIVPAWWWRLLRWLNVGSERRLAEAKAVLNEFVYREIAKRKSRLATTSQAGEGYDLLSLYMAWPREPGMSERQRDQFLRDSAVSYLFAAKDLIVAALTWFFYMLCTHPHVEAKILDELRSLHPTATVAATGGGEHAVFDSDALQPASYLHAAVLETLRLFPPAPFEEKEAVRSDVLPDGTTVAKGTRVIFCIYAMGRMEGLWGSDCHEFRPERWLSDIGRVRHEPSHKFAVFNCGPRSCLGKNLGLSNIKIAAAAILYNFRVELIDGHIVEPQNSVVLLTKNGMRVRIKRRHAA

SEQ ID NO: 26146 - protein, 496 aa, Zea mays subsp. mays
  peptide (1)..(496): Ceres Seq. ID no. 12566536
  misc_feature (9)..(489): Pfam Name: Pfam Description:  Cytochrome P450
  misc_feature (1)..(496): NCBI GI NO: 34906256 NR Description: putative cytochrome P450
  misc_feature (1)..(493): NCBI GI NO: 15227116 NR Description: cytochrome P450, putative; protein id: At2g21910.1
  misc_feature (1)..(493): NCBI GI NO: 37535524 NR Description: putative cytochrome P450 protein
  misc_feature (1)..(496): NCBI GI NO: 30692374 NR Description: cytochrome P450 family [Arabidopsis thaliana]
  misc_feature (1)..(493): NCBI GI NO: 7430717 NR Description: cytochrome P450 homolog F23K16
  misc_feature (1)..(493): NCBI GI NO: 15220272 NR Description: cytochrome P450, putative; protein id: At1g47620.1
  misc_feature (1)..(493): NCBI GI NO: 15237250 NR Description: cytochrome P450-like protein; protein id:At5g23190
  misc_feature (11)..(493): NCBI GI NO: 15227788 NR Description: cytochrome P450, putative; protein id: At2g23180
  misc_feature (1)..(492): NCBI GI NO: 15218645 NR Description: cytochrome P450, putative; protein id: At1g65340.1
  misc_feature (21)..(493): NCBI GI NO: 30692374 NR Description: cytochrome P450 family [Arabidopsis thaliana]
MRERRQRAPLSWPVVGMLPFVLANLGRLYDAITDALHGSGCTLMFRGPWLARADFLLTCDPAAVQHCLASNHGGYDRGRDFAEMFDLLGDGLLVADAASWARQRHVAATVFGTPAFRSFVLCTMARQTARLLVPFLDCAAADQEGDGGVVDLEDVFMRYSLDVTYASVFDADLDMLCVAAASAPVPPFGLATRVASESVLFRHIVPAWWWRLLRWLNVGSERRLAEAKAVLNEFVYREIAKRKSRLATTSQAGEGYDLLSLYMAWPREPGMSERQRDQFLRDSAVSYLFAAKDLIVAALTWFFYMLCTHPHVEAKILDELRSLHPTATVAATGGGEHAVFDSDALQPASYLHAAVLETLRLFPPAPFEEKEAVRSDVLPDGTTVAKGTRVIFCIYAMGRMEGLWGSDCHEFRPERWLSDIGRVRHEPSHKFAVFNCGPRSCLGKNLGLSNIKIAAAAILYNFRVELIDGHIVEPQNSVVLLTKNGMRVRIKRRHAA

SEQ ID NO: 26147 - DNA, 1027 bp, Zea mays subsp. mays
  misc_feature (1)..(1027): Ceres Seq. ID no. 12358294
cagttcaaagcagcgcctcgccaccggacgaacacacagatcgctacagcccgcatgaccaacctctccgccatggcagcgagccaatcctacgtgatccgattcgacggccacttcgacgagccgtcgccgagctccgcgggcgccgagccgccgggcccgcagccgccgttcgcagggaggatgatctcgctcgagcgggagcaccaagtcattgtcgccgccctgctgcacgtcgtctccgggtacgccacgccgccgccgcaggtcttcacgccgccgccggcagcggcgcgctgccaggtgtgcgggatggagcggtgcctcggctgcgagttcttcgccgccggggagggcgcattgggcggcggcgcggagaaggcagccgcgacaggaggcgcggcggcgctggcggcggggcaaaggaggcggaggaagaagaagaacaagtaccgcggcgtgcggcagcggccgtgggggaagtgggcggcggagatccgcgacccgcgccgcgcggtgcgcaagtggctgggcacgttcgacaccgccgaggaggccgccagggcctacgaccaggccgccatcgagttccgcggcccgcgcgccaagctcaacttcccgttccccgagcagccgccgacggggcacgacgagcccatcagcagcaacggcgacgcgagcgcggccgccaggtcgtcggacaccacgccgtcgccgtcgctctgcagcgcggacgccgaggagcgcgggcagccggagtggccgagcgccgggcaggaggcaggggaccaactgctctgggaaggcctgcaggacctgatgaggctggacgaaggcgagccctggctccatccagcctcaagcgcttggaattgaaatttgaaacgcccgcgatcagatcccagccgttcaactagtttgaaataggagcatcctagcctttcgctatgcttctttttttttcttccctccttaactcttctttttctaacctctgttgtacttatttggacaaagcagagttttg

SEQ ID NO: 26148 - protein, 304 aa, Zea mays subsp. mays
  peptide (1)..(304): Ceres Seq. ID no. 12358295
  misc_feature (46)..(281): Pfam Name: Pfam Description:  HlyD family secretion protein
VQSSASPPDEHTDRYSPHDQPLRHGSEPILRDPIRRPLRRAVAELRGRRAAGPAAAVRREDDLARAGAPSHCRRPAARRLRVRHAAAAGLHAAAGSGALPGVRDGAVPRLRVLRRRGGRIGRRRGEGSRDRRRGGAGGGAKEAEEEEEQVPRRAAAAVGEVGGGDPRPAPRGAQVAGHVRHRRGGRQGLRPGRHRVPRPARQAQLPVPRAAADGARRAHQQQRRRERGRQVVGHHAVAVALQRGRRGARAAGVAERRAGGRGPTALGRPAGPDEAGRRRALAPSSLKRLELKFETPAIRSQPFN

SEQ ID NO: 26149 - protein, 291 aa, Zea mays subsp. mays
  peptide (1)..(291): Ceres Seq. ID no. 12358296
  misc_feature (148)..(208): Pfam Name: Pfam Description:  AP2 domain
  misc_feature (100)..(279): NCBI GI NO: 15235365 NR Description: putative protein; protein id: At4g34410
  misc_feature (143)..(255): NCBI GI NO: 15228312 NR Description: AP2 domain protein RAP2
  misc_feature (143)..(255): NCBI GI NO: 2467088 NR Description: putative Ckc2 [Arabidopsis thaliana]
  misc_feature (143)..(255): NCBI GI NO: 629508 NR Description: cadmium-induced protein - Arabidopsis thaliana
  misc_feature (38)..(207): NCBI GI NO: 33519168 NR Description: AP2 domain-containing protein AP29
  misc_feature (145)..(213): NCBI GI NO: 10798644 NR Description: AP2 domain-containing transcription factor
  misc_feature (115)..(241): NCBI GI NO: 2281649 NR Description: AP2 domain containing protein RAP2.12
  misc_feature (115)..(241): NCBI GI NO: 15220971 NR Description: AP2 domain protein RAP2
  misc_feature (115)..(241): NCBI GI NO: 21593779 NR Description: AP2 domain containing protein, putative
  misc_feature (90)..(246): NCBI GI NO: 19880313 NR Description: putative EREBP-type transcription factor
QFKAAPRHRTNTQIATARMTNLSAMAASQSYVIRFDGHFDEPSPSSAGAEPPGPQPPFAGRMISLEREHQVIVAALLHVVSGYATPPPQVFTPPPAAARCQVCGMERCLGCEFFAAGEGALGGGAEKAAATGGAAALAAGQRRRRKKKNKYRGVRQRPWGKWAAEIRDPRRAVRKWLGTFDTAEEAARAYDQAAIEFRGPRAKLNFPFPEQPPTGHDEPISSNGDASAAARSSDTTPSPSLCSADAEERGQPEWPSAGQEAGDQLLWEGLQDLMRLDEGEPWLHPASSAWN

SEQ ID NO: 26150 - protein, 273 aa, Zea mays subsp. mays
  peptide (1)..(273): Ceres Seq. ID no. 12358297
  misc_feature (130)..(190): Pfam Name: Pfam Description:  AP2 domain
  misc_feature (82)..(261): NCBI GI NO: 15235365 NR Description: putative protein; protein id: At4g34410
  misc_feature (125)..(237): NCBI GI NO: 15228312 NR Description: AP2 domain protein RAP2
  misc_feature (125)..(237): NCBI GI NO: 2467088 NR Description: putative Ckc2 [Arabidopsis thaliana]
  misc_feature (125)..(237): NCBI GI NO: 629508 NR Description: cadmium-induced protein - Arabidopsis thaliana
  misc_feature (20)..(189): NCBI GI NO: 33519168 NR Description: AP2 domain-containing protein AP29
  misc_feature (127)..(195): NCBI GI NO: 10798644 NR Description: AP2 domain-containing transcription factor
  misc_feature (97)..(223): NCBI GI NO: 2281649 NR Description: AP2 domain containing protein RAP2.12
  misc_feature (97)..(223): NCBI GI NO: 21593779 NR Description: AP2 domain containing protein, putative
  misc_feature (97)..(223): NCBI GI NO: 15220971 NR Description: AP2 domain protein RAP2
  misc_feature (72)..(228): NCBI GI NO: 19880313 NR Description: putative EREBP-type transcription factor
MTNLSAMAASQSYVIRFDGHFDEPSPSSAGAEPPGPQPPFAGRMISLEREHQVIVAALLHVVSGYATPPPQVFTPPPAAARCQVCGMERCLGCEFFAAGEGALGGGAEKAAATGGAAALAAGQRRRRKKKNKYRGVRQRPWGKWAAEIRDPRRAVRKWLGTFDTAEEAARAYDQAAIEFRGPRAKLNFPFPEQPPTGHDEPISSNGDASAAARSSDTTPSPSLCSADAEERGQPEWPSAGQEAGDQLLWEGLQDLMRLDEGEPWLHPASSAWN

SEQ ID NO: 26151 - DNA, 1389 bp, Zea mays subsp. mays
  misc_feature (1)..(1389): Ceres Seq. ID no. 13499065
atatatccacgccaaggtccggcaccttttctcctcgcgccagagccacgcacgctagtgtcagtggcacgcaggcagccgcgcgcaccgaggggagaccagagctagcggcgaggccaagggcaagggcaagggcgcggacggcaatggcgagagctggaggcggcggtccgttcttcccggtccgcggcgcggcgctggtggtcgtgctgctaggcatcgtcgcgggcgcggcgagggcgcagctgcggctgaactactacggcagctcgtgccccagcgcggagtccacggtgcgctccgtcatctcgcagcgcctccagcagagcttcgccgtggggcccggcacgctccgcctcttcttccacgactgcttcgtcaggggatgcgacgcgtcggtgatgctgatggcgccgaacggggacgacgagagccacagcggcgcggacgccacgctgtcgtccggacgccgtggacgccatcaacaaggcgaaggcggccgtggaggcgctccccgggtgcgccggcaaggtctcgtgcgcggacatcctcgccatggccgcacgtgacgtcgtctccctgctgggcgggccgagctacggcgtggagctggggcggctggacggcaagacgttcaacagggccatcgtgaagcacgtcctcccgggccccggcttcaacctggaccagctcaacgccctcttcgcgcagaacggcctcacgcagacggacatgatcgcgctctcaggcgcgcacacgatcggggtgacgcactgcgacaagttcgtgcggcggatctacacgttcaagcagcggctggcgtggaacccgccgatgaacctggacttcctgcgctcgctgcggcgggtgtgccccctcagctacagccccacggcgttcgccatgctggacgtcaccacgcccagggtcttcgacaacgcctacttcaacaacctccgctacaacaagggcctgctcgcctccgaccaggtgctcttcaccgaccgccgctcccgacccaccgtcaacctcttcgccgccaacgccaccgccttccacgaggcattcgtcgccgccatggccaagctcggcaggatcggcctcaagaccggcgccgacggcgagatacgccgcgtctgcaccgccgtcaactaagcctgcattggctgcttgctgcttgcgtgcgtgggtttcacttcttctttctcttgtttatatacgtacgtttgtcggatggattttgttggtagccatgagatgacatccttgctctgagctagcggacctgccccgactggatgatagagattgatccagatgttcttctagtagattctaattctttatggatgtttcccattgacacgcggttacgcgctcttcaaccgc

SEQ ID NO: 26152 - protein, 199 aa, Zea mays subsp. mays
  peptide (1)..(199): Ceres Seq. ID no. 13499066
  misc_feature (1)..(98): Pfam Name: Pfam Description:  Peroxidase
  misc_feature (1)..(199): NCBI GI NO: 39545735 NR Description: OSJNBa0071I13.13
  misc_feature (1)..(98): NCBI GI NO: 23343905 NR Description: seed peroxidase 2 [Setaria faberi]
  misc_feature (1)..(199): NCBI GI NO: 1620369 NR Description: peroxidase ATP22a [Arabidopsis thaliana]
  misc_feature (1)..(199): NCBI GI NO: 15224266 NR Description: peroxidase, putative [Arabidopsis thaliana]
  misc_feature (1)..(199): NCBI GI NO: 15234648 NR Description: peroxidase, putative [Arabidopsis thaliana]
  misc_feature (1)..(198): NCBI GI NO: 4138647 NR Description: peroxidase [Trifolium repens]
  misc_feature (1)..(199): NCBI GI NO: 28629828 NR Description: peroxidase 1 [Artemisia annua]
  misc_feature (1)..(199): NCBI GI NO: 15235597 NR Description: peroxidase, putative [Arabidopsis thaliana]
  misc_feature (1)..(199): NCBI GI NO: 15235600 NR Description: peroxidase, putative [Arabidopsis thaliana]
  misc_feature (1)..(199): NCBI GI NO: 21554605 NR Description: peroxidase, prxr2 [Arabidopsis thaliana]
MAARDVVSLLGGPSYGVELGRLDGKTFNRAIVKHVLPGPGFNLDQLNALFAQNGLTQTDMIALSGAHTIGVTHCDKFVRRIYTFKQRLAWNPPMNLDFLRSLRRVCPLSYSPTAFAMLDVTTPRVFDNAYFNNLRYNKGLLASDQVLFTDRRSRPTVNLFAANATAFHEAFVAAMAKLGRIGLKTGADGEIRRVCTAVN

SEQ ID NO: 26153 - protein, 188 aa, Zea mays subsp. mays
  peptide (1)..(188): Ceres Seq. ID no. 13499067
  misc_feature (98)..(149): Pfam Name: Pfam Description:  Peroxidase
  misc_feature (49)..(153): NCBI GI NO: 39545735 NR Description: OSJNBa0071I13.13
  misc_feature (67)..(149): NCBI GI NO: 23343905 NR Description: seed peroxidase 2 [Setaria faberi]
  misc_feature (65)..(147): NCBI GI NO: 1620369 NR Description: peroxidase ATP22a [Arabidopsis thaliana]
  misc_feature (65)..(147): NCBI GI NO: 15224266 NR Description: peroxidase, putative [Arabidopsis thaliana]
  misc_feature (70)..(142): NCBI GI NO: 15234648 NR Description: peroxidase, putative [Arabidopsis thaliana]
  misc_feature (67)..(149): NCBI GI NO: 4138647 NR Description: peroxidase [Trifolium repens]
  misc_feature (66)..(145): NCBI GI NO: 28629828 NR Description: peroxidase 1 [Artemisia annua]
  misc_feature (66)..(141): NCBI GI NO: 15235597 NR Description: peroxidase, putative [Arabidopsis thaliana]
  misc_feature (66)..(139): NCBI GI NO: 15235600 NR Description: peroxidase, putative [Arabidopsis thaliana]
  misc_feature (66)..(141): NCBI GI NO: 21554605 NR Description: peroxidase, prxr2 [Arabidopsis thaliana]
ISTPRSGTFSPRARATHASVSGTQAAARTEGRPELAARPRARARARTAMARAGGGGPFFPVRGAALVVVLLGIVAGAARAQLRLNYYGSSCPSAESTVRSVISQRLQQSFAVGPGTLRLFFHDCFVRGCDASVMLMAPNGDDESHSGADATLSSGRRGRHQQGEGGRGGAPRVRRQGLVRGHPRHGRT

SEQ ID NO: 26154 - protein, 140 aa, Zea mays subsp. mays
  peptide (1)..(140): Ceres Seq. ID no. 13499068
  misc_feature (1)..(140): NCBI GI NO: 39545735 NR Description: OSJNBa0071I13.13
  misc_feature (1)..(39): NCBI GI NO: 23343905 NR Description: seed peroxidase 2 [Setaria faberi]
  misc_feature (1)..(140): NCBI GI NO: 1620369 NR Description: peroxidase ATP22a [Arabidopsis thaliana]
  misc_feature (1)..(140): NCBI GI NO: 15224266 NR Description: peroxidase, putative [Arabidopsis thaliana]
  misc_feature (1)..(140): NCBI GI NO: 15234648 NR Description: peroxidase, putative [Arabidopsis thaliana]
  misc_feature (1)..(139): NCBI GI NO: 4138647 NR Description: peroxidase [Trifolium repens]
  misc_feature (1)..(140): NCBI GI NO: 28629828 NR Description: peroxidase 1 [Artemisia annua]
  misc_feature (1)..(140): NCBI GI NO: 15235597 NR Description: peroxidase, putative [Arabidopsis thaliana]
  misc_feature (1)..(140): NCBI GI NO: 15235600 NR Description: peroxidase, putative [Arabidopsis thaliana]
  misc_feature (1)..(140): NCBI GI NO: 21554605 NR Description: peroxidase, prxr2 [Arabidopsis thaliana]
MIALSGAHTIGVTHCDKFVRRIYTFKQRLAWNPPMNLDFLRSLRRVCPLSYSPTAFAMLDVTTPRVFDNAYFNNLRYNKGLLASDQVLFTDRRSRPTVNLFAANATAFHEAFVAAMAKLGRIGLKTGADGEIRRVCTAVN

SEQ ID NO: 26155 - DNA, 1333 bp, Zea mays subsp. mays
  misc_feature (1)..(1333): Ceres Seq. ID no. 12566545
acgacacgtcattgccgtggcccagcgctagtttccagaagcagccgcgagcttccaccgccttcttcccgtgcattttctcgagcgacggagcgatccgttcgggccgtccaccacagcgagagagagcggcagaggcgcagagcgcaaccgagcgagagagagaggacggcgacggcggagatgatggggtggggagaggaggtggtggctctgtccctgcgaggctacggctatggcaacgaggaggacgaccggccggagaagccgcggcggtacggggtgacggagatgcggagccccttctactccttccgccccgcaaaccaggcgctccaggaaatattggattctcttagtccattcgttgatggtttgaagttctctggcggatgccatagtttgatgggaaaggagttggttagagagatcactgatctagcacacaggcatgacatttatgtgagcacaggtgattgggcagagcatttgctgcgccaaggaccctcttctttcaagcaatatgtagaggaatgcaaggccttagggtttgacacaattgagctgaatgctgggtctctcaacctccctgaagaggctctgttgagactagtccgcctcatcaagagtagtggtttaagggcaaagccaatgttttcggtgaagtttgacagttctgatattcctgcgtctggtgatagggcctttggggcttacatagctccagtcaaagggaagacctcagaaagagttgaagatgttgacctgctgattaggagggcagagagatgcttggaagcaggcgctgatatgatcatgatcgatgctgatgatgtttgccagcgtgctgaatctctgaggacagacatcatcgccaagattgtaggccggctcgggcttgataaaaccatgtttgaagcttccaactccaacacctcggagtggttcgtcagacgttatggcccaagggtaaatctctttgttgaacactctgacgtgatgaatctggagcgcctccggggcttcaacatgcgcagaagcaactcggcctcccgttttgcctcgccgttcttcctgatctaatgggctaatggccattccccttcctgagatgtgtaagatacttctacatgttctcaccctcgcagagcttgttatggcctagagatgtaaccgcctttgttaatgcctcgatgtagcccccagcgagcagcgcatagcacctgttatgttgtcagcgtcgctactgataatcggttctgttggtcaatgctactataataatcggttgtggtgcaagtaatgtgaatagtgtaagagtgttttgtgtttc

SEQ ID NO: 26156 - protein, 360 aa, Zea mays subsp. mays
  peptide (1)..(360): Ceres Seq. ID no. 12566546
  misc_feature (82)..(341): Pfam Name: 2R Pfam Description: null
  misc_feature (82)..(359): NCBI GI NO: 30685384 NR Description: expressed protein [Arabidopsis thaliana]
  misc_feature (82)..(360): NCBI GI NO: 7487784 NR Description: hypothetical protein T6K22
  misc_feature (86)..(340): NCBI GI NO: 19553737 NR Description: hypothetical protein
  misc_feature (46)..(340): NCBI GI NO: 40745438 NR Description: hypothetical protein AN1464.2
  misc_feature (87)..(340): NCBI GI NO: 29655237 NR Description: hypothetical protein [Coxiella burnetii RSA 493]
TTRHCRGPALVSRSSRELPPPSSRAFSRATERSVRAVHHSERERQRRRAQPSERERTATAEMMGWGEEVVALSLRGYGYGNEEDDRPEKPRRYGVTEMRSPFYSFRPANQALQEILDSLSPFVDGLKFSGGCHSLMGKELVREITDLAHRHDIYVSTGDWAEHLLRQGPSSFKQYVEECKALGFDTIELNAGSLNLPEEALLRLVRLIKSSGLRAKPMFSVKFDSSDIPASGDRAFGAYIAPVKGKTSERVEDVDLLIRRAERCLEAGADMIMIDADDVCQRAESLRTDIIAKIVGRLGLDKTMFEASNSNTSEWFVRRYGPRVNLFVEHSDVMNLERLRGFNMRRSNSASRFASPFFLI

SEQ ID NO: 26157 - protein, 299 aa, Zea mays subsp. mays
  peptide (1)..(299): Ceres Seq. ID no. 12566547
  misc_feature (21)..(280): Pfam Name: 2R Pfam Description: null
  misc_feature (21)..(298): NCBI GI NO: 30685384 NR Description: expressed protein [Arabidopsis thaliana]
  misc_feature (21)..(299): NCBI GI NO: 7487784 NR Description: hypothetical protein T6K22
  misc_feature (25)..(279): NCBI GI NO: 19553737 NR Description: hypothetical protein
  misc_feature (1)..(279): NCBI GI NO: 40745438 NR Description: hypothetical protein AN1464.2
  misc_feature (26)..(279): NCBI GI NO: 29655237 NR Description: hypothetical protein [Coxiella burnetii RSA 493]
MMGWGEEVVALSLRGYGYGNEEDDRPEKPRRYGVTEMRSPFYSFRPANQALQEILDSLSPFVDGLKFSGGCHSLMGKELVREITDLAHRHDIYVSTGDWAEHLLRQGPSSFKQYVEECKALGFDTIELNAGSLNLPEEALLRLVRLIKSSGLRAKPMFSVKFDSSDIPASGDRAFGAYIAPVKGKTSERVEDVDLLIRRAERCLEAGADMIMIDADDVCQRAESLRTDIIAKIVGRLGLDKTMFEASNSNTSEWFVRRYGPRVNLFVEHSDVMNLERLRGFNMRRSNSASRFASPFFLI

SEQ ID NO: 26158 - protein, 298 aa, Zea mays subsp. mays
  peptide (1)..(298): Ceres Seq. ID no. 12566548
  misc_feature (20)..(279): Pfam Name: 2R Pfam Description: null
  misc_feature (20)..(297): NCBI GI NO: 30685384 NR Description: expressed protein [Arabidopsis thaliana]
  misc_feature (20)..(298): NCBI GI NO: 7487784 NR Description: hypothetical protein T6K22
  misc_feature (24)..(278): NCBI GI NO: 19553737 NR Description: hypothetical protein
  misc_feature (1)..(278): NCBI GI NO: 40745438 NR Description: hypothetical protein AN1464.2
  misc_feature (25)..(278): NCBI GI NO: 29655237 NR Description: hypothetical protein [Coxiella burnetii RSA 493]
MGWGEEVVALSLRGYGYGNEEDDRPEKPRRYGVTEMRSPFYSFRPANQALQEILDSLSPFVDGLKFSGGCHSLMGKELVREITDLAHRHDIYVSTGDWAEHLLRQGPSSFKQYVEECKALGFDTIELNAGSLNLPEEALLRLVRLIKSSGLRAKPMFSVKFDSSDIPASGDRAFGAYIAPVKGKTSERVEDVDLLIRRAERCLEAGADMIMIDADDVCQRAESLRTDIIAKIVGRLGLDKTMFEASNSNTSEWFVRRYGPRVNLFVEHSDVMNLERLRGFNMRRSNSASRFASPFFLI

SEQ ID NO: 26159 - DNA, 1430 bp, Zea mays subsp. mays
  misc_feature (1)..(1430): Ceres Seq. ID no. 12386925
gctctaaaaagtccaactccaaacctagactagaggcccctcaccgaggcgacgacgcacgcagccgagcgccactccgccgccgccgcctcctcctcgtccccgtcccgcgccgcaacggcctcccccaccctgcgcccgccggccgcccctcgacgggtcgagcggagcggggaacccatccgtccggccgttggtcgctctcgctcgtctggtgttggttgtaatgagaagctggacctgttaggccgaagagttctcgttgcaagtctgtgcctcagcgatgggttcaggcaacttgatcgtgaagaaggtggtaaagcacagctcctttgatctggacatacagcttgataagagttggatggaggatgttacctgcccgatctgccttgattaccctcacaatgcagtgctactgaggtgcacgtcttatgagaagggatgcaggccgtttgtttgcgatacagaccagacccgctcaaactgtcttgagaggtttaaatctgcatatgaactgccttccaatgtgaaagtttcatctttagccgtgcctcctcttgatagcattattcatattgtgccgtctaacgcaaacaaccgccccagctgccctttgtgtagaggtgatgttattgggtgggttgttattggtgaggctcggctgcatcttaatcagaagaaaaggtgctgtgaagaggattgctgctcgtttgttggcaacttcaatgagcttcagaagcacacgcaacaaaagcatcctgattcacgcccttcagagatcgatcctgctaggcaagttgattgggagaatttccagcaatcttctgatatcgtagatgtcttgagcacaatacatgcacaagttccaaacgggattgttctgggagactatgtgattgagtatggggatgatgacactggtgaggactatgaagttttccgcagggtcaggacgaactggtggtcatgtattttctgcagggcgttttcaagatcttcaagaagtcgtagaagatccagagcaagggaaagaataggcagtggaaggaggaatggcaaccaggttaatctagaaaattttaacctcgtggttccgacacaacctgttgaattaagggaaattaggtttgatgaaattgatgatgaatacatagtcacaggggccattcctagtatcgcagcaccgggaagaatggctagtttccattacagggatacaagatatggacgttgatgcatagggtctgcagtaaaaaaaggaatagatgttatgcaatttaccgatcaacgtaacgttgtaactccgctcatttggattccttccacctgccctcggtaggtgctgccgcagttcaaacttatctgtgcataaaaagtagcaacagaacctcgctgttcgtttgaatcaggcctcgtcattctagttc

SEQ ID NO: 26160 - protein, 317 aa, Zea mays subsp. mays
  peptide (1)..(317): Ceres Seq. ID no. 12386926
  misc_feature (1)..(311): NCBI GI NO: 7486671 NR Description: hypothetical protein F8F16
  misc_feature (7)..(295): NCBI GI NO: 18417801 NR Description: expressed protein; protein id: At4g31410
  misc_feature (110)..(217): NCBI GI NO: 25365932 NR Description: unknown protein T32E8.10
  misc_feature (110)..(217): NCBI GI NO: 30699285 NR Description: expressed protein [Arabidopsis thaliana]
  misc_feature (25)..(77): NCBI GI NO: 25365932 NR Description: unknown protein T32E8.10
  misc_feature (25)..(77): NCBI GI NO: 30699285 NR Description: expressed protein [Arabidopsis thaliana]
  misc_feature (110)..(215): NCBI GI NO: 15230170 NR Description: unknown protein; protein id: At3g24740
  misc_feature (11)..(82): NCBI GI NO: 15230170 NR Description: unknown protein; protein id: At3g24740
  misc_feature (106)..(210): NCBI GI NO: 38346521 NR Description: OSJNBa0027H09.16
  misc_feature (13)..(109): NCBI GI NO: 38346521 NR Description: OSJNBa0027H09.16
MGSGNLIVKKVVKHSSFDLDIQLDKSWMEDVTCPICLDYPHNAVLLRCTSYEKGCRPFVCDTDQTRSNCLERFKSAYELPSNVKVSSLAVPPLDSIIHIVPSNANNRPSCPLCRGDVIGWVVIGEARLHLNQKKRCCEEDCCSFVGNFNELQKHTQQKHPDSRPSEIDPARQVDWENFQQSSDIVDVLSTIHAQVPNGIVLGDYVIEYGDDDTGEDYEVFRRVRTNWWSCIFCRAFSRSSRSRRRSRARERIGSGRRNGNQVNLENFNLVVPTQPVELREIRFDEIDDEYIVTGAIPSIAAPGRMASFHYRDTRYGR

SEQ ID NO: 26161 - protein, 290 aa, Zea mays subsp. mays
  peptide (1)..(290): Ceres Seq. ID no. 12386927
  misc_feature (1)..(284): NCBI GI NO: 7486671 NR Description: hypothetical protein F8F16
  misc_feature (1)..(268): NCBI GI NO: 18417801 NR Description: expressed protein; protein id: At4g31410
  misc_feature (83)..(190): NCBI GI NO: 25365932 NR Description: unknown protein T32E8.10
  misc_feature (83)..(190): NCBI GI NO: 30699285 NR Description: expressed protein [Arabidopsis thaliana]
  misc_feature (1)..(50): NCBI GI NO: 25365932 NR Description: unknown protein T32E8.10
  misc_feature (1)..(50): NCBI GI NO: 30699285 NR Description: expressed protein [Arabidopsis thaliana]
  misc_feature (83)..(188): NCBI GI NO: 15230170 NR Description: unknown protein; protein id: At3g24740
  misc_feature (1)..(55): NCBI GI NO: 15230170 NR Description: unknown protein; protein id: At3g24740
  misc_feature (79)..(183): NCBI GI NO: 38346521 NR Description: OSJNBa0027H09.16
  misc_feature (1)..(82): NCBI GI NO: 38346521 NR Description: OSJNBa0027H09.16
MEDVTCPICLDYPHNAVLLRCTSYEKGCRPFVCDTDQTRSNCLERFKSAYELPSNVKVSSLAVPPLDSIIHIVPSNANNRPSCPLCRGDVIGWVVIGEARLHLNQKKRCCEEDCCSFVGNFNELQKHTQQKHPDSRPSEIDPARQVDWENFQQSSDIVDVLSTIHAQVPNGIVLGDYVIEYGDDDTGEDYEVFRRVRTNWWSCIFCRAFSRSSRSRRRSRARERIGSGRRNGNQVNLENFNLVVPTQPVELREIRFDEIDDEYIVTGAIPSIAAPGRMASFHYRDTRYGR

SEQ ID NO: 26162 - DNA, 1539 bp, Zea mays subsp. mays
  misc_feature (1)..(1539): Ceres Seq. ID no. 12356198
agaagcacggcaatctcgatctcgttcgttcccctgagcggcagtcagtgcgagcgagcgcgcacacagacaactcatcctctcccctctctctctcacacacacacatccatcatcccatccctgtgacgggcgatccgagggcctaccgacgatggtgtccgccgtgctccggaccatcctcgtgacgggcggcgccgggtacatcggcagccacacggtgctgcagctgctgcagcagggcttccgcgtcgtcgtcgtcgacaacctcgacaacgcctccgaggccgccctcgcccgcgtcgccgagctcgccgggcacgacggcgccaacctcgtcttccacaaggttgaccttcgcgacaggcacgcgttggtggacatcttctcgtcgcacaggttcgaggctgtcattcactttgctgggctcaaggctgttggggagagcgtgcacaagcccctgctttactacgacaacaacctggtcggcaccatcaccctcctggaggtgatggctgcgaatggctgcaagaagctggtgttctcgtcatctgcaactgtctatgggtggcccaaggaagtaccatgcaccgaagaattcccgctctgcgccaccaatccctatgggcggacaaagcttgtgattgaagacatctgccgcgacgtccaccgctccgacccggactggaagatcatactgctcaggtacttcaaccccgttggcgctcatccaagcgggtacatcggcgaagacccctgcggtgtcccgaacaacctgatgccctacgtgcagcaagtcgctgttgtgaggttacctcacctcacggtctacgggacggactacagcaccaaggatgggactggggtgcgtgattacatccacgttgtcgacctggctgacggccacatagcagccctgaggaagctccacgaagactccgacaaaataggctgtgaagtgtacaacttggggactggaaaggggacgtcggtgttggaaatggtggctgcattcgagaaggcttctgggaagaaaatccctctgggtgttcgctgggcgaagacccggagacgcagagatcgtctacgccgcaactgccaaggcagagaaagagctcaaatggaaggccaagtacgggatcgaggagatgtgcagagatctgtggaactgggcgagcaagaacccgtacgggtacgctgggtcacgcgacaacagcaaatgaaccacccatccatgcatcccatcctgcagtaggagcaagcagcagccttatagcctatgctaccataattagtaactcatcaatcatgcatacataatcagccagtcatctgattaggggtactgcgatgggcctcgcttcttcagtgtatagagggaggaggaggggggtcatcttgatattctttttttttatcattcccgaatgattattattagtagccagttcgatattactccatggttggttgctagagaaggaataagctccattcatatacctaactaaagatatatatatacatgcattcactgtc

SEQ ID NO: 26163 - protein, 366 aa, Zea mays subsp. mays
  peptide (1)..(366): Ceres Seq. ID no. 12356199
  misc_feature (9)..(297): Pfam Name: Pfam Description:  NAD dependent epimerase/dehydratase family
  misc_feature (1)..(297): NCBI GI NO: 32130594 NR Description: UDP-glucose-4-epimerase [Zea mays]
  misc_feature (1)..(297): NCBI GI NO: 21715990 NR Description: UDP-glucose 4-epimerase
  misc_feature (7)..(297): NCBI GI NO: 11386775 NR Description: UDP-glucose 4-epimerase GEPI48
  misc_feature (7)..(297): NCBI GI NO: 15236663 NR Description: UDPglucose 4-epimerase - like protein
  misc_feature (7)..(297): NCBI GI NO: 21536846 NR Description: UDPglucose 4-epimerase-like protein
  misc_feature (7)..(297): NCBI GI NO: 12643850 NR Description: Probable UDP-glucose 4-epimerase At4g10960
  misc_feature (7)..(297): NCBI GI NO: 15236988 NR Description: UDP-galactose 4-epimerase - like protein
  misc_feature (7)..(297): NCBI GI NO: 21553659 NR Description: UDP-galactose 4-epimerase-like protein
  misc_feature (6)..(297): NCBI GI NO: 25553520 NR Description: putative UDP-glucose 4-epimerase
  misc_feature (9)..(324): NCBI GI NO: 15217653 NR Description: UDP-galactose 4-epimerase, putative
MVSAVLRTILVTGGAGYIGSHTVLQLLQQGFRVVVVDNLDNASEAALARVAELAGHDGANLVFHKVDLRDRHALVDIFSSHRFEAVIHFAGLKAVGESVHKPLLYYDNNLVGTITLLEVMAANGCKKLVFSSSATVYGWPKEVPCTEEFPLCATNPYGRTKLVIEDICRDVHRSDPDWKIILLRYFNPVGAHPSGYIGEDPCGVPNNLMPYVQQVAVVRLPHLTVYGTDYSTKDGTGVRDYIHVVDLADGHIAALRKLHEDSDKIGCEVYNLGTGKGTSVLEMVAAFEKASGKKIPLGVRWAKTRRRRDRLRRNCQGRERAQMEGQVRDRGDVQRSVELGEQEPVRVRWVTRQQQMNHPSMHPILQ

SEQ ID NO: 26164 - protein, 247 aa, Zea mays subsp. mays
  peptide (1)..(247): Ceres Seq. ID no. 12356200
  misc_feature (1)..(178): Pfam Name: Pfam Description:  NAD dependent epimerase/dehydratase family
  misc_feature (1)..(178): NCBI GI NO: 32130594 NR Description: UDP-glucose-4-epimerase [Zea mays]
  misc_feature (1)..(178): NCBI GI NO: 21715990 NR Description: UDP-glucose 4-epimerase
  misc_feature (1)..(178): NCBI GI NO: 11386775 NR Description: UDP-glucose 4-epimerase GEPI48
  misc_feature (1)..(178): NCBI GI NO: 15236663 NR Description: UDPglucose 4-epimerase - like protein
  misc_feature (1)..(178): NCBI GI NO: 21536846 NR Description: UDPglucose 4-epimerase-like protein
  misc_feature (1)..(178): NCBI GI NO: 12643850 NR Description: Probable UDP-glucose 4-epimerase At4g10960
  misc_feature (1)..(178): NCBI GI NO: 15236988 NR Description: UDP-galactose 4-epimerase - like protein
  misc_feature (1)..(178): NCBI GI NO: 21553659 NR Description: UDP-galactose 4-epimerase-like protein
  misc_feature (1)..(178): NCBI GI NO: 25553520 NR Description: putative UDP-glucose 4-epimerase
  misc_feature (1)..(205): NCBI GI NO: 15217653 NR Description: UDP-galactose 4-epimerase, putative
MAANGCKKLVFSSSATVYGWPKEVPCTEEFPLCATNPYGRTKLVIEDICRDVHRSDPDWKIILLRYFNPVGAHPSGYIGEDPCGVPNNLMPYVQQVAVVRLPHLTVYGTDYSTKDGTGVRDYIHVVDLADGHIAALRKLHEDSDKIGCEVYNLGTGKGTSVLEMVAAFEKASGKKIPLGVRWAKTRRRRDRLRRNCQGRERAQMEGQVRDRGDVQRSVELGEQEPVRVRWVTRQQQMNHPSMHPILQ

SEQ ID NO: 26165 - DNA, 919 bp, Zea mays subsp. mays
  misc_feature (1)..(919): Ceres Seq. ID no. 12412873
ttttctccagcaagtaccgctcggtgaaaggagctaaagttattattgatgcaaacacaggccgttccaggggctatggatttgtcaggtttggagacgacaacgacaaatctcatgccatgtctgaaatgaatggtgtatattgctctacgaggccaattcgtataggacctgcgactcccagaagatcttcaggtgattctggctcctcgactcctggtcattcagatggtgattcttctaacagaacggtatatgttggtgggcttgaccccaatgtcagtgaagatgaactgagaaaagcctttgccaaatatgatcttgcctctgtgaaaattcctctaggaaagcaatgtggctttgttcaatttgttagcagaactgatgctgaagaagcactacaaggattaaatggatcactcattggaaaccaggcagttcgcctttcatgggtccgcagcccatcgcataagcagtctaggggtgactccgtcaacaggaggaacaacatgtactatggcacaccattctacggcggatatggctatgcctccccggtgccacacccaaacatgtacgctgcagcgtatggcacgtacccgctatatggcaaccagcagctagtgagctagagagctcccctccgacgtgtcccctctgacgggaaacaaaggttttggtccggtgagcatagtagcgtcaggtgagaaggtgcctttataaggctgtcctaagaagtgggcgagatatgttgttgcatcgttatcgttatggtgcctgtaactgttgtgtgtgccgtgtgcgtccggaagaattggatggaatggaactcgtggcttgttgtagtacatcagagagtcatgttattctttcaagaaattttgacttggtaataaattaaactattgtttgtgcgtcc

SEQ ID NO: 26166 - protein, 209 aa, Zea mays subsp. mays
  peptide (1)..(209): Ceres Seq. ID no. 12412874
  misc_feature (1)..(55): Pfam Name: a.k.a. RRM, RBD, or RNP domain Pfam Description: RNA recognition motif.
  misc_feature (1)..(209): NCBI GI NO: 15220241 NR Description: RNA binding protein 47
  misc_feature (1)..(202): NCBI GI NO: 15594035 NR Description: nucleic acid binding protein [Nicotiana tabacum]
  misc_feature (1)..(209): NCBI GI NO: 15220233 NR Description: RNA binding protein 47
  misc_feature (67)..(209): NCBI GI NO: 7489196 NR Description: RNA binding protein homolog - common tobacco
  misc_feature (67)..(209): NCBI GI NO: 9663769 NR Description: RNA Binding Protein 47 [Nicotiana plumbaginifolia]
  misc_feature (1)..(81): NCBI GI NO: 7489196 NR Description: RNA binding protein homolog - common tobacco
  misc_feature (1)..(81): NCBI GI NO: 9663769 NR Description: RNA Binding Protein 47 [Nicotiana plumbaginifolia]
  misc_feature (67)..(209): NCBI GI NO: 7489112 NR Description: DNA binding protein ACBF - common tobacco
  misc_feature (1)..(81): NCBI GI NO: 7489112 NR Description: DNA binding protein ACBF - common tobacco
  misc_feature (67)..(209): NCBI GI NO: 40804404 NR Description: DNA-binding protein [Lycopersicon esculentum]
FSSKYRSVKGAKVIIDANTGRSRGYGFVRFGDDNDKSHAMSEMNGVYCSTRPIRIGPATPRRSSGDSGSSTPGHSDGDSSNRTVYVGGLDPNVSEDELRKAFAKYDLASVKIPLGKQCGFVQFVSRTDAEEALQGLNGSLIGNQAVRLSWVRSPSHKQSRGDSVNRRNNMYYGTPFYGGYGYASPVPHPNMYAAAYGTYPLYGNQQLVS

SEQ ID NO: 26167 - protein, 170 aa, Zea mays subsp. mays
  peptide (1)..(170): Ceres Seq. ID no. 12412875
  misc_feature (1)..(170): NCBI GI NO: 15220241 NR Description: RNA binding protein 47
  misc_feature (1)..(163): NCBI GI NO: 15594035 NR Description: nucleic acid binding protein [Nicotiana tabacum]
  misc_feature (1)..(170): NCBI GI NO: 15220233 NR Description: RNA binding protein 47
  misc_feature (28)..(170): NCBI GI NO: 7489196 NR Description: RNA binding protein homolog - common tobacco
  misc_feature (28)..(170): NCBI GI NO: 9663769 NR Description: RNA Binding Protein 47 [Nicotiana plumbaginifolia]
  misc_feature (1)..(42): NCBI GI NO: 7489196 NR Description: RNA binding protein homolog - common tobacco
  misc_feature (1)..(42): NCBI GI NO: 9663769 NR Description: RNA Binding Protein 47 [Nicotiana plumbaginifolia]
  misc_feature (28)..(170): NCBI GI NO: 7489112 NR Description: DNA binding protein ACBF - common tobacco
  misc_feature (1)..(42): NCBI GI NO: 7489112 NR Description: DNA binding protein ACBF - common tobacco
  misc_feature (28)..(170): NCBI GI NO: 40804404 NR Description: DNA-binding protein [Lycopersicon esculentum]
MSEMNGVYCSTRPIRIGPATPRRSSGDSGSSTPGHSDGDSSNRTVYVGGLDPNVSEDELRKAFAKYDLASVKIPLGKQCGFVQFVSRTDAEEALQGLNGSLIGNQAVRLSWVRSPSHKQSRGDSVNRRNNMYYGTPFYGGYGYASPVPHPNMYAAAYGTYPLYGNQQLVS

SEQ ID NO: 26168 - protein, 167 aa, Zea mays subsp. mays
  peptide (1)..(167): Ceres Seq. ID no. 12412876
  misc_feature (1)..(167): NCBI GI NO: 15220241 NR Description: RNA binding protein 47
  misc_feature (1)..(160): NCBI GI NO: 15594035 NR Description: nucleic acid binding protein [Nicotiana tabacum]
  misc_feature (1)..(167): NCBI GI NO: 15220233 NR Description: RNA binding protein 47
  misc_feature (25)..(167): NCBI GI NO: 7489196 NR Description: RNA binding protein homolog - common tobacco
  misc_feature (25)..(167): NCBI GI NO: 9663769 NR Description: RNA Binding Protein 47 [Nicotiana plumbaginifolia]
  misc_feature (1)..(39): NCBI GI NO: 7489196 NR Description: RNA binding protein homolog - common tobacco
  misc_feature (1)..(39): NCBI GI NO: 9663769 NR Description: RNA Binding Protein 47 [Nicotiana plumbaginifolia]
  misc_feature (25)..(167): NCBI GI NO: 7489112 NR Description: DNA binding protein ACBF - common tobacco
  misc_feature (1)..(39): NCBI GI NO: 7489112 NR Description: DNA binding protein ACBF - common tobacco
  misc_feature (25)..(167): NCBI GI NO: 40804404 NR Description: DNA-binding protein [Lycopersicon esculentum]
MNGVYCSTRPIRIGPATPRRSSGDSGSSTPGHSDGDSSNRTVYVGGLDPNVSEDELRKAFAKYDLASVKIPLGKQCGFVQFVSRTDAEEALQGLNGSLIGNQAVRLSWVRSPSHKQSRGDSVNRRNNMYYGTPFYGGYGYASPVPHPNMYAAAYGTYPLYGNQQLVS

SEQ ID NO: 26169 - DNA, 1847 bp, Zea mays subsp. mays
  misc_feature (1)..(1847): Ceres Seq. ID no. 12344025
gtaacttagccgtattgatatatgcactgatgactggccagaggcgacgatggagacggtctgctagttcaagttctacttccttccgcggccgcacgcgcgtcgttcgacgaattgccggagccagctgaaaatcgccggaggtgctctcggcggtcctggcctgattctctaccgacgcgagctgtggtcagtagccacgtctgtatatccacgtctagctggccatctttgcaccctccccacgtccatggaccctccaagaggtggagcttccacctccagtgaattagaagaacacagcagtggtagggtgccctggtgagcgctcatcatcctctgtgatgacgatgatgatgacaaaagagaggtcatttgttgctaagtcgagacggatgagtattgagtaggcggccttataggagcactaagatgttccgggcaaatttgtggcatttacacacatgctgttactgctgattcttctttaaaagccatggatgtatgtcaaataccacgacctccatggaggcaaacaagaatcaaggaagtcaaattacaccgatttggcaaacaagtactatgatcttgtcactggcttttacgaatatggatggggcgactcattccatcttgctggcggatatccgggtgagacttcccgtgaagccattaagcggcaccagcattttttggcactacaattggggctcaagaagggtatgaaggttttggatgtgggatgtggaattgggggacctttaatagaaatcgccagattcaggcaatgatctgcaataatgtttcattgcccattcaatcaataaattccaacaataatgaagaacatacatacatatatatatatatgtgtgtgtgtgaattttcaattctgtttattgtagctcaacatcgataactggactgaacaacaatgactaccacatctcaaggggcaaggagctcattttttcagcaggtttgagtgagcaatgctgcttcttgaagggggacttcatggacatgccaatatctgataacacctttgatgcggcctatgcaatacaggctacatgtcatgcaccagatgcacaaggcgtctatagtgaggtctaccgtgtgctgaaacctgggcagtattttgcactggatgaatggtgcttgaccgaccgatttgatcccaacaacgccaagcatttggccatcaaggctgagattgagctcggtgatggcctacctgacatccgtaccactcgccaatgtgtccaagctatgaaagatgcaggatttgaggtcgtttttgcaaaggatcttgctcaagtttttccttgcccgtggtaccgggtgatggatcccacctacttttcatgggctcacttccaatgcacacgcccaggacggatcgtcacccgtgcaattgtcaatacactagagttcctccgtattgccccagcaggcagcatgggagcctacaacgtcctgatgagtgcctctgatggccttctaaaaggtggccgggaaggtatcttcacagcgaccttcttcgtcctgggccgcaagcctctcaaggaagttgatatagtaagcctctcaaggaagttgatatagtgaacggcggcgtcctttgagctgcaagattagtatggggctgtactcataagagctatgaatcatggccaacgtgttctgtgctgaggtgtgtttactggattgtcttatgggttatggcccttgcgctgtgtgctggcctgctgggtcatgttcccgcagtagcctgtatctgcttgtcagcttgtgtgctgtgtactatgcactatctgaataaaaatgcagttttacgcattgtt

SEQ ID NO: 26170 - protein, 196 aa, Zea mays subsp. mays
  peptide (1)..(196): Ceres Seq. ID no. 12344026
  misc_feature (1)..(103): Pfam Name: Pfam Description:  ubiE/COQ5 methyltransferase family
  misc_feature (1)..(188): NCBI GI NO: 30103006 NR Description: putative endosperm C-24 sterol methyltransferase
  misc_feature (1)..(185): NCBI GI NO: 7489677 NR Description: probable sterol 24-C-methyltransferase (EC2
  misc_feature (1)..(185): NCBI GI NO: 1872473 NR Description: delta-24-sterol methyltransferase
  misc_feature (1)..(185): NCBI GI NO: 7443716 NR Description: sterol 24-C-methyltransferase (EC 2
  misc_feature (1)..(185): NCBI GI NO: 7443715 NR Description: sterol 24-C-methyltransferase (EC 2
  misc_feature (1)..(185): NCBI GI NO: 34393309 NR Description: cycloartenol-C24-methyltransferase
  misc_feature (1)..(185): NCBI GI NO: 3560531 NR Description: cycloartenol-C24-methyltransferase
  misc_feature (1)..(182): NCBI GI NO: 7443720 NR Description: probable sterol 24-C-methyltransferase (EC2
  misc_feature (1)..(182): NCBI GI NO: 21434843 NR Description: cephalopod [Arabidopsis thaliana]
  misc_feature (1)..(182): NCBI GI NO: 15240691 NR Description: 24-sterol C-methyltransferase
MDMPISDNTFDAAYAIQATCHAPDAQGVYSEVYRVLKPGQYFALDEWCLTDRFDPNNAKHLAIKAEIELGDGLPDIRTTRQCVQAMKDAGFEVVFAKDLAQVFPCPWYRVMDPTYFSWAHFQCTRPGRIVTRAIVNTLEFLRIAPAGSMGAYNVLMSASDGLLKGGREGIFTATFFVLGRKPLKEVDIVSLSRKLI

SEQ ID NO: 26171 - protein, 194 aa, Zea mays subsp. mays
  peptide (1)..(194): Ceres Seq. ID no. 12344027
  misc_feature (1)..(101): Pfam Name: Pfam Description:  ubiE/COQ5 methyltransferase family
  misc_feature (1)..(186): NCBI GI NO: 30103006 NR Description: putative endosperm C-24 sterol methyltransferase
  misc_feature (1)..(183): NCBI GI NO: 7489677 NR Description: probable sterol 24-C-methyltransferase (EC2
  misc_feature (1)..(183): NCBI GI NO: 1872473 NR Description: delta-24-sterol methyltransferase
  misc_feature (1)..(183): NCBI GI NO: 7443716 NR Description: sterol 24-C-methyltransferase (EC 2
  misc_feature (1)..(183): NCBI GI NO: 7443715 NR Description: sterol 24-C-methyltransferase (EC 2
  misc_feature (1)..(183): NCBI GI NO: 34393309 NR Description: cycloartenol-C24-methyltransferase
  misc_feature (1)..(183): NCBI GI NO: 3560531 NR Description: cycloartenol-C24-methyltransferase
  misc_feature (1)..(180): NCBI GI NO: 7443720 NR Description: probable sterol 24-C-methyltransferase (EC2
  misc_feature (1)..(180): NCBI GI NO: 21434843 NR Description: cephalopod [Arabidopsis thaliana]
  misc_feature (1)..(180): NCBI GI NO: 15240691 NR Description: 24-sterol C-methyltransferase
MPISDNTFDAAYAIQATCHAPDAQGVYSEVYRVLKPGQYFALDEWCLTDRFDPNNAKHLAIKAEIELGDGLPDIRTTRQCVQAMKDAGFEVVFAKDLAQVFPCPWYRVMDPTYFSWAHFQCTRPGRIVTRAIVNTLEFLRIAPAGSMGAYNVLMSASDGLLKGGREGIFTATFFVLGRKPLKEVDIVSLSRKLI

SEQ ID NO: 26172 - protein, 111 aa, Zea mays subsp. mays
  peptide (1)..(111): Ceres Seq. ID no. 12344028
  misc_feature (1)..(103): NCBI GI NO: 30103006 NR Description: putative endosperm C-24 sterol methyltransferase
  misc_feature (1)..(100): NCBI GI NO: 7489677 NR Description: probable sterol 24-C-methyltransferase (EC2
  misc_feature (1)..(100): NCBI GI NO: 1872473 NR Description: delta-24-sterol methyltransferase
  misc_feature (1)..(100): NCBI GI NO: 7443716 NR Description: sterol 24-C-methyltransferase (EC 2
  misc_feature (1)..(100): NCBI GI NO: 7443715 NR Description: sterol 24-C-methyltransferase (EC 2
  misc_feature (1)..(100): NCBI GI NO: 34393309 NR Description: cycloartenol-C24-methyltransferase
  misc_feature (1)..(100): NCBI GI NO: 3560531 NR Description: cycloartenol-C24-methyltransferase
  misc_feature (1)..(97): NCBI GI NO: 7443720 NR Description: probable sterol 24-C-methyltransferase (EC2
  misc_feature (1)..(97): NCBI GI NO: 21434843 NR Description: cephalopod [Arabidopsis thaliana]
  misc_feature (1)..(97): NCBI GI NO: 15240691 NR Description: 24-sterol C-methyltransferase
MKDAGFEVVFAKDLAQVFPCPWYRVMDPTYFSWAHFQCTRPGRIVTRAIVNTLEFLRIAPAGSMGAYNVLMSASDGLLKGGREGIFTATFFVLGRKPLKEVDIVSLSRKLI

SEQ ID NO: 26173 - DNA, 1768 bp, Zea mays subsp. mays
  misc_feature (1)..(1768): Ceres Seq. ID no. 12357458
accggtgacgaagccttccgtgtcatcaggatcgcagggttttgtttcgtttcgcgggcgttgggaatccatccatggcgaggaagatgctcatcgacggggaggtggcggccgtcgcggatggtgggcactatgactacgatctcttcgtcatcggggcgggcagcggcggtgttcgcggctctcgcaccgccgcctccttcggagctaaggttgcgatttgtgagctcccattccaccccatcagctcagagtggctaggaggacatggtgggacttgcgtgatacgtggttgcgtacctaaaaagatactcgtgtatggtgcatcattccgtggagaatttgaggattcgataattttgggtgggagattaacggagatattaacttcaattggaaaacgctattggaaaataagactaaagaaattgttagattaaatggtgtgtatcagaggatccttaccagtgccggtgtgacaatgattgaaggggcaggcagtctagttgatgctcatactgttgaagttagccagcccgatggttcaaagcaaaggtataccgcgaagcacattttgatcgcgactggtagccgtgctcaacgtgtcaacatacctggaaaggatctggctattacttctgatgaggccttgagcttggaggagcttccaaagcgcgctgtaatcctgggtggcggatatattgctgttgaatttgcttctatctggagggggatgggtgctgaagtagatttgttttatcgaagagatcttcctctaagaggttttgatgatgagatgagagctattgttgcaagcaaccttgagggaaggggaatcaagttgcatccagggacaaatctctctgagttgagtaaaacggctgacggaataaaagttgtaactgataaaggagaagagctcattgcagatgttgtcctatttgcgacagggcgcacaccaaactcccagagactgaacttgcaagctgcaggcgttgagattgaccgggttggagccatcaaggttgacgaatattctcgtacttctgctcctagtgtatgggctgtgggtgatgtaacaaaccggattaatttaacacctgttgcattaatggaggcaacttgctttgctaaaactgtgtttggtggccagcaagttaagcctgatcacagagatgttccttgtgctgttttctccattccaccactatctgtagtgggcctcagcgaagaacaggccttggaggaagccaatggtgatattcttgttttcatctcatcattcaacccaatgaagaacagcatatccaagcgccaggagaagactatcatgaaactggtagttgatgctgaaactgacaaagtacttggtgcatccatgtgtggaccagacgcacctgaaattatccagggcatcgctattgcggttaaatgtggagccaccaaagcagacttcgacagcactgtcggaatccacccttccgctgctgaagagttcgtgaccatgcgcaccgtgacaaggcgcttgagcccgacatccaagccaaagacgaacttgtaagcaagaaattggtgttttgggggaatgttacaccggacaaatacactggtttcatcacgttggtaatttttacgtcattggaactggaaccatgtatattgaaggaataagtttttttttcatggcaacacaccgaaaataatgagaccatggattttcttgatacaaataatgagctcaagcagagaacgtttatggttggttctc

SEQ ID NO: 26174 - protein, 359 aa, Zea mays subsp. mays
  peptide (1)..(359): Ceres Seq. ID no. 12357459
  misc_feature (1)..(208): Pfam Name: Pfam Description:  Pyridine nucleotide-disulphide oxidoreductase
  misc_feature (1)..(359): NCBI GI NO: 19860133 NR Description: Glutathione reductase, cytosolic (GR) (GRase)
  misc_feature (1)..(359): NCBI GI NO: 7431855 NR Description: probable glutathione-disulfide reductase (EC1
  misc_feature (1)..(359): NCBI GI NO: 2500116 NR Description: Glutathione reductase, cytosolic
  misc_feature (1)..(359): NCBI GI NO: 21263645 NR Description: Glutathione reductase, cytosolic (GR) (GRase)
  misc_feature (1)..(359): NCBI GI NO: 13430632 NR Description: putative glutathione reductase
  misc_feature (1)..(359): NCBI GI NO: 15230074 NR Description: glutathione reductase, putative
  misc_feature (1)..(359): NCBI GI NO: 2500115 NR Description: Glutathione reductase, chloroplast precursor
  misc_feature (1)..(359): NCBI GI NO: 7431864 NR Description: glutathione-disulfide reductase (EC 1
  misc_feature (1)..(329): NCBI GI NO: 10862871 NR Description: glutathione reductase
  misc_feature (1)..(359): NCBI GI NO: 22450154 NR Description: deoxymugineic acid synthase 1
MIEGAGSLVDAHTVEVSQPDGSKQRYTAKHILIATGSRAQRVNIPGKDLAITSDEALSLEELPKRAVILGGGYIAVEFASIWRGMGAEVDLFYRRDLPLRGFDDEMRAIVASNLEGRGIKLHPGTNLSELSKTADGIKVVTDKGEELIADVVLFATGRTPNSQRLNLQAAGVEIDRVGAIKVDEYSRTSAPSVWAVGDVTNRINLTPVALMEATCFAKTVFGGQQVKPDHRDVPCAVFSIPPLSVVGLSEEQALEEANGDILVFISSFNPMKNSISKRQEKTIMKLVVDAETDKVLGASMCGPDAPEIIQGIAIAVKCGATKADFDSTVGIHPSAAEEFVTMRTVTRRLSPTSKPKTNL

SEQ ID NO: 26175 - protein, 275 aa, Zea mays subsp. mays
  peptide (1)..(275): Ceres Seq. ID no. 12357460
  misc_feature (1)..(124): Pfam Name: Pfam Description:  Pyridine nucleotide-disulphide oxidoreductase
  misc_feature (1)..(275): NCBI GI NO: 19860133 NR Description: Glutathione reductase, cytosolic (GR) (GRase)
  misc_feature (1)..(275): NCBI GI NO: 7431855 NR Description: probable glutathione-disulfide reductase (EC1
  misc_feature (1)..(275): NCBI GI NO: 2500116 NR Description: Glutathione reductase, cytosolic
  misc_feature (1)..(275): NCBI GI NO: 21263645 NR Description: Glutathione reductase, cytosolic (GR) (GRase)
  misc_feature (1)..(275): NCBI GI NO: 13430632 NR Description: putative glutathione reductase
  misc_feature (1)..(275): NCBI GI NO: 15230074 NR Description: glutathione reductase, putative
  misc_feature (1)..(275): NCBI GI NO: 2500115 NR Description: Glutathione reductase, chloroplast precursor
  misc_feature (1)..(275): NCBI GI NO: 7431864 NR Description: glutathione-disulfide reductase (EC 1
  misc_feature (1)..(245): NCBI GI NO: 10862871 NR Description: glutathione reductase
  misc_feature (1)..(275): NCBI GI NO: 22450154 NR Description: deoxymugineic acid synthase 1
MGAEVDLFYRRDLPLRGFDDEMRAIVASNLEGRGIKLHPGTNLSELSKTADGIKVVTDKGEELIADVVLFATGRTPNSQRLNLQAAGVEIDRVGAIKVDEYSRTSAPSVWAVGDVTNRINLTPVALMEATCFAKTVFGGQQVKPDHRDVPCAVFSIPPLSVVGLSEEQALEEANGDILVFISSFNPMKNSISKRQEKTIMKLVVDAETDKVLGASMCGPDAPEIIQGIAIAVKCGATKADFDSTVGIHPSAAEEFVTMRTVTRRLSPTSKPKTNL

SEQ ID NO: 26176 - protein, 254 aa, Zea mays subsp. mays
  peptide (1)..(254): Ceres Seq. ID no. 12357461
  misc_feature (1)..(103): Pfam Name: Pfam Description:  Pyridine nucleotide-disulphide oxidoreductase
  misc_feature (1)..(254): NCBI GI NO: 19860133 NR Description: Glutathione reductase, cytosolic (GR) (GRase)
  misc_feature (1)..(254): NCBI GI NO: 7431855 NR Description: probable glutathione-disulfide reductase (EC1
  misc_feature (1)..(254): NCBI GI NO: 2500116 NR Description: Glutathione reductase, cytosolic
  misc_feature (1)..(254): NCBI GI NO: 21263645 NR Description: Glutathione reductase, cytosolic (GR) (GRase)
  misc_feature (1)..(254): NCBI GI NO: 13430632 NR Description: putative glutathione reductase
  misc_feature (1)..(254): NCBI GI NO: 15230074 NR Description: glutathione reductase, putative
  misc_feature (1)..(254): NCBI GI NO: 2500115 NR Description: Glutathione reductase, chloroplast precursor
  misc_feature (1)..(254): NCBI GI NO: 7431864 NR Description: glutathione-disulfide reductase (EC 1
  misc_feature (1)..(224): NCBI GI NO: 10862871 NR Description: glutathione reductase
  misc_feature (1)..(254): NCBI GI NO: 22450154 NR Description: deoxymugineic acid synthase 1
MRAIVASNLEGRGIKLHPGTNLSELSKTADGIKVVTDKGEELIADVVLFATGRTPNSQRLNLQAAGVEIDRVGAIKVDEYSRTSAPSVWAVGDVTNRINLTPVALMEATCFAKTVFGGQQVKPDHRDVPCAVFSIPPLSVVGLSEEQALEEANGDILVFISSFNPMKNSISKRQEKTIMKLVVDAETDKVLGASMCGPDAPEIIQGIAIAVKCGATKADFDSTVGIHPSAAEEFVTMRTVTRRLSPTSKPKTNL

SEQ ID NO: 26177 - DNA, 1244 bp, Zea mays subsp. mays
  misc_feature (1)..(1244): Ceres Seq. ID no. 12566552
cgaccctcgcgccttcgcgagtctctctctttctctcgagtctcgacacaccacagcggaagcggctcgactcgctgagtgacaagacgcgacgcgacgccaagccaagaccaaattaccaaaccctaccccttcgccgcgaccgcgatcccccacatcgttggcgatgagctcctcctccaacagcgggaagaagccggcgcccgccggcggccgcggggggcccaccatccgcacgctcgccgacataaaccgtggccctgccggtttcccaggtgccggaggcggcagcagcgatgacgacgagccccaggagtactacaccggcggcgagaagagtggaatgcttgttcaagatccaacaagaagaaatgacgtggatgcaatatttgaacaagcaagacaggcgggcgctatccatggaatgcccccttttcttggtggcgagtcttccagctctaggagctttactgggactggccgacttcttacaggggagacagtaccatctgctgcacctcaggaaccagtaccaattcgaatacgccacaatatacatttgtggaacaatggctttactgtggatgatggtccactgagatactacgatgatcctgaaaatgaagagttccttgagagccttaagatgtcaaagtgccccaaggagctggtgcctactgatggagaacatgttgatgtgtctgttattaaaaggatggaagattaccgggaacctgtaaggcctcaatcagctttccagggtgttggaagaacccttggtggtggaccttccccagatgagagtgcaacacctgctcctgcaccagcggcccctgctgcttcgaggtccgctggcatagtcgtggatgactcccagccatttacatccatacagctgaggctggctgacggcactcgcatggtcgcccggttcaacatgcaccacaccgtgggagacatcaggtccttcatcgacgcatctcggcctggaaccgcaaggccgtatcagctgcagacaggtttcccacccaagcagctggctgacccaacgcagaccgtggtgcaagctgggctggcaaactcggttatcatgcagaagatgtaatgtttcgacaacatgggtaactaggatgcatcgtactgcatcttttgagaactgtcttattgtggttgacatactgctctggtgcgtcattcatggtcttaatagtttatagttcatctatgaactgaattatgcttcc

SEQ ID NO: 26178 - protein, 312 aa, Zea mays subsp. mays
  peptide (1)..(312): Ceres Seq. ID no. 12566553
  misc_feature (234)..(311): Pfam Name: Pfam Description:  UBX domain
  misc_feature (5)..(311): NCBI GI NO: 18412499 NR Description: putative membrane trafficking factor
  misc_feature (1)..(311): NCBI GI NO: 13123657 NR Description: phosphatase-like protein Mtc923
  misc_feature (5)..(311): NCBI GI NO: 7487458 NR Description: hypothetical protein T27D20
  misc_feature (1)..(312): NCBI GI NO: 13123659 NR Description: phosphatase-like protein Psc923 [Pisum sativum]
  misc_feature (4)..(311): NCBI GI NO: 15234731 NR Description: putative protein; protein id: At4g22150.1
  misc_feature (1)..(311): NCBI GI NO: 18414442 NR Description: phosphatase like protein; protein id: At4g15410
  misc_feature (1)..(311): NCBI GI NO: 15292665 NR Description: putative phosphatase [Arabidopsis thaliana]
  misc_feature (1)..(308): NCBI GI NO: 7485149 NR Description: hypothetical protein - Arabidopsis thaliana
  misc_feature (1)..(293): NCBI GI NO: 40739694 NR Description: hypothetical protein AN8228.2
  misc_feature (44)..(312): NCBI GI NO: 20149635 NR Description: p47 [Homo sapiens]
MSSSSNSGKKPAPAGGRGGPTIRTLADINRGPAGFPGAGGGSSDDDEPQEYYTGGEKSGMLVQDPTRRNDVDAIFEQARQAGAIHGMPPFLGGESSSSRSFTGTGRLLTGETVPSAAPQEPVPIRIRHNIHLWNNGFTVDDGPLRYYDDPENEEFLESLKMSKCPKELVPTDGEHVDVSVIKRMEDYREPVRPQSAFQGVGRTLGGGPSPDESATPAPAPAAPAASRSAGIVVDDSQPFTSIQLRLADGTRMVARFNMHHTVGDIRSFIDASRPGTARPYQLQTGFPPKQLADPTQTVVQAGLANSVIMQKM

SEQ ID NO: 26179 - protein, 253 aa, Zea mays subsp. mays
  peptide (1)..(253): Ceres Seq. ID no. 12566554
  misc_feature (175)..(252): Pfam Name: Pfam Description:  UBX domain
  misc_feature (1)..(252): NCBI GI NO: 18412499 NR Description: putative membrane trafficking factor
  misc_feature (1)..(252): NCBI GI NO: 13123657 NR Description: phosphatase-like protein Mtc923
  misc_feature (1)..(252): NCBI GI NO: 7487458 NR Description: hypothetical protein T27D20
  misc_feature (1)..(253): NCBI GI NO: 13123659 NR Description: phosphatase-like protein Psc923 [Pisum sativum]
  misc_feature (1)..(252): NCBI GI NO: 15234731 NR Description: putative protein; protein id: At4g22150.1
  misc_feature (1)..(252): NCBI GI NO: 18414442 NR Description: phosphatase like protein; protein id: At4g15410
  misc_feature (1)..(252): NCBI GI NO: 15292665 NR Description: putative phosphatase [Arabidopsis thaliana]
  misc_feature (1)..(249): NCBI GI NO: 7485149 NR Description: hypothetical protein - Arabidopsis thaliana
  misc_feature (1)..(234): NCBI GI NO: 40739694 NR Description: hypothetical protein AN8228.2
  misc_feature (1)..(253): NCBI GI NO: 20149635 NR Description: p47 [Homo sapiens]
MLVQDPTRRNDVDAIFEQARQAGAIHGMPPFLGGESSSSRSFTGTGRLLTGETVPSAAPQEPVPIRIRHNIHLWNNGFTVDDGPLRYYDDPENEEFLESLKMSKCPKELVPTDGEHVDVSVIKRMEDYREPVRPQSAFQGVGRTLGGGPSPDESATPAPAPAAPAASRSAGIVVDDSQPFTSIQLRLADGTRMVARFNMHHTVGDIRSFIDASRPGTARPYQLQTGFPPKQLADPTQTVVQAGLANSVIMQKM

SEQ ID NO: 26180 - protein, 226 aa, Zea mays subsp. mays
  peptide (1)..(226): Ceres Seq. ID no. 12566555
  misc_feature (148)..(225): Pfam Name: Pfam Description:  UBX domain
  misc_feature (1)..(225): NCBI GI NO: 18412499 NR Description: putative membrane trafficking factor
  misc_feature (1)..(225): NCBI GI NO: 13123657 NR Description: phosphatase-like protein Mtc923
  misc_feature (1)..(225): NCBI GI NO: 7487458 NR Description: hypothetical protein T27D20
  misc_feature (1)..(226): NCBI GI NO: 13123659 NR Description: phosphatase-like protein Psc923 [Pisum sativum]
  misc_feature (1)..(225): NCBI GI NO: 15234731 NR Description: putative protein; protein id: At4g22150.1
  misc_feature (1)..(225): NCBI GI NO: 18414442 NR Description: phosphatase like protein; protein id: At4g15410
  misc_feature (1)..(225): NCBI GI NO: 15292665 NR Description: putative phosphatase [Arabidopsis thaliana]
  misc_feature (1)..(222): NCBI GI NO: 7485149 NR Description: hypothetical protein - Arabidopsis thaliana
  misc_feature (1)..(207): NCBI GI NO: 40739694 NR Description: hypothetical protein AN8228.2
  misc_feature (1)..(226): NCBI GI NO: 20149635 NR Description: p47 [Homo sapiens]
MPPFLGGESSSSRSFTGTGRLLTGETVPSAAPQEPVPIRIRHNIHLWNNGFTVDDGPLRYYDDPENEEFLESLKMSKCPKELVPTDGEHVDVSVIKRMEDYREPVRPQSAFQGVGRTLGGGPSPDESATPAPAPAAPAASRSAGIVVDDSQPFTSIQLRLADGTRMVARFNMHHTVGDIRSFIDASRPGTARPYQLQTGFPPKQLADPTQTVVQAGLANSVIMQKM

SEQ ID NO: 26181 - DNA, 1862 bp, Zea mays subsp. mays
  misc_feature (1)..(1862): Ceres Seq. ID no. 12344032
ctcgttccctcgagaactgtaccatcacgcgccgcccgcccgcccttgattgagcagggactgggagagagggtgaaagggggcaagaaaacgcttcttgttgccgctgtgcttctgcggatccgtggctgcgcacgccggcggggaagaggagtcgctggcggcgcgcctccagtctttcttcacctccgtgctctccgggctcttcggccaggccgaggccgaggacgaggacgaagagatgcccacgcgcaaccacaacgctgccgcggctgccgctccgcagcatcaccatcacaaccgaggtggtgctcccgctcttggaaagagcaaggccgtgcccggccgagctgatgccatgaaccggcgagcccccctcggcgatattggcaacctcgtcagcgtccgcccagccgaagggaaacctcagctgcaggagcagatcaatcgccccatcacgcgaagcttcggcgctcagctcgtgaagaacgtgcaggcgaatgccgcaatcaagaatgccgcaatcctacccgcgaggcatgcgccgaggcaggaaaggaaggctcctgccaagcagccgcctcctgaggatgtcatagtactcagctccgactctgaacaaagcaggacgcagttggagagcagcgctagctccgtccggtcgaggaagaaggtcatcaacaccctttcttctgtgctctcggctcgctcaaaggctgcctgtggaatcactgacaagaggcggcaagtagtagtgatcgaagacatcgacaagttggacgtcaacaatgagctcgcagttgtggaatacattgaggacatctacacgttctacaagattgctcagcatgacagacggccatgtgattatatagacacccaagtcgagatcaaccctaagatgagggctatcctagctgattggataattgaagtacaccacaagttcgctctgatgccggagactctctacttgaccatgtacatcatcgatcagtacctctcgctgcaaccagtcctgcgaagggagctgcagctggtcggtgtttcagctatgctgatcgcctgcaagtacgaggagatttgggccccagaggtgaacgatttcattcttatatcagacagtgcatacagcagggagcagatcctttcgatggagaagggaatcctgaatagcctggagtggaacctcactgtccctacagtatacatgttccttgttcgttttctgaaggcggcaaccttgggcaacaaagttgagaaagagatggagaatatggtcttcttcttcgctgaactggcgctgatgcagtacggcttggtgacgcggctgccttcgctggtcgctgcttcggttgtctacgcagccaggctcactctcaagagggctcccctctggaccgacaccctcaagcaccacacgggcttcagagagtcagagacagagctaatcgagtgcacgaagttgctggtcagcgcacactcgtccaccgctgacagcaagctgaggtctgtatacaagaagtattccagtgagcagttcggaggtgtcgcgcttcgcccacccgcagccgcagtggagatcaagtaaacgaagataacttcgtgctagtgtttgttagtataatgtaatggaaggcgagcctgacattcgctagggtctatccgtctatgtttgcttgtcggggtagtcaagaaagtttgaatgcttgaggcagccgtttgtttggtaggctgttctcagagtccaggtgttatctgacttgtgatggcatgttgtgtttcatgtgatggatatcattagaatcctaatctagtacgatatctattcatgaatataaatggtatttattcatttgttc

SEQ ID NO: 26182 - protein, 449 aa, Zea mays subsp. mays
  peptide (1)..(449): Ceres Seq. ID no. 12344033
  misc_feature (193)..(318): Pfam Name: Pfam Description:  Cyclin, N-terminal domain
  misc_feature (40)..(449): NCBI GI NO: 2130119 NR Description: cyclin Ia - maize
  misc_feature (40)..(449): NCBI GI NO: 516554 NR Description: cyclin IaZm
  misc_feature (1)..(443): NCBI GI NO: 34909050 NR Description: putative cyclin Ia
  misc_feature (1)..(445): NCBI GI NO: 2130120 NR Description: cyclin Ib - maize
  misc_feature (1)..(446): NCBI GI NO: 7438506 NR Description: mitosis-specific cyclin B-type
  misc_feature (28)..(443): NCBI GI NO: 6093215 NR Description: CYCB1-1 protein [Petunia x hybrida]
  misc_feature (15)..(446): NCBI GI NO: 461725 NR Description: G2/mitotic-specific cyclin 1
  misc_feature (22)..(446): NCBI GI NO: 7438499 NR Description: mitosis-specific cyclin - parsley
  misc_feature (15)..(446): NCBI GI NO: 9502284 NR Description: cyclin [Cicer arietinum]
  misc_feature (20)..(446): NCBI GI NO: 7438485 NR Description: mitosis-specific cyclin CYM
MPTRNHNAAAAAAPQHHHHNRGGAPALGKSKAVPGRADAMNRRAPLGDIGNLVSVRPAEGKPQLQEQINRPITRSFGAQLVKNVQANAAIKNAAILPARHAPRQERKAPAKQPPPEDVIVLSSDSEQSRTQLESSASSVRSRKKVINTLSSVLSARSKAACGITDKRRQVVVIEDIDKLDVNNELAVVEYIEDIYTFYKIAQHDRRPCDYIDTQVEINPKMRAILADWIIEVHHKFALMPETLYLTMYIIDQYLSLQPVLRRELQLVGVSAMLIACKYEEIWAPEVNDFILISDSAYSREQILSMEKGILNSLEWNLTVPTVYMFLVRFLKAATLGNKVEKEMENMVFFFAELALMQYGLVTRLPSLVAASVVYAARLTLKRAPLWTDTLKHHTGFRESETELIECTKLLVSAHSSTADSKLRSVYKKYSSEQFGGVALRPPAAAVEIK

SEQ ID NO: 26183 - protein, 410 aa, Zea mays subsp. mays
  peptide (1)..(410): Ceres Seq. ID no. 12344034
  misc_feature (154)..(279): Pfam Name: Pfam Description:  Cyclin, N-terminal domain
  misc_feature (1)..(410): NCBI GI NO: 2130119 NR Description: cyclin Ia - maize
  misc_feature (1)..(410): NCBI GI NO: 516554 NR Description: cyclin IaZm
  misc_feature (1)..(404): NCBI GI NO: 34909050 NR Description: putative cyclin Ia
  misc_feature (1)..(406): NCBI GI NO: 2130120 NR Description: cyclin Ib - maize
  misc_feature (1)..(407): NCBI GI NO: 7438506 NR Description: mitosis-specific cyclin B-type
  misc_feature (1)..(404): NCBI GI NO: 6093215 NR Description: CYCB1-1 protein [Petunia x hybrida]
  misc_feature (1)..(407): NCBI GI NO: 461725 NR Description: G2/mitotic-specific cyclin 1
  misc_feature (1)..(407): NCBI GI NO: 7438499 NR Description: mitosis-specific cyclin - parsley
  misc_feature (1)..(407): NCBI GI NO: 9502284 NR Description: cyclin [Cicer arietinum]
  misc_feature (1)..(407): NCBI GI NO: 7438485 NR Description: mitosis-specific cyclin CYM
MNRRAPLGDIGNLVSVRPAEGKPQLQEQINRPITRSFGAQLVKNVQANAAIKNAAILPARHAPRQERKAPAKQPPPEDVIVLSSDSEQSRTQLESSASSVRSRKKVINTLSSVLSARSKAACGITDKRRQVVVIEDIDKLDVNNELAVVEYIEDIYTFYKIAQHDRRPCDYIDTQVEINPKMRAILADWIIEVHHKFALMPETLYLTMYIIDQYLSLQPVLRRELQLVGVSAMLIACKYEEIWAPEVNDFILISDSAYSREQILSMEKGILNSLEWNLTVPTVYMFLVRFLKAATLGNKVEKEMENMVFFFAELALMQYGLVTRLPSLVAASVVYAARLTLKRAPLWTDTLKHHTGFRESETELIECTKLLVSAHSSTADSKLRSVYKKYSSEQFGGVALRPPAAAVEIK

SEQ ID NO: 26184 - protein, 229 aa, Zea mays subsp. mays
  peptide (1)..(229): Ceres Seq. ID no. 12344035
  misc_feature (1)..(98): Pfam Name: Pfam Description:  Cyclin, N-terminal domain
  misc_feature (1)..(229): NCBI GI NO: 2130119 NR Description: cyclin Ia - maize
  misc_feature (1)..(229): NCBI GI NO: 516554 NR Description: cyclin IaZm
  misc_feature (1)..(223): NCBI GI NO: 34909050 NR Description: putative cyclin Ia
  misc_feature (1)..(225): NCBI GI NO: 2130120 NR Description: cyclin Ib - maize
  misc_feature (1)..(226): NCBI GI NO: 7438506 NR Description: mitosis-specific cyclin B-type
  misc_feature (1)..(223): NCBI GI NO: 6093215 NR Description: CYCB1-1 protein [Petunia x hybrida]
  misc_feature (1)..(226): NCBI GI NO: 461725 NR Description: G2/mitotic-specific cyclin 1
  misc_feature (1)..(226): NCBI GI NO: 7438499 NR Description: mitosis-specific cyclin - parsley
  misc_feature (1)..(226): NCBI GI NO: 9502284 NR Description: cyclin [Cicer arietinum]
  misc_feature (1)..(226): NCBI GI NO: 7438485 NR Description: mitosis-specific cyclin CYM
MRAILADWIIEVHHKFALMPETLYLTMYIIDQYLSLQPVLRRELQLVGVSAMLIACKYEEIWAPEVNDFILISDSAYSREQILSMEKGILNSLEWNLTVPTVYMFLVRFLKAATLGNKVEKEMENMVFFFAELALMQYGLVTRLPSLVAASVVYAARLTLKRAPLWTDTLKHHTGFRESETELIECTKLLVSAHSSTADSKLRSVYKKYSSEQFGGVALRPPAAAVEIK

SEQ ID NO: 26185 - DNA, 1487 bp, Zea mays subsp. mays
  misc_feature (1)..(1487): Ceres Seq. ID no. 12409925
aaaacctctcctgccgccgccgccatggagagtgcgccgcaaacccccaccatggcggccgccggcgatgtccttcgcgtggccgacctcccgggacgaggtcgcggtctcgttgccgcccgcatcgtccgcgagggtgaggtgctcttctccgagcctcccgtcctcctctacccgtcgactctctcctccctccgctcctactgctccgcctgcttccgctccctcacccccgccgccacgattccctgcgtttcctgccgcgccgctgccttctgctccccggcctgcgccgccgcttcgcacccgcacctcctctgtgccgcgctctcccacggcggcggcgctggcctcgccgccgccgcccccaccgaggcgatccaagagccgctcctcttcctcctctccgcctactccctcccggagtcaaccatgcgctccatgctctctctctcctcggcgccgcccccgcccccgggcgcgcaggacgccgcggggctccatgctgctgtggcagccctagcgccgccgcacatgcttccccagggcttgtcgccagacctaacggcggctctcctcgccaaggaccggggcaatagcttcgccatcatggagccgtaccgacacgggatgtcgctcgagctcctgaaggcgcgggcctacgcagtctacccccgtgcttcgctgttcaaccatgactgcctgcccaatgcgtgccatttcgattaccccgacaggcctgggccagggaacactgacattgtggtgcgtgcactccatgacatacccgaggggagggaggtctgcatcagctactttgcggctaattggaggtatgctgataggcagcgcaggctgctggaggattatggattccggtgcgagtgtgatcgctgtcaggtggagagtcagtggaaggatgatgatgataacaatggagatgatggggatgacaccatggaagaggaggatgaggatgatgctggagatagaggtgatgatgggattgaggaggaagagggggatggtgctaccaatggcggtgatgatgatttcccacatgcctacttctttgtcaggtacttatgtgacaatgagggttgttggggtatgcttgctccattgccaccctcaccaaacggggacctgtcccatgtgtttgaatgcaatctctgtgggaagctgaggaaggaagaggatgtcattcctgatgagggcacttctggcatggtccattagtttgatgaaaacatactgatccatgtgctgcttcttttagtgggagtcagggaagtctgttgtttaaatctactgactgaagtatcccagctccaatgagaggctgcaataataaaaatccaaaaggttaagagtgagtatggtcctaataaggcatcaaaatgtcttttttgtagagaagatagccatatgcagactgtaatagcttcaaactagtttccaaagaaggataattatgactcaatttt

SEQ ID NO: 26186 - protein, 412 aa, Zea mays subsp. mays
  peptide (1)..(412): Ceres Seq. ID no. 12409926
  misc_feature (24)..(280): Pfam Name: Pfam Description:  SET domain
  misc_feature (21)..(410): NCBI GI NO: 40253403 NR Description: SET-domain transcriptional regulator-like protein
  misc_feature (128)..(410): NCBI GI NO: 40253402 NR Description: SET-domain transcriptional regulator-like protein
  misc_feature (24)..(399): NCBI GI NO: 30680748 NR Description: SET-domain transcriptional regulator family
  misc_feature (24)..(337): NCBI GI NO: 18399103 NR Description: putative SET-domain transcriptional regulator
  misc_feature (21)..(110): NCBI GI NO: 40253402 NR Description: SET-domain transcriptional regulator-like protein
  misc_feature (25)..(299): NCBI GI NO: 30680137 NR Description: SET-domain transcriptional regulator family
  misc_feature (302)..(351): NCBI GI NO: 4154097 NR Description: unknown [Human herpesvirus 8]
  misc_feature (297)..(351): NCBI GI NO: 4154097 NR Description: unknown [Human herpesvirus 8]
  misc_feature (295)..(351): NCBI GI NO: 4154097 NR Description: unknown [Human herpesvirus 8]
  misc_feature (302)..(351): NCBI GI NO: 9886896 NR Description: Orf73 [Human herpesvirus 8]
KTSPAAAAMESAPQTPTMAAAGDVLRVADLPGRGRGLVAARIVREGEVLFSEPPVLLYPSTLSSLRSYCSACFRSLTPAATIPCVSCRAAAFCSPACAAASHPHLLCAALSHGGGAGLAAAAPTEAIQEPLLFLLSAYSLPESTMRSMLSLSSAPPPPPGAQDAAGLHAAVAALAPPHMLPQGLSPDLTAALLAKDRGNSFAIMEPYRHGMSLELLKARAYAVYPRASLFNHDCLPNACHFDYPDRPGPGNTDIVVRALHDIPEGREVCISYFAANWRYADRQRRLLEDYGFRCECDRCQVESQWKDDDDNNGDDGDDTMEEEDEDDAGDRGDDGIEEEEGDGATNGGDDDFPHAYFFVRYLCDNEGCWGMLAPLPPSPNGDLSHVFECNLCGKLRKEEDVIPDEGTSGMVH

SEQ ID NO: 26187 - protein, 404 aa, Zea mays subsp. mays
  peptide (1)..(404): Ceres Seq. ID no. 12409927
  misc_feature (16)..(272): Pfam Name: Pfam Description:  SET domain
  misc_feature (13)..(402): NCBI GI NO: 40253403 NR Description: SET-domain transcriptional regulator-like protein
  misc_feature (120)..(402): NCBI GI NO: 40253402 NR Description: SET-domain transcriptional regulator-like protein
  misc_feature (16)..(391): NCBI GI NO: 30680748 NR Description: SET-domain transcriptional regulator family
  misc_feature (16)..(329): NCBI GI NO: 18399103 NR Description: putative SET-domain transcriptional regulator
  misc_feature (13)..(102): NCBI GI NO: 40253402 NR Description: SET-domain transcriptional regulator-like protein
  misc_feature (17)..(291): NCBI GI NO: 30680137 NR Description: SET-domain transcriptional regulator family
  misc_feature (294)..(343): NCBI GI NO: 4154097 NR Description: unknown [Human herpesvirus 8]
  misc_feature (289)..(343): NCBI GI NO: 4154097 NR Description: unknown [Human herpesvirus 8]
  misc_feature (287)..(343): NCBI GI NO: 4154097 NR Description: unknown [Human herpesvirus 8]
  misc_feature (294)..(343): NCBI GI NO: 9886896 NR Description: Orf73 [Human herpesvirus 8]
MESAPQTPTMAAAGDVLRVADLPGRGRGLVAARIVREGEVLFSEPPVLLYPSTLSSLRSYCSACFRSLTPAATIPCVSCRAAAFCSPACAAASHPHLLCAALSHGGGAGLAAAAPTEAIQEPLLFLLSAYSLPESTMRSMLSLSSAPPPPPGAQDAAGLHAAVAALAPPHMLPQGLSPDLTAALLAKDRGNSFAIMEPYRHGMSLELLKARAYAVYPRASLFNHDCLPNACHFDYPDRPGPGNTDIVVRALHDIPEGREVCISYFAANWRYADRQRRLLEDYGFRCECDRCQVESQWKDDDDNNGDDGDDTMEEEDEDDAGDRGDDGIEEEEGDGATNGGDDDFPHAYFFVRYLCDNEGCWGMLAPLPPSPNGDLSHVFECNLCGKLRKEEDVIPDEGTSGMVH

SEQ ID NO: 26188 - protein, 395 aa, Zea mays subsp. mays
  peptide (1)..(395): Ceres Seq. ID no. 12409928
  misc_feature (7)..(263): Pfam Name: Pfam Description:  SET domain
  misc_feature (4)..(393): NCBI GI NO: 40253403 NR Description: SET-domain transcriptional regulator-like protein
  misc_feature (111)..(393): NCBI GI NO: 40253402 NR Description: SET-domain transcriptional regulator-like protein
  misc_feature (7)..(382): NCBI GI NO: 30680748 NR Description: SET-domain transcriptional regulator family
  misc_feature (7)..(320): NCBI GI NO: 18399103 NR Description: putative SET-domain transcriptional regulator
  misc_feature (4)..(93): NCBI GI NO: 40253402 NR Description: SET-domain transcriptional regulator-like protein
  misc_feature (8)..(282): NCBI GI NO: 30680137 NR Description: SET-domain transcriptional regulator family
  misc_feature (285)..(334): NCBI GI NO: 4154097 NR Description: unknown [Human herpesvirus 8]
  misc_feature (280)..(334): NCBI GI NO: 4154097 NR Description: unknown [Human herpesvirus 8]
  misc_feature (278)..(334): NCBI GI NO: 4154097 NR Description: unknown [Human herpesvirus 8]
  misc_feature (285)..(334): NCBI GI NO: 9886896 NR Description: Orf73 [Human herpesvirus 8]
MAAAGDVLRVADLPGRGRGLVAARIVREGEVLFSEPPVLLYPSTLSSLRSYCSACFRSLTPAATIPCVSCRAAAFCSPACAAASHPHLLCAALSHGGGAGLAAAAPTEAIQEPLLFLLSAYSLPESTMRSMLSLSSAPPPPPGAQDAAGLHAAVAALAPPHMLPQGLSPDLTAALLAKDRGNSFAIMEPYRHGMSLELLKARAYAVYPRASLFNHDCLPNACHFDYPDRPGPGNTDIVVRALHDIPEGREVCISYFAANWRYADRQRRLLEDYGFRCECDRCQVESQWKDDDDNNGDDGDDTMEEEDEDDAGDRGDDGIEEEEGDGATNGGDDDFPHAYFFVRYLCDNEGCWGMLAPLPPSPNGDLSHVFECNLCGKLRKEEDVIPDEGTSGMVH

SEQ ID NO: 26189 - DNA, 1672 bp, Zea mays subsp. mays
  misc_feature (1)..(1672): Ceres Seq. ID no. 12566560
aattccgctgcatacttgcattgcatctcatccctcctgctcctgcgtcctcctcctctatttctctcctgctgcttgctactacctcatcgatccattccatccatcgccgaggggggagggccgccgcccgcccgggtcgcatcgcatcgcccggtcggccggggactcggggcaggcgagcgacactagctataaaagacctcccgccgcctgcgactgggccgtgtgcaagcaaagcgcaaggccgatctggggttggagggccggccatggtgatgatgatgcggtcgtgcctcggcggcggcctgctaccggtggcggtcatgctctgcctcaacgtggtggcggcggtcatggtgtcgctcgtcaaggtggccatggacggcggcatgaaaccgctcgtgatcgtcaccctgcagcagctcaccgccgccgtcttcctcgcgccaatcgcattcttcaaggagaggaagtcgaggccaaagctgacgctggagatcttcgcctacatcttcgtcagtgcggcgctcggcctgcgccatatattgcagggcagctcttcgtcagtacatgatcttcgtggccctgcgctacaccacggccaccttcgtgaccgccttctccaacatcgcccccgtgctcaccttcctcctggccgtcgctacgcggtccgaagcgctggacctcaagagcaggacggggttggcgaagctgctgggcacgctggtgtcgctggccggcgccatggtgctcaccctctacaagggcgtggcgctcacccacgcggcggcagcctcgcaggaccaccagcagcactcccacggccggttgccgccgagcgccgccgacagccgcggcaagtggacgctgggcaccgtggccatcctgggcaactgcgtctgcctctcctgctggttcctgctccacggccgcctcgccaagaagtacccgcacgtctactcctgcaacgcgctcatgtccttgctcagcttcctccaggtcgccgtcgtcggcctctgcacccagcgcagcatctccccctggatcgtcaccagcaagttcaacatcctcaccgtcctatacgccggcatcgtcggctgcggcgtctcgttcgtgctggtgacatggtgcatcgagaagagaggagccgtgttcgtggccgccttcataccggtggtgcagatcatcgtctccgtcatcgacttctccatcctgcacgagcagctctacctcggaaggtacgcacggacacggtaccatgccatcactgaatggcaatcgacctgatcgaaagtgaagtcacctgctctgctctgctctgcttccccctttgtgctgtgcagcgtgctgggatcagtgctagtgataggtggcctttaccttctgctgtggggcaagaggcaggaggccctgcactgtcctcctcctcctccaaaggttgccgaagaagaccctgctgacaaagagcagcagcaagtgcagcacaactgaagacggacagcatcctctgactgtttggtcgtttggttgtaacagtgccagcaataagatctctctgcctccttttcttttcttttggtgtctcaggggggtgggcaatgttccttccttctcagatcgatcaccaacaaagtgtttagattctaatccaaaacagtagaatggtctt

SEQ ID NO: 26190 - protein, 423 aa, Zea mays subsp. mays
  peptide (1)..(423): Ceres Seq. ID no. 12566561
  misc_feature (99)..(178): NCBI GI NO: 6815050 NR Description: ESTs AU078644
  misc_feature (99)..(178): NCBI GI NO: 34897774 NR Description: ESTs AU078644
  misc_feature (104)..(178): NCBI GI NO: 34897816 NR Description: P0514G12.28
  misc_feature (105)..(178): NCBI GI NO: 34897814 NR Description: P0514G12.27
  misc_feature (125)..(159): NCBI GI NO: 32489301 NR Description: OSJNBa0028I23.24
  misc_feature (106)..(178): NCBI GI NO: 30689857 NR Description: nodulin N21 family protein [Arabidopsis thaliana]
  misc_feature (99)..(178): NCBI GI NO: 15234185 NR Description: unknown protein; protein id: At4g01450.1
  misc_feature (105)..(178): NCBI GI NO: 15234179 NR Description: unknown protein; protein id: At4g01430
  misc_feature (106)..(178): NCBI GI NO: 38605909 NR Description: OSJNBb0088C09.3
  misc_feature (104)..(178): NCBI GI NO: 28932880 NR Description: nodulin-like protein [Gossypium hirsutum]
FRCILALHLIPPAPASSSSISLLLLATTSSIHSIHRRGGRAAARPGRIASPGRPGTRGRRATLAIKDLPPPATGPCASKAQGRSGVGGPAMVMMMRSCLGGGLLPVAVMLCLNVVAAVMVSLVKVAMDGGMKPLVIVTLQQLTAAVFLAPIAFFKERKSRPKLTLEIFAYIFVSAALGLRHILQGSSSSVHDLRGPALHHGHLRDRLLQHRPRAHLPPGRRYAVRSAGPQEQDGVGEAAGHAGVAGRRHGAHPLQGRGAHPRGGSLAGPPAALPRPVAAERRRQPRQVDAGHRGHPGQLRLPLLLVPAPRPPRQEVPARLLLQRAHVLAQLPPGRRRRPLHPAQHLPLDRHQQVQHPHRPIRRHRRLRRLVRAGDMVHREERSRVRGRLHTGGADHRLRHRLLHPARAALPRKVRTDTVPCHH

SEQ ID NO: 26191 - protein, 333 aa, Zea mays subsp. mays
  peptide (1)..(333): Ceres Seq. ID no. 12566562
  misc_feature (9)..(88): NCBI GI NO: 6815050 NR Description: ESTs AU078644
  misc_feature (9)..(88): NCBI GI NO: 34897774 NR Description: ESTs AU078644
  misc_feature (14)..(88): NCBI GI NO: 34897816 NR Description: P0514G12.28
  misc_feature (15)..(88): NCBI GI NO: 34897814 NR Description: P0514G12.27
  misc_feature (35)..(69): NCBI GI NO: 32489301 NR Description: OSJNBa0028I23.24
  misc_feature (16)..(88): NCBI GI NO: 30689857 NR Description: nodulin N21 family protein [Arabidopsis thaliana]
  misc_feature (9)..(88): NCBI GI NO: 15234185 NR Description: unknown protein; protein id: At4g01450.1
  misc_feature (15)..(88): NCBI GI NO: 15234179 NR Description: unknown protein; protein id: At4g01430
  misc_feature (16)..(88): NCBI GI NO: 38605909 NR Description: OSJNBb0088C09.3
  misc_feature (14)..(88): NCBI GI NO: 28932880 NR Description: nodulin-like protein [Gossypium hirsutum]
MVMMMRSCLGGGLLPVAVMLCLNVVAAVMVSLVKVAMDGGMKPLVIVTLQQLTAAVFLAPIAFFKERKSRPKLTLEIFAYIFVSAALGLRHILQGSSSSVHDLRGPALHHGHLRDRLLQHRPRAHLPPGRRYAVRSAGPQEQDGVGEAAGHAGVAGRRHGAHPLQGRGAHPRGGSLAGPPAALPRPVAAERRRQPRQVDAGHRGHPGQLRLPLLLVPAPRPPRQEVPARLLLQRAHVLAQLPPGRRRRPLHPAQHLPLDRHQQVQHPHRPIRRHRRLRRLVRAGDMVHREERSRVRGRLHTGGADHRLRHRLLHPARAALPRKVRTDTVPCHH

SEQ ID NO: 26192 - protein, 331 aa, Zea mays subsp. mays
  peptide (1)..(331): Ceres Seq. ID no. 12566563
  misc_feature (7)..(86): NCBI GI NO: 6815050 NR Description: ESTs AU078644
  misc_feature (7)..(86): NCBI GI NO: 34897774 NR Description: ESTs AU078644
  misc_feature (12)..(86): NCBI GI NO: 34897816 NR Description: P0514G12.28
  misc_feature (13)..(86): NCBI GI NO: 34897814 NR Description: P0514G12.27
  misc_feature (33)..(67): NCBI GI NO: 32489301 NR Description: OSJNBa0028I23.24
  misc_feature (14)..(86): NCBI GI NO: 30689857 NR Description: nodulin N21 family protein [Arabidopsis thaliana]
  misc_feature (7)..(86): NCBI GI NO: 15234185 NR Description: unknown protein; protein id: At4g01450.1
  misc_feature (13)..(86): NCBI GI NO: 15234179 NR Description: unknown protein; protein id: At4g01430
  misc_feature (14)..(86): NCBI GI NO: 38605909 NR Description: OSJNBb0088C09.3
  misc_feature (12)..(86): NCBI GI NO: 28932880 NR Description: nodulin-like protein [Gossypium hirsutum]
MMMRSCLGGGLLPVAVMLCLNVVAAVMVSLVKVAMDGGMKPLVIVTLQQLTAAVFLAPIAFFKERKSRPKLTLEIFAYIFVSAALGLRHILQGSSSSVHDLRGPALHHGHLRDRLLQHRPRAHLPPGRRYAVRSAGPQEQDGVGEAAGHAGVAGRRHGAHPLQGRGAHPRGGSLAGPPAALPRPVAAERRRQPRQVDAGHRGHPGQLRLPLLLVPAPRPPRQEVPARLLLQRAHVLAQLPPGRRRRPLHPAQHLPLDRHQQVQHPHRPIRRHRRLRRLVRAGDMVHREERSRVRGRLHTGGADHRLRHRLLHPARAALPRKVRTDTVPCHH

SEQ ID NO: 26193 - DNA, 1600 bp, Zea mays subsp. mays
  misc_feature (1)..(1600): Ceres Seq. ID no. 12409921
atcctgtttcttgccgcactagaaacgtcgatccagcaatggctgctaccccgaccatcgttctggtgcccgtctggggcattggccacttcgtaccaatgctcgaggtcggcaagcggctgctcgcacgcagcgcactgcccctcaccgtcaccgtgctcgtaatgccgttgcctgcagaggcgaagcgggcgtccgagatcaccgagcacatacgccagcaggaagcctccggcctcgccatccgcttccaccatctgccagcggtggaacccccaaccgaccactcgggcatcgaggagtacatatcccgctacgtgcagctgtactcgccccacgtcaaggcggccgtcgccggggttgacgtgcccggtggccggcgtcgttgtcgacatcttctgcacggcgctgttcgacgcggcgcaccagctcggcgtgcccggcctacgtgtacctgatcaccagcgccgcgatgtgcgcgctcttgctgcgctccccgacgctcgacgaggaggtagccgtcgaggtcgagttcgagcaaatggaaggcggagtggacgtgccagggctgccgccggtgccggcgtcctgcctgccgacggggctggagaacagaaagatcccgacctatcgctggttcctgtacaacggcaggcgctatatggaagcagcaggcatcatcgtcaacaccattgccgaggccgagccgcgcgtcctcgcggccatcgccgacgggcggtgcacgcgtggtgtcccggcacctccggtgtactcgatcgggccggtgatcccctccaccccgcccgccgagcagcaggcgcaggagtgcgtgcgctggctcgactcgcagcctccgagctccgtggtgttcctatgcttcggcagcggtggctgcttcacggcgccccaagcgcacgagatagcgcacggcctggaccgcagcgggcatcgattcctgtgggtgctgcgcgggacgccggagcccggcacgaagttgccctcggacgggaacctcgcggagctgcttccggcggatttcttggcgaggacgaaggatagagggctcgtgtggcctaccaaggcgccgcagaaggagatactcgcccacgccgccgtgggaggcttcgtcacgcactgtggctggaactcggtcctcgagagcctctggcatggcgtgccgatggtgccatggccgcttggcgccgagcagcactacaacgcgttcacgctggtggccgacatgggcgtcgccgtggcgctgaacgtggaaaggaagaggaagaatttcgtggaggcgaccgagctggagcgagcggttaaagctctgatgtgcgacggcgagacagcgaggaaggttagggacaaggtcatggagataaaagccgcgtgccggaaggcaatggaggagggcggatcatcgaacatgtcgttgcagaggctctgtgatgcgctcgtcgaaggcgcggtgcacccgggaaagtgatgcccacagagttcaatcaggaggctctgtccaccagccatccaatggtgtacatgtattctgttatgagttctctgtttttagagcaagttaaataatattttttatgagttctcg

SEQ ID NO: 26194 - protein, 336 aa, Zea mays subsp. mays
  peptide (1)..(336): Ceres Seq. ID no. 12409922
  misc_feature (1)..(328): Pfam Name: Pfam Description:  UDP-glucoronosyl and UDP-glucosyl transferase
  misc_feature (1)..(332): NCBI GI NO: 34394651 NR Description: putative glucosyltransferase
  misc_feature (1)..(327): NCBI GI NO: 34394683 NR Description: putative flavonol 3-O-glucosyltransferase
  misc_feature (1)..(336): NCBI GI NO: 34394653 NR Description: putative glucosyltransferase-3
  misc_feature (1)..(323): NCBI GI NO: 34394688 NR Description: putative glucosyltransferase
  misc_feature (1)..(330): NCBI GI NO: 34394676 NR Description: putative glucosyltransferase
  misc_feature (1)..(328): NCBI GI NO: 34898742 NR Description: putative betanidin 6-O-glucosyltransferase
  misc_feature (1)..(334): NCBI GI NO: 34394680 NR Description: putative glucosyltransferase
  misc_feature (38)..(226): NCBI GI NO: 19911213 NR Description: glucosyltransferase like protein [Vigna angularis]
  misc_feature (1)..(329): NCBI GI NO: 14349251 NR Description: glucosyltransferase [Nicotiana tabacum]
  misc_feature (1)..(323): NCBI GI NO: 15234056 NR Description: putative flavonol glucosyltransferase
MCALLLRSPTLDEEVAVEVEFEQMEGGVDVPGLPPVPASCLPTGLENRKIPTYRWFLYNGRRYMEAAGIIVNTIAEAEPRVLAAIADGRCTRGVPAPPVYSIGPVIPSTPPAEQQAQECVRWLDSQPPSSVVFLCFGSGGCFTAPQAHEIAHGLDRSGHRFLWVLRGTPEPGTKLPSDGNLAELLPADFLARTKDRGLVWPTKAPQKEILAHAAVGGFVTHCGWNSVLESLWHGVPMVPWPLGAEQHYNAFTLVADMGVAVALNVERKRKNFVEATELERAVKALMCDGETARKVRDKVMEIKAACRKAMEEGGSSNMSLQRLCDALVEGAVHPGK

SEQ ID NO: 26195 - protein, 313 aa, Zea mays subsp. mays
  peptide (1)..(313): Ceres Seq. ID no. 12409923
  misc_feature (1)..(305): Pfam Name: Pfam Description:  UDP-glucoronosyl and UDP-glucosyl transferase
  misc_feature (1)..(309): NCBI GI NO: 34394651 NR Description: putative glucosyltransferase
  misc_feature (1)..(304): NCBI GI NO: 34394683 NR Description: putative flavonol 3-O-glucosyltransferase
  misc_feature (1)..(313): NCBI GI NO: 34394653 NR Description: putative glucosyltransferase-3
  misc_feature (1)..(300): NCBI GI NO: 34394688 NR Description: putative glucosyltransferase
  misc_feature (1)..(307): NCBI GI NO: 34394676 NR Description: putative glucosyltransferase
  misc_feature (1)..(305): NCBI GI NO: 34898742 NR Description: putative betanidin 6-O-glucosyltransferase
  misc_feature (1)..(311): NCBI GI NO: 34394680 NR Description: putative glucosyltransferase
  misc_feature (15)..(203): NCBI GI NO: 19911213 NR Description: glucosyltransferase like protein [Vigna angularis]
  misc_feature (1)..(306): NCBI GI NO: 14349251 NR Description: glucosyltransferase [Nicotiana tabacum]
  misc_feature (1)..(300): NCBI GI NO: 15234056 NR Description: putative flavonol glucosyltransferase
MEGGVDVPGLPPVPASCLPTGLENRKIPTYRWFLYNGRRYMEAAGIIVNTIAEAEPRVLAAIADGRCTRGVPAPPVYSIGPVIPSTPPAEQQAQECVRWLDSQPPSSVVFLCFGSGGCFTAPQAHEIAHGLDRSGHRFLWVLRGTPEPGTKLPSDGNLAELLPADFLARTKDRGLVWPTKAPQKEILAHAAVGGFVTHCGWNSVLESLWHGVPMVPWPLGAEQHYNAFTLVADMGVAVALNVERKRKNFVEATELERAVKALMCDGETARKVRDKVMEIKAACRKAMEEGGSSNMSLQRLCDALVEGAVHPGK

SEQ ID NO: 26196 - protein, 273 aa, Zea mays subsp. mays
  peptide (1)..(273): Ceres Seq. ID no. 12409924
  misc_feature (1)..(265): Pfam Name: Pfam Description:  UDP-glucoronosyl and UDP-glucosyl transferase
  misc_feature (1)..(269): NCBI GI NO: 34394651 NR Description: putative glucosyltransferase
  misc_feature (1)..(264): NCBI GI NO: 34394683 NR Description: putative flavonol 3-O-glucosyltransferase
  misc_feature (1)..(273): NCBI GI NO: 34394653 NR Description: putative glucosyltransferase-3
  misc_feature (1)..(260): NCBI GI NO: 34394688 NR Description: putative glucosyltransferase
  misc_feature (1)..(267): NCBI GI NO: 34394676 NR Description: putative glucosyltransferase
  misc_feature (1)..(265): NCBI GI NO: 34898742 NR Description: putative betanidin 6-O-glucosyltransferase
  misc_feature (1)..(271): NCBI GI NO: 34394680 NR Description: putative glucosyltransferase
  misc_feature (1)..(163): NCBI GI NO: 19911213 NR Description: glucosyltransferase like protein [Vigna angularis]
  misc_feature (1)..(266): NCBI GI NO: 14349251 NR Description: glucosyltransferase [Nicotiana tabacum]
  misc_feature (1)..(260): NCBI GI NO: 15234056 NR Description: putative flavonol glucosyltransferase
MEAAGIIVNTIAEAEPRVLAAIADGRCTRGVPAPPVYSIGPVIPSTPPAEQQAQECVRWLDSQPPSSVVFLCFGSGGCFTAPQAHEIAHGLDRSGHRFLWVLRGTPEPGTKLPSDGNLAELLPADFLARTKDRGLVWPTKAPQKEILAHAAVGGFVTHCGWNSVLESLWHGVPMVPWPLGAEQHYNAFTLVADMGVAVALNVERKRKNFVEATELERAVKALMCDGETARKVRDKVMEIKAACRKAMEEGGSSNMSLQRLCDALVEGAVHPGK

SEQ ID NO: 26197 - DNA, 1523 bp, Zea mays subsp. mays
  misc_feature (1)..(1523): Ceres Seq. ID no. 12363351
atttttccgtctcgccccaactgccgaccgccgccctcgccccggctcctccctttccctctagctagcaccaatcgttcatccagtctcacaaccgagctccccgaccaccagcacgcctcgcgcgtccctcccaacagcgtgctccagttccttcaatggcatctcgggcgcgcctgccgggcaccccggcctcgatcgccgtcctcatcctctccttcttccaaggtacgtacgtggtggctctgatccacttgcccgccgtggactgacgggctgcttgggtttgtgggtggtggtggatggaacccggtgcggcaccacgttcaccttcagcaaccgctgcggcgacacggtgtggccgggcctgctcgccggctcggggacgccgccgctggagaccacgggcttcgcgctggcgccggggcagtcgcgcgcgctgtacgcgccgcaggggtggtcgggccgcttctggggccgctccggctgcgacttcgacgccgcctccgccaagggctcctgcgccacgggcgactgcggctccggcgaggtcgagtgccgcggcgcgggggcgtccccgcccgccacgctcgccgagttcacgctcgacggcgccggcggcaaggacttctacgacgtcagcctcgtcgacggctacaacctgcccatgctcgtgcgggccaccgcgcccgaatgccccgacacggggtgcctcgtcgacctcaacgggctctgccccgacgagctccgcgccgcccacggccgcgcctgccgcagcgcctgcgaggcgttcggcagccccgagtactgctgcaacggcgcctacggcaaccccaacacctgccacccgtcacagtactcccagctcttcaagtcggcgtgccccaactcctacagctacgcctacgacgacgccacctccaccttcacctgcaaccacaccgattacaccatcaccttctgccccaaatccactccaaccagcgacaaatccgaacattcgtctcggaggccaagccacgagcaactggaagattcggtgtggcttgcatccttgaaggcaagtgacgccagtgctctggcaacaacgtcatggtcggcgtccattgtgctccgatctgccttggcaattgcagtggcgaccttgcttgctgcacaacttgcaccagatcatcctatggtcagcttgctatgattcatcatggttgcggttcttgatcggtaggagtcatctaagttattttctgacaagaagaggattagagcagtagcagtgatcagcaatgggaagagaatattgtgtaggctttttgtttgtggataggtgctagagaaggaatgatgtgttacaagttggcaactggaatttcatgaacgcattgcaaggcgattcaggttgctctgttgtcatcggcccctttttctatttttgcagtaaagcgcataaaaaacatctcgaatggatactgtaaccatttgatgtgcagaggttcacagagtaatgtgattttggttagaactcc

SEQ ID NO: 26198 - protein, 251 aa, Zea mays subsp. mays
  peptide (1)..(251): Ceres Seq. ID no. 12363352
  misc_feature (55)..(229): Pfam Name: Pfam Description:  Equine herpesvirus glycoprotein gp2
  misc_feature (59)..(92): NCBI GI NO: 18568262 NR Description: glycyl-tRNA synthetase [Zea mays]
  misc_feature (1)..(251): NCBI GI NO: 11360494 NR Description: antifreeze glycopeptide AFGP polyprotein precursor
  misc_feature (1)..(229): NCBI GI NO: 11360494 NR Description: antifreeze glycopeptide AFGP polyprotein precursor
  misc_feature (1)..(229): NCBI GI NO: 11360494 NR Description: antifreeze glycopeptide AFGP polyprotein precursor
  misc_feature (66)..(231): NCBI GI NO: 9630030 NR Description: unknown
  misc_feature (61)..(219): NCBI GI NO: 9630030 NR Description: unknown
  misc_feature (8)..(231): NCBI GI NO: 25989119 NR Description: unknown [Streptomyces aureofaciens]
  misc_feature (1)..(229): NCBI GI NO: 11360494 NR Description: antifreeze glycopeptide AFGP polyprotein precursor
  misc_feature (61)..(232): NCBI GI NO: 188864 NR Description: mucin
  misc_feature (3)..(231): NCBI GI NO: 27375632 NR Description: blr0521 [Bradyrhizobium japonicum]
MEPGAAPRSPSATAAATRCGRACSPARGRRRWRPRASRWRRGSRARCTRRRGGRAASGAAPAATSTPPPPRAPAPRATAAPARSSAAARGRPRPPRSPSSRSTAPAARTSTTSASSTATTCPCSCGPPRPNAPTRGASSTSTGSAPTSSAPPTAAPAAAPARRSAAPSTAATAPTATPTPATRHSTPSSSSRRAPTPTATPTTTPPPPSPATTPITPSPSAPNPLQPATNPNIRLGGQATSNWKIRCGLHP

SEQ ID NO: 26199 - protein, 175 aa, Zea mays subsp. mays
  peptide (1)..(175): Ceres Seq. ID no. 12363353
  misc_feature (1)..(100): Pfam Name: Pfam Description:  Thaumatin family
  misc_feature (1)..(165): NCBI GI NO: 37531042 NR Description: putative thaumatin-like protein
  misc_feature (1)..(112): NCBI GI NO: 21592749 NR Description: putative thaumatin-like protein
  misc_feature (1)..(112): NCBI GI NO: 7442168 NR Description: pathogenesis-related protein F20M13
  misc_feature (1)..(112): NCBI GI NO: 18420282 NR Description: putative thaumatin-like protein
  misc_feature (1)..(104): NCBI GI NO: 2262099 NR Description: thaumatin isolog [Arabidopsis thaliana]
  misc_feature (1)..(104): NCBI GI NO: 15233738 NR Description: thaumatin-like protein; protein id: At4g24180.1
  misc_feature (1)..(149): NCBI GI NO: 15233437 NR Description: thaumatin-like protein; protein id: At4g36010
  misc_feature (1)..(163): NCBI GI NO: 25296204 NR Description: hypothetical protein T20H2.19
  misc_feature (1)..(163): NCBI GI NO: 30686652 NR Description: thaumatin family [Arabidopsis thaliana]
  misc_feature (1)..(153): NCBI GI NO: 15222875 NR Description: thaumatin, putative; protein id: At1g75800
MLVRATAPECPDTGCLVDLNGLCPDELRAAHGRACRSACEAFGSPEYCCNGAYGNPNTCHPSQYSQLFKSACPNSYSYAYDDATSTFTCNHTDYTITFCPKSTPTSDKSEHSSRRPSHEQLEDSVWLASLKASDASALATTSWSASIVLRSALAIAVATLLAAQLAPDHPMVSLL

SEQ ID NO: 26200 - DNA, 1679 bp, Zea mays subsp. mays
  misc_feature (1)..(1679): Ceres Seq. ID no. 12435060
gcacgagaccattacctagaacatcctaatcgaaaaacattccatcggtcgtgaaaagaaaaagggaaacaaaccaagctagctagagaaaagaagaagctggtactagctagctagctagcttagctatgggcaccatcgtggacgctgacgtcgggttcgcggtgaagaggacgagcaggtcgctggtgccgcctgcgtcggcgacgccgcgggagacgctgcggctgtcggtgatcgaccgcgtggcggggctgcgccacctggtgcggtcgctgcacgtgttcgccgcgggcggcgacaagaagcggcagcaggcgacggcggcgacgccggccaaggcgctgcgggaggcgctggggaaggcgctggtggactactacccgttcgcggggcggttcgtggtggtggacgcggagggcggcggggagacgcgggtggcgtgcaccggcgagggcgcctggttcgtggaggccaacgccgcgtgctcgctcgaggaggcccgccacctcgaccaccccatgctcatccccaaggagcagctgctgccggagccctcgccggacgtcaacccgctggacatgccgctcatgatgcaggtgacggagttctcgtgcggcggcttccgtggtggggctcatctccgtgcacacgatcgcggacggcctgggcgcggggcagttcatcaacacggtggcgacgtacgcgcggggcgccacgtccgccacgcccaagcccgtgtggggcgcgcgacgtgatcccggacccgcccaagatgccggcgcctccgccgcgcctggacctgctggacctgcgctacttcacggcggacctgagcccggaccacatcggcaaggtgaaggcgcggtacctggagtcgacggggcagcgctgctcggcgttcgacgtgtgcgtggcgcgcacgtggcaggcccgcgtgcgcgcgctgcggctccccgacccggccgcgcccgtgcacgtctgcttcttcgccaacacccgccacctgcttccggcggcggccacggccgggttctacggcaactgcttctacacggtgaaggcgacgcgggcgagcggggaggtggcggcggccgacgtggtggacgttgtgcgcgccatccgcgacgccaaggcgaggctgggcgccgacttcgcgcgctgggccgcgggcggcttcgaccgcgacccctacgagctcaccttcacctacgactcgctcttcgtctccgactggacgcgcctcggcttcctcgaggcggactacggctggggcaccccgacgcacgtcctgcccttctcctaccacccgttcatggcagtcgccgtcatcggcgccccgcctaagcccaagcccggcgcccgcatcatgaccatgtgcgtccaggagcagcacctgcccgagttccaggagcagatgatgagccagcaggccgcctaggcctagctagctcctgatcacccccatcaccatgttcatctatatcgtcatcgtcatcatgcatgcggcgtgcacgtttggaatatttgttaatcaatcaataacggtgaggtgaggttgctattatatgaagtagtagtaacacctcaacaacaacaacccaatgcaatgggaactcgcgtgtaatttgctccttcttcttcaaatataattccgcctcaattgtatgtatgtatgt

SEQ ID NO: 26201 - protein, 221 aa, Zea mays subsp. mays
  peptide (1)..(221): Ceres Seq. ID no. 12435061
  misc_feature (1)..(215): Pfam Name: Pfam Description:  Transferase family
  misc_feature (1)..(215): NCBI GI NO: 34912654 NR Description: putative acetyl transferase
  misc_feature (1)..(215): NCBI GI NO: 34906304 NR Description: unnamed protein product
  misc_feature (1)..(215): NCBI GI NO: 18558566 NR Description: putative 0-deacetylbaccatin III-10-O-acetyltransferase-like protein
  misc_feature (1)..(216): NCBI GI NO: 34906150 NR Description: putative 0-deacetylbaccatin III-10-O-acetyltransferase
  misc_feature (1)..(215): NCBI GI NO: 34912652 NR Description: putative acetyl transferase
  misc_feature (1)..(218): NCBI GI NO: 15228696 NR Description: putative protein; protein id: At3g62160.1
  misc_feature (86)..(215): NCBI GI NO: 34894340 NR Description: unnamed protein product
  misc_feature (1)..(215): NCBI GI NO: 38347149 NR Description: OSJNBa0039G19.9
  misc_feature (1)..(217): NCBI GI NO: 38346537 NR Description: OSJNBa0040D17.12
  misc_feature (4)..(212): NCBI GI NO: 28558088 NR Description: 3'-N-debenzoyl-2'-deoxytaxol N-benzoyltransferase
MPAPPPRLDLLDLRYFTADLSPDHIGKVKARYLESTGQRCSAFDVCVARTWQARVRALRLPDPAAPVHVCFFANTRHLLPAAATAGFYGNCFYTVKATRASGEVAAADVVDVVRAIRDAKARLGADFARWAAGGFDRDPYELTFTYDSLFVSDWTRLGFLEADYGWGTPTHVLPFSYHPFMAVAVIGAPPKPKPGARIMTMCVQEQHLPEFQEQMMSQQAA

SEQ ID NO: 26202 - protein, 209 aa, Zea mays subsp. mays
  peptide (1)..(209): Ceres Seq. ID no. 12435062
  misc_feature (12)..(169): Pfam Name: Pfam Description:  Transferase family
  misc_feature (12)..(169): NCBI GI NO: 34912654 NR Description: putative acetyl transferase
  misc_feature (11)..(195): NCBI GI NO: 34906304 NR Description: unnamed protein product
  misc_feature (12)..(195): NCBI GI NO: 34906150 NR Description: putative 0-deacetylbaccatin III-10-O-acetyltransferase
  misc_feature (13)..(169): NCBI GI NO: 34912652 NR Description: putative acetyl transferase
  misc_feature (9)..(166): NCBI GI NO: 15228696 NR Description: putative protein; protein id: At3g62160.1
  misc_feature (23)..(166): NCBI GI NO: 38347149 NR Description: OSJNBa0039G19.9
  misc_feature (9)..(158): NCBI GI NO: 34894342 NR Description: unnamed protein product
  misc_feature (9)..(178): NCBI GI NO: 38346537 NR Description: OSJNBa0040D17.12
  misc_feature (11)..(184): NCBI GI NO: 28558088 NR Description: 3'-N-debenzoyl-2'-deoxytaxol N-benzoyltransferase
  misc_feature (11)..(166): NCBI GI NO: 28558099 NR Description: 10-deacetylbaccatin III 10-O-acetyltransferase
MGTIVDADVGFAVKRTSRSLVPPASATPRETLRLSVIDRVAGLRHLVRSLHVFAAGGDKKRQQATAATPAKALREALGKALVDYYPFAGRFVVVDAEGGGETRVACTGEGAWFVEANAACSLEEARHLDHPMLIPKEQLLPEPSPDVNPLDMPLMMQVTEFSCGGFRGGAHLRAHDRGRPGRGAVHQHGGDVRAGRHVRHAQARVGRAT

SEQ ID NO: 26203 - DNA, 2059 bp, Zea mays subsp. mays
  misc_feature (1)..(2059): Ceres Seq. ID no. 12593811
aatttgatcaaccgccatccattctcctcctccgttgcagctgcggcatccatccagtagtccgaccaatccatggcttcagcgttcgggaccgcctccacttgcggcattaaacatgcacctgccggcgttgcgcttgctgcgcccatgaagcacctttccctcgtctcgccctcgctggtttcgcttccgcgcaagatgaggccgcgaaggaagtacaacttcagggtaaacgctgcaaaggagctgcatttcaacaaggatggctcggctatcaggaaaatgcaaaatggggtcaacaagcttgcagatctcgtcggggttactcttggaccaaaggggcgaaatgtagtcctcgaaagcaagtatggctcacctaaaattgtcaatgatggtgtcactgtggcaaaggaggttgaacttgaggaccctgttgaaaatattggtgctaaattggtccgccaagctgctgctaaaacaaatgacttggctggtgatgggacaaccacttcggttgtccttgctcaagggatgattactgagggtgtaaaggttgtagctgctggtgctaatccagtgcagatcacccgtggtattgagaaaacagccaaagcactagtcagtgaactccaaaagatgtccaaggaggttgaggacagtgagcttgctgatgttgctgcagttagtgcgggaaataactatgaaattgggaatatgataactgaggctatgaaaaaggttgggcggcagggagtggtcacacttgaagaaggaaagagtgctgaaaataacctctattctgttgagggaatgcagtttgaccgtggctatatttctccctactttgtgactgacagtgaaaaaatgacagtcgagtatgagaactgcaagcttctccttgtggacaagaaaattaacaatgccagagatcttatcactatcctggaggatgctattagaagtggatatccaattctaatagtggcagaggacattgagcaggaagctcttgcaacccttgtggttaataggcttagaggtgcattgaagattgctgctattaaggcccctggttttggagagcgcaaaagtcaatatcttgatgacattgctactctcactggaggcactgtcatcagagaagaagttggattatccttagacaaggcagacaatgcggtcctaggaactgctgctaaggttgtagttaccaaggattcaacaacaatagtgggagatggcactacacaggaggaagtgaacaaaagggtgacacaaatcaagaaccagattgaggctactgaacaagaatatgagagagaaaaactaaacgagaggatagctaaactctctggtggtgttgctgtcattcaggtaggagcacagacagaaactgagctcaaggaaaagaaattgagggttgaggatgccctgaatgctacaaaggcagcagtcgaggaaggtatcgttgtaggtggtggctgtacccttttgaggcttgcatcaaaatttgatgcaattatagagacccttgagaacgatgaacagaaggttggggctgaaattgtaaggaagtccttgagctatccacttaaattgattgcaaaaaatgcaggcgttaatggcagtgtggttactgagaaggttcttgccaatgagaacttcaggtatgggtacaatgcggctacaggggagtatgaggacttgatggctgctggtatcattgatcccaccaaggttgtgaggtgctgcttggagcatgctgcatcggtggcgaaaaccttcatcacctctgatgccgttgttgttgacgccaaggtggctgagcaagcaccatcatctcctgcaaacccaatggcaatgggtggtggctcaggttttgggttctaaattgttcagctgcccttcgttccatcgcagcgacagaatcttagtttcgagatataataataaattggatgatgttagtttcgagatattagttggatgttgttattgttgtctcaaattataaaaaatcaagtgcaagtaaccaagacagctgaaaaaaatagttttg

SEQ ID NO: 26204 - protein, 605 aa, Zea mays subsp. mays
  peptide (1)..(605): Ceres Seq. ID no. 12593812
  misc_feature (78)..(582): Pfam Name: Pfam Description:  TCP-1/cpn60 chaperonin family
  misc_feature (1)..(605): NCBI GI NO: 34897924 NR Description: ESTs C99033
  misc_feature (1)..(604): NCBI GI NO: 2506277 NR Description: RuBisCO subunit binding-protein beta subunit
  misc_feature (1)..(605): NCBI GI NO: 15231255 NR Description: chaperonin 60 beta, putative; protein id:At3g13470
  misc_feature (1)..(605): NCBI GI NO: 15222729 NR Description: Rubisco subunit binding-protein beta subunit
  misc_feature (1)..(605): NCBI GI NO: 7443855 NR Description: probable chaperonin 60 beta chain precursor
  misc_feature (1)..(605): NCBI GI NO: 81601 NR Description: chaperonin 60 beta precursor
  misc_feature (1)..(605): NCBI GI NO: 30696748 NR Description: chaperonin, putative [Arabidopsis thaliana]
  misc_feature (1)..(588): NCBI GI NO: 134104 NR Description: RuBisCO subunit binding-protein beta subunit
  misc_feature (102)..(605): NCBI GI NO: 2493650 NR Description: RUBISCO SUBUNIT BINDING-PROTEIN BETA SUBUNIT
  misc_feature (50)..(594): NCBI GI NO: 15222666 NR Description: chaperonin precursor, putative
MASAFGTASTCGIKHAPAGVALAAPMKHLSLVSPSLVSLPRKMRPRRKYNFRVNAAKELHFNKDGSAIRKMQNGVNKLADLVGVTLGPKGRNVVLESKYGSPKIVNDGVTVAKEVELEDPVENIGAKLVRQAAAKTNDLAGDGTTTSVVLAQGMITEGVKVVAAGANPVQITRGIEKTAKALVSELQKMSKEVEDSELADVAAVSAGNNYEIGNMITEAMKKVGRQGVVTLEEGKSAENNLYSVEGMQFDRGYISPYFVTDSEKMTVEYENCKLLLVDKKINNARDLITILEDAIRSGYPILIVAEDIEQEALATLVVNRLRGALKIAAIKAPGFGERKSQYLDDIATLTGGTVIREEVGLSLDKADNAVLGTAAKVVVTKDSTTIVGDGTTQEEVNKRVTQIKNQIEATEQEYEREKLNERIAKLSGGVAVIQVGAQTETELKEKKLRVEDALNATKAAVEEGIVVGGGCTLLRLASKFDAIIETLENDEQKVGAEIVRKSLSYPLKLIAKNAGVNGSVVTEKVLANENFRYGYNAATGEYEDLMAAGIIDPTKVVRCCLEHAASVAKTFITSDAVVVDAKVAEQAPSSPANPMAMGGGSGFGF

SEQ ID NO: 26205 - protein, 580 aa, Zea mays subsp. mays
  peptide (1)..(580): Ceres Seq. ID no. 12593813
  misc_feature (53)..(557): Pfam Name: Pfam Description:  TCP-1/cpn60 chaperonin family
  misc_feature (1)..(580): NCBI GI NO: 34897924 NR Description: ESTs C99033
  misc_feature (1)..(579): NCBI GI NO: 2506277 NR Description: RuBisCO subunit binding-protein beta subunit
  misc_feature (1)..(580): NCBI GI NO: 15231255 NR Description: chaperonin 60 beta, putative; protein id:At3g13470
  misc_feature (1)..(580): NCBI GI NO: 15222729 NR Description: Rubisco subunit binding-protein beta subunit
  misc_feature (1)..(580): NCBI GI NO: 7443855 NR Description: probable chaperonin 60 beta chain precursor
  misc_feature (1)..(580): NCBI GI NO: 81601 NR Description: chaperonin 60 beta precursor
  misc_feature (1)..(580): NCBI GI NO: 30696748 NR Description: chaperonin, putative [Arabidopsis thaliana]
  misc_feature (1)..(563): NCBI GI NO: 134104 NR Description: RuBisCO subunit binding-protein beta subunit
  misc_feature (77)..(580): NCBI GI NO: 2493650 NR Description: RUBISCO SUBUNIT BINDING-PROTEIN BETA SUBUNIT
  misc_feature (25)..(569): NCBI GI NO: 15222666 NR Description: chaperonin precursor, putative
MKHLSLVSPSLVSLPRKMRPRRKYNFRVNAAKELHFNKDGSAIRKMQNGVNKLADLVGVTLGPKGRNVVLESKYGSPKIVNDGVTVAKEVELEDPVENIGAKLVRQAAAKTNDLAGDGTTTSVVLAQGMITEGVKVVAAGANPVQITRGIEKTAKALVSELQKMSKEVEDSELADVAAVSAGNNYEIGNMITEAMKKVGRQGVVTLEEGKSAENNLYSVEGMQFDRGYISPYFVTDSEKMTVEYENCKLLLVDKKINNARDLITILEDAIRSGYPILIVAEDIEQEALATLVVNRLRGALKIAAIKAPGFGERKSQYLDDIATLTGGTVIREEVGLSLDKADNAVLGTAAKVVVTKDSTTIVGDGTTQEEVNKRVTQIKNQIEATEQEYEREKLNERIAKLSGGVAVIQVGAQTETELKEKKLRVEDALNATKAAVEEGIVVGGGCTLLRLASKFDAIIETLENDEQKVGAEIVRKSLSYPLKLIAKNAGVNGSVVTEKVLANENFRYGYNAATGEYEDLMAAGIIDPTKVVRCCLEHAASVAKTFITSDAVVVDAKVAEQAPSSPANPMAMGGGSGFGF

SEQ ID NO: 26206 - protein, 563 aa, Zea mays subsp. mays
  peptide (1)..(563): Ceres Seq. ID no. 12593814
  misc_feature (36)..(540): Pfam Name: Pfam Description:  TCP-1/cpn60 chaperonin family
  misc_feature (1)..(563): NCBI GI NO: 34897924 NR Description: ESTs C99033
  misc_feature (1)..(562): NCBI GI NO: 2506277 NR Description: RuBisCO subunit binding-protein beta subunit
  misc_feature (1)..(563): NCBI GI NO: 15231255 NR Description: chaperonin 60 beta, putative; protein id:At3g13470
  misc_feature (1)..(563): NCBI GI NO: 15222729 NR Description: Rubisco subunit binding-protein beta subunit
  misc_feature (1)..(563): NCBI GI NO: 7443855 NR Description: probable chaperonin 60 beta chain precursor
  misc_feature (1)..(563): NCBI GI NO: 81601 NR Description: chaperonin 60 beta precursor
  misc_feature (1)..(563): NCBI GI NO: 30696748 NR Description: chaperonin, putative [Arabidopsis thaliana]
  misc_feature (1)..(546): NCBI GI NO: 134104 NR Description: RuBisCO subunit binding-protein beta subunit
  misc_feature (60)..(563): NCBI GI NO: 2493650 NR Description: RUBISCO SUBUNIT BINDING-PROTEIN BETA SUBUNIT
  misc_feature (8)..(552): NCBI GI NO: 15222666 NR Description: chaperonin precursor, putative
MRPRRKYNFRVNAAKELHFNKDGSAIRKMQNGVNKLADLVGVTLGPKGRNVVLESKYGSPKIVNDGVTVAKEVELEDPVENIGAKLVRQAAAKTNDLAGDGTTTSVVLAQGMITEGVKVVAAGANPVQITRGIEKTAKALVSELQKMSKEVEDSELADVAAVSAGNNYEIGNMITEAMKKVGRQGVVTLEEGKSAENNLYSVEGMQFDRGYISPYFVTDSEKMTVEYENCKLLLVDKKINNARDLITILEDAIRSGYPILIVAEDIEQEALATLVVNRLRGALKIAAIKAPGFGERKSQYLDDIATLTGGTVIREEVGLSLDKADNAVLGTAAKVVVTKDSTTIVGDGTTQEEVNKRVTQIKNQIEATEQEYEREKLNERIAKLSGGVAVIQVGAQTETELKEKKLRVEDALNATKAAVEEGIVVGGGCTLLRLASKFDAIIETLENDEQKVGAEIVRKSLSYPLKLIAKNAGVNGSVVTEKVLANENFRYGYNAATGEYEDLMAAGIIDPTKVVRCCLEHAASVAKTFITSDAVVVDAKVAEQAPSSPANPMAMGGGSGFGF

SEQ ID NO: 26207 - DNA, 1464 bp, Zea mays subsp. mays
  misc_feature (1)..(1464): Ceres Seq. ID no. 12376480
aaagctcaaaccgagcaatagcagtccttgctcctccaacttccctcctggcttctgcccctttgtctgcgctcctcacgccgccccccgccccagccccacacccgcattccccagatctccatggactcgaactcgacccctcccacggacccggcggcctcctgcttggcctccgcctctgcggcggtggcatcgggggacgtcgccgcgatgctgccggactcgccgccgcggcgtggggcgggccaccgccgcgcacagtcggagatcctcctcggcggcgccgcgctccccgacgacctcaccttcgacgcggacctcggcgttgtcggggaggcctgcgtggccggcgacgaggatgaggaggatgacgacgacgacgaggaaggggtcggcggcgctggcggcagccggatgttcgagatgttcctcgagaacggtggcaagctcccgggaccgccggagccgtcggcgcatccgcattcgacgccgccgcggccacggcaccatcacagcatgtctatggatgggtccacgtctttgtttggttccgccgccgccgggatgcctgggaggtcgggcactgatgccaagaaggctatttctgacgctaagctcgccgagctcgcgcttgttgaccccaagcgtgccaagaggattttggcaaaccgccagtcagctgctaggtcgaaagaaagaaagatgcgctacattgcggagcttgaaaggaaagtacagactctccaattagaagcaactacactatcagctcagctggccatgttgcagcgagatacgactggtatgacaagcgagaatagtgatctgaagatacgtgtgcagacaatggagcagcaggttcagctgcaggacgctctgaacgacaggctaagagacgagattcagcagctgaaggttgcaacaggacaggtaaacgccagcattggaaaaacaggaaactctggtatgtcatcatttggaggtaatccacaaagttaccagcgtagccatatacagtctcttctgactgctcagcacctgcagcggctccggatccactcccaacatcagcaacagcagacgcattttcagcagcagcagcagcagccgcagccgcagctgctgctgcaggaggcgcatccatttccggtggacctaaagatgagaggattttctctgtcatcacatgctcagaacgcaggtgcatcagacagccatgctgccaagagcgaaccctgagatttagcatgtattcatgtgggttgttagaaataataatgtcgctctgttagcgtggtgtctaggtgaacttcaaattgtttgaggtgcttagattttgtgcagcctggagctcccatttggttgtaagcttcagtgctgactgaccggtcatttaccttgcctaatgcttgtacctgggtcctggccatgactttgtgcctggaggatggagccgttcgc

SEQ ID NO: 26208 - protein, 372 aa, Zea mays subsp. mays
  peptide (1)..(372): Ceres Seq. ID no. 12376481
  misc_feature (173)..(235): Pfam Name: Pfam Description:  bZIP transcription factor
  misc_feature (1)..(372): NCBI GI NO: 21740783 NR Description: OSJNBa0067K08.24
  misc_feature (4)..(372): NCBI GI NO: 15221391 NR Description: bZIP protein; protein id: At1g06070
  misc_feature (4)..(372): NCBI GI NO: 21553831 NR Description: transcriptional activator RF2a, putative
  misc_feature (19)..(349): NCBI GI NO: 7489564 NR Description: probable transcription activator RF2a - rice
  misc_feature (25)..(342): NCBI GI NO: 15224665 NR Description: bZIP transcription factor
  misc_feature (30)..(340): NCBI GI NO: 15226727 NR Description: bZip DNA binding protein; protein id: At2g40620
  misc_feature (30)..(340): NCBI GI NO: 25453519 NR Description: b-Zip DNA binding protein
  misc_feature (34)..(283): NCBI GI NO: 39579226 NR Description: bZIP transcription factor RF2b
  misc_feature (109)..(353): NCBI GI NO: 34394739 NR Description: putative transcription activator RF2a
  misc_feature (112)..(332): NCBI GI NO: 2921823 NR Description: shoot-forming PKSF1 [Paulownia kawakamii]
MDSNSTPPTDPAASCLASASAAVASGDVAAMLPDSPPRRGAGHRRAQSEILLGGAALPDDLTFDADLGVVGEACVAGDEDEEDDDDDEEGVGGAGGSRMFEMFLENGGKLPGPPEPSAHPHSTPPRPRHHHSMSMDGSTSLFGSAAAGMPGRSGTDAKKAISDAKLAELALVDPKRAKRILANRQSAARSKERKMRYIAELERKVQTLQLEATTLSAQLAMLQRDTTGMTSENSDLKIRVQTMEQQVQLQDALNDRLRDEIQQLKVATGQVNASIGKTGNSGMSSFGGNPQSYQRSHIQSLLTAQHLQRLRIHSQHQQQQTHFQQQQQQPQPQLLLQEAHPFPVDLKMRGFSLSSHAQNAGASDSHAAKSEP

SEQ ID NO: 26209 - protein, 342 aa, Zea mays subsp. mays
  peptide (1)..(342): Ceres Seq. ID no. 12376482
  misc_feature (143)..(205): Pfam Name: Pfam Description:  bZIP transcription factor
  misc_feature (1)..(342): NCBI GI NO: 21740783 NR Description: OSJNBa0067K08.24
  misc_feature (1)..(342): NCBI GI NO: 15221391 NR Description: bZIP protein; protein id: At1g06070
  misc_feature (1)..(342): NCBI GI NO: 21553831 NR Description: transcriptional activator RF2a, putative
  misc_feature (1)..(319): NCBI GI NO: 7489564 NR Description: probable transcription activator RF2a - rice
  misc_feature (1)..(312): NCBI GI NO: 15224665 NR Description: bZIP transcription factor
  misc_feature (1)..(310): NCBI GI NO: 15226727 NR Description: bZip DNA binding protein; protein id: At2g40620
  misc_feature (1)..(310): NCBI GI NO: 25453519 NR Description: b-Zip DNA binding protein
  misc_feature (4)..(253): NCBI GI NO: 39579226 NR Description: bZIP transcription factor RF2b
  misc_feature (79)..(323): NCBI GI NO: 34394739 NR Description: putative transcription activator RF2a
  misc_feature (82)..(302): NCBI GI NO: 2921823 NR Description: shoot-forming PKSF1 [Paulownia kawakamii]
MLPDSPPRRGAGHRRAQSEILLGGAALPDDLTFDADLGVVGEACVAGDEDEEDDDDDEEGVGGAGGSRMFEMFLENGGKLPGPPEPSAHPHSTPPRPRHHHSMSMDGSTSLFGSAAAGMPGRSGTDAKKAISDAKLAELALVDPKRAKRILANRQSAARSKERKMRYIAELERKVQTLQLEATTLSAQLAMLQRDTTGMTSENSDLKIRVQTMEQQVQLQDALNDRLRDEIQQLKVATGQVNASIGKTGNSGMSSFGGNPQSYQRSHIQSLLTAQHLQRLRIHSQHQQQQTHFQQQQQQPQPQLLLQEAHPFPVDLKMRGFSLSSHAQNAGASDSHAAKSEP

SEQ ID NO: 26210 - protein, 274 aa, Zea mays subsp. mays
  peptide (1)..(274): Ceres Seq. ID no. 12376483
  misc_feature (75)..(137): Pfam Name: Pfam Description:  bZIP transcription factor
  misc_feature (1)..(274): NCBI GI NO: 21740783 NR Description: OSJNBa0067K08.24
  misc_feature (1)..(274): NCBI GI NO: 15221391 NR Description: bZIP protein; protein id: At1g06070
  misc_feature (1)..(274): NCBI GI NO: 21553831 NR Description: transcriptional activator RF2a, putative
  misc_feature (1)..(251): NCBI GI NO: 7489564 NR Description: probable transcription activator RF2a - rice
  misc_feature (1)..(244): NCBI GI NO: 15224665 NR Description: bZIP transcription factor
  misc_feature (1)..(242): NCBI GI NO: 15226727 NR Description: bZip DNA binding protein; protein id: At2g40620
  misc_feature (1)..(242): NCBI GI NO: 25453519 NR Description: b-Zip DNA binding protein
  misc_feature (1)..(185): NCBI GI NO: 39579226 NR Description: bZIP transcription factor RF2b
  misc_feature (11)..(255): NCBI GI NO: 34394739 NR Description: putative transcription activator RF2a
  misc_feature (14)..(234): NCBI GI NO: 2921823 NR Description: shoot-forming PKSF1 [Paulownia kawakamii]
MFEMFLENGGKLPGPPEPSAHPHSTPPRPRHHHSMSMDGSTSLFGSAAAGMPGRSGTDAKKAISDAKLAELALVDPKRAKRILANRQSAARSKERKMRYIAELERKVQTLQLEATTLSAQLAMLQRDTTGMTSENSDLKIRVQTMEQQVQLQDALNDRLRDEIQQLKVATGQVNASIGKTGNSGMSSFGGNPQSYQRSHIQSLLTAQHLQRLRIHSQHQQQQTHFQQQQQQPQPQLLLQEAHPFPVDLKMRGFSLSSHAQNAGASDSHAAKSEP

SEQ ID NO: 26211 - DNA, 1481 bp, Zea mays subsp. mays
  misc_feature (1)..(1481): Ceres Seq. ID no. 12373728
aaaaagcgtgtgcgacagaggaagtccatgtgcccggctcggccctgccacggccacgcacagcagaggagcccgcaagcccgcgcgctccccgccaagatttgccaccaataccccggtcctccactcctcctctcctccgcgagctccgtctccccccctcgcgcgaacgccgggcgcacgcagccaggccaggtatccccccggccccaaccaaaccatcgcatgggagccgcgactggcccgacgaagcggagccgcgtccccagcaagaggcagcaggaggaggaggccatggcgcgcgctgcgggcgtggaggcgcaggcgcaggcgcggcggcggccacggctggtggggtacgaggagctgccggagtacctcaaggacaacgagtacatccgcgggcactaccgcgccgagtggcccgtccgcgacgcgctcctcagcgccttcgcctggcacaacgagactctcaacgtgtggacgcatctcggcgggttcctgtttttcctggcgctcgcggtcgccggagggtggacggaggccgccgacgaagccgctccggggatcatgaggttcgtggtgacaccaccagctaacgcttcgtgggacgtgctgcattcgggtctgccaagccacgacggcagggcgtcgcagtccggcgtgccgcggtggccgcggacggtgttcctggtgggcgccatgtcgtgcctggccatcagcgcgacggcccacctgctggcgtgccactcgcggcgcgccagcgtggtgttctggcagctcgactacgcgggcatctccgtgatgatcgtcgcctccttcgtgccgccggtgtactacgccttcctctgccacccgccggcgcgggcggccatacctgtccgccatcgcggcgctgggcgcgctcgtggtggccgcgctgctctccccgtcctgctcgtccccgcgctaccgccgcctccgcgcggcgctgttcctggccatgggcctgtcgggcgtcgtcccggcgctgcacgcgctgtggctcaactggggccacgccgcctgctacctggcgctcggcctcgaggtcgccatgggtctcgcctacgccacgggcgcatggttctacgtcagccgcgtgccggagaagtggaggcccggggtgttcgacgtcgtgggccacagccaccagatcttccacgtgctcgtgctcgtcggcgccgtcacgcactacgtcgccgtcgccgtgctcatccactggcgggagaaggtggctgccgcctgtggcgcggcgtcgtaggcgggcttgctgctcctggcttctgcagcaagccagctgaggtgtttgatcatccagagcttcaatgtgccagtgcgatggattcaacaagcgttcgaatcggcgaacgaagtagttgcagttgcagttgcagcatagatcggctctagagttcgacgatttgtaatttaattgatgggatgattgagtatggtggtcc

SEQ ID NO: 26212 - protein, 476 aa, Zea mays subsp. mays
  peptide (1)..(476): Ceres Seq. ID no. 12373729
  misc_feature (204)..(285): Pfam Name: Hly-III / UPF0073 Pfam Description: Uncharacterised protein family
  misc_feature (84)..(320): NCBI GI NO: 18400468 NR Description: expressed protein; protein id: At2g24150
  misc_feature (104)..(320): NCBI GI NO: 13272399 NR Description: hypothetical protein [Arabidopsis thaliana]
  misc_feature (204)..(285): NCBI GI NO: 18377749 NR Description: unknown protein [Arabidopsis thaliana]
  misc_feature (94)..(175): NCBI GI NO: 18377749 NR Description: unknown protein [Arabidopsis thaliana]
  misc_feature (204)..(285): NCBI GI NO: 30688829 NR Description: expressed protein [Arabidopsis thaliana]
  misc_feature (94)..(175): NCBI GI NO: 30688829 NR Description: expressed protein [Arabidopsis thaliana]
  misc_feature (76)..(176): NCBI GI NO: 15241302 NR Description: putative protein; protein id: At5g20270
  misc_feature (189)..(286): NCBI GI NO: 15241302 NR Description: putative protein; protein id: At5g20270
  misc_feature (94)..(285): NCBI GI NO: 25407688 NR Description: hypothetical protein AT4g30850
  misc_feature (91)..(175): NCBI GI NO: 15235657 NR Description: expressed protein; protein id: At4g37680
KKRVRQRKSMCPARPCHGHAQQRSPQARALPAKICHQYPGPPLLLSSASSVSPPRANAGRTQPGQVSPRPQPNHRMGAATGPTKRSRVPSKRQQEEEAMARAAGVEAQAQARRRPRLVGYEELPEYLKDNEYIRGHYRAEWPVRDALLSAFAWHNETLNVWTHLGGFLFFLALAVAGGWTEAADEAAPGIMRFVVTPPANASWDVLHSGLPSHDGRASQSGVPRWPRTVFLVGAMSCLAISATAHLLACHSRRASVVFWQLDYAGISVMIVASFVPPVYYAFLCHPPARAAIPVRHRGAGRARGGRAALPVLLVPALPPPPRGAVPGHGPVGRRPGAARAVAQLGPRRLLPGARPRGRHGSRLRHGRMVLRQPRAGEVEARGVRRRGPQPPDLPRARARRRRHALRRRRRAHPLAGEGGCRLWRGVVGGLAAPGFCSKPAEVFDHPELQCASAMDSTSVRIGERSSCSCSCSIDRL

SEQ ID NO: 26213 - protein, 467 aa, Zea mays subsp. mays
  peptide (1)..(467): Ceres Seq. ID no. 12373730
  misc_feature (195)..(276): Pfam Name: Hly-III / UPF0073 Pfam Description: Uncharacterised protein family
  misc_feature (75)..(311): NCBI GI NO: 18400468 NR Description: expressed protein; protein id: At2g24150
  misc_feature (95)..(311): NCBI GI NO: 13272399 NR Description: hypothetical protein [Arabidopsis thaliana]
  misc_feature (195)..(276): NCBI GI NO: 18377749 NR Description: unknown protein [Arabidopsis thaliana]
  misc_feature (85)..(166): NCBI GI NO: 18377749 NR Description: unknown protein [Arabidopsis thaliana]
  misc_feature (195)..(276): NCBI GI NO: 30688829 NR Description: expressed protein [Arabidopsis thaliana]
  misc_feature (85)..(166): NCBI GI NO: 30688829 NR Description: expressed protein [Arabidopsis thaliana]
  misc_feature (67)..(167): NCBI GI NO: 15241302 NR Description: putative protein; protein id: At5g20270
  misc_feature (180)..(277): NCBI GI NO: 15241302 NR Description: putative protein; protein id: At5g20270
  misc_feature (85)..(276): NCBI GI NO: 25407688 NR Description: hypothetical protein AT4g30850
  misc_feature (82)..(166): NCBI GI NO: 15235657 NR Description: expressed protein; protein id: At4g37680
MCPARPCHGHAQQRSPQARALPAKICHQYPGPPLLLSSASSVSPPRANAGRTQPGQVSPRPQPNHRMGAATGPTKRSRVPSKRQQEEEAMARAAGVEAQAQARRRPRLVGYEELPEYLKDNEYIRGHYRAEWPVRDALLSAFAWHNETLNVWTHLGGFLFFLALAVAGGWTEAADEAAPGIMRFVVTPPANASWDVLHSGLPSHDGRASQSGVPRWPRTVFLVGAMSCLAISATAHLLACHSRRASVVFWQLDYAGISVMIVASFVPPVYYAFLCHPPARAAIPVRHRGAGRARGGRAALPVLLVPALPPPPRGAVPGHGPVGRRPGAARAVAQLGPRRLLPGARPRGRHGSRLRHGRMVLRQPRAGEVEARGVRRRGPQPPDLPRARARRRRHALRRRRRAHPLAGEGGCRLWRGVVGGLAAPGFCSKPAEVFDHPELQCASAMDSTSVRIGERSSCSCSCSIDRL

SEQ ID NO: 26214 - protein, 401 aa, Zea mays subsp. mays
  peptide (1)..(401): Ceres Seq. ID no. 12373731
  misc_feature (129)..(210): Pfam Name: Hly-III / UPF0073 Pfam Description: Uncharacterised protein family
  misc_feature (9)..(245): NCBI GI NO: 18400468 NR Description: expressed protein; protein id: At2g24150
  misc_feature (29)..(245): NCBI GI NO: 13272399 NR Description: hypothetical protein [Arabidopsis thaliana]
  misc_feature (129)..(210): NCBI GI NO: 18377749 NR Description: unknown protein [Arabidopsis thaliana]
  misc_feature (19)..(100): NCBI GI NO: 18377749 NR Description: unknown protein [Arabidopsis thaliana]
  misc_feature (129)..(210): NCBI GI NO: 30688829 NR Description: expressed protein [Arabidopsis thaliana]
  misc_feature (19)..(100): NCBI GI NO: 30688829 NR Description: expressed protein [Arabidopsis thaliana]
  misc_feature (1)..(101): NCBI GI NO: 15241302 NR Description: putative protein; protein id: At5g20270
  misc_feature (114)..(211): NCBI GI NO: 15241302 NR Description: putative protein; protein id: At5g20270
  misc_feature (19)..(210): NCBI GI NO: 25407688 NR Description: hypothetical protein AT4g30850
  misc_feature (16)..(100): NCBI GI NO: 15235657 NR Description: expressed protein; protein id: At4g37680
MGAATGPTKRSRVPSKRQQEEEAMARAAGVEAQAQARRRPRLVGYEELPEYLKDNEYIRGHYRAEWPVRDALLSAFAWHNETLNVWTHLGGFLFFLALAVAGGWTEAADEAAPGIMRFVVTPPANASWDVLHSGLPSHDGRASQSGVPRWPRTVFLVGAMSCLAISATAHLLACHSRRASVVFWQLDYAGISVMIVASFVPPVYYAFLCHPPARAAIPVRHRGAGRARGGRAALPVLLVPALPPPPRGAVPGHGPVGRRPGAARAVAQLGPRRLLPGARPRGRHGSRLRHGRMVLRQPRAGEVEARGVRRRGPQPPDLPRARARRRRHALRRRRRAHPLAGEGGCRLWRGVVGGLAAPGFCSKPAEVFDHPELQCASAMDSTSVRIGERSSCSCSCSIDRL

SEQ ID NO: 26215 - DNA, 1054 bp, Zea mays subsp. mays
  misc_feature (1)..(1054): Ceres Seq. ID no. 12373289
aagatcgccgcctcgcagtcgcacagtcgcactcgctccacttccattcccagcgaccccgcccgcccggaggcgtcgcacctgcacgctgcggcagcgggcagccgccaagcctctctcgtgcggcaagcaccacacagacacccgatggcgctgctgctgctgcgcggctgcgccgcgccgccagccgtccacgcggccccggcggggtcccggctgctccctccggcgctgccgcggcggcggctcgtggccgtcgcctcttcggcctcctccgcgccgtccggcgaggtggcgtcgtcgtcccaggacggccgcggctacgggatcgtgggcgggcccaacggccacgccatcgctcccgccacagacaccaagtccaccgccgtcgagaccaccgtcgagagggtgatcttcgacttccggttcctggcactcctcgccgtcgccgggtcgctcgccggctccgtcctgtgcttcctcaatggctgtgtcttcatcaaagaggcgtaccaggtttactggtcgagctgtgtcaagggggttcattcggggcagatggtcctcaaggtcgtcgaggccatcgatgtgtatcttgctggaacagtcatgctgatatttgggatgggtctctacggcctcttcatcagcaacgctcccgccggtgttcctcctgaatccgaccgtgccctcagcggctcgtcgctgttcggaatgttcgctttgaaggaacgcccgaagtggatgaacatcacctcgcttgacgagctcaagacaaaagtggggcacgtcatcgtgatgattctacttgtgaagatgttcgagaagagcaagatggtgacgatagccacggggctggacctcctcagctactcgatctgcatcttcttgtcatcagcttctctctacatcctgcacaatcttcacaagggcgaccatgaggagtgacgagagtgaaatgccgaatttgtagcctattcgagagagagagttgacggtcttgtccaataatcaatactggatttttaagactctcttcaacggtgttctcttc

SEQ ID NO: 26216 - protein, 315 aa, Zea mays subsp. mays
  peptide (1)..(315): Ceres Seq. ID no. 12373290
  misc_feature (51)..(315): NCBI GI NO: 34899026 NR Description: contains ESTsAU173916
  misc_feature (78)..(312): NCBI GI NO: 15240692 NR Description: unknown protein; protein id: At5g13720
  misc_feature (78)..(312): NCBI GI NO: 20465418 NR Description: unknown protein [Arabidopsis thaliana]
  misc_feature (51)..(314): NCBI GI NO: 34395260 NR Description: unknown protein
  misc_feature (129)..(314): NCBI GI NO: 34899024 NR Description: hypothetical protein~similar to Arabidopsisthaliana chromosome 5
  misc_feature (78)..(313): NCBI GI NO: 18415304 NR Description: putative protein; protein id: At4g19390
  misc_feature (78)..(313): NCBI GI NO: 15810053 NR Description: AT4g19390/T5K18_170 [Arabidopsis thaliana]
  misc_feature (78)..(313): NCBI GI NO: 7487716 NR Description: hypothetical protein T5K18
  misc_feature (116)..(308): NCBI GI NO: 31126772 NR Description: unknown protein
  misc_feature (126)..(291): NCBI GI NO: 33864647 NR Description: conserved hypothetical protein
KIAASQSHSRTRSTSIPSDPARPEASHLHAAAAGSRQASLVRQAPHRHPMALLLLRGCAAPPAVHAAPAGSRLLPPALPRRRLVAVASSASSAPSGEVASSSQDGRGYGIVGGPNGHAIAPATDTKSTAVETTVERVIFDFRFLALLAVAGSLAGSVLCFLNGCVFIKEAYQVYWSSCVKGVHSGQMVLKVVEAIDVYLAGTVMLIFGMGLYGLFISNAPAGVPPESDRALSGSSLFGMFALKERPKWMNITSLDELKTKVGHVIVMILLVKMFEKSKMVTIATGLDLLSYSICIFLSSASLYILHNLHKGDHEE

SEQ ID NO: 26217 - protein, 266 aa, Zea mays subsp. mays
  peptide (1)..(266): Ceres Seq. ID no. 12373291
  misc_feature (2)..(266): NCBI GI NO: 34899026 NR Description: contains ESTsAU173916
  misc_feature (29)..(263): NCBI GI NO: 15240692 NR Description: unknown protein; protein id: At5g13720
  misc_feature (29)..(263): NCBI GI NO: 20465418 NR Description: unknown protein [Arabidopsis thaliana]
  misc_feature (2)..(265): NCBI GI NO: 34395260 NR Description: unknown protein
  misc_feature (80)..(265): NCBI GI NO: 34899024 NR Description: hypothetical protein~similar to Arabidopsisthaliana chromosome 5
  misc_feature (29)..(264): NCBI GI NO: 18415304 NR Description: putative protein; protein id: At4g19390
  misc_feature (29)..(264): NCBI GI NO: 15810053 NR Description: AT4g19390/T5K18_170 [Arabidopsis thaliana]
  misc_feature (29)..(264): NCBI GI NO: 7487716 NR Description: hypothetical protein T5K18
  misc_feature (67)..(259): NCBI GI NO: 31126772 NR Description: unknown protein
  misc_feature (77)..(242): NCBI GI NO: 33864647 NR Description: conserved hypothetical protein
MALLLLRGCAAPPAVHAAPAGSRLLPPALPRRRLVAVASSASSAPSGEVASSSQDGRGYGIVGGPNGHAIAPATDTKSTAVETTVERVIFDFRFLALLAVAGSLAGSVLCFLNGCVFIKEAYQVYWSSCVKGVHSGQMVLKVVEAIDVYLAGTVMLIFGMGLYGLFISNAPAGVPPESDRALSGSSLFGMFALKERPKWMNITSLDELKTKVGHVIVMILLVKMFEKSKMVTIATGLDLLSYSICIFLSSASLYILHNLHKGDHEE

SEQ ID NO: 26218 - protein, 224 aa, Zea mays subsp. mays
  peptide (1)..(224): Ceres Seq. ID no. 12373292
DRRLAVAQSHSLHFHSQRPRPPGGVAPARCGSGQPPSLSRAASTTQTPDGAAAAARLRRAASRPRGPGGVPAAPSGAAAAAARGRRLFGLLRAVRRGGVVVPGRPRLRDRGRAQRPRHRSRHRHQVHRRRDHRREGDLRLPVPGTPRRRRVARRLRPVLPQWLCLHQRGVPGLLVELCQGGSFGADGPQGRRGHRCVSCWNSHADIWDGSLRPLHQQRSRRCSS

SEQ ID NO: 26219 - DNA, 1380 bp, Zea mays subsp. mays
  misc_feature (1)..(1380): Ceres Seq. ID no. 12353756
aaccatttcttcttcctttttctatatcgcgttacgtccctacccagcgatctaggccgccgcctctcctactgcatctccctcgctctcgtcgcctcgttcgcttcgcctccgccccgccccgccccgagcagagcgcagccctatccggagctgggatggcggacgcgaagcagcagcagcagcagcagcagccacagcaggcggcagcggcagccaccggcgtgtggaagacggtcaagcccttcgttaacggcggggcctctgggatgctcgcgacctgcgtcatccagcctatcgacatggtcaaggtgaggatccagttgggtgagggctctgctggtcaggtcacaaggaacatgcttgcaaatgagggtgtccgttctttctacaagggtttgtccgccggattgctgaggcaagcgacgtacacgactgctcgtcttggatcctttagggttctaactaacaaagcagttgaaaagaatgaagggaagccattgcctctatttcagaaagcttttattggtctgactgctggtgcaattggtgcttgtgttggtagtcctgctgatctggcactcattagaatgcaagccgattcgaccctgccagttgcacaacgacgcaactataaatgctttccatgcactctaccgtatcagtggtgatgagggagtccttgcgctttggaagggtgcaggtccaactgtggtgagagctatggcactcaatatgggtatgcttgcttcctatgaccagagtgtcgagctatttagggacaaatttggcgcaggagaaatttctactgttgttggagccagcgctgtttctggattctttgcctcagcatgcagtttgccctttgactatgtgaagacacagattcagaagatgcaacctgatgcgaatggcaagtacccatacacagggtctttggactgtgctgtgaagaccttcaagagcggtggcccattcaagttctacactggtttcccggtgtactgcgtcaggattgcaccccatgtcatgatgacctggatattcttgaatcagatccagaagtttgagaagaagatcggcatataggattcccatgggacggatacagggttgacagttctatgctattactgcttgactctgtaataacattccagctgctttcgcaccatggtagttggttttggtagagacaagtctgttacaattttttaccttagctttccaattattgtgttgcaataatcgaattaattgttgctgggggatttttttggggggttgggagggtggcatgcttttgttggctgggatgtagccataaggagagggggatactgcctagttatgtcattgaatggaattggaccatatttt

SEQ ID NO: 26220 - protein, 222 aa, Zea mays subsp. mays
  peptide (1)..(222): Ceres Seq. ID no. 12353757
  misc_feature (53)..(212): NCBI GI NO: 2130089 NR Description: 2-oxoglutarate/malate translocator
  misc_feature (53)..(212): NCBI GI NO: 2130090 NR Description: 2-oxoglutarate/malate translocator
  misc_feature (69)..(211): NCBI GI NO: 19913109 NR Description: dicarboxylate/tricarboxylate carrier
  misc_feature (74)..(211): NCBI GI NO: 7489246 NR Description: oxoglutarate/malate translocator - potato
  misc_feature (71)..(211): NCBI GI NO: 15241167 NR Description: mitochondrial 2-oxoglutarate/malate translocator
  misc_feature (74)..(211): NCBI GI NO: 10798640 NR Description: mitochondrial 2-oxoglutarate/malate carrier
  misc_feature (74)..(211): NCBI GI NO: 19913105 NR Description: dicarboxylate/tricarboxylate carrier
  misc_feature (74)..(211): NCBI GI NO: 19913107 NR Description: dicarboxylate/tricarboxylate carrier
  misc_feature (138)..(211): NCBI GI NO: 19913111 NR Description: dicarboxylate/tricarboxylate carrier
  misc_feature (145)..(212): NCBI GI NO: 2331139 NR Description: 2-oxoglutarate/malate translocator [Oryza sativa]
PFLLPFSISRYVPTQRSRPPPLLLHLPRSRRLVRFASAPPRPEQSAALSGAGMADAKQQQQQQQPQQAAAAATGVWKTVKPFVNGGASGMLATCVIQPIDMVKVRIQLGEGSAGQVTRNMLANEGVRSFYKGLSAGLLRQATYTTARLGSFRVLTNKAVEKNEGKPLPLFQKAFIGLTAGAIGACVGSPADLALIRMQADSTLPVAQRRNYKCFPCTLPYQW

SEQ ID NO: 26221 - protein, 170 aa, Zea mays subsp. mays
  peptide (1)..(170): Ceres Seq. ID no. 12353758
  misc_feature (1)..(160): NCBI GI NO: 2130089 NR Description: 2-oxoglutarate/malate translocator
  misc_feature (1)..(160): NCBI GI NO: 2130090 NR Description: 2-oxoglutarate/malate translocator
  misc_feature (17)..(159): NCBI GI NO: 19913109 NR Description: dicarboxylate/tricarboxylate carrier
  misc_feature (22)..(159): NCBI GI NO: 7489246 NR Description: oxoglutarate/malate translocator - potato
  misc_feature (19)..(159): NCBI GI NO: 15241167 NR Description: mitochondrial 2-oxoglutarate/malate translocator
  misc_feature (22)..(159): NCBI GI NO: 10798640 NR Description: mitochondrial 2-oxoglutarate/malate carrier
  misc_feature (22)..(159): NCBI GI NO: 19913107 NR Description: dicarboxylate/tricarboxylate carrier
  misc_feature (22)..(159): NCBI GI NO: 19913105 NR Description: dicarboxylate/tricarboxylate carrier
  misc_feature (86)..(159): NCBI GI NO: 19913111 NR Description: dicarboxylate/tricarboxylate carrier
  misc_feature (93)..(160): NCBI GI NO: 2331139 NR Description: 2-oxoglutarate/malate translocator [Oryza sativa]
MADAKQQQQQQQPQQAAAAATGVWKTVKPFVNGGASGMLATCVIQPIDMVKVRIQLGEGSAGQVTRNMLANEGVRSFYKGLSAGLLRQATYTTARLGSFRVLTNKAVEKNEGKPLPLFQKAFIGLTAGAIGACVGSPADLALIRMQADSTLPVAQRRNYKCFPCTLPYQW

SEQ ID NO: 26222 - protein, 133 aa, Zea mays subsp. mays
  peptide (1)..(133): Ceres Seq. ID no. 12353759
  misc_feature (1)..(123): NCBI GI NO: 2130089 NR Description: 2-oxoglutarate/malate translocator
  misc_feature (1)..(123): NCBI GI NO: 2130090 NR Description: 2-oxoglutarate/malate translocator
  misc_feature (1)..(122): NCBI GI NO: 19913109 NR Description: dicarboxylate/tricarboxylate carrier
  misc_feature (1)..(122): NCBI GI NO: 7489246 NR Description: oxoglutarate/malate translocator - potato
  misc_feature (1)..(122): NCBI GI NO: 15241167 NR Description: mitochondrial 2-oxoglutarate/malate translocator
  misc_feature (1)..(122): NCBI GI NO: 10798640 NR Description: mitochondrial 2-oxoglutarate/malate carrier
  misc_feature (1)..(122): NCBI GI NO: 19913107 NR Description: dicarboxylate/tricarboxylate carrier
  misc_feature (1)..(122): NCBI GI NO: 19913105 NR Description: dicarboxylate/tricarboxylate carrier
  misc_feature (49)..(122): NCBI GI NO: 19913111 NR Description: dicarboxylate/tricarboxylate carrier
  misc_feature (56)..(123): NCBI GI NO: 2331139 NR Description: 2-oxoglutarate/malate translocator [Oryza sativa]
MLATCVIQPIDMVKVRIQLGEGSAGQVTRNMLANEGVRSFYKGLSAGLLRQATYTTARLGSFRVLTNKAVEKNEGKPLPLFQKAFIGLTAGAIGACVGSPADLALIRMQADSTLPVAQRRNYKCFPCTLPYQW

SEQ ID NO: 26223 - DNA, 1447 bp, Zea mays subsp. mays
  misc_feature (1)..(1447): Ceres Seq. ID no. 12344474
accaaaccaggaaactgcaaacctacccccggtcgccgactcgccggcctcgactctccggtctccgcccagactacaaatggagctctgcacctgcgtggcccgcagttctgcgcccccctcttctagctgccgcgcggtgccattcccgcgagttctctcccatcgcatttggagccgatcgggatactgcactgtctgctttaccccgtcaagccctgttgctaggagtcgattctctactctaatgacgactgcacacaacacagggaccccagatctagttgacttcaattgggatgatcttgggtttcaactgatcccaacggacttcatgtatttaatgagctgttcttcagatggggtgtttatgaatggtaaattagtgccatatgggtcaattgagctgaatccagcagccgccgtgctgaattatggtcagggattgcttgaaggtctacgagcacatagaaaagaggatggatcaatccttctttttcgtccacatgaaaatgcacggcggatggaaattggtgcagaccggttatgcatgcctgcaccaagtgtagagcaattcctagaagctgtgaaactaactgttctggcaaacaagcattgggtgcctccttttggtaaaggttctttgtatatcagaccgcagctaattggaagtggggctatccttggtgtggcacctgccccacagtacacattcattgtgtttgtttgcccagttgggcattatttcaagggtggtctagctccaatcagcttgttaactgaggaagaataccaccgtgctgcacctggtggaactggtgaaataaaaactattgggaactatgcttcggttgtcagtgctcagagaagagccaaggaaaaaggccattctgatgttttatacttagatccagtccataataagtttgttgaggaagtttcttcttgtaatatattcatggtgaagggcaatattatttctactccactgttaacggggacaattcttcctggaatcacaaggagaagtgtgattgaaatttctcagaatcttggatttcaggttgaggagcgtcttatcacaatagatgaactgcttggggctgatgaagtcttttgtacaggaacagctgttgtattgtcacctgttgggagcatcacttaccgtggaagaagagtggagtatgggaagaaccaggaggccggagtcgtgtcccaacaactctatgccgcactcacagctatccagaaaggtctcacggaggacagcatgggatggacgttgcagctaacttagcagctttttttcacatgatcgagctctacaactcttatttccgttttctcgataagtctcacttctatcaacttgttcttctgttgaaacagagtactttaaaaggaatccccaataatgactttccctgtatattgctgatatgttggc

SEQ ID NO: 26224 - protein, 431 aa, Zea mays subsp. mays
  peptide (1)..(431): Ceres Seq. ID no. 12344475
  misc_feature (126)..(413): Pfam Name: Pfam Description:  Aminotransferase class IV
  misc_feature (35)..(430): NCBI GI NO: 38345763 NR Description: OSJNBa0065O17.16
  misc_feature (91)..(430): NCBI GI NO: 34902362 NR Description: Putative aminotransferase
  misc_feature (72)..(431): NCBI GI NO: 26391655 NR Description: Branched-chain amino acid aminotransferase 5
  misc_feature (93)..(430): NCBI GI NO: 6319167 NR Description: branched-chain amino acid aminotransferase
  misc_feature (23)..(431): NCBI GI NO: 21593211 NR Description: branched-chain-amino-acid transaminase-like
  misc_feature (72)..(431): NCBI GI NO: 15239157 NR Description: branched-chain amino acid aminotransferase
  misc_feature (23)..(431): NCBI GI NO: 18408919 NR Description: branched-chain-amino-acid transaminase -like
  misc_feature (23)..(431): NCBI GI NO: 11280250 NR Description: branched-chain-amino-acid transaminase-like
  misc_feature (80)..(430): NCBI GI NO: 6319165 NR Description: branched-chain amino acid aminotransferase
  misc_feature (170)..(431): NCBI GI NO: 37536656 NR Description: putative aminotransferase
PNQETANLPPVADSPASTLRSPPRLQMELCTCVARSSAPPSSSCRAVPFPRVLSHRIWSRSGYCTVCFTPSSPVARSRFSTLMTTAHNTGTPDLVDFNWDDLGFQLIPTDFMYLMSCSSDGVFMNGKLVPYGSIELNPAAAVLNYGQGLLEGLRAHRKEDGSILLFRPHENARRMEIGADRLCMPAPSVEQFLEAVKLTVLANKHWVPPFGKGSLYIRPQLIGSGAILGVAPAPQYTFIVFVCPVGHYFKGGLAPISLLTEEEYHRAAPGGTGEIKTIGNYASVVSAQRRAKEKGHSDVLYLDPVHNKFVEEVSSCNIFMVKGNIISTPLLTGTILPGITRRSVIEISQNLGFQVEERLITIDELLGADEVFCTGTAVVLSPVGSITYRGRRVEYGKNQEAGVVSQQLYAALTAIQKGLTEDSMGWTLQLT

SEQ ID NO: 26225 - protein, 405 aa, Zea mays subsp. mays
  peptide (1)..(405): Ceres Seq. ID no. 12344476
  misc_feature (100)..(387): Pfam Name: Pfam Description:  Aminotransferase class IV
  misc_feature (9)..(404): NCBI GI NO: 38345763 NR Description: OSJNBa0065O17.16
  misc_feature (65)..(404): NCBI GI NO: 34902362 NR Description: Putative aminotransferase
  misc_feature (46)..(405): NCBI GI NO: 26391655 NR Description: Branched-chain amino acid aminotransferase 5
  misc_feature (67)..(404): NCBI GI NO: 6319167 NR Description: branched-chain amino acid aminotransferase
  misc_feature (1)..(405): NCBI GI NO: 21593211 NR Description: branched-chain-amino-acid transaminase-like
  misc_feature (46)..(405): NCBI GI NO: 15239157 NR Description: branched-chain amino acid aminotransferase
  misc_feature (1)..(405): NCBI GI NO: 18408919 NR Description: branched-chain-amino-acid transaminase -like
  misc_feature (1)..(405): NCBI GI NO: 11280250 NR Description: branched-chain-amino-acid transaminase-like
  misc_feature (54)..(404): NCBI GI NO: 6319165 NR Description: branched-chain amino acid aminotransferase
  misc_feature (144)..(405): NCBI GI NO: 37536656 NR Description: putative aminotransferase
MELCTCVARSSAPPSSSCRAVPFPRVLSHRIWSRSGYCTVCFTPSSPVARSRFSTLMTTAHNTGTPDLVDFNWDDLGFQLIPTDFMYLMSCSSDGVFMNGKLVPYGSIELNPAAAVLNYGQGLLEGLRAHRKEDGSILLFRPHENARRMEIGADRLCMPAPSVEQFLEAVKLTVLANKHWVPPFGKGSLYIRPQLIGSGAILGVAPAPQYTFIVFVCPVGHYFKGGLAPISLLTEEEYHRAAPGGTGEIKTIGNYASVVSAQRRAKEKGHSDVLYLDPVHNKFVEEVSSCNIFMVKGNIISTPLLTGTILPGITRRSVIEISQNLGFQVEERLITIDELLGADEVFCTGTAVVLSPVGSITYRGRRVEYGKNQEAGVVSQQLYAALTAIQKGLTEDSMGWTLQLT

SEQ ID NO: 26226 - protein, 349 aa, Zea mays subsp. mays
  peptide (1)..(349): Ceres Seq. ID no. 12344477
  misc_feature (44)..(331): Pfam Name: Pfam Description:  Aminotransferase class IV
  misc_feature (1)..(348): NCBI GI NO: 38345763 NR Description: OSJNBa0065O17.16
  misc_feature (9)..(348): NCBI GI NO: 34902362 NR Description: Putative aminotransferase
  misc_feature (1)..(349): NCBI GI NO: 26391655 NR Description: Branched-chain amino acid aminotransferase 5
  misc_feature (11)..(348): NCBI GI NO: 6319167 NR Description: branched-chain amino acid aminotransferase
  misc_feature (1)..(349): NCBI GI NO: 21593211 NR Description: branched-chain-amino-acid transaminase-like
  misc_feature (1)..(349): NCBI GI NO: 15239157 NR Description: branched-chain amino acid aminotransferase
  misc_feature (1)..(349): NCBI GI NO: 18408919 NR Description: branched-chain-amino-acid transaminase -like
  misc_feature (1)..(349): NCBI GI NO: 11280250 NR Description: branched-chain-amino-acid transaminase-like
  misc_feature (1)..(348): NCBI GI NO: 6319165 NR Description: branched-chain amino acid aminotransferase
  misc_feature (88)..(349): NCBI GI NO: 37536656 NR Description: putative aminotransferase
MTTAHNTGTPDLVDFNWDDLGFQLIPTDFMYLMSCSSDGVFMNGKLVPYGSIELNPAAAVLNYGQGLLEGLRAHRKEDGSILLFRPHENARRMEIGADRLCMPAPSVEQFLEAVKLTVLANKHWVPPFGKGSLYIRPQLIGSGAILGVAPAPQYTFIVFVCPVGHYFKGGLAPISLLTEEEYHRAAPGGTGEIKTIGNYASVVSAQRRAKEKGHSDVLYLDPVHNKFVEEVSSCNIFMVKGNIISTPLLTGTILPGITRRSVIEISQNLGFQVEERLITIDELLGADEVFCTGTAVVLSPVGSITYRGRRVEYGKNQEAGVVSQQLYAALTAIQKGLTEDSMGWTLQLT

SEQ ID NO: 26227 - DNA, 1569 bp, Zea mays subsp. mays
  misc_feature (1)..(1569): Ceres Seq. ID no. 13493453
atcctaatcgaaaaatcaaaagaaaaaaaagatcgcagccgaaaggaaggggaaaaaaggaccaaataaacaatccactgtctcctacctccgcggaagcatcaaacaaatcaccctgccgatcgccatggacgaacagcaggcggaggagggcgaaagcgcgcgcgtcaagaggacgccggaggaggggtcgtcgccgctgtccgctctggcggatgacgtgctgctacagatcctgggacggctcgaggcggacccgcgggactgggcgcgggcctcctgcgcgtccccgcgcctcgccgctctgctccgggcggcctgcctcccgccgcgactgtcgcgggcgctccccgccgagctcctccccgcgccgtcaccggacggggcgcccgcggcctgggcggcgctccacaagctctccgtctgttgcccggggctcctccgcgccggggtgctcctcgagcccaccgacgatttcgggctcgatctcgacatcgggcctgacgtccccatctacgcccgcaccgacgcctcctccgccgaggggttcgaggccacggccacctcccgccacagcggaaccatcgtcgcggccgggagcgcgccccgcgccggcgaatctgccaacgtcgccgcgtggtcgctctacgacgacctgtacctggacgcggcatacgactgctcgtccgagctgcagatcccgcctgccgctgcggctgtggaacccgccccgcccgcgcccttggcggcgatccgcgacgtggaggaagcaacgaccacaaatgctgtctcatgcggcgtcgcccggcgcggcgtggtggccgggagccgactgcatccgcggcggtggctgggcaccgtcggcgcgcacctggcatcggggtcctggacgctgagccgtgagcaggggaacaagctccttgccagccgcttccgcggcgaccggctatacctctgcgactggcccgggtgcgtgcacaaggaggagcgacgcaagtacatggtcttccgcggcgtgttccacaacttcgcccggtctcaggtccggcgcgcgctcagggacacgcgccgccccaccgtcgccatcgagtgcgccttctgcggctgcaaagagacctgggacctctactcggctttctgcctccgcagtttctacggctaccacgacgacggcgagcctgtggtgcgcgcctacgtctgcgagaacggccacgtcgcgggcgcctggaccgaccgcccactctactcctgatcttggagtggacactccgactgacatggtattgcatcaaagactgcaccctgccattgccagatgctcgctcctaccacttgagctgtttctagacataattatgcgtgcctgcatatagcaatccggattttcgtcatgttctgatacacgtgggatgtgtattctttatttctttcttcttgctgttgctgttgtttgtgagaatggttgagtagaataaggatgccggttgatttgcagcataggatataaagagatttgcttaaaattgtaaacctgatgctacgagaaattggaaccgctgttttattgcc

SEQ ID NO: 26228 - protein, 374 aa, Zea mays subsp. mays
  peptide (1)..(374): Ceres Seq. ID no. 13493454
  misc_feature (200)..(374): NCBI GI NO: 21553661 NR Description: unknown [Arabidopsis thaliana]
  misc_feature (66)..(180): NCBI GI NO: 21553661 NR Description: unknown [Arabidopsis thaliana]
  misc_feature (200)..(374): NCBI GI NO: 15235367 NR Description: F-box protein family [Arabidopsis thaliana]
  misc_feature (66)..(180): NCBI GI NO: 15235367 NR Description: F-box protein family [Arabidopsis thaliana]
MDEQQAEEGESARVKRTPEEGSSPLSALADDVLLQILGRLEADPRDWARASCASPRLAALLRAACLPPRLSRALPAELLPAPSPDGAPAAWAALHKLSVCCPGLLRAGVLLEPTDDFGLDLDIGPDVPIYARTDASSAEGFEATATSRHSGTIVAAGSAPRAGESANVAAWSLYDDLYLDAAYDCSSELQIPPAAAAVEPAPPAPLAAIRDVEEATTTNAVSCGVARRGVVAGSRLHPRRWLGTVGAHLASGSWTLSREQGNKLLASRFRGDRLYLCDWPGCVHKEERRKYMVFRGVFHNFARSQVRRALRDTRRPTVAIECAFCGCKETWDLYSAFCLRSFYGYHDDGEPVVRAYVCENGHVAGAWTDRPLYS

SEQ ID NO: 26229 - protein, 297 aa, Zea mays subsp. mays
  peptide (1)..(297): Ceres Seq. ID no. 13493455
  misc_feature (103)..(297): Pfam Name: Pfam Description:  Equine herpesvirus glycoprotein gp2
  misc_feature (78)..(297): NCBI GI NO: 13592175 NR Description: ppg3 [Leishmania major]
  misc_feature (103)..(297): NCBI GI NO: 17221114 NR Description: glycoprotein gp2 [Equine herpesvirus 1]
  misc_feature (82)..(297): NCBI GI NO: 17221106 NR Description: glycoprotein gp2 [Equine herpesvirus 1]
  misc_feature (78)..(297): NCBI GI NO: 13592175 NR Description: ppg3 [Leishmania major]
  misc_feature (82)..(297): NCBI GI NO: 30313663 NR Description: sublingual apomucin [Mus musculus]
  misc_feature (1)..(297): NCBI GI NO: 18376167 NR Description: hypothetical protein [Neurospora crassa]
  misc_feature (85)..(297): NCBI GI NO: 13592175 NR Description: ppg3 [Leishmania major]
  misc_feature (82)..(229): NCBI GI NO: 17384256 NR Description: mucin 5 [Homo sapiens]
  misc_feature (287)..(297): NCBI GI NO: 17384256 NR Description: mucin 5 [Homo sapiens]
  misc_feature (82)..(223): NCBI GI NO: 17384256 NR Description: mucin 5 [Homo sapiens]
PNRKIKRKKRSQPKGRGKKDQINNPLSPTSAEASNKSPCRSPWTNSRRRRAKARASRGRRRRGRRRCPLWRMTCCYRSWDGSRRTRGTGRGPPARPRASPLCSGRPASRRDCRGRSPPSSSPRRHRTGRPRPGRRSTSSPSVARGSSAPGCSSSPPTISGSISTSGLTSPSTPAPTPPPPRGSRPRPPPATAEPSSRPGARPAPANLPTSPRGRSTTTCTWTRHTTARPSCRSRLPLRLWNPPRPRPWRRSATWRKQRPQMLSHAASPGAAWWPGADCIRGGGWAPSARTWHRGPGR

SEQ ID NO: 26230 - protein, 226 aa, Zea mays subsp. mays
  peptide (1)..(226): Ceres Seq. ID no. 13493456
  misc_feature (32)..(226): Pfam Name: Pfam Description:  Equine herpesvirus glycoprotein gp2
  misc_feature (7)..(226): NCBI GI NO: 13592175 NR Description: ppg3 [Leishmania major]
  misc_feature (32)..(226): NCBI GI NO: 17221114 NR Description: glycoprotein gp2 [Equine herpesvirus 1]
  misc_feature (11)..(226): NCBI GI NO: 17221106 NR Description: glycoprotein gp2 [Equine herpesvirus 1]
  misc_feature (7)..(226): NCBI GI NO: 13592175 NR Description: ppg3 [Leishmania major]
  misc_feature (11)..(226): NCBI GI NO: 30313663 NR Description: sublingual apomucin [Mus musculus]
  misc_feature (1)..(226): NCBI GI NO: 18376167 NR Description: hypothetical protein [Neurospora crassa]
  misc_feature (14)..(226): NCBI GI NO: 13592175 NR Description: ppg3 [Leishmania major]
  misc_feature (11)..(158): NCBI GI NO: 17384256 NR Description: mucin 5 [Homo sapiens]
  misc_feature (216)..(226): NCBI GI NO: 17384256 NR Description: mucin 5 [Homo sapiens]
  misc_feature (11)..(152): NCBI GI NO: 17384256 NR Description: mucin 5 [Homo sapiens]
MTCCYRSWDGSRRTRGTGRGPPARPRASPLCSGRPASRRDCRGRSPPSSSPRRHRTGRPRPGRRSTSSPSVARGSSAPGCSSSPPTISGSISTSGLTSPSTPAPTPPPPRGSRPRPPPATAEPSSRPGARPAPANLPTSPRGRSTTTCTWTRHTTARPSCRSRLPLRLWNPPRPRPWRRSATWRKQRPQMLSHAASPGAAWWPGADCIRGGGWAPSARTWHRGPGR

SEQ ID NO: 26231 - DNA, 1240 bp, Zea mays subsp. mays
  misc_feature (1)..(1240): Ceres Seq. ID no. 12376591
gcacgagaccattacctagaacatcctaatcgaaaaatccgcagtcgcacacccgccattgcattcgcagcaccagcgccgcttctccttcctcgagctcacccctctcttctcttctcctattcgctcgcgtgctctctctctctctctctgctgcctcagccgccctcgctgtcgctgagccgacagattcattcggccggtcatggctgacgcgttgtgcaacggcgtcgtggcgtccccgtgcggccgggacgtcgccggcagggccaggggcgccggcagggccgcgctcgcggagtcccttcaggtcgccgggcacgccagcaagacctccttctccgccgggaggatgtcggtcaaggacagcaagccgaggcccctgtcgcgtagcctcgaggccgccgcgccaggacagatgaacctgtcgttccccaaggccatgcggtggtgggagaaggggctgcaccccaacatgcgcgaggtcgagtccgcgcaggacctcgccgactcgctgctcagcgccggcgacaaactcgtggtcgtcgacttcttctccccaggctgcggcggctgccgcgccctccaccccaagatcgcccagttcgccgagaagaacccgggcgtgcagttcctgcaggtgaactacgagacgcacaagtccatgtgctacagcctccgcgtccacgtcctccctttcttcaggttctaccggggagccgagggccgggtcagcagcttcagctgcaccaacgcaacgatcaacaagttcaaggacgcgctcgccaagcacggggctgagaggtgcagcctcgggcctgcgcgggggctggacgagtcggagctcatggctttggctgagaacagggacctgcacttcacctacgacaagccgggcggcctcgtccccctcgcggaagccattgccaaggaggctgccgcgccgggaggcccgtggcttcctctgcctgcgtccctgctcggccagggatcggccgataactcattgctgccgtctggaagatagaccgtgctccgtgctcggttggtttcattcattggaggtggctcctccgtcttgtacagatttcattcgttcgtagtggtctgatgatgctggagtgacagaaatattcagacgcgggatgcgcagtgactatcgcgggatgcgcagtgactatcgcgtctgtattgttgcatctagacctttgctgaaacatgaaaaaatccattgcttggc

SEQ ID NO: 26232 - protein, 273 aa, Zea mays subsp. mays
  peptide (1)..(273): Ceres Seq. ID no. 12376592
  misc_feature (1)..(273): NCBI GI NO: 34394520 NR Description: putative thioredoxin
  misc_feature (54)..(273): NCBI GI NO: 15223262 NR Description: putative thioredoxin; protein id: At1g08570
  misc_feature (42)..(273): NCBI GI NO: 308906 NR Description: thioredoxin
  misc_feature (71)..(250): NCBI GI NO: 15225825 NR Description: putative thioredoxin; protein id: At2g33270.1
  misc_feature (63)..(223): NCBI GI NO: 15240254 NR Description: thioredoxin-like 3; protein id: At5g61440
  misc_feature (65)..(233): NCBI GI NO: 19071639 NR Description: putative thioredoxin
  misc_feature (73)..(207): NCBI GI NO: 18417441 NR Description: Thioredoxin - like protein; protein id:At4g29670
  misc_feature (73)..(207): NCBI GI NO: 21554313 NR Description: thioredoxin-like protein [Arabidopsis thaliana]
  misc_feature (43)..(196): NCBI GI NO: 4973258 NR Description: thioredoxin-like 2 [Arabidopsis thaliana]
  misc_feature (43)..(196): NCBI GI NO: 15236134 NR Description: putative thioredoxin; protein id: At4g26160
MADALCNGVVASPCGRDVAGRARGAGRAALAESLQVAGHASKTSFSAGRMSVKDSKPRPLSRSLEAAAPGQMNLSFPKAMRWWEKGLHPNMREVESAQDLADSLLSAGDKLVVVDFFSPGCGGCRALHPKIAQFAEKNPGVQFLQVNYETHKSMCYSLRVHVLPFFRFYRGAEGRVSSFSCTNATINKFKDALAKHGAERCSLGPARGLDESELMALAENRDLHFTYDKPGGLVPLAEAIAKEAAAPGGPWLPLPASLLGQGSADNSLLPSGR

SEQ ID NO: 26233 - protein, 224 aa, Zea mays subsp. mays
  peptide (1)..(224): Ceres Seq. ID no. 12376593
  misc_feature (1)..(224): NCBI GI NO: 34394520 NR Description: putative thioredoxin
  misc_feature (5)..(224): NCBI GI NO: 15223262 NR Description: putative thioredoxin; protein id: At1g08570
  misc_feature (1)..(224): NCBI GI NO: 308906 NR Description: thioredoxin
  misc_feature (22)..(201): NCBI GI NO: 15225825 NR Description: putative thioredoxin; protein id: At2g33270.1
  misc_feature (14)..(174): NCBI GI NO: 15240254 NR Description: thioredoxin-like 3; protein id: At5g61440
  misc_feature (16)..(184): NCBI GI NO: 19071639 NR Description: putative thioredoxin
  misc_feature (24)..(158): NCBI GI NO: 18417441 NR Description: Thioredoxin - like protein; protein id:At4g29670
  misc_feature (24)..(158): NCBI GI NO: 21554313 NR Description: thioredoxin-like protein [Arabidopsis thaliana]
  misc_feature (1)..(147): NCBI GI NO: 4973258 NR Description: thioredoxin-like 2 [Arabidopsis thaliana]
  misc_feature (1)..(147): NCBI GI NO: 15236134 NR Description: putative thioredoxin; protein id: At4g26160
MSVKDSKPRPLSRSLEAAAPGQMNLSFPKAMRWWEKGLHPNMREVESAQDLADSLLSAGDKLVVVDFFSPGCGGCRALHPKIAQFAEKNPGVQFLQVNYETHKSMCYSLRVHVLPFFRFYRGAEGRVSSFSCTNATINKFKDALAKHGAERCSLGPARGLDESELMALAENRDLHFTYDKPGGLVPLAEAIAKEAAAPGGPWLPLPASLLGQGSADNSLLPSGR

SEQ ID NO: 26234 - protein, 202 aa, Zea mays subsp. mays
  peptide (1)..(202): Ceres Seq. ID no. 12376594
  misc_feature (1)..(202): NCBI GI NO: 34394520 NR Description: putative thioredoxin
  misc_feature (1)..(202): NCBI GI NO: 15223262 NR Description: putative thioredoxin; protein id: At1g08570
  misc_feature (1)..(202): NCBI GI NO: 308906 NR Description: thioredoxin
  misc_feature (1)..(179): NCBI GI NO: 15225825 NR Description: putative thioredoxin; protein id: At2g33270.1
  misc_feature (1)..(152): NCBI GI NO: 15240254 NR Description: thioredoxin-like 3; protein id: At5g61440
  misc_feature (1)..(162): NCBI GI NO: 19071639 NR Description: putative thioredoxin
  misc_feature (2)..(136): NCBI GI NO: 18417441 NR Description: Thioredoxin - like protein; protein id:At4g29670
  misc_feature (2)..(136): NCBI GI NO: 21554313 NR Description: thioredoxin-like protein [Arabidopsis thaliana]
  misc_feature (1)..(125): NCBI GI NO: 4973258 NR Description: thioredoxin-like 2 [Arabidopsis thaliana]
  misc_feature (1)..(125): NCBI GI NO: 15236134 NR Description: putative thioredoxin; protein id: At4g26160
MNLSFPKAMRWWEKGLHPNMREVESAQDLADSLLSAGDKLVVVDFFSPGCGGCRALHPKIAQFAEKNPGVQFLQVNYETHKSMCYSLRVHVLPFFRFYRGAEGRVSSFSCTNATINKFKDALAKHGAERCSLGPARGLDESELMALAENRDLHFTYDKPGGLVPLAEAIAKEAAAPGGPWLPLPASLLGQGSADNSLLPSGR

SEQ ID NO: 26235 - DNA, 1408 bp, Zea mays subsp. mays
  misc_feature (1)..(1408): Ceres Seq. ID no. 12344038
gtctagattcattgcacctgctggtcgtttgaactttgaaccgagcggcacggcaaccctttctccgagccgcccaagtccgtacagcgcccatgcccttctcacgtgcatgcccccctccccaaaaccacacacacgagaggaaaaaaaaagggggctcattttcctacgagatcccgtggaaaacggccgggtgcggcaggagaggccggggtgcctgccagtgccatcacgtgccggtgaccaccgtcctgatcctcatcccctcgctcgctgcgcctggcctgacgtgtccccccggcccccgggtccgtgtgtacgctggcgtccggcgggatataaaagcggtcccgcacccacctcttcttcctccttttttttctctcatccgaattcccaggcaggcaggtcggcgaggagggcaggaagaccgaagaccgagccgtgcgggggctcgggacgggaacgggacaggaccccaaaatctcagatccttcctgcccgcccgcccgtgcccgtcgacgcgtcgttcttgccggccgcgccccacctccgccctctcctcctccagggggatcggatacgccacaggctgcgcgatggtgctgtgggtcttcggctacggctccctcatctggaaccccggcttcgacttcgacgacaaaatcctcggcttcatcaagggctacaagcgcacctttaatctcgcttgcattgaccacagaggcacaccggagcatccggcgaggacctgcacgcttgaaaccgacgacgaggccatatgctggggaattgcatattgtgtcaagggtggtccagaaaaagagctaaaagcaatgcagtacttggagagaagagagtgtgagtacgaccagaaaatatccattgatttctacaaggaaggagatcccttgaaaccagctgtgacgggcgtcttagtgttcgtttccactccagatccaattggcaacaagtactatcttggccctgctcctctgcaggatatggcaaggcaaattgctacagccaatggccctactggctataatagggattacctgttctcaatggagaaggcattagccagcattagccacgaagatgattcgatcatagagcttgcaaacgaggtgaggaaggtgctcaacagaacaaaggagaccaagatcactggtgccaatgcttccctgaaatcacatgcccctcttgtgcacctgtccgcgcttccagaaggcaccgttgtggactcgagatagcgacctctactcggaatttactttcagctcttgcatgtttgtggttgtggccatcatgtactgattttcccttttcaacagttgtcgtgaggctgtatcgtctggagtaaaaaaaaatgctaaaagccggcactaataatgatattaacttg

SEQ ID NO: 26236 - protein, 387 aa, Zea mays subsp. mays
  peptide (1)..(387): Ceres Seq. ID no. 12344039
  misc_feature (172)..(350): Pfam Name: Pfam Description:  ChaC-like protein
  misc_feature (170)..(368): NCBI GI NO: 18417778 NR Description: unknown protein; protein id: At4g31290
  misc_feature (170)..(368): NCBI GI NO: 21593515 NR Description: unknown [Arabidopsis thaliana]
  misc_feature (170)..(386): NCBI GI NO: 27525010 NR Description: putative cation transporter [Beta procumbens]
  misc_feature (170)..(358): NCBI GI NO: 15239626 NR Description: putative protein; protein id: At5g26220.1
  misc_feature (269)..(358): NCBI GI NO: 7486723 NR Description: hypothetical protein F9D12
  misc_feature (170)..(250): NCBI GI NO: 7486723 NR Description: hypothetical protein F9D12
  misc_feature (249)..(387): NCBI GI NO: 31711499 NR Description: OsCTTP [Oryza sativa (indica cultivar-group)]
  misc_feature (170)..(250): NCBI GI NO: 7486662 NR Description: hypothetical protein F8F16
  misc_feature (269)..(333): NCBI GI NO: 7486662 NR Description: hypothetical protein F8F16
  misc_feature (170)..(365): NCBI GI NO: 18401334 NR Description: expressed protein; protein id: At1g44790
MPFSRACPPPQNHTHERKKKGGSFSYEIPWKTAGCGRRGRGACQCHHVPVTTVLILIPSLAAPGLTCPPGPRVRVYAGVRRDIKAVPHPPLLPPFFSLIRIPRQAGRRGGQEDRRPSRAGARDGNGTGPQNLRSFLPARPCPSTRRSCRPRPTSALSSSRGIGYATGCAMVLWVFGYGSLIWNPGFDFDDKILGFIKGYKRTFNLACIDHRGTPEHPARTCTLETDDEAICWGIAYCVKGGPEKELKAMQYLERRECEYDQKISIDFYKEGDPLKPAVTGVLVFVSTPDPIGNKYYLGPAPLQDMARQIATANGPTGYNRDYLFSMEKALASISHEDDSIIELANEVRKVLNRTKETKITGANASLKSHAPLVHLSALPEGTVVDSR

SEQ ID NO: 26237 - protein, 233 aa, Zea mays subsp. mays
  peptide (1)..(233): Ceres Seq. ID no. 12344040
SRFIAPAGRLNFEPSGTATLSPSRPSPYSAHALLTCMPPSPKPHTREEKKRGLIFLRDPVENGRVRQERPGCLPVPSRAGDHRPDPHPLARCAWPDVSPRPPGPCVRWRPAGYKSGPAPTSSSSFFFSHPNSQAGRSARRAGRPKTEPCGGSGRERDRTPKSQILPARPPVPVDASFLPAAPHLRPLLLQGDRIRHRLRDGAVGLRLRLPHLEPRLRLRRQNPRLHQGLQAHL

SEQ ID NO: 26238 - protein, 218 aa, Zea mays subsp. mays
  peptide (1)..(218): Ceres Seq. ID no. 12344041
  misc_feature (3)..(181): Pfam Name: Pfam Description:  ChaC-like protein
  misc_feature (1)..(199): NCBI GI NO: 18417778 NR Description: unknown protein; protein id: At4g31290
  misc_feature (1)..(199): NCBI GI NO: 21593515 NR Description: unknown [Arabidopsis thaliana]
  misc_feature (1)..(217): NCBI GI NO: 27525010 NR Description: putative cation transporter [Beta procumbens]
  misc_feature (1)..(189): NCBI GI NO: 15239626 NR Description: putative protein; protein id: At5g26220.1
  misc_feature (100)..(189): NCBI GI NO: 7486723 NR Description: hypothetical protein F9D12
  misc_feature (1)..(81): NCBI GI NO: 7486723 NR Description: hypothetical protein F9D12
  misc_feature (80)..(218): NCBI GI NO: 31711499 NR Description: OsCTTP [Oryza sativa (indica cultivar-group)]
  misc_feature (1)..(81): NCBI GI NO: 7486662 NR Description: hypothetical protein F8F16
  misc_feature (100)..(164): NCBI GI NO: 7486662 NR Description: hypothetical protein F8F16
  misc_feature (1)..(196): NCBI GI NO: 18401334 NR Description: expressed protein; protein id: At1g44790
MVLWVFGYGSLIWNPGFDFDDKILGFIKGYKRTFNLACIDHRGTPEHPARTCTLETDDEAICWGIAYCVKGGPEKELKAMQYLERRECEYDQKISIDFYKEGDPLKPAVTGVLVFVSTPDPIGNKYYLGPAPLQDMARQIATANGPTGYNRDYLFSMEKALASISHEDDSIIELANEVRKVLNRTKETKITGANASLKSHAPLVHLSALPEGTVVDSR

SEQ ID NO: 26239 - DNA, 1389 bp, Zea mays subsp. mays
  misc_feature (1)..(1389): Ceres Seq. ID no. 12352271
gaagtaagcgtggatgttgcccacgtggcccccggctcctccagaagtagccatacggattcagatcgcggccgcggcgactccccgagcagaagaacccgatcgaacgcggccgcggcggcgactccccgatctcagatccctgctgcgagcgaagtgttcgattcgagcagagatggcggcggcatgggcggtgctggctttgttcctcgtcgcggcgcaggtggcggcggcggcgccggtcacggcgccagcgttcctgtgggcgcccaaaaactacggattcagctctgatgatgctaaggaggtagtccattaccaaacaatctcaccaaagagcttagctaaatctgttctcgaggaaggtggctggtcaaacttcatgtgctcaagggaggatactcagaataatgttgatgttgccattgtttttattggctcaaagctgcaatcgtcagacatatctaaagataagcaagttgatccagctttagcagacacactgaagctctccttcacacgctcagagttttccatggcattcccctacgtttccaccacagtcgacgagagactagaggactcgttgctatccagctttgccgagaactgcaacaatggtttcggaagaaaccgcgtcacctacacagacacgtgtaccggtcaagatctgaagaaataccacaacatggatgccatcaatgacctggtagtgtcaggggtagcgtcaaggagagtcaaccacccaagtggacagaccgatgtaatcgtcttctgtagcggcgggttcgagaatccaggcactgcgaaatcagaaggagagctgctttcccagcttgtggacttgctggacttgtcgggagccaaatatacggtcctctatgcgtcccaaccgtctggtttgctggagagcccttcgggcctgccgctgggtaggcatctcgcggagaagaagactaacggcacgaaagctgtccagggcgaaaaatgcgatggcgagtgcctcgtcaaatctagtctcctcgaaggaactttcgttgggatagtgcttctcatcatcctgatatcaggactcatgtgcatgatggggatcgatactccctcgaggtttgaagctccccaggagtcttgatctctcccttggactgcagaatccgcgggggggttgtgacgagggcacgcggcggcgttgaggggggccggtgttctgttggtctgcactgtggatatatatcgtttagcttcccatttggaagggagtacgccttgtgtatttttttttaccgagccaactgtcactcacaatgtgctagaattttttggtgtaatatttggctatttgcgtttcgcgtctacggacaactaataagctgaggcctgaggcattgc

SEQ ID NO: 26240 - protein, 372 aa, Zea mays subsp. mays
  peptide (1)..(372): Ceres Seq. ID no. 12352272
  misc_feature (58)..(372): NCBI GI NO: 30682651 NR Description: expressed protein [Arabidopsis thaliana]
  misc_feature (60)..(372): NCBI GI NO: 24417230 NR Description: unknown [Arabidopsis thaliana]
  misc_feature (168)..(372): NCBI GI NO: 21618303 NR Description: unknown [Arabidopsis thaliana]
  misc_feature (105)..(165): NCBI GI NO: 25405838 NR Description: hypothetical protein T5A14.4
MLPTWPPAPPEVAIRIQIAAAATPRAEEPDRTRPRRRLPDLRSLLRAKCSIRAEMAAAWAVLALFLVAAQVAAAAPVTAPAFLWAPKNYGFSSDDAKEVVHYQTISPKSLAKSVLEEGGWSNFMCSREDTQNNVDVAIVFIGSKLQSSDISKDKQVDPALADTLKLSFTRSEFSMAFPYVSTTVDERLEDSLLSSFAENCNNGFGRNRVTYTDTCTGQDLKKYHNMDAINDLVVSGVASRRVNHPSGQTDVIVFCSGGFENPGTAKSEGELLSQLVDLLDLSGAKYTVLYASQPSGLLESPSGLPLGRHLAEKKTNGTKAVQGEKCDGECLVKSSLLEGTFVGIVLLIILISGLMCMMGIDTPSRFEAPQES

SEQ ID NO: 26241 - protein, 318 aa, Zea mays subsp. mays
  peptide (1)..(318): Ceres Seq. ID no. 12352273
  misc_feature (4)..(318): NCBI GI NO: 30682651 NR Description: expressed protein [Arabidopsis thaliana]
  misc_feature (6)..(318): NCBI GI NO: 24417230 NR Description: unknown [Arabidopsis thaliana]
  misc_feature (114)..(318): NCBI GI NO: 21618303 NR Description: unknown [Arabidopsis thaliana]
  misc_feature (51)..(111): NCBI GI NO: 25405838 NR Description: hypothetical protein T5A14.4
MAAAWAVLALFLVAAQVAAAAPVTAPAFLWAPKNYGFSSDDAKEVVHYQTISPKSLAKSVLEEGGWSNFMCSREDTQNNVDVAIVFIGSKLQSSDISKDKQVDPALADTLKLSFTRSEFSMAFPYVSTTVDERLEDSLLSSFAENCNNGFGRNRVTYTDTCTGQDLKKYHNMDAINDLVVSGVASRRVNHPSGQTDVIVFCSGGFENPGTAKSEGELLSQLVDLLDLSGAKYTVLYASQPSGLLESPSGLPLGRHLAEKKTNGTKAVQGEKCDGECLVKSSLLEGTFVGIVLLIILISGLMCMMGIDTPSRFEAPQES

SEQ ID NO: 26242 - protein, 249 aa, Zea mays subsp. mays
  peptide (1)..(249): Ceres Seq. ID no. 12352274
  misc_feature (1)..(249): NCBI GI NO: 30682651 NR Description: expressed protein [Arabidopsis thaliana]
  misc_feature (1)..(249): NCBI GI NO: 24417230 NR Description: unknown [Arabidopsis thaliana]
  misc_feature (45)..(249): NCBI GI NO: 21618303 NR Description: unknown [Arabidopsis thaliana]
  misc_feature (1)..(42): NCBI GI NO: 25405838 NR Description: hypothetical protein T5A14.4
MCSREDTQNNVDVAIVFIGSKLQSSDISKDKQVDPALADTLKLSFTRSEFSMAFPYVSTTVDERLEDSLLSSFAENCNNGFGRNRVTYTDTCTGQDLKKYHNMDAINDLVVSGVASRRVNHPSGQTDVIVFCSGGFENPGTAKSEGELLSQLVDLLDLSGAKYTVLYASQPSGLLESPSGLPLGRHLAEKKTNGTKAVQGEKCDGECLVKSSLLEGTFVGIVLLIILISGLMCMMGIDTPSRFEAPQES

SEQ ID NO: 26243 - DNA, 909 bp, Zea mays subsp. mays; identical to SEQ ID NO: 25383
  misc_feature (1)..(909): Ceres Seq. ID no. 12356120

SEQ ID NO: 26244 - protein, 198 aa, Zea mays subsp. mays; identical to SEQ ID NO: 25384
  peptide (1)..(198): Ceres Seq. ID no. 12356121
  misc_feature (19)..(178): Pfam Name: Pfam Description:  Equine herpesvirus glycoprotein gp2
  misc_feature (11)..(190): NCBI GI NO: 11359723 NR Description: proteophosphoglycan, membrane-associated
  misc_feature (19)..(193): NCBI GI NO: 32699068 NR Description: hypothetical protein FLJ35107 [Homo sapiens]
  misc_feature (1)..(193): NCBI GI NO: 2429362 NR Description: proline rich protein [Santalum album]
  misc_feature (13)..(190): NCBI GI NO: 11359723 NR Description: proteophosphoglycan, membrane-associated
  misc_feature (19)..(193): NCBI GI NO: 32699068 NR Description: hypothetical protein FLJ35107 [Homo sapiens]
  misc_feature (17)..(183): NCBI GI NO: 32699068 NR Description: hypothetical protein FLJ35107 [Homo sapiens]
  misc_feature (11)..(192): NCBI GI NO: 11359723 NR Description: proteophosphoglycan, membrane-associated
  misc_feature (11)..(193): NCBI GI NO: 13592175 NR Description: ppg3 [Leishmania major]
  misc_feature (11)..(190): NCBI GI NO: 13592175 NR Description: ppg3 [Leishmania major]
  misc_feature (11)..(190): NCBI GI NO: 13592175 NR Description: ppg3 [Leishmania major]

SEQ ID NO: 26245 - protein, 190 aa, Zea mays subsp. mays; identical to SEQ ID NO: 25385
  peptide (1)..(190): Ceres Seq. ID no. 12356122
  misc_feature (29)..(168): Pfam Name: Pfam Description:  Protein of unknown function, DUF538
  misc_feature (13)..(170): NCBI GI NO: 18411923 NR Description: coded for by A
  misc_feature (13)..(170): NCBI GI NO: 21554037 NR Description: unknown [Arabidopsis thaliana]
  misc_feature (29)..(168): NCBI GI NO: 18379014 NR Description: Expressed protein; protein id: At1g02816
  misc_feature (39)..(173): NCBI GI NO: 15235335 NR Description: putative protein; protein id: At4g02360.1
  misc_feature (23)..(168): NCBI GI NO: 18379012 NR Description: Expressed protein; protein id: At1g02813
  misc_feature (23)..(168): NCBI GI NO: 21553750 NR Description: unknown [Arabidopsis thaliana]

SEQ ID NO: 26246 - protein, 173 aa, Zea mays subsp. mays; identical to SEQ ID NO: 25386
  peptide (1)..(173): Ceres Seq. ID no. 12356123
  misc_feature (12)..(151): Pfam Name: Pfam Description:  Protein of unknown function, DUF538
  misc_feature (1)..(153): NCBI GI NO: 18411923 NR Description: coded for by A
  misc_feature (1)..(153): NCBI GI NO: 21554037 NR Description: unknown [Arabidopsis thaliana]
  misc_feature (12)..(151): NCBI GI NO: 18379014 NR Description: Expressed protein; protein id: At1g02816
  misc_feature (22)..(156): NCBI GI NO: 15235335 NR Description: putative protein; protein id: At4g02360.1
  misc_feature (6)..(151): NCBI GI NO: 18379012 NR Description: Expressed protein; protein id: At1g02813
  misc_feature (6)..(151): NCBI GI NO: 21553750 NR Description: unknown [Arabidopsis thaliana]

SEQ ID NO: 26247 - DNA, 1504 bp, Zea mays subsp. mays
  misc_feature (1)..(1504): Ceres Seq. ID no. 12381098
aagccaacacggtcacacgactgcataattgtgctcgctcgccgggccccgggacgtgacacatcgcacggccgaagcagcttgccggctgccgcgtttcgcctcccgcctgccgtgccgcccgtgaccgcgagaaggccggcagctttgcatgaggaggaggaggatgggggcactgcacgtcgtcggcgagcccaggatcagcttccgccagcagcctgcagcagtcgtcgcgaagaacggcggccacggcgccgtcgtcgaggagatccacggcctgatccgcgtctacaaggacggacacgtggagcggctcccggcgatcccagccgtgccctgcacgtggggcggcacggcccccggacgcgccgggcggcgtcgtcgcgagggacgtggtggtggaccccgcgacgggggtgtgggcgcggctgtacgcgccgacgtcggcgggggacggagccaggcgccccgtcgtggtgtacttccacggcggcgggttctgcgtcgggtccgcggcctggagctgctaccacgagttcctcgcccagctcgcggcgcgcgcgggctgcgccgtgatgtccgtggactaccggctggcgcccgagcaccgcctgccggccgcgttcgacgacgggctggccgcggtgcggtggctgcggcaccaggccgcagcgtcagcgtcagcgtcagcgtgctgcaacgacgacctgtcgtggtggcgggcccgctgcggctttgaccgcgtgttcctcatgggcgacagcgcgggcgccagcatcgccttgcacgtggccgcgaggctcgggcagggccagcttggcgcgctgccccccttgaccgtcaggggccccgtcctgatccagccattcctgggcggcgaggggcgtaccgcgtccgagaagaacgtggcgcagccgccacggtcggcgctgacgctggccacctccgactgctactggcggctggcgctgccggccggagccagccgcgagcacccctggtgcaacccgctgtcgggccgcgccgcgccgcgcctggagaccactccgctgcccccgctcctggtgtgcgtctcggagacggacatcctgcgggaccgcaacctggagctgtgcagggcgttgcgcgaggcgggcaagcgcgtggagcaggccgtgtacggcggcgtcgggcacgcgttccaggtgctccacaactgccacctgtcccagccgcggacgcaggagatgctcgcgcacatcaaggccttcgtcagcgccaggtagcaggcgccgcagcagcagccgcctcctccattcgtcgttggtccctaacaaacagacactcgccatgttaattaatccactacctaatcctaatccaatcgaagagtagatgccgtgtaagcaaccagaaccagccttgtgcagtactgtatcagtagtgtgtgacttggagcagaaagcgtccaatgcccagcccgggttgttgttgtagcggtgtcggaaagcaaaagcttatcact

SEQ ID NO: 26248 - protein, 229 aa, Zea mays subsp. mays
  peptide (1)..(229): Ceres Seq. ID no. 12381099
  misc_feature (1)..(226): NCBI GI NO: 15237267 NR Description: putative protein; protein id: At5g16080
  misc_feature (1)..(226): NCBI GI NO: 21593215 NR Description: unknown [Arabidopsis thaliana]
  misc_feature (1)..(146): NCBI GI NO: 18409077 NR Description: expressed protein; protein id: At1g68620
  misc_feature (1)..(202): NCBI GI NO: 27819508 NR Description: putative esterase
  misc_feature (1)..(197): NCBI GI NO: 34895936 NR Description: P0030H07.39
  misc_feature (1)..(229): NCBI GI NO: 34899932 NR Description: putative cell death associated protein
  misc_feature (1)..(206): NCBI GI NO: 5487873 NR Description: PrMC3 [Pinus radiata]
  misc_feature (1)..(226): NCBI GI NO: 34895916 NR Description: P0030H07.24
  misc_feature (42)..(226): NCBI GI NO: 18409077 NR Description: expressed protein; protein id: At1g68620
  misc_feature (1)..(223): NCBI GI NO: 34904770 NR Description: similar to carboxylesterase
MSVDYRLAPEHRLPAAFDDGLAAVRWLRHQAAASASASACCNDDLSWWRARCGFDRVFLMGDSAGASIALHVAARLGQGQLGALPPLTVRGPVLIQPFLGGEGRTASEKNVAQPPRSALTLATSDCYWRLALPAGASREHPWCNPLSGRAAPRLETTPLPPLLVCVSETDILRDRNLELCRALREAGKRVEQAVYGGVGHAFQVLHNCHLSQPRTQEMLAHIKAFVSAR

SEQ ID NO: 26249 - protein, 195 aa, Zea mays subsp. mays
  peptide (1)..(195): Ceres Seq. ID no. 12381100
  misc_feature (17)..(64): NCBI GI NO: 15237267 NR Description: putative protein; protein id: At5g16080
  misc_feature (17)..(64): NCBI GI NO: 21593215 NR Description: unknown [Arabidopsis thaliana]
  misc_feature (33)..(68): NCBI GI NO: 18409077 NR Description: expressed protein; protein id: At1g68620
MRRRRMGALHVVGEPRISFRQQPAAVVAKNGGHGAVVEEIHGLIRVYKDGHVERLPAIPAVPCTWGGTAPGRAGRRRREGRGGGPRDGGVGAAVRADVGGGRSQAPRRGVLPRRRVLRRVRGLELLPRVPRPARGARGLRRDVRGLPAGARAPPAGRVRRRAGRGAVAAAPGRSVSVSVSVLQRRPVVVAGPLRL

SEQ ID NO: 26250 - protein, 191 aa, Zea mays subsp. mays
  peptide (1)..(191): Ceres Seq. ID no. 12381101
KPTRSHDCIIVLARRAPGRDTSHGRSSLPAAAFRLPPAVPPVTARRPAALHEEEEDGGTARRRRAQDQLPPAACSSRREERRPRRRRRGDPRPDPRLQGRTRGAAPGDPSRALHVGRHGPRTRRAASSRGTWWWTPRRGCGRGCTRRRRRGTEPGAPSWCTSTAAGSASGPRPGAATTSSSPSSRRARAAP

SEQ ID NO: 26251 - DNA, 1552 bp, Zea mays subsp. mays
  misc_feature (1)..(1552): Ceres Seq. ID no. 12367612
agattgcgagactgtacactgtagagagagacgtcgtcggcctgagcgccgtgcaagcaagcaagcggcggcaatggcggcggctcttcaagccacgccgatcaaaaccctagccacctcccgctggcgcgtcgaaggtgcggaggcgcggccgcggccgcggccgattgcggtgagcttccgttgctccgcggcggcgaggagctacaacatcacgctcttacctggggacggcatcggcccggaggtggtcgccgtcgccaaggacgtgctatccttcgccggagccctcgaaggcgtcgagctccggtttcaggagaagctggtgggcggctcggcgctggacgccaccggcgtgccactccctgacgagacgctcgacgaggccaagggttccgacgctgttctcctcggcgccattggaggctataagtgggataccaatgagaagcacctcaagcctgagaccgggctgctgcagctacgtgccggactcggggtctttgccaatctgcgaccagctgcagttttgccgcagttggtagacgcatccactctgaagaaagaggtagctgaaggtgttgacatcatggttgtcagggagcttactggaggcatctactttggcaaacccaggggttttggaacaaatgacaagggagacgatattggcttcaacacagaagtttattcagcttctgagatcgatcgtattgcacgagttgcatttgaggtcgctcgcaagagaagagggaaactatgctcggttgataaagcaaatgtgctggaggcatccatgctttggaggaaaaaggtgactgcactagcctctgaattccctgacattgagctctcacacatgtatgttgacaatgctgcaatgcagcttgtcaggaatcctaagcagtttgatacaattgtcacaaacaatatttttggtgacatattatctgatgaagcatcaatgattacgggaagcattggaatgcttccatctgcgagtgtcggtgaatcgggacctggtctttttgaacctattcatggctctgcccctgatattgctggacaggacaaggccaatccattagctacaattcttagcgcagcgatgctattgcgatatggcctaggagaagaaaatgctgcgaggagaattgaagctgcagttacagaaacactgaaccatgggttccgaactggggacatatattctcctggaacaacactggttggatgcaagcggatgggggaggaagtcttgaagacagtggagtcactgaaggaagtggctgctgtgaactgatgcatgctggtacttgattcattgcattttattagaagtcgagccgagcgtaagagagcatggtgtctgggttattgttgatgttgaattgaaagtttagtggctgaaccgatagccacttcgcatttctgtggtttgtttgtctccctgtagttttttctttggtacaaggaaaggataggcatatgtttgctcaataaaatgggatagtttatgccgctttgaataaaagatggagttctgttttgg

SEQ ID NO: 26252 - protein, 433 aa, Zea mays subsp. mays
  peptide (1)..(433): Ceres Seq. ID no. 12367613
  misc_feature (70)..(419): Pfam Name: Pfam Description:  Isocitrate/isopropylmalate dehydrogenase
  misc_feature (25)..(425): NCBI GI NO: 126201 NR Description: 3-isopropylmalate dehydrogenase
  misc_feature (25)..(425): NCBI GI NO: 15220167 NR Description: putative 3-isopropylmalate dehydrogenase
  misc_feature (25)..(425): NCBI GI NO: 17064730 NR Description: putative 3-isopropylmalate dehydrogenase
  misc_feature (25)..(425): NCBI GI NO: 21553584 NR Description: putative 3-isopropylmalate dehydrogenase
  misc_feature (61)..(425): NCBI GI NO: 15221631 NR Description: 3-methyladenine DNA glycosylase, putative
  misc_feature (61)..(425): NCBI GI NO: 21592944 NR Description: 3-methyladenine DNA glycosylase, putative
  misc_feature (61)..(425): NCBI GI NO: 21759267 NR Description: 3-isopropylmalate dehydrogenase 1
  misc_feature (61)..(425): NCBI GI NO: 15241338 NR Description: 3-isopropylmalate dehydrogenase
  misc_feature (61)..(425): NCBI GI NO: 18377879 NR Description: AT5g14200/MUA22_20 [Arabidopsis thaliana]
  misc_feature (110)..(425): NCBI GI NO: 26451517 NR Description: putative 3-isopropylmalate dehydrogenase
DCETVHCRERRRRPERRASKQAAAMAAALQATPIKTLATSRWRVEGAEARPRPRPIAVSFRCSAAARSYNITLLPGDGIGPEVVAVAKDVLSFAGALEGVELRFQEKLVGGSALDATGVPLPDETLDEAKGSDAVLLGAIGGYKWDTNEKHLKPETGLLQLRAGLGVFANLRPAAVLPQLVDASTLKKEVAEGVDIMVVRELTGGIYFGKPRGFGTNDKGDDIGFNTEVYSASEIDRIARVAFEVARKRRGKLCSVDKANVLEASMLWRKKVTALASEFPDIELSHMYVDNAAMQLVRNPKQFDTIVTNNIFGDILSDEASMITGSIGMLPSASVGESGPGLFEPIHGSAPDIAGQDKANPLATILSAAMLLRYGLGEENAARRIEAAVTETLNHGFRTGDIYSPGTTLVGCKRMGEEVLKTVESLKEVAAVN

SEQ ID NO: 26253 - protein, 409 aa, Zea mays subsp. mays
  peptide (1)..(409): Ceres Seq. ID no. 12367614
  misc_feature (46)..(395): Pfam Name: Pfam Description:  Isocitrate/isopropylmalate dehydrogenase
  misc_feature (1)..(401): NCBI GI NO: 126201 NR Description: 3-isopropylmalate dehydrogenase
  misc_feature (1)..(401): NCBI GI NO: 15220167 NR Description: putative 3-isopropylmalate dehydrogenase
  misc_feature (1)..(401): NCBI GI NO: 17064730 NR Description: putative 3-isopropylmalate dehydrogenase
  misc_feature (1)..(401): NCBI GI NO: 21553584 NR Description: putative 3-isopropylmalate dehydrogenase
  misc_feature (37)..(401): NCBI GI NO: 15221631 NR Description: 3-methyladenine DNA glycosylase, putative
  misc_feature (37)..(401): NCBI GI NO: 21592944 NR Description: 3-methyladenine DNA glycosylase, putative
  misc_feature (37)..(401): NCBI GI NO: 21759267 NR Description: 3-isopropylmalate dehydrogenase 1
  misc_feature (37)..(401): NCBI GI NO: 15241338 NR Description: 3-isopropylmalate dehydrogenase
  misc_feature (37)..(401): NCBI GI NO: 18377879 NR Description: AT5g14200/MUA22_20 [Arabidopsis thaliana]
  misc_feature (86)..(401): NCBI GI NO: 26451517 NR Description: putative 3-isopropylmalate dehydrogenase
MAAALQATPIKTLATSRWRVEGAEARPRPRPIAVSFRCSAAARSYNITLLPGDGIGPEVVAVAKDVLSFAGALEGVELRFQEKLVGGSALDATGVPLPDETLDEAKGSDAVLLGAIGGYKWDTNEKHLKPETGLLQLRAGLGVFANLRPAAVLPQLVDASTLKKEVAEGVDIMVVRELTGGIYFGKPRGFGTNDKGDDIGFNTEVYSASEIDRIARVAFEVARKRRGKLCSVDKANVLEASMLWRKKVTALASEFPDIELSHMYVDNAAMQLVRNPKQFDTIVTNNIFGDILSDEASMITGSIGMLPSASVGESGPGLFEPIHGSAPDIAGQDKANPLATILSAAMLLRYGLGEENAARRIEAAVTETLNHGFRTGDIYSPGTTLVGCKRMGEEVLKTVESLKEVAAVN

SEQ ID NO: 26254 - protein, 237 aa, Zea mays subsp. mays
  peptide (1)..(237): Ceres Seq. ID no. 12367615
  misc_feature (1)..(223): Pfam Name: Pfam Description:  Isocitrate/isopropylmalate dehydrogenase
  misc_feature (1)..(229): NCBI GI NO: 126201 NR Description: 3-isopropylmalate dehydrogenase
  misc_feature (1)..(229): NCBI GI NO: 15220167 NR Description: putative 3-isopropylmalate dehydrogenase
  misc_feature (1)..(229): NCBI GI NO: 17064730 NR Description: putative 3-isopropylmalate dehydrogenase
  misc_feature (1)..(229): NCBI GI NO: 21553584 NR Description: putative 3-isopropylmalate dehydrogenase
  misc_feature (1)..(229): NCBI GI NO: 15221631 NR Description: 3-methyladenine DNA glycosylase, putative
  misc_feature (1)..(229): NCBI GI NO: 21592944 NR Description: 3-methyladenine DNA glycosylase, putative
  misc_feature (1)..(229): NCBI GI NO: 21759267 NR Description: 3-isopropylmalate dehydrogenase 1
  misc_feature (1)..(229): NCBI GI NO: 15241338 NR Description: 3-isopropylmalate dehydrogenase
  misc_feature (1)..(229): NCBI GI NO: 18377879 NR Description: AT5g14200/MUA22_20 [Arabidopsis thaliana]
  misc_feature (1)..(229): NCBI GI NO: 26451517 NR Description: putative 3-isopropylmalate dehydrogenase
MVVRELTGGIYFGKPRGFGTNDKGDDIGFNTEVYSASEIDRIARVAFEVARKRRGKLCSVDKANVLEASMLWRKKVTALASEFPDIELSHMYVDNAAMQLVRNPKQFDTIVTNNIFGDILSDEASMITGSIGMLPSASVGESGPGLFEPIHGSAPDIAGQDKANPLATILSAAMLLRYGLGEENAARRIEAAVTETLNHGFRTGDIYSPGTTLVGCKRMGEEVLKTVESLKEVAAVN

SEQ ID NO: 26255 - DNA, 1585 bp, Zea mays subsp. mays
  misc_feature (1)..(1585): Ceres Seq. ID no. 12381056
  misc_feature (1553)..(1553): n is a, c, t, g, unknown, or other
  misc_feature (1555)..(1555): n is a, c, t, g, unknown, or other
  misc_feature (1552)..(1552): n is a, c, t, g, unknown, or other
gcacgagaccattacctagaacatcctaatcgaaaaaaaatcacttcaggtaagggcgaagaagagcattccctctcccggtctccccatctcccgaaccgcgtgagccaaaccctcccagctcgcgcgccctcgatggatgcctccgccgccacccccgcccccgggccttccttctctggcgccgagtcctccgcggccgccgcccagccgccggcggaggctccgcagttgcgcgtccacggcgccggcagcggcagcggcgtcgcgcgagcctgccgccaccacgcgtacagccgcaagcagaagtcgctcggccttctctgctccaacttcgtggcgctgtacgaccgggaggacgtggaggtgattgggctggacgacgcggccaagcgtctcggcgtcgagcgacgctgatctacgacatagtcaacgttctcgagagcgtcgggattcttgtgcggagggccaagaatcggtatacatggctcggattcgggggagtccctgctgcgctgaaagaactcaaggagagggcgctaaggaagatgtccggatcaccggtgttactgtcaatggaggactcctctactgccaacttatcagatgatgaggatgatgaaaaattgggcgatgctgatgaagatgctgagagcgagaagctcagccaacctgttgacaatacgtctgataagcctgacgcacccagctgccgccttagatctgatcatcggaaggagaagtcccttgggctcctcactcagaattttgtcaagctcttcctcaacatggaggttgggacaatctcacttgacgaagctgcaaggcttctccttggagagggacatgcagacagcaacatgagaaccaaagttcgtcgattgtatgacattgccaatgtgctgtcttctttgaacctcattgagaagacgcagcaagcagacacaagaaaacctgcattccggtggctaggccaggcaaagcgaaagcaagataacaatgtcatggtttctgtacctccatcgatgaaggcaatgcccaataagagagcatttggtactgatcttacaaacattgacaataagcgaggcaagttagactcagcagcggagaacaaagtcaagctcatgcagggtgctggtaacatagtgaagacttttgagaggcagctggtgcaagggaaaaggagtgactttgtttatgggcccttccaccctgctggtgcaaagaaacacgaaactgatgatcaaactgttaagcagcaggagaggaagaacattcaggactgggaaaaccttgctgtgtccttccgtccacaatatcagaatcaagcactgaatgatctttttggtcattatgtggaagcatggaaatcatggtacgtggatcttacccaggaaacggcatcatgaagcagaatgttggcaggtcagttgtaacttgtaagccgtttccagtagttagatcaactgagttgttgatgcttgcttagggaaccaccctgtacaagatggaataaaaacacgaaggcaattttgtctttcgactgtanntnctcgaatgctagaagtgaggccattttttc

SEQ ID NO: 26256 - protein, 287 aa, Zea mays subsp. mays
  peptide (1)..(287): Ceres Seq. ID no. 12381057
  misc_feature (1)..(284): NCBI GI NO: 22331664 NR Description: DP-E2F-like protein 1; protein id: At3g48160
  misc_feature (1)..(267): NCBI GI NO: 30692988 NR Description: DP-E2F-related protein 1 [Arabidopsis thaliana]
  misc_feature (1)..(267): NCBI GI NO: 7487385 NR Description: hypothetical protein T24C20
  misc_feature (14)..(281): NCBI GI NO: 22330789 NR Description: DP-E2F-like protein 3; protein id: At3g01330
  misc_feature (48)..(284): NCBI GI NO: 15242176 NR Description: DP-E2F-like 2; protein id: At5g14960
  misc_feature (1)..(49): NCBI GI NO: 15242176 NR Description: DP-E2F-like 2; protein id: At5g14960
  misc_feature (14)..(264): NCBI GI NO: 6094551 NR Description: hypothetical protein [Arabidopsis thaliana]
  misc_feature (1)..(142): NCBI GI NO: 26334515 NR Description: unnamed protein product [Mus musculus]
  misc_feature (1)..(170): NCBI GI NO: 40254337 NR Description: E2F transcription factor 7 [Mus musculus]
  misc_feature (1)..(170): NCBI GI NO: 26326999 NR Description: unnamed protein product [Mus musculus]
MSGSPVLLSMEDSSTANLSDDEDDEKLGDADEDAESEKLSQPVDNTSDKPDAPSCRLRSDHRKEKSLGLLTQNFVKLFLNMEVGTISLDEAARLLLGEGHADSNMRTKVRRLYDIANVLSSLNLIEKTQQADTRKPAFRWLGQAKRKQDNNVMVSVPPSMKAMPNKRAFGTDLTNIDNKRGKLDSAAENKVKLMQGAGNIVKTFERQLVQGKRSDFVYGPFHPAGAKKHETDDQTVKQQERKNIQDWENLAVSFRPQYQNQALNDLFGHYVEAWKSWYVDLTQETAS

SEQ ID NO: 26257 - protein, 278 aa, Zea mays subsp. mays
  peptide (1)..(278): Ceres Seq. ID no. 12381058
  misc_feature (1)..(275): NCBI GI NO: 22331664 NR Description: DP-E2F-like protein 1; protein id: At3g48160
  misc_feature (1)..(258): NCBI GI NO: 30692988 NR Description: DP-E2F-related protein 1 [Arabidopsis thaliana]
  misc_feature (1)..(258): NCBI GI NO: 7487385 NR Description: hypothetical protein T24C20
  misc_feature (5)..(272): NCBI GI NO: 22330789 NR Description: DP-E2F-like protein 3; protein id: At3g01330
  misc_feature (39)..(275): NCBI GI NO: 15242176 NR Description: DP-E2F-like 2; protein id: At5g14960
  misc_feature (1)..(40): NCBI GI NO: 15242176 NR Description: DP-E2F-like 2; protein id: At5g14960
  misc_feature (5)..(255): NCBI GI NO: 6094551 NR Description: hypothetical protein [Arabidopsis thaliana]
  misc_feature (1)..(133): NCBI GI NO: 26334515 NR Description: unnamed protein product [Mus musculus]
  misc_feature (1)..(161): NCBI GI NO: 40254337 NR Description: E2F transcription factor 7 [Mus musculus]
  misc_feature (1)..(161): NCBI GI NO: 26326999 NR Description: unnamed protein product [Mus musculus]
MEDSSTANLSDDEDDEKLGDADEDAESEKLSQPVDNTSDKPDAPSCRLRSDHRKEKSLGLLTQNFVKLFLNMEVGTISLDEAARLLLGEGHADSNMRTKVRRLYDIANVLSSLNLIEKTQQADTRKPAFRWLGQAKRKQDNNVMVSVPPSMKAMPNKRAFGTDLTNIDNKRGKLDSAAENKVKLMQGAGNIVKTFERQLVQGKRSDFVYGPFHPAGAKKHETDDQTVKQQERKNIQDWENLAVSFRPQYQNQALNDLFGHYVEAWKSWYVDLTQETAS

SEQ ID NO: 26258 - protein, 207 aa, Zea mays subsp. mays
  peptide (1)..(207): Ceres Seq. ID no. 12381059
  misc_feature (1)..(204): NCBI GI NO: 22331664 NR Description: DP-E2F-like protein 1; protein id: At3g48160
  misc_feature (1)..(187): NCBI GI NO: 30692988 NR Description: DP-E2F-related protein 1 [Arabidopsis thaliana]
  misc_feature (1)..(187): NCBI GI NO: 7487385 NR Description: hypothetical protein T24C20
  misc_feature (1)..(201): NCBI GI NO: 22330789 NR Description: DP-E2F-like protein 3; protein id: At3g01330
  misc_feature (1)..(204): NCBI GI NO: 15242176 NR Description: DP-E2F-like 2; protein id: At5g14960
  misc_feature (1)..(184): NCBI GI NO: 6094551 NR Description: hypothetical protein [Arabidopsis thaliana]
  misc_feature (1)..(62): NCBI GI NO: 26334515 NR Description: unnamed protein product [Mus musculus]
  misc_feature (1)..(90): NCBI GI NO: 40254337 NR Description: E2F transcription factor 7 [Mus musculus]
  misc_feature (1)..(90): NCBI GI NO: 26326999 NR Description: unnamed protein product [Mus musculus]
  misc_feature (1)..(90): NCBI GI NO: 29741773 NR Description: similar to Transcription factor E2F dimerisationpartner
MEVGTISLDEAARLLLGEGHADSNMRTKVRRLYDIANVLSSLNLIEKTQQADTRKPAFRWLGQAKRKQDNNVMVSVPPSMKAMPNKRAFGTDLTNIDNKRGKLDSAAENKVKLMQGAGNIVKTFERQLVQGKRSDFVYGPFHPAGAKKHETDDQTVKQQERKNIQDWENLAVSFRPQYQNQALNDLFGHYVEAWKSWYVDLTQETAS

SEQ ID NO: 26259 - DNA, 1353 bp, Zea mays subsp. mays
  misc_feature (1)..(1353): Ceres Seq. ID no. 12352275
accacgcgtccacgcctcaccatcgcagaagcgcagtaggaactaggaagccggacaaagctacgcaaggagggagaaagcgtgtaaaccatggcgtcctccgcgttcctcaacgctctcgtcctccgatcgccatcaccgtcgctctcgtcctcgtctaacctccgcagcaccggcgccttcgcgttcccgaaaccaccgcgcttcccatgcctgcgttctgcgcgtcgactcgtccttgcgagggcggcggcagcgccggcgccggggcgatggccccgaggacgagtgggggccggagcccgagggcggttccgctgtcacgggggccgcggtggcggaggcgccagaggcgagagaggtcgcggagctcaaggcgcagctaaaggacgcgctgtacggcacggagcggggcctgcgggcgtccagcgagtcgcgagccaaagtgctggagctcatcacgcagctcgagacgcgcaaccccacgccggctcctacggaggcgcttacgctccttaacggcaagtggatcctcgcgtacacatcgttttcccaactattcccactattggggtttggtaatctgcctcagctggtgaaggtggaggaaatatcacaaaccattgattctgagaacttcacagtgcaaaactgtatcaagttttcaggacctttggctacaacctcagttgccactaatgcaaaatttgaaattagaagccccaagcgtgtgcagatcaaatttgatgaagggattgttggtacaccacagttgaccgactccattgtgctaccagagaagtttgagttatttggacagaacatcgacctgagtccactgaaaggcatattttcttccatcgaaaatgcagcatcctaggttgcaaagaccatatctgagcagcctccgctgaaaataccgatcaggacaaacaatgctgaatcgtggttgcttacgacataccttgacgaagagctcaggatctccagaggcgatggcagcagcatctttgtgctgttcaaggagggaagtactcttctatactgagatccaaatcccgagtcgatgatcgttgaagctgaaccgtgaagtagttatactgcttatgctttcctttcttatagtaatatactccgtctcaaaataagtcaatttctagaatcacttaaagtcaaattatcttaagtttgaccaattttataggaaaggcaccatcgtctatgtctctatgacaccaaatgagtacattatgaaaaatatatgggttgtcttgtaaatacagttcttgtcattagagtatatgatgactaggaccggtttaatccgaaatatataaactctatatatcagtc

SEQ ID NO: 26260 - protein, 142 aa, Zea mays subsp. mays
  peptide (1)..(142): Ceres Seq. ID no. 12352276
  misc_feature (1)..(71): NCBI GI NO: 29367475 NR Description: fibrillin-like protein
MASSAFLNALVLRSPSPSLSSSSNLRSTGAFAFPKPPRFPCLRSARRLVLARAAAAPAPGRWPRGRVGAGARGRFRCHGGRGGGGARGERGRGAQGAAKGRAVRHGAGPAGVQRVASQSAGAHHAARDAQPHAGSYGGAYAP

SEQ ID NO: 26261 - DNA, 1193 bp, Zea mays subsp. mays
  misc_feature (1)..(1193): Ceres Seq. ID no. 13492699
agattcctcgcccaaccctaccccaggcgatctcgcatcgcatggccaccggaccgcggtctctccacgccctcctcggcggcggtgcagttgccgacttgctgctgtggcgacggaggaatgcctcggcggcagccgtggtgggcgccaccacggtctggttcgtcttcgagcgcgcggggtacagcttcccctccgtcctctccaacgccctgctcctcctcgtcgccatcctcttcttctgggccaagtctgcgtcgctgctcaacaggcctcttccacctcttcctaatcttgaggtctcagatgcgattgttgaaaaagctgcaaatcatgctcttgtatggatcaataggctgctggctgttggtcatgacatcgccatcaagagagataggaaagtttttataaaggtgatactgattttgtgggtggtttcattcattggaatgctcttcaattttcttacgcttatttacattggtgtaatgctttctctgttggttccaccactctatgagaagtaccaggaccaggttgatgagaaggttggtgtagcgtacagtgtactatcaaggcacatagataccatcattaccagggctgggcaatcagccaagcagaagaagactgagtaaaagaaacgttttgctgtattgtggaacatctctggttgtcaagtgaagttgacagtgggcctttcatctttgaccctctattccactaatatgaaccctcgatatgctgatctgaggttctgatgtgcattatgggaaatgaggcggcttgtgtatttcctttttgaacatggggtttactatgggtgcatatcgcactcggaatgatatcgagaaattgcgactcgtacatgcaattatgcaggctgcttgctctgttagtcatatgatctttccgtcagtgattttaaattttaggctgctccgaggaactttgcaggctgctccgagcaattatgcaggctgcttgctcattcgatgcccatctactggtagctcgttttctgaaatactagtacctaataaggtgtattctacgtagacagttgcatatcatgtgaataaataggtattttctggcggcagttctgtttttgctttacctgtgtttatactcccaccgtttattttgacaatgcgtacaaggtctagataagtcttttttagtgcgcttct

SEQ ID NO: 26262 - protein, 211 aa, Zea mays subsp. mays
  peptide (1)..(211): Ceres Seq. ID no. 13492700
  misc_feature (16)..(211): NCBI GI NO: 38345298 NR Description: OSJNBa0043A12.26
  misc_feature (20)..(183): NCBI GI NO: 18402246 NR Description: expressed protein [Arabidopsis thaliana]
  misc_feature (20)..(183): NCBI GI NO: 21593206 NR Description: unknown [Arabidopsis thaliana]
  misc_feature (20)..(210): NCBI GI NO: 30679374 NR Description: expressed protein [Arabidopsis thaliana]
  misc_feature (35)..(210): NCBI GI NO: 25411624 NR Description: hypothetical protein At2g15280
  misc_feature (11)..(179): NCBI GI NO: 15232423 NR Description: expressed protein [Arabidopsis thaliana]
  misc_feature (20)..(209): NCBI GI NO: 26450318 NR Description: unknown protein [Arabidopsis thaliana]
  misc_feature (29)..(209): NCBI GI NO: 30681541 NR Description: reticulon family [Arabidopsis thaliana]
  misc_feature (21)..(180): NCBI GI NO: 34904202 NR Description: P0492F05.25
  misc_feature (12)..(181): NCBI GI NO: 15222616 NR Description: expressed protein [Arabidopsis thaliana]
IPRPTLPQAISHRMATGPRSLHALLGGGAVADLLLWRRRNASAAAVVGATTVWFVFERAGYSFPSVLSNALLLLVAILFFWAKSASLLNRPLPPLPNLEVSDAIVEKAANHALVWINRLLAVGHDIAIKRDRKVFIKVILILWVVSFIGMLFNFLTLIYIGVMLSLLVPPLYEKYQDQVDEKVGVAYSVLSRHIDTIITRAGQSAKQKKTE

SEQ ID NO: 26263 - protein, 198 aa, Zea mays subsp. mays
  peptide (1)..(198): Ceres Seq. ID no. 13492701
  misc_feature (3)..(198): NCBI GI NO: 38345298 NR Description: OSJNBa0043A12.26
  misc_feature (7)..(170): NCBI GI NO: 18402246 NR Description: expressed protein [Arabidopsis thaliana]
  misc_feature (7)..(170): NCBI GI NO: 21593206 NR Description: unknown [Arabidopsis thaliana]
  misc_feature (7)..(197): NCBI GI NO: 30679374 NR Description: expressed protein [Arabidopsis thaliana]
  misc_feature (22)..(197): NCBI GI NO: 25411624 NR Description: hypothetical protein At2g15280
  misc_feature (1)..(166): NCBI GI NO: 15232423 NR Description: expressed protein [Arabidopsis thaliana]
  misc_feature (7)..(196): NCBI GI NO: 26450318 NR Description: unknown protein [Arabidopsis thaliana]
  misc_feature (16)..(196): NCBI GI NO: 30681541 NR Description: reticulon family [Arabidopsis thaliana]
  misc_feature (8)..(167): NCBI GI NO: 34904202 NR Description: P0492F05.25
  misc_feature (1)..(168): NCBI GI NO: 15222616 NR Description: expressed protein [Arabidopsis thaliana]
MATGPRSLHALLGGGAVADLLLWRRRNASAAAVVGATTVWFVFERAGYSFPSVLSNALLLLVAILFFWAKSASLLNRPLPPLPNLEVSDAIVEKAANHALVWINRLLAVGHDIAIKRDRKVFIKVILILWVVSFIGMLFNFLTLIYIGVMLSLLVPPLYEKYQDQVDEKVGVAYSVLSRHIDTIITRAGQSAKQKKTE

SEQ ID NO: 26264 - protein, 136 aa, Zea mays subsp. mays
  peptide (1)..(136): Ceres Seq. ID no. 13492702
RFLAQPYPRRSRIAWPPDRGLSTPSSAAVQLPTCCCGDGGMPRRQPWWAPPRSGSSSSARGTASPPSSPTPCSSSSPSSSSGPSLRRCSTGLFHLFLILRSQMRLLKKLQIMLLYGSIGCWLLVMTSPSREIGKFL

SEQ ID NO: 26265 - DNA, 1404 bp, Zea mays subsp. mays
  misc_feature (1)..(1404): Ceres Seq. ID no. 12365409
aaatctcctggaaattctgatcgaacctcctgcttggagcttcgcagcaacaccgtcctcacccgcgctgaaaaagcacccatcttcctattgcgcctttcttgtagagtcaagtcagctcacttttctcgtttcgatccagatcccgtattcccgttggattcgtttatcccgcgtcccgcaagcaatatcagatccttagcttctgtggttctgcacttattcagcgtctctccagcttggaccccttaaagtgttctccaggtacagctacttgaatcgtcagaaatggccactgacgccagcggaggtggtaagcctagtcttcttctgagtactttaccgaagcaactaccatcggattttctgaaagagattacggatgggttctctgctgacagaaaactgggtcaaggtggatttggaactgtttacaagggattcctgcaagacgggcaagccattgctgtgaagaagctctcagataattccccagtggcaaccgaaaaacagttcaagaatgaggttgggaaccttatggccatccagcatgagaacatagtgaggttgtatggctactgtcatgaactgcagaagaaagtgatagaacacaatggaagatacattcttgtggatgtggttcagagcatgctctgctacgaatacgcccccaaggggagccttgacaagtgtatttttgatatatcttctaggcctaattgggccacatgcttcaaaataattaagggcatttgccagggtttatatttcctacataaggggatggataggcctattgttcatctggatcttcagcctgccaacatactattggatgacaacatggtaccaaaaattgcggattttggcctgtcaaggctctttggtgaagaacaaacccgaataaacacaataaatgttgtgggagccaaagggtatatggctccagaatatctgtacagaggggagatctcaacccggtctgacatatacagcttaggcgtactaatcatggagatcacaactgggcagaagaactctccgaatgacaaagacatgtgtgcaaggaactttataaatcaggtttgccaaacatggacagacgaacacatggcatccaagtactcatcactagatgcagacagcctccagcaagtaaaagcatgcattgaaactgggctaaaatgtgtggatatcgatcagaagaagaggccctctatagttgaaattgttgacaagctcgatggaaggcttgctctctgaatggtagtgtatgctgcgcaaggtaaaactgtgatgcagagttaattctgcctatggtgatatgctctagatgcaatcacggaaacaataattgtatcacttactaatttatgtacttatgaaaaatatgttgcttgtgtc

SEQ ID NO: 26266 - protein, 324 aa, Zea mays subsp. mays
  peptide (1)..(324): Ceres Seq. ID no. 12365410
  misc_feature (125)..(318): NCBI GI NO: 37532178 NR Description: putative receptor-like protein kinase
  misc_feature (27)..(110): NCBI GI NO: 37532178 NR Description: putative receptor-like protein kinase
  misc_feature (18)..(319): NCBI GI NO: 38344521 NR Description: OSJNBa0016N04.14
  misc_feature (20)..(318): NCBI GI NO: 21728344 NR Description: stem rust resistance protein Rpg1
  misc_feature (20)..(318): NCBI GI NO: 21929723 NR Description: barley stem rust resistance protein
  misc_feature (20)..(318): NCBI GI NO: 21929729 NR Description: barley stem rust resistance protein
  misc_feature (288)..(318): NCBI GI NO: 21728344 NR Description: stem rust resistance protein Rpg1
  misc_feature (288)..(318): NCBI GI NO: 21929729 NR Description: barley stem rust resistance protein
  misc_feature (288)..(318): NCBI GI NO: 21929723 NR Description: barley stem rust resistance protein
  misc_feature (152)..(318): NCBI GI NO: 38344522 NR Description: OSJNBa0016N04.15
MATDASGGGKPSLLLSTLPKQLPSDFLKEITDGFSADRKLGQGGFGTVYKGFLQDGQAIAVKKLSDNSPVATEKQFKNEVGNLMAIQHENIVRLYGYCHELQKKVIEHNGRYILVDVVQSMLCYEYAPKGSLDKCIFDISSRPNWATCFKIIKGICQGLYFLHKGMDRPIVHLDLQPANILLDDNMVPKIADFGLSRLFGEEQTRINTINVVGAKGYMAPEYLYRGEISTRSDIYSLGVLIMEITTGQKNSPNDKDMCARNFINQVCQTWTDEHMASKYSSLDADSLQQVKACIETGLKCVDIDQKKRPSIVEIVDKLDGRLAL

SEQ ID NO: 26267 - protein, 241 aa, Zea mays subsp. mays
  peptide (1)..(241): Ceres Seq. ID no. 12365411
  misc_feature (42)..(235): NCBI GI NO: 37532178 NR Description: putative receptor-like protein kinase
  misc_feature (1)..(27): NCBI GI NO: 37532178 NR Description: putative receptor-like protein kinase
  misc_feature (1)..(236): NCBI GI NO: 38344521 NR Description: OSJNBa0016N04.14
  misc_feature (1)..(235): NCBI GI NO: 21728344 NR Description: stem rust resistance protein Rpg1
  misc_feature (1)..(235): NCBI GI NO: 21929723 NR Description: barley stem rust resistance protein
  misc_feature (1)..(235): NCBI GI NO: 21929729 NR Description: barley stem rust resistance protein
  misc_feature (205)..(235): NCBI GI NO: 21728344 NR Description: stem rust resistance protein Rpg1
  misc_feature (205)..(235): NCBI GI NO: 21929729 NR Description: barley stem rust resistance protein
  misc_feature (205)..(235): NCBI GI NO: 21929723 NR Description: barley stem rust resistance protein
  misc_feature (69)..(235): NCBI GI NO: 38344522 NR Description: OSJNBa0016N04.15
MAIQHENIVRLYGYCHELQKKVIEHNGRYILVDVVQSMLCYEYAPKGSLDKCIFDISSRPNWATCFKIIKGICQGLYFLHKGMDRPIVHLDLQPANILLDDNMVPKIADFGLSRLFGEEQTRINTINVVGAKGYMAPEYLYRGEISTRSDIYSLGVLIMEITTGQKNSPNDKDMCARNFINQVCQTWTDEHMASKYSSLDADSLQQVKACIETGLKCVDIDQKKRPSIVEIVDKLDGRLAL

SEQ ID NO: 26268 - protein, 204 aa, Zea mays subsp. mays
  peptide (1)..(204): Ceres Seq. ID no. 12365412
  misc_feature (5)..(198): NCBI GI NO: 37532178 NR Description: putative receptor-like protein kinase
  misc_feature (1)..(199): NCBI GI NO: 38344521 NR Description: OSJNBa0016N04.14
  misc_feature (1)..(198): NCBI GI NO: 21728344 NR Description: stem rust resistance protein Rpg1
  misc_feature (1)..(198): NCBI GI NO: 21929723 NR Description: barley stem rust resistance protein
  misc_feature (1)..(198): NCBI GI NO: 21929729 NR Description: barley stem rust resistance protein
  misc_feature (168)..(198): NCBI GI NO: 21728344 NR Description: stem rust resistance protein Rpg1
  misc_feature (168)..(198): NCBI GI NO: 21929723 NR Description: barley stem rust resistance protein
  misc_feature (168)..(198): NCBI GI NO: 21929729 NR Description: barley stem rust resistance protein
  misc_feature (32)..(198): NCBI GI NO: 38344522 NR Description: OSJNBa0016N04.15
  misc_feature (1)..(20): NCBI GI NO: 38344522 NR Description: OSJNBa0016N04.15
MLCYEYAPKGSLDKCIFDISSRPNWATCFKIIKGICQGLYFLHKGMDRPIVHLDLQPANILLDDNMVPKIADFGLSRLFGEEQTRINTINVVGAKGYMAPEYLYRGEISTRSDIYSLGVLIMEITTGQKNSPNDKDMCARNFINQVCQTWTDEHMASKYSSLDADSLQQVKACIETGLKCVDIDQKKRPSIVEIVDKLDGRLAL

SEQ ID NO: 26269 - DNA, 1673 bp, Zea mays subsp. mays; identical to SEQ ID NO: 23430
  misc_feature (1)..(1673): Ceres Seq. ID no. 12387134

SEQ ID NO: 26270 - protein, 425 aa, Zea mays subsp. mays; identical to SEQ ID NO: 23431
  peptide (1)..(425): Ceres Seq. ID no. 12387135
  misc_feature (189)..(384): Pfam Name: Pfam Description:  Arabidopsis proteins of unknown function
  misc_feature (2)..(425): NCBI GI NO: 21389708 NR Description: putative carboxyl-terminal proteinase
  misc_feature (15)..(425): NCBI GI NO: 15240622 NR Description: putative protein; protein id: At5g50150
  misc_feature (13)..(425): NCBI GI NO: 28416687 NR Description: At1g70550 [Arabidopsis thaliana]
  misc_feature (179)..(425): NCBI GI NO: 15528706 NR Description: P0583G08.7
  misc_feature (12)..(178): NCBI GI NO: 15528706 NR Description: P0583G08.7
  misc_feature (2)..(424): NCBI GI NO: 34913794 NR Description: OSJNBa0026J14.25
  misc_feature (12)..(425): NCBI GI NO: 15220207 NR Description: putative carboxyl-terminal peptidase
  misc_feature (1)..(425): NCBI GI NO: 25345695 NR Description: protein F26F24.22
  misc_feature (132)..(425): NCBI GI NO: 6573746 NR Description: F20B24.18 [Arabidopsis thaliana]
  misc_feature (12)..(99): NCBI GI NO: 6573746 NR Description: F20B24.18 [Arabidopsis thaliana]

SEQ ID NO: 26271 - protein, 414 aa, Zea mays subsp. mays; identical to SEQ ID NO: 23432
  peptide (1)..(414): Ceres Seq. ID no. 12387136
  misc_feature (178)..(373): Pfam Name: Pfam Description:  Arabidopsis proteins of unknown function
  misc_feature (1)..(414): NCBI GI NO: 21389708 NR Description: putative carboxyl-terminal proteinase
  misc_feature (4)..(414): NCBI GI NO: 15240622 NR Description: putative protein; protein id: At5g50150
  misc_feature (2)..(414): NCBI GI NO: 28416687 NR Description: At1g70550 [Arabidopsis thaliana]
  misc_feature (168)..(414): NCBI GI NO: 15528706 NR Description: P0583G08.7
  misc_feature (1)..(167): NCBI GI NO: 15528706 NR Description: P0583G08.7
  misc_feature (1)..(413): NCBI GI NO: 34913794 NR Description: OSJNBa0026J14.25
  misc_feature (1)..(414): NCBI GI NO: 15220207 NR Description: putative carboxyl-terminal peptidase
  misc_feature (1)..(414): NCBI GI NO: 25345695 NR Description: protein F26F24.22
  misc_feature (121)..(414): NCBI GI NO: 6573746 NR Description: F20B24.18 [Arabidopsis thaliana]
  misc_feature (1)..(88): NCBI GI NO: 6573746 NR Description: F20B24.18 [Arabidopsis thaliana]

SEQ ID NO: 26272 - protein, 410 aa, Zea mays subsp. mays; identical to SEQ ID NO: 23433
  peptide (1)..(410): Ceres Seq. ID no. 12387137
  misc_feature (174)..(369): Pfam Name: Pfam Description:  Arabidopsis proteins of unknown function
  misc_feature (1)..(410): NCBI GI NO: 21389708 NR Description: putative carboxyl-terminal proteinase
  misc_feature (1)..(410): NCBI GI NO: 15240622 NR Description: putative protein; protein id: At5g50150
  misc_feature (1)..(410): NCBI GI NO: 28416687 NR Description: At1g70550 [Arabidopsis thaliana]
  misc_feature (164)..(410): NCBI GI NO: 15528706 NR Description: P0583G08.7
  misc_feature (1)..(163): NCBI GI NO: 15528706 NR Description: P0583G08.7
  misc_feature (1)..(409): NCBI GI NO: 34913794 NR Description: OSJNBa0026J14.25
  misc_feature (1)..(410): NCBI GI NO: 15220207 NR Description: putative carboxyl-terminal peptidase
  misc_feature (1)..(410): NCBI GI NO: 25345695 NR Description: protein F26F24.22
  misc_feature (117)..(410): NCBI GI NO: 6573746 NR Description: F20B24.18 [Arabidopsis thaliana]
  misc_feature (1)..(84): NCBI GI NO: 6573746 NR Description: F20B24.18 [Arabidopsis thaliana]

SEQ ID NO: 26273 - DNA, 1337 bp, Zea mays subsp. mays
  misc_feature (1)..(1337): Ceres Seq. ID no. 13499111
  misc_feature (492)..(492): n is a, c, t, g, unknown, or other
  misc_feature (493)..(493): n is a, c, t, g, unknown, or other
gcacgagaccattacctagaacatcctaatcgaaaaatgtcatttgacagcgcaacacggcgctgcagggtaaagatctcccccgctcgccggtctctctgcccaggccagcaggacgaagaagaagccggccgggaagacccaggcctgaccgcctgagctaggggagaggaggacgacgatggggctgctgtctcagcgggtggagcggtcggagatggagcccggcgaccacatctacacctggcgcgccggctacacctactcccaccacgggatttacgtcggcggcagcaaggtggtgcacttcacgcggaagagggaggcgggcggcgcgggtctggactcggccatcgccgtgtccagcctcctcctctcgcggggctcggacgagtgccccagcttcccggactgcggcttccagctccccgacagcggcgtggtgctgacctgcgtggactgcttcctcggcggcggcgcgctgcaccgctnngagtacggcgtgcccgccgcggcgttcctggccaaggtccgcgggggcacgtccaccacggcgcgcgccgacccgggcgacgccgccgtgcgccgcgccatgcacctcctccggcacggcttcggcgactacgacgtgttcgagaacaactgcgaggacttcgcgctctactgcaagacggggctcctgctcctccccgccgccgcggctggcggcggggtcgggaggagcgggcaggccgcggccgccctcggcgtgccgctggccgcgctcttctccaccccgttcaagctcgtggccgccggcccgctcggcatggccgccgtcaccgcgggcgtgtactgcgccggcaggtacgtcaccgacatcggggtgaggacggacgtggtgaaggtggaggtgaaggacctgtcggcgcacctcggctggcgccgcgccagggctcaggagaagaagaagaagcagcagcaggaggaggcgccggcggcggccaagagcttgcttccgctcaagcggaaacgggagacctgcgtttgattggcgtgcggttgcaaatagatttgatttcttcgtctttagttactgcatagaaattaataagcccgatatagatagatatatgtcctagcgttcttgcccgatgccccgatcgatattgttcgttgttctttgtacgtactctgtatcattctaagagtttcagttactcctacatacattcttcattactgcaacaagatagttgagaacacagttgttaattgagctgagctgtacgtctcgtactgttccacaatagaatgcgaaggcatgcatgaggtccacgacatttggtccatttctg

SEQ ID NO: 26274 - protein, 282 aa, Zea mays subsp. mays
  peptide (1)..(282): Ceres Seq. ID no. 13499112
  misc_feature (105)..(186): Pfam Name: Pfam Description:  NC domain
  misc_feature (1)..(264): NCBI GI NO: 18378812 NR Description: expressed protein [Arabidopsis thaliana]
  misc_feature (1)..(264): NCBI GI NO: 21592684 NR Description: unknown [Arabidopsis thaliana]
  misc_feature (1)..(255): NCBI GI NO: 22328196 NR Description: expressed protein [Arabidopsis thaliana]
  misc_feature (1)..(245): NCBI GI NO: 18415178 NR Description: expressed protein [Arabidopsis thaliana]
  misc_feature (1)..(243): NCBI GI NO: 18396282 NR Description: expressed protein [Arabidopsis thaliana]
  misc_feature (1)..(243): NCBI GI NO: 21594170 NR Description: unknown [Arabidopsis thaliana]
  misc_feature (1)..(190): NCBI GI NO: 15237330 NR Description: expressed protein [Arabidopsis thaliana]
  misc_feature (197)..(256): NCBI GI NO: 15237330 NR Description: expressed protein [Arabidopsis thaliana]
  misc_feature (32)..(245): NCBI GI NO: 9758417 NR Description: gb|AAF32477
  misc_feature (1)..(210): NCBI GI NO: 15237327 NR Description: hypothetical protein [Arabidopsis thaliana]
  misc_feature (104)..(104): Xaa is any aa, unknown or other
MGLLSQRVERSEMEPGDHIYTWRAGYTYSHHGIYVGGSKVVHFTRKREAGGAGLDSAIAVSSLLLSRGSDECPSFPDCGFQLPDSGVVLTCVDCFLGGGALHRXEYGVPAAAFLAKVRGGTSTTARADPGDAAVRRAMHLLRHGFGDYDVFENNCEDFALYCKTGLLLLPAAAAGGGVGRSGQAAAALGVPLAALFSTPFKLVAAGPLGMAAVTAGVYCAGRYVTDIGVRTDVVKVEVKDLSAHLGWRRARAQEKKKKQQQEEAPAAAKSLLPLKRKRETCV

SEQ ID NO: 26275 - protein, 270 aa, Zea mays subsp. mays
  peptide (1)..(270): Ceres Seq. ID no. 13499113
  misc_feature (93)..(174): Pfam Name: Pfam Description:  NC domain
  misc_feature (1)..(252): NCBI GI NO: 18378812 NR Description: expressed protein [Arabidopsis thaliana]
  misc_feature (1)..(252): NCBI GI NO: 21592684 NR Description: unknown [Arabidopsis thaliana]
  misc_feature (1)..(243): NCBI GI NO: 22328196 NR Description: expressed protein [Arabidopsis thaliana]
  misc_feature (1)..(233): NCBI GI NO: 18415178 NR Description: expressed protein [Arabidopsis thaliana]
  misc_feature (1)..(231): NCBI GI NO: 18396282 NR Description: expressed protein [Arabidopsis thaliana]
  misc_feature (1)..(231): NCBI GI NO: 21594170 NR Description: unknown [Arabidopsis thaliana]
  misc_feature (1)..(178): NCBI GI NO: 15237330 NR Description: expressed protein [Arabidopsis thaliana]
  misc_feature (185)..(244): NCBI GI NO: 15237330 NR Description: expressed protein [Arabidopsis thaliana]
  misc_feature (20)..(233): NCBI GI NO: 9758417 NR Description: gb|AAF32477
  misc_feature (1)..(198): NCBI GI NO: 15237327 NR Description: hypothetical protein [Arabidopsis thaliana]
  misc_feature (92)..(92): Xaa is any aa, unknown or other
MEPGDHIYTWRAGYTYSHHGIYVGGSKVVHFTRKREAGGAGLDSAIAVSSLLLSRGSDECPSFPDCGFQLPDSGVVLTCVDCFLGGGALHRXEYGVPAAAFLAKVRGGTSTTARADPGDAAVRRAMHLLRHGFGDYDVFENNCEDFALYCKTGLLLLPAAAAGGGVGRSGQAAAALGVPLAALFSTPFKLVAAGPLGMAAVTAGVYCAGRYVTDIGVRTDVVKVEVKDLSAHLGWRRARAQEKKKKQQQEEAPAAAKSLLPLKRKRETCV

SEQ ID NO: 26276 - protein, 145 aa, Zea mays subsp. mays
  peptide (1)..(145): Ceres Seq. ID no. 13499114
  misc_feature (1)..(127): NCBI GI NO: 18378812 NR Description: expressed protein [Arabidopsis thaliana]
  misc_feature (1)..(127): NCBI GI NO: 21592684 NR Description: unknown [Arabidopsis thaliana]
  misc_feature (1)..(118): NCBI GI NO: 22328196 NR Description: expressed protein [Arabidopsis thaliana]
  misc_feature (1)..(108): NCBI GI NO: 18415178 NR Description: expressed protein [Arabidopsis thaliana]
  misc_feature (1)..(106): NCBI GI NO: 18396282 NR Description: expressed protein [Arabidopsis thaliana]
  misc_feature (1)..(106): NCBI GI NO: 21594170 NR Description: unknown [Arabidopsis thaliana]
  misc_feature (1)..(53): NCBI GI NO: 15237330 NR Description: expressed protein [Arabidopsis thaliana]
  misc_feature (60)..(119): NCBI GI NO: 15237330 NR Description: expressed protein [Arabidopsis thaliana]
  misc_feature (1)..(108): NCBI GI NO: 9758417 NR Description: gb|AAF32477
  misc_feature (1)..(73): NCBI GI NO: 15237327 NR Description: hypothetical protein [Arabidopsis thaliana]
MHLLRHGFGDYDVFENNCEDFALYCKTGLLLLPAAAAGGGVGRSGQAAAALGVPLAALFSTPFKLVAAGPLGMAAVTAGVYCAGRYVTDIGVRTDVVKVEVKDLSAHLGWRRARAQEKKKKQQQEEAPAAAKSLLPLKRKRETCV

SEQ ID NO: 26277 - DNA, 890 bp, Zea mays subsp. mays
  misc_feature (1)..(890): Ceres Seq. ID no. 12387086
aaaaaatgacttttttgttgtctgatctaatgggaatgtacggaatctcgtctcccatctcgcacttgagttgagactactgttgtgactattgtgtgcgtgagagagaaacagaagaggaaaaggaatccatggcggcgacgctggcgaggagggcggggcgctccgcggcgacgacgctatggggcgcggcgaggggcttcgcatcggtggggtccgacatcgtctctgcggctcccggcgtgtcgctgcagaaggcgcggtcctgggacgagggcgtcgccaccaagttctctaccacgcctctcaaggacatcttctacgggaagaaggtggtcatcttcggcttgcccggtgcatatacaggggtttgttcacaagcgcacgttcctagttacaagaagaatattgacaagttgaaagcaaaaggaatcgactctgttatctgtgtagctgtgaatgatccgtatgtcctggatggatgggcaaaaaagctagacgctaaagatacaattgagttctatggtgactttgatgggagtttccacaaaagcttggatttggagatagacctttctgctgctttgcttggccgccgttctcacaggtggtccgcctttgttgacgatggtaagatcaagtctttcaatgttgaggaagcaccgtccgactttaaggtttctggtgcggaggtgatcttggaccagatctgagctcctcaatgaacttcggccatcttcagtttgtgcggcatacttcctctgcagcagccgaataaaattaaatctcttacgacccgtgtaagatgttaaagatacgatgcgccccagactgtatggcctcggcctcggtttttctggaatgaattgatcagtgttcactgtgtgcgt

SEQ ID NO: 26278 - protein, 193 aa, Zea mays subsp. mays
  peptide (1)..(193): Ceres Seq. ID no. 12387087
  misc_feature (31)..(191): Pfam Name: Pfam Description:  AhpC/TSA family
  misc_feature (1)..(193): NCBI GI NO: 34903114 NR Description: unnamed protein product
  misc_feature (11)..(193): NCBI GI NO: 7658343 NR Description: unknown protein; 13384-11892
  misc_feature (11)..(193): NCBI GI NO: 18397457 NR Description: expressed protein; protein id: At3g06050
  misc_feature (6)..(193): NCBI GI NO: 21553531 NR Description: unknown [Arabidopsis thaliana]
  misc_feature (48)..(193): NCBI GI NO: 17987739 NR Description: THIOL PEROXIDASE [Brucella melitensis]
  misc_feature (48)..(193): NCBI GI NO: 23501379 NR Description: ahpC/TSA family protein [Brucella suis 1330]
  misc_feature (62)..(193): NCBI GI NO: 15888122 NR Description: AGR_C_1423p [Agrobacterium tumefaciens]
  misc_feature (56)..(191): NCBI GI NO: 15964668 NR Description: HYPOTHETICAL PEROXIREDOXIN PROTEIN
  misc_feature (58)..(190): NCBI GI NO: 27367181 NR Description: Peroxiredoxin [Vibrio vulnificus CMCP6]
  misc_feature (61)..(193): NCBI GI NO: 27376428 NR Description: peroxiredoxin [Bradyrhizobium japonicum]
MAATLARRAGRSAATTLWGAARGFASVGSDIVSAAPGVSLQKARSWDEGVATKFSTTPLKDIFYGKKVVIFGLPGAYTGVCSQAHVPSYKKNIDKLKAKGIDSVICVAVNDPYVLDGWAKKLDAKDTIEFYGDFDGSFHKSLDLEIDLSAALLGRRSHRWSAFVDDGKIKSFNVEEAPSDFKVSGAEVILDQI

SEQ ID NO: 26279 - DNA, 1666 bp, Zea mays subsp. mays
  misc_feature (1)..(1666): Ceres Seq. ID no. 12409899
tttttttgtttggatgagatcgctgcaacattgttcttgatccacacttgcctgatcttaccgtctcgttcgtgttcgtgccagcaaccagcgaaaatgggtgccggaggcaggatgaccgagaaggagcgggagaagcatgagcaggagcaggtcgcccgtgctaccggcggtggcgcggcagtgcagcggtcgccggtggagaagccgccgttcacgttggggcagatcaagaaggcgatcccgccgcactgcttcgagcgctccgtgctgaggtccttctcgtacgtggcccacgacctgtcgctcgccgcggcgctcctctacctcgcggtggccgtgataccggcgctaccctgcccgctccgctacgcggcctggccgctgtactgggtggcccaggggtgcgtgtgcacgggcgtgtgggtgatcgcgcacgagtgcggccaccacgccttctccgaccacgcgctcctggacgacgccgtcggcctggcgctgcactcggcgctgctggtgccctacttctcgtggaagtacagccaccggcgccaccactccaacacggggtccctggagcgcgacgaggtgttcgtgccgaggaccaaggaggcgctgccgtggtacgccccgtacgtgcacggcagccccgcgggccggctggcgcacgtcgccgtgcagctcaccctgggctggccgctgtacctggccaccaacgcgtcggggcgcccgtacccgcgcttcgcctgccacttcgacccctacggcccgatctacggcgaccgggagcgcgcccagatcttcgtctcggacgccggcgtcgcggccgtggcgttcgggctgtacaagctggcggcggcgttcgggctctggtgggtggtgcgcgtgtacgccgtgcccgctgctgatcgtcaacgcgtggctggtgctcatcacgtacctgcagcacacccacccggcgctgccccactacgactcgggcgagtgggactggctgcgcggcgcgctcgccaccgtcgaccgagactacggcgtcctcaaccgcgtgttccaccacatcacggacacgcacgtcgcgcaccacctcttctccaccatgccgcactaccacgccgtggaggccaccagggcgatcaggcccgtcctcggcgagtactaccagttcgacccgacccctgtcgccaaggccacctggcgcgaggccagggagtgcatctacgtcgagcctgagaaccgcaaccgcaagggcgtcttctggtacaacagcaagttctagccgccgcttgctttttccctaggaatgggaggagaaatcaggatgagaagatggtaatgtctgcatctacctgtctaatggttagtcaccagtctttagacaggaagagagcatttgggcttcagaaaaggaggcttactgcactactgcagtgccatcgctagatttaaggcaaattcagtgtgtctgtgccccatggctgtgagctttgggtactctcaagtagtcaagttctcttgtttttgtttttagtcgtcgctgttgtaggcttgccggcggcggtcgttgcgtggccgcgccttgtcgtgtgcgtcttgccatctcttcgtgctcccttcgtgttgttgtaaaacactagtctggtgtctttggcggaataacagatcgtcg

SEQ ID NO: 26280 - protein, 409 aa, Zea mays subsp. mays
  peptide (1)..(409): Ceres Seq. ID no. 12409900
  misc_feature (130)..(300): Pfam Name: Pfam Description:  Fatty acid desaturase
  misc_feature (33)..(300): NCBI GI NO: 28371827 NR Description: delta-12 oleate desaturase [Punica granatum]
  misc_feature (33)..(300): NCBI GI NO: 28564441 NR Description: delta 12-acyl-lipid-desaturase [Punica granatum]
  misc_feature (33)..(300): NCBI GI NO: 27261181 NR Description: delta 12 oleic acid desaturase FAD2
  misc_feature (33)..(300): NCBI GI NO: 34903462 NR Description: putative omega-6 fatty acid desaturase
  misc_feature (33)..(300): NCBI GI NO: 8886726 NR Description: omega-6 fatty acid desaturase [Sesamum indicum]
  misc_feature (33)..(300): NCBI GI NO: 1345977 NR Description: Omega-6 fatty acid desaturase
  misc_feature (33)..(300): NCBI GI NO: 23428547 NR Description: delta-12 fatty acid desaturase [Persea americana]
  misc_feature (33)..(300): NCBI GI NO: 7433295 NR Description: omega-6 desaturase, microsomal - upland cotton
  misc_feature (33)..(300): NCBI GI NO: 17225582 NR Description: delta-12 fatty acid desaturase
  misc_feature (70)..(242): NCBI GI NO: 39652599 NR Description: oleate delta12 desaturase [Aspergillus oryzae]
FFCLDEIAATLFLIHTCLILPSRSCSCQQPAKMGAGGRMTEKEREKHEQEQVARATGGGAAVQRSPVEKPPFTLGQIKKAIPPHCFERSVLRSFSYVAHDLSLAAALLYLAVAVIPALPCPLRYAAWPLYWVAQGCVCTGVWVIAHECGHHAFSDHALLDDAVGLALHSALLVPYFSWKYSHRRHHSNTGSLERDEVFVPRTKEALPWYAPYVHGSPAGRLAHVAVQLTLGWPLYLATNASGRPYPRFACHFDPYGPIYGDRERAQIFVSDAGVAAVAFGLYKLAAAFGLWWVVRVYAVPAADRQRVAGAHHVPAAHPPGAAPLRLGRVGLAARRARHRRPRLRRPQPRVPPHHGHARRAPPLLHHAALPRRGGHQGDQARPRRVLPVRPDPCRQGHLARGQGVHLRRA

SEQ ID NO: 26281 - protein, 377 aa, Zea mays subsp. mays
  peptide (1)..(377): Ceres Seq. ID no. 12409901
  misc_feature (98)..(268): Pfam Name: Pfam Description:  Fatty acid desaturase
  misc_feature (1)..(268): NCBI GI NO: 28371827 NR Description: delta-12 oleate desaturase [Punica granatum]
  misc_feature (1)..(268): NCBI GI NO: 28564441 NR Description: delta 12-acyl-lipid-desaturase [Punica granatum]
  misc_feature (1)..(268): NCBI GI NO: 27261181 NR Description: delta 12 oleic acid desaturase FAD2
  misc_feature (1)..(268): NCBI GI NO: 34903462 NR Description: putative omega-6 fatty acid desaturase
  misc_feature (1)..(268): NCBI GI NO: 8886726 NR Description: omega-6 fatty acid desaturase [Sesamum indicum]
  misc_feature (1)..(268): NCBI GI NO: 1345977 NR Description: Omega-6 fatty acid desaturase
  misc_feature (1)..(268): NCBI GI NO: 23428547 NR Description: delta-12 fatty acid desaturase [Persea americana]
  misc_feature (1)..(268): NCBI GI NO: 7433295 NR Description: omega-6 desaturase, microsomal - upland cotton
  misc_feature (1)..(268): NCBI GI NO: 17225582 NR Description: delta-12 fatty acid desaturase
  misc_feature (38)..(210): NCBI GI NO: 39652599 NR Description: oleate delta12 desaturase [Aspergillus oryzae]
MGAGGRMTEKEREKHEQEQVARATGGGAAVQRSPVEKPPFTLGQIKKAIPPHCFERSVLRSFSYVAHDLSLAAALLYLAVAVIPALPCPLRYAAWPLYWVAQGCVCTGVWVIAHECGHHAFSDHALLDDAVGLALHSALLVPYFSWKYSHRRHHSNTGSLERDEVFVPRTKEALPWYAPYVHGSPAGRLAHVAVQLTLGWPLYLATNASGRPYPRFACHFDPYGPIYGDRERAQIFVSDAGVAAVAFGLYKLAAAFGLWWVVRVYAVPAADRQRVAGAHHVPAAHPPGAAPLRLGRVGLAARRARHRRPRLRRPQPRVPPHHGHARRAPPLLHHAALPRRGGHQGDQARPRRVLPVRPDPCRQGHLARGQGVHLRRA

SEQ ID NO: 26282 - protein, 371 aa, Zea mays subsp. mays
  peptide (1)..(371): Ceres Seq. ID no. 12409902
  misc_feature (92)..(262): Pfam Name: Pfam Description:  Fatty acid desaturase
  misc_feature (1)..(262): NCBI GI NO: 28371827 NR Description: delta-12 oleate desaturase [Punica granatum]
  misc_feature (1)..(262): NCBI GI NO: 28564441 NR Description: delta 12-acyl-lipid-desaturase [Punica granatum]
  misc_feature (1)..(262): NCBI GI NO: 27261181 NR Description: delta 12 oleic acid desaturase FAD2
  misc_feature (1)..(262): NCBI GI NO: 34903462 NR Description: putative omega-6 fatty acid desaturase
  misc_feature (1)..(262): NCBI GI NO: 8886726 NR Description: omega-6 fatty acid desaturase [Sesamum indicum]
  misc_feature (1)..(262): NCBI GI NO: 1345977 NR Description: Omega-6 fatty acid desaturase
  misc_feature (1)..(262): NCBI GI NO: 23428547 NR Description: delta-12 fatty acid desaturase [Persea americana]
  misc_feature (1)..(262): NCBI GI NO: 7433295 NR Description: omega-6 desaturase, microsomal - upland cotton
  misc_feature (1)..(262): NCBI GI NO: 17225582 NR Description: delta-12 fatty acid desaturase
  misc_feature (32)..(204): NCBI GI NO: 39652599 NR Description: oleate delta12 desaturase [Aspergillus oryzae]
MTEKEREKHEQEQVARATGGGAAVQRSPVEKPPFTLGQIKKAIPPHCFERSVLRSFSYVAHDLSLAAALLYLAVAVIPALPCPLRYAAWPLYWVAQGCVCTGVWVIAHECGHHAFSDHALLDDAVGLALHSALLVPYFSWKYSHRRHHSNTGSLERDEVFVPRTKEALPWYAPYVHGSPAGRLAHVAVQLTLGWPLYLATNASGRPYPRFACHFDPYGPIYGDRERAQIFVSDAGVAAVAFGLYKLAAAFGLWWVVRVYAVPAADRQRVAGAHHVPAAHPPGAAPLRLGRVGLAARRARHRRPRLRRPQPRVPPHHGHARRAPPLLHHAALPRRGGHQGDQARPRRVLPVRPDPCRQGHLARGQGVHLRRA

SEQ ID NO: 26283 - DNA, 1318 bp, Zea mays subsp. mays
  misc_feature (1)..(1318): Ceres Seq. ID no. 12350973
attccatcacagattcacagccaactaaagagaaggagagcgtgtgttcgtttcgagaacgcacgcacagacgccatggaggtgacaccaaaccacaccctgaccgtgaccgggtgggcggccatgaacgagtccgccggcaaggtggagcccttcgtcttcaagagaagggagaacggcccggacgacgtgacgatcaaagtgcagtactgcggcatgtgccacacggacctgcacttcatcaacaacgactggggcatcaccacgtacccgctggtcccggggcacgagatcacgggcgtggtcaccaaggccgggcgcaacgtcacgggcttccgtgtcggcgaccgcgtcggcgtgggctgcatcgccgcctcctgcctggactgcgaccactgccgccgctccgaggagaactactgcgaccgtgtggcgctcacctacaacggcgtcttctgggacggcagcgtcacgtacggcggctactcgcgcgcgctggtggcggacaagcgcttcgtggtgcgcgtccccgacgcgctgccgctggacgccgccgcgccgctgctgtgcgcgggcgtcacggtgtacagccccatgaagcaccacggcatgctggggcaccccggcgccagcctcggcgtcgtcgggctcggcggcctcggccacgtcgccgtcaagctcgccaaggcgttcggtctccgcgtcaccgtcgtcagcacgtcgccggccaaggaggccgaggccagggcccggctcggcgccgaccgcttcgtcgtcagcaccgacgacgcgcagatgcgggacgcggccaggtccctcgactacgtcatcgacaccgtctccgccaagcactcgctcggacccatcctggacctgctcaaggtcagcggcaagctcgtgctcgtcgccgcgccggaccagcccgtcgagctcccctccttcccgctcatctttgggaagaggaccgtcagcgggagcatgacgggagggatcagggagacgcaggagatgctcgacctctgcgcccgccacaacatcacctgcgacatcgagctcgtctccacggacgggatcaacgccgcgctcgcgcgcctcgcacgcaacgacgtccgataccgcttcgtcatcgacatcgccggcgactccacctcaaaactatagttcattcaattcgttgcattattatcatctatcaatatcgtcaccagtggcaggcatggcctctggttgcttgcattttgctctctatccatatcaagtgtgtgtcagcatgggccagcgtgcatattgcgccattgcttgcagcaaataaacattc

SEQ ID NO: 26284 - protein, 438 aa, Zea mays subsp. mays
  peptide (1)..(438): Ceres Seq. ID no. 12350974
SITDSQPTKEKESVCSFRERTHRRHGGDTKPHPDRDRVGGHERVRRQGGALRLQEKGERPGRRDDQSAVLRHVPHGPALHQQRLGHHHVPAGPGARDHGRGHQGRAQRHGLPCRRPRRRGLHRRLLPGLRPLPPLRGELLRPCGAHLQRRLLGRQRHVRRLLARAGGGQALRGARPRRAAAGRRRAAAVRGRHGVQPHEAPRHAGAPRRQPRRRRARRPRPRRRQARQGVRSPRHRRQHVAGQGGRGQGPARRRPLRRQHRRRADAGRGQVPRLRHRHRLRQALARTHPGPAQGQRQARARRRAGPARRAPLLPAHLWEEDRQREHDGRDQGDAGDARPLRPPQHHLRHRARLHGRDQRRARAPRTQRRPIPLRHRHRRRLHLKTIVHSIRCIIIIYQYRHQWQAWPLVACILLSIHIKCVSAWASVHIAPLLAANKH

SEQ ID NO: 26285 - protein, 386 aa, Zea mays subsp. mays
  peptide (1)..(386): Ceres Seq. ID no. 12350975
  misc_feature (26)..(382): NCBI GI NO: 38344562 NR Description: OSJNBa0065B15.8
  misc_feature (32)..(386): NCBI GI NO: 22475166 NR Description: putative sinapyl alcohol dehydrogenase
  misc_feature (32)..(379): NCBI GI NO: 2146727 NR Description: cinnamyl-alcohol dehydrogenase (EC 1
  misc_feature (32)..(379): NCBI GI NO: 15235022 NR Description: cinnamyl-alcohol dehydrogenase CAD1
  misc_feature (26)..(378): NCBI GI NO: 10720093 NR Description: Probable mannitol dehydrogenase
  misc_feature (32)..(379): NCBI GI NO: 1168728 NR Description: Probable mannitol dehydrogenase
  misc_feature (32)..(379): NCBI GI NO: 21592964 NR Description: cinnamyl-alcohol dehydrogenase CAD1
  misc_feature (34)..(384): NCBI GI NO: 10720088 NR Description: Probable mannitol dehydrogenase
  misc_feature (32)..(378): NCBI GI NO: 14279694 NR Description: sinapyl alcohol dehydrogenase
  misc_feature (41)..(379): NCBI GI NO: 15233643 NR Description: cinnamyl-alcohol dehydrogenase ELI3-2
IPSQIHSQLKRRRACVRFENARTDAMEVTPNHTLTVTGWAAMNESAGKVEPFVFKRRENGPDDVTIKVQYCGMCHTDLHFINNDWGITTYPLVPGHEITGVVTKAGRNVTGFRVGDRVGVGCIAASCLDCDHCRRSEENYCDRVALTYNGVFWDGSVTYGGYSRALVADKRFVVRVPDALPLDAAAPLLCAGVTVYSPMKHHGMLGHPGASLGVVGLGGLGHVAVKLAKAFGLRVTVVSTSPAKEAEARARLGADRFVVSTDDAQMRDAARSLDYVIDTVSAKHSLGPILDLLKVSGKLVLVAAPDQPVELPSFPLIFGKRTVSGSMTGGIRETQEMLDLCARHNITCDIELVSTDGINAALARLARNDVRYRFVIDIAGDSTSKL

SEQ ID NO: 26286 - protein, 361 aa, Zea mays subsp. mays
  peptide (1)..(361): Ceres Seq. ID no. 12350976
  misc_feature (1)..(357): NCBI GI NO: 38344562 NR Description: OSJNBa0065B15.8
  misc_feature (7)..(361): NCBI GI NO: 22475166 NR Description: putative sinapyl alcohol dehydrogenase
  misc_feature (7)..(354): NCBI GI NO: 2146727 NR Description: cinnamyl-alcohol dehydrogenase (EC 1
  misc_feature (7)..(354): NCBI GI NO: 15235022 NR Description: cinnamyl-alcohol dehydrogenase CAD1
  misc_feature (1)..(353): NCBI GI NO: 10720093 NR Description: Probable mannitol dehydrogenase
  misc_feature (7)..(354): NCBI GI NO: 1168728 NR Description: Probable mannitol dehydrogenase
  misc_feature (7)..(354): NCBI GI NO: 21592964 NR Description: cinnamyl-alcohol dehydrogenase CAD1
  misc_feature (9)..(359): NCBI GI NO: 10720088 NR Description: Probable mannitol dehydrogenase
  misc_feature (7)..(353): NCBI GI NO: 14279694 NR Description: sinapyl alcohol dehydrogenase
  misc_feature (16)..(354): NCBI GI NO: 15233643 NR Description: cinnamyl-alcohol dehydrogenase ELI3-2
MEVTPNHTLTVTGWAAMNESAGKVEPFVFKRRENGPDDVTIKVQYCGMCHTDLHFINNDWGITTYPLVPGHEITGVVTKAGRNVTGFRVGDRVGVGCIAASCLDCDHCRRSEENYCDRVALTYNGVFWDGSVTYGGYSRALVADKRFVVRVPDALPLDAAAPLLCAGVTVYSPMKHHGMLGHPGASLGVVGLGGLGHVAVKLAKAFGLRVTVVSTSPAKEAEARARLGADRFVVSTDDAQMRDAARSLDYVIDTVSAKHSLGPILDLLKVSGKLVLVAAPDQPVELPSFPLIFGKRTVSGSMTGGIRETQEMLDLCARHNITCDIELVSTDGINAALARLARNDVRYRFVIDIAGDSTSKL

SEQ ID NO: 26287 - DNA, 1522 bp, Zea mays subsp. mays
  misc_feature (1)..(1522): Ceres Seq. ID no. 12341968
accatcctcctcttcctcgaacggtcgaaccgccgaaagcacgcaccccgccgccgcgtaccctcccctcacccgctcaccatcgccggccgccgttcggcgcgacgcggattcgaatccggaaagcgggcgatgggggcgaagcgcgcggtgctggtgggcatcaattaccagggcaccaaagcggagctcaagggctgccacaacgacgtcgctcgcatgcgccggtgcctcgtcgaccgcttcggattcgacgagtccggcatccgcgtcctcatagatgacggctccgcgccgcagcccacgggggccaacatccggcgggaactcgcgcgcctcgtcggggacgcgcggcccggggacctcctcttcttccactacagcgggcacggcatacggctgcccgccgagaccgggaaggacgacgacaccggctacgacgagtgcatcgtgccctgcgacatgaaccttatcacagaccaagatttcacggagcttgcgcaaaaagtccccagtggctgtctctttaccatagtttctgattcgtgccacagtggagggctacttgacaagaccaaggagcagattgggcacagcaccaagcagaagcagaagcagacccagacccagacccagagccgggaacttgaggaacggtctccttctggcaccagcttccgggaattcctcaaaggtactgttcgggaagcgtttgagtctcaaggaattcacctgccccaccgtagccgtagccaccagcaagggagcggtcacggcgacgacggtgaccaagagtcgcgctacatcaacacagccgatgcccacgtcaaaaaccggtcgctacctctctcgacattgatcgagatgctgaaggagaagactgggaaggacgacattgatgtagggtcaatccggctaacgctttttaacctcttcaaagacgatgccagcccgaagataaagaagttcatgaaggtcatgctgaacaagttacagcaggggcagcacggaggcattgtgggcttcatgggcgctctggcacaggaggtcctgaaagccaagctcgatggcaaggaagaagaagagttcgacccggcaatgaaacagcacgtgcacagcgatcaagaggtgtacgccgggacgacggcaagggtgccgagcaacggtgtcctgatcagtgggtgccagaccgaccagacgtctgccgacgcgaccacgccgaagggggtgtcctacggtgcgctcagcaatgccatccaggccatcctcgcggagcgtgggacggtaacgaacaaggagctcgtgctgaaagcgcgcaagatgctgtcgaaacagggctacacccaacagcctgggctctactgcagcgatgagaatgccagtgcggcttttatatgctgatgatgattcattgggtttgtcctgtggattgcaatatttgtattttgtctctaagtgcatgtgagttggactggtggttatgttttttcgctgagatttgggaatgtatcgtttctttcgc

SEQ ID NO: 26288 - protein, 466 aa, Zea mays subsp. mays
  peptide (1)..(466): Ceres Seq. ID no. 12341969
  misc_feature (48)..(466): Pfam Name: Pfam Description:  Caspase domain
  misc_feature (46)..(466): NCBI GI NO: 29367583 NR Description: latex-abundant protein-like protein
  misc_feature (45)..(466): NCBI GI NO: 34908928 NR Description: putative latex-abundant protein
  misc_feature (47)..(466): NCBI GI NO: 4235430 NR Description: latex-abundant protein [Hevea brasiliensis]
  misc_feature (53)..(466): NCBI GI NO: 23343885 NR Description: metacaspase 1 [Lycopersicon esculentum]
  misc_feature (48)..(466): NCBI GI NO: 40644374 NR Description: metacaspase type II [Picea abies]
  misc_feature (47)..(466): NCBI GI NO: 15219342 NR Description: hypothetical protein common family
  misc_feature (48)..(466): NCBI GI NO: 15219345 NR Description: hypothetical protein common family
  misc_feature (48)..(466): NCBI GI NO: 33304380 NR Description: metacaspase 7 [Arabidopsis thaliana]
  misc_feature (260)..(466): NCBI GI NO: 15219340 NR Description: hypothetical protein common family
  misc_feature (47)..(217): NCBI GI NO: 15219340 NR Description: hypothetical protein common family
TILLFLERSNRRKHAPRRRVPSPHPLTIAGRRSARRGFESGKRAMGAKRAVLVGINYQGTKAELKGCHNDVARMRRCLVDRFGFDESGIRVLIDDGSAPQPTGANIRRELARLVGDARPGDLLFFHYSGHGIRLPAETGKDDDTGYDECIVPCDMNLITDQDFTELAQKVPSGCLFTIVSDSCHSGGLLDKTKEQIGHSTKQKQKQTQTQTQSRELEERSPSGTSFREFLKGTVREAFESQGIHLPHRSRSHQQGSGHGDDGDQESRYINTADAHVKNRSLPLSTLIEMLKEKTGKDDIDVGSIRLTLFNLFKDDASPKIKKFMKVMLNKLQQGQHGGIVGFMGALAQEVLKAKLDGKEEEEFDPAMKQHVHSDQEVYAGTTARVPSNGVLISGCQTDQTSADATTPKGVSYGALSNAIQAILAERGTVTNKELVLKARKMLSKQGYTQQPGLYCSDENASAAFIC

SEQ ID NO: 26289 - protein, 422 aa, Zea mays subsp. mays
  peptide (1)..(422): Ceres Seq. ID no. 12341970
  misc_feature (4)..(422): Pfam Name: Pfam Description:  Caspase domain
  misc_feature (2)..(422): NCBI GI NO: 29367583 NR Description: latex-abundant protein-like protein
  misc_feature (1)..(422): NCBI GI NO: 34908928 NR Description: putative latex-abundant protein
  misc_feature (3)..(422): NCBI GI NO: 4235430 NR Description: latex-abundant protein [Hevea brasiliensis]
  misc_feature (9)..(422): NCBI GI NO: 23343885 NR Description: metacaspase 1 [Lycopersicon esculentum]
  misc_feature (4)..(422): NCBI GI NO: 40644374 NR Description: metacaspase type II [Picea abies]
  misc_feature (3)..(422): NCBI GI NO: 15219342 NR Description: hypothetical protein common family
  misc_feature (4)..(422): NCBI GI NO: 15219345 NR Description: hypothetical protein common family
  misc_feature (4)..(422): NCBI GI NO: 33304380 NR Description: metacaspase 7 [Arabidopsis thaliana]
  misc_feature (216)..(422): NCBI GI NO: 15219340 NR Description: hypothetical protein common family
  misc_feature (3)..(173): NCBI GI NO: 15219340 NR Description: hypothetical protein common family
MGAKRAVLVGINYQGTKAELKGCHNDVARMRRCLVDRFGFDESGIRVLIDDGSAPQPTGANIRRELARLVGDARPGDLLFFHYSGHGIRLPAETGKDDDTGYDECIVPCDMNLITDQDFTELAQKVPSGCLFTIVSDSCHSGGLLDKTKEQIGHSTKQKQKQTQTQTQSRELEERSPSGTSFREFLKGTVREAFESQGIHLPHRSRSHQQGSGHGDDGDQESRYINTADAHVKNRSLPLSTLIEMLKEKTGKDDIDVGSIRLTLFNLFKDDASPKIKKFMKVMLNKLQQGQHGGIVGFMGALAQEVLKAKLDGKEEEEFDPAMKQHVHSDQEVYAGTTARVPSNGVLISGCQTDQTSADATTPKGVSYGALSNAIQAILAERGTVTNKELVLKARKMLSKQGYTQQPGLYCSDENASAAFIC

SEQ ID NO: 26290 - protein, 393 aa, Zea mays subsp. mays
  peptide (1)..(393): Ceres Seq. ID no. 12341971
  misc_feature (1)..(393): Pfam Name: Pfam Description:  Caspase domain
  misc_feature (1)..(393): NCBI GI NO: 29367583 NR Description: latex-abundant protein-like protein
  misc_feature (1)..(393): NCBI GI NO: 34908928 NR Description: putative latex-abundant protein
  misc_feature (1)..(393): NCBI GI NO: 4235430 NR Description: latex-abundant protein [Hevea brasiliensis]
  misc_feature (1)..(393): NCBI GI NO: 23343885 NR Description: metacaspase 1 [Lycopersicon esculentum]
  misc_feature (1)..(393): NCBI GI NO: 40644374 NR Description: metacaspase type II [Picea abies]
  misc_feature (1)..(393): NCBI GI NO: 15219342 NR Description: hypothetical protein common family
  misc_feature (1)..(393): NCBI GI NO: 15219345 NR Description: hypothetical protein common family
  misc_feature (1)..(393): NCBI GI NO: 33304380 NR Description: metacaspase 7 [Arabidopsis thaliana]
  misc_feature (187)..(393): NCBI GI NO: 15219340 NR Description: hypothetical protein common family
  misc_feature (1)..(144): NCBI GI NO: 15219340 NR Description: hypothetical protein common family
MRRCLVDRFGFDESGIRVLIDDGSAPQPTGANIRRELARLVGDARPGDLLFFHYSGHGIRLPAETGKDDDTGYDECIVPCDMNLITDQDFTELAQKVPSGCLFTIVSDSCHSGGLLDKTKEQIGHSTKQKQKQTQTQTQSRELEERSPSGTSFREFLKGTVREAFESQGIHLPHRSRSHQQGSGHGDDGDQESRYINTADAHVKNRSLPLSTLIEMLKEKTGKDDIDVGSIRLTLFNLFKDDASPKIKKFMKVMLNKLQQGQHGGIVGFMGALAQEVLKAKLDGKEEEEFDPAMKQHVHSDQEVYAGTTARVPSNGVLISGCQTDQTSADATTPKGVSYGALSNAIQAILAERGTVTNKELVLKARKMLSKQGYTQQPGLYCSDENASAAFIC

SEQ ID NO: 26291 - DNA, 1630 bp, Zea mays subsp. mays
  misc_feature (1)..(1630): Ceres Seq. ID no. 12362880
gcacgagaccattacctagaacatcctaatcgaaaaaattggatcttggatccatctccatgggtgcctccagtacttgcccttgccaccacttcagctcgtcttccatcctcaccaagcgggccatcgccttcgtgctctacgccctcgtccccctcgccctcatccactacctcctatctcttcctccccgtctcccctctcctcccaccaccggcgccgccacctccccgtcacggccgcagcaggcggaggaggctccggcagcgcggtgcgattactcggacggggagtgggtgcgggccgcggcaggtcctcggtacaacgggtcgagctgcggcgagacgatcaaggccggccagaactgcgaggcgcacgggcggccggacacggggtacatctactggcggtggcgcccgcgcgggtgcgcgctgccgccgttcgacccggaggagttcctgagcgcggtgcgcggtcgccacgtggccttcgttggcgactcgctcgcgcggaaccagtgcgagtccctggtgtgcctgctcgcctccgcgttcccggcccagctggtgcgcggcgctggcggcggcgacggggacggggacggcgacgagctccgcaagttccggcgctgggcgttcccgtcgcacaacgcgacggtgtcggtgttctggtcgccgttcctagtgaacggcacggagaggcccaagtcgccggcggcggcgggagggctggaccacaaccggatctacttcgaccagcccgacgagcggtgggcggcggcggtcccggggttcgacgtggtggtgctgtcggcggggcagtggtacctgaactcggccatgttctacgaccgtggcgccgtcatcggctgccatcgatgcccggagcccaaccgcaccgagacgggcttcttcggcgtgttccgcctcgccgtccgcaacgcgctccgcgaggtcatagcccgcgtcgccgccacgtcctcgcccgcgcgcccccggctggctgtgatgacgacgttctcgcccgcgcacttccagggggattgggacagcccgaccgcgtgcgtgcgcactcagccgtacgcgcgcggggagcgggagatggagtacatggatctggagatgctgcgcgccggggtggaggaggtcgccgcggccggcgaggacgcgagggtgcgcgggggcggcctggcggtggaggcgctgcaggtgacgcggctggcggcgatgcgcccggacgggcacccgggcctgtacacccgggcgttcccgttcgccaagggtgcgagggatcggatgcccaacgactgtgtgcactggtgcctgcccgggcccatcgacacgtggaacgagatcctgctgcagctcgtcaagcgatgggccatcggcgtcggcaccgacacctcgtcgccatcgccatgaactggtcttaccatgagaggttcgaagctaccgagtggccgtttggatgggcgattttggtccaaatccttgcgatggatttcgaattatttactcactcaagcgctttagattttgtagagttggcctttcgttcaagcgctcagtcaggtatctttcgcttgtattttaatgataccagaactggaatcagcttaattagtcagctt

SEQ ID NO: 26292 - protein, 453 aa, Zea mays subsp. mays
  peptide (1)..(453): Ceres Seq. ID no. 12362881
  misc_feature (293)..(437): Pfam Name: Pfam Description:  Arabidopsis proteins of unknown function
  misc_feature (20)..(299): NCBI GI NO: 15223079 NR Description: unknown protein; protein id: At1g70230
  misc_feature (293)..(442): NCBI GI NO: 15223079 NR Description: unknown protein; protein id: At1g70230
  misc_feature (18)..(439): NCBI GI NO: 34900868 NR Description: P0458G06.23
  misc_feature (18)..(439): NCBI GI NO: 34900856 NR Description: P0458G06.13
  misc_feature (186)..(435): NCBI GI NO: 15234058 NR Description: hypothetical protein; protein id: At4g01080.1
  misc_feature (1)..(209): NCBI GI NO: 15234058 NR Description: hypothetical protein; protein id: At4g01080.1
  misc_feature (186)..(435): NCBI GI NO: 28393189 NR Description: unknown protein [Arabidopsis thaliana]
  misc_feature (1)..(209): NCBI GI NO: 28393189 NR Description: unknown protein [Arabidopsis thaliana]
  misc_feature (72)..(439): NCBI GI NO: 15237213 NR Description: putative protein; protein id: At5g15900.1
  misc_feature (19)..(437): NCBI GI NO: 34898640 NR Description: hypothetical protein~similar to Oryza sativachromosome 1
MGASSTCPCHHFSSSSILTKRAIAFVLYALVPLALIHYLLSLPPRLPSPPTTGAATSPSRPQQAEEAPAARCDYSDGEWVRAAAGPRYNGSSCGETIKAGQNCEAHGRPDTGYIYWRWRPRGCALPPFDPEEFLSAVRGRHVAFVGDSLARNQCESLVCLLASAFPAQLVRGAGGGDGDGDGDELRKFRRWAFPSHNATVSVFWSPFLVNGTERPKSPAAAGGLDHNRIYFDQPDERWAAAVPGFDVVVLSAGQWYLNSAMFYDRGAVIGCHRCPEPNRTETGFFGVFRLAVRNALREVIARVAATSSPARPRLAVMTTFSPAHFQGDWDSPTACVRTQPYARGEREMEYMDLEMLRAGVEEVAAAGEDARVRGGGLAVEALQVTRLAAMRPDGHPGLYTRAFPFAKGARDRMPNDCVHWCLPGPIDTWNEILLQLVKRWAIGVGTDTSSPSP

SEQ ID NO: 26293 - protein, 251 aa, Zea mays subsp. mays
  peptide (1)..(251): Ceres Seq. ID no. 12362882
  misc_feature (87)..(142): Pfam Name: 20 copies Pfam Description: Collagen triple helix repeat
MPGAQPHRDGLLRRVPPRRPQRAPRGHSPRRRHVLARAPPAGCDDDVLARALPGGLGQPDRVRAHSAVRARGAGDGVHGSGDAARRGGGGRRGRRGREGARGRPGGGGAAGDAAGGDAPGRAPGPVHPGVPVRQGCEGSDAQRLCALVPARAHRHVERDPAAARQAMGHRRRHRHLVAIAMNWSYHERFEATEWPFGWAILVQILAMDFELFTHSSALDFVELAFRSSAQSGIFRLYFNDTRTGISLISQL

SEQ ID NO: 26294 - DNA, 1190 bp, Zea mays subsp. mays
  misc_feature (1)..(1190): Ceres Seq. ID no. 12565974
aaaatactccgcctgcatctccaaagcacactgctccctctggcttcccgcctcctcttcggctccttcgcgtcccgacgccccctcatggccaccgccgccgccaccgcagcagcagtagtctcctccccggctgccccacgcgccggggccgccgccgcctcccgccgggggttcgtcacgtttggtggaggcgccgcccgcttctctcccacgctgcggtccggccgtgggttctctggtgtgcaaacccatgttgccgctgttgaacaagcaattgtaaaagatgctaccaagctggaagctccagttgttgttgttacaggtgcatctagagggattggtaaggcaactgctctagcccttggaaaagcaggatgcaaggttctggtaaactatgcccggtcctcgaaagaggctgaagaggtctccaaagagattgaagcatctggtggtgaggctatcaccttcggaggagatgtttcaaaagaagctgatgtagagtctatgatgaaagcagctctagataaatggggaacaatagatgtgctggtaaataatgcagggattacacgagacacattgttgatgaggatgaagaaatctcagtggcaagacgtaattgatctgaatcttactggtgtcttcctttgtacacaggctgcaacaaaagtaatgatgaaaaagagaaagggaaaaattatcaacattgcatctgtagttggtcttactggcaatgttggccaagctaattatagcgcagccaaggctggagtgattggtttcacaaaaacagttgccagggagtatgcaagcagaaatatcaatgtgaatgctattgcaccagggttcattgcatctgatatgactgccgaacttggagaagagcttgagaagaaaatcttgtcaaccattccgttagggagatatggccaaccagaggaagttgcagggttggtcgagttcctggcccttaaccccgcagctagctatatgactggacaggtgcttacaattgacggagggatggtaatgtaagatttgagttagcttgatgcacttctacttttgctgagcatttaatgttgaacacccttgttgtgcacgggcgattttggacaacaaattagtgttgtctctttctttgtaatactctctggtaataaatctagcatgtggaatggaagttg

SEQ ID NO: 26295 - protein, 345 aa, Zea mays subsp. mays
  peptide (1)..(345): Ceres Seq. ID no. 12565975
  misc_feature (30)..(345): NCBI GI NO: 38346116 NR Description: OSJNBb0006N15.11
  misc_feature (31)..(345): NCBI GI NO: 119791 NR Description: 3-oxoacyl-
  misc_feature (82)..(345): NCBI GI NO: 14422251 NR Description: 3-oxyacyl-
  misc_feature (82)..(345): NCBI GI NO: 14422263 NR Description: beta-oxyacyl-
  misc_feature (83)..(345): NCBI GI NO: 14422249 NR Description: 3-oxyacyl-
  misc_feature (83)..(345): NCBI GI NO: 14422247 NR Description: 3-oxyacyl-
  misc_feature (102)..(345): NCBI GI NO: 13096234 NR Description: Chain A
  misc_feature (33)..(345): NCBI GI NO: 18395461 NR Description: putative 3-oxoacyl
  misc_feature (99)..(345): NCBI GI NO: 14422253 NR Description: 3-oxyacyl-
  misc_feature (33)..(345): NCBI GI NO: 99753 NR Description: 3-oxoacyl-
KILRLHLQSTLLPLASRLLFGSFASRRPLMATAAATAAAVVSSPAAPRAGAAAASRRGFVTFGGGAARFSPTLRSGRGFSGVQTHVAAVEQAIVKDATKLEAPVVVVTGASRGIGKATALALGKAGCKVLVNYARSSKEAEEVSKEIEASGGEAITFGGDVSKEADVESMMKAALDKWGTIDVLVNNAGITRDTLLMRMKKSQWQDVIDLNLTGVFLCTQAATKVMMKKRKGKIINIASVVGLTGNVGQANYSAAKAGVIGFTKTVAREYASRNINVNAIAPGFIASDMTAELGEELEKKILSTIPLGRYGQPEEVAGLVEFLALNPAASYMTGQVLTIDGGMVM

SEQ ID NO: 26296 - protein, 316 aa, Zea mays subsp. mays
  peptide (1)..(316): Ceres Seq. ID no. 12565976
  misc_feature (1)..(316): NCBI GI NO: 38346116 NR Description: OSJNBb0006N15.11
  misc_feature (2)..(316): NCBI GI NO: 119791 NR Description: 3-oxoacyl-
  misc_feature (53)..(316): NCBI GI NO: 14422251 NR Description: 3-oxyacyl-
  misc_feature (53)..(316): NCBI GI NO: 14422263 NR Description: beta-oxyacyl-
  misc_feature (54)..(316): NCBI GI NO: 14422249 NR Description: 3-oxyacyl-
  misc_feature (54)..(316): NCBI GI NO: 14422247 NR Description: 3-oxyacyl-
  misc_feature (73)..(316): NCBI GI NO: 13096234 NR Description: Chain A
  misc_feature (4)..(316): NCBI GI NO: 18395461 NR Description: putative 3-oxoacyl
  misc_feature (70)..(316): NCBI GI NO: 14422253 NR Description: 3-oxyacyl-
  misc_feature (4)..(316): NCBI GI NO: 99753 NR Description: 3-oxoacyl-
MATAAATAAAVVSSPAAPRAGAAAASRRGFVTFGGGAARFSPTLRSGRGFSGVQTHVAAVEQAIVKDATKLEAPVVVVTGASRGIGKATALALGKAGCKVLVNYARSSKEAEEVSKEIEASGGEAITFGGDVSKEADVESMMKAALDKWGTIDVLVNNAGITRDTLLMRMKKSQWQDVIDLNLTGVFLCTQAATKVMMKKRKGKIINIASVVGLTGNVGQANYSAAKAGVIGFTKTVAREYASRNINVNAIAPGFIASDMTAELGEELEKKILSTIPLGRYGQPEEVAGLVEFLALNPAASYMTGQVLTIDGGMVM

SEQ ID NO: 26297 - protein, 176 aa, Zea mays subsp. mays
  peptide (1)..(176): Ceres Seq. ID no. 12565977
  misc_feature (1)..(176): NCBI GI NO: 38346116 NR Description: OSJNBb0006N15.11
  misc_feature (1)..(176): NCBI GI NO: 119791 NR Description: 3-oxoacyl-
  misc_feature (1)..(176): NCBI GI NO: 14422251 NR Description: 3-oxyacyl-
  misc_feature (1)..(176): NCBI GI NO: 14422263 NR Description: beta-oxyacyl-
  misc_feature (1)..(176): NCBI GI NO: 14422249 NR Description: 3-oxyacyl-
  misc_feature (1)..(176): NCBI GI NO: 14422247 NR Description: 3-oxyacyl-
  misc_feature (1)..(176): NCBI GI NO: 13096234 NR Description: Chain A
  misc_feature (1)..(176): NCBI GI NO: 18395461 NR Description: putative 3-oxoacyl
  misc_feature (1)..(176): NCBI GI NO: 14422253 NR Description: 3-oxyacyl-
  misc_feature (1)..(176): NCBI GI NO: 99753 NR Description: 3-oxoacyl-
MMKAALDKWGTIDVLVNNAGITRDTLLMRMKKSQWQDVIDLNLTGVFLCTQAATKVMMKKRKGKIINIASVVGLTGNVGQANYSAAKAGVIGFTKTVAREYASRNINVNAIAPGFIASDMTAELGEELEKKILSTIPLGRYGQPEEVAGLVEFLALNPAASYMTGQVLTIDGGMVM

SEQ ID NO: 26298 - DNA, 431 bp, Zea mays subsp. mays
  misc_feature (1)..(431): Ceres Seq. ID no. 12376962
tagatttgatggtgcagttcccgagccacgaaaggggattagaagtgggcatgtgcctgggagcaaatgtgttccgtttcctcaggttcttgacagctcacaaaagctattgccttcagatgagctccgtaaacggtttgagcaagaaggaatatcacttgatcagcctcttgttacctcttgtggcactggtgtgacagcatgtgtattagccttgttgcaactgctgtttagtctcttcataataggacgcccgtgctcttcatagaggacctcttgattgtatttgccccgtgctgtgattctatggaggttggttggatgcttggatgtaaggctggggaagcgaagccttttggccttcactgtaaaagctgcaacagaaaaactgtcacatgcactgaattataagataactccccttgatctcc

SEQ ID NO: 26299 - protein, 88 aa, Zea mays subsp. mays
  peptide (1)..(88): Ceres Seq. ID no. 12376963
  misc_feature (1)..(72): Pfam Name: Pfam Description:  Rhodanese-like domain
  misc_feature (1)..(72): NCBI GI NO: 4406372 NR Description: thiosulfate sulfurtransferase [Datisca glomerata]
  misc_feature (1)..(72): NCBI GI NO: 18412307 NR Description: mercaptopyruvate sulfurtransferase
  misc_feature (1)..(72): NCBI GI NO: 25288794 NR Description: thiosulfate sulfurtransferase (EC 2
  misc_feature (1)..(72): NCBI GI NO: 18394364 NR Description: mercaptopyruvate sulfurtransferase
  misc_feature (1)..(72): NCBI GI NO: 25456716 NR Description: thiosulfate sulfurtransferase (EC 2.8.1.1)
  misc_feature (1)..(72): NCBI GI NO: 30684873 NR Description: mercaptopyruvate sulfurtransferase (Mst2/Rdh2)
  misc_feature (1)..(72): NCBI GI NO: 14571545 NR Description: thiosulfate transferase [Triticum aestivum]
  misc_feature (2)..(72): NCBI GI NO: 25288797 NR Description: hypothetical protein F3O9.26
  misc_feature (1)..(72): NCBI GI NO: 13470599 NR Description: thiosulfate sulfurtransferase [Mesorhizobium loti]
  misc_feature (1)..(83): NCBI GI NO: 22960827 NR Description: hypothetical protein [Rhodopseudomonas palustris]
RFDGAVPEPRKGIRSGHVPGSKCVPFPQVLDSSQKLLPSDELRKRFEQEGISLDQPLVTSCGTGVTACVLALLQLLFSLFIIGRPCSS

SEQ ID NO: 26300 - protein, 64 aa, Zea mays subsp. mays
  peptide (1)..(64): Ceres Seq. ID no. 12376964
DLMVQFPSHERGLEVGMCLGANVFRFLRFLTAHKSYCLQMSSVNGLSKKEYHLISLLLPLVALV

SEQ ID NO: 26301 - protein, 62 aa, Zea mays subsp. mays
  peptide (1)..(62): Ceres Seq. ID no. 12376965
MVQFPSHERGLEVGMCLGANVFRFLRFLTAHKSYCLQMSSVNGLSKKEYHLISLLLPLVALV

SEQ ID NO: 26302 - DNA, 2165 bp, Zea mays subsp. mays
  misc_feature (1)..(2165): Ceres Seq. ID no. 13493004
tacctagaacatcctaatcgaaaaatgcgttactgtaccaatggctccccacctcctggccgtggccgtggccgtggcggccatcatcgccaccgtctcgttgctggcgcccggcgccgctgcctacccgtggccagtttgtgggacgagcaacgacttcgagcccaacagcacataccaggccaacctcaacctcctcgccgccatgctgcccaacaacgtgtccgcatccccggtcctctacgccaccgccgtcgtcggcgccgtcccggagcaggtctggggcatgggactctgccgcggcgacgccaacgccagcagctgcctcgcctgcctcacccaggcgttccaggacctgcccaacgactgctcctacaacaaggacgccgccatctactacgacccctgcaccctccactactccgacgtccacaccctcgccgacgacgacaccggcccgacgaccatgtcgtacaacatcaacaacaacgccaacgtcacctcggacccggcccggttcgagcgcctcctcgccgccctcgtcaacgccaccgccgagcacgccgcgtccaactccacccggcgattcgccacgggggaggccgacgccgacttcgaccggcagttccccaaggtgtacgcgctggcgcagtgcacgccggaccagacgccggcgcagtgccgcaagtgcctcgccggcctcatatcgcagtcgctggacgggttccagaacaacatcggaggcagggtgctctgggtcaactgcacctggcggtacgagacctcgcccttcttcaatggaccggccatggtgcgcctggcatcgtcgtcgagccctccggcagcggcagcggcaggtggaggggagaggaagtacagcgtgttcatcgtggttcttgcagttgtgctgcccactctagctgccctgaatcttgtgttttgcttctgtttctggcggcggccagcaccacaggcaaagcagtcacagcccatgtattccaccgaagcagaggacgtggaaacggtggactccatgatgatcgacgtctccgccctgcgagccgcaacagggaatttcgacgagagcaacaagctcggcgaaggcgggtttggcgcggtgtacaagggcgtcctcccggacggcgacgagatagcggtgaagcgtctgtcgaagagctcgacgcagggagtggaggagctgaagaacgagctcgcgctggtcgccaggctgaggcacaggaacctcgtcaggctcgtcggcgtgtgcctggagcagcaagaacggctgctcgtctacgagtttgtccccaaccggagcctcgacctggtactcttcggtaccgacacgcgtgagccgctcagctgggagcagaggtacaggatcataaacggcatcgctcgaggcctgcagtacctccacgaggactcccagctcaaggtagtccaccgtgatctcaaggccagcaacatcctgctagacgtggagatgaaccccaagatctcagatttcggcctcgcgaggatcttcggccgggaccagacgcaggccgtcaccagccgcgttgtcggaacctatgggtacctagcaccagaatacctgatgcgcgggaactactccgtgaaatcggacgccttcagcttcggcgtcatggtgctggagatcgtcaccgggaggaagaacaacggcagctcccacaagtccggagacctcttgaccaccgtatgggagcactgggaggccgggacggtggcggagctggtggacccgtccctgggcggaagcttcccggagggcgacgtgctgaggtgcatccacatcggtctgctctgcgtccagggggaccccgctgcccgcccggtgatgtcgtccgtcgtgacgatgcttggaaccgacacggtcaccctccaggctccatccaagccgggattcttcgccagaaagagtggcactagcacgaccgtgtccgctgatgatgggtcgatttagagattgccactagagtacagagttgccagaaagagtagctcctttttttaacgatagccatctctatcgctaataagatcctgcgttttattagtatgggaggcatgggattattgaaggtctccttgactctaaagaaaatgtcttaggacagacttgagcctaaacgtctttgttc

SEQ ID NO: 26303 - protein, 648 aa, Zea mays subsp. mays
  peptide (1)..(648): Ceres Seq. ID no. 13493005
  misc_feature (320)..(646): NCBI GI NO: 34898858 NR Description: OJ1058_A12.27
  misc_feature (1)..(276): NCBI GI NO: 34898858 NR Description: OJ1058_A12.27
  misc_feature (16)..(644): NCBI GI NO: 34898856 NR Description: OJ1058_A12.26
  misc_feature (321)..(639): NCBI GI NO: 34898846 NR Description: OJ1058_A12.21
  misc_feature (4)..(272): NCBI GI NO: 34898846 NR Description: OJ1058_A12.21
  misc_feature (1)..(647): NCBI GI NO: 28812101 NR Description: P0458H05.25
  misc_feature (8)..(647): NCBI GI NO: 28812097 NR Description: P0458H05.21
  misc_feature (1)..(638): NCBI GI NO: 28812099 NR Description: P0458H05.23
  misc_feature (2)..(648): NCBI GI NO: 28812096 NR Description: P0458H05.20
  misc_feature (1)..(640): NCBI GI NO: 28812103 NR Description: P0458H05.27
MAPHLLAVAVAVAAIIATVSLLAPGAAAYPWPVCGTSNDFEPNSTYQANLNLLAAMLPNNVSASPVLYATAVVGAVPEQVWGMGLCRGDANASSCLACLTQAFQDLPNDCSYNKDAAIYYDPCTLHYSDVHTLADDDTGPTTMSYNINNNANVTSDPARFERLLAALVNATAEHAASNSTRRFATGEADADFDRQFPKVYALAQCTPDQTPAQCRKCLAGLISQSLDGFQNNIGGRVLWVNCTWRYETSPFFNGPAMVRLASSSSPPAAAAAGGGERKYSVFIVVLAVVLPTLAALNLVFCFCFWRRPAPQAKQSQPMYSTEAEDVETVDSMMIDVSALRAATGNFDESNKLGEGGFGAVYKGVLPDGDEIAVKRLSKSSTQGVEELKNELALVARLRHRNLVRLVGVCLEQQERLLVYEFVPNRSLDLVLFGTDTREPLSWEQRYRIINGIARGLQYLHEDSQLKVVHRDLKASNILLDVEMNPKISDFGLARIFGRDQTQAVTSRVVGTYGYLAPEYLMRGNYSVKSDAFSFGVMVLEIVTGRKNNGSSHKSGDLLTTVWEHWEAGTVAELVDPSLGGSFPEGDVLRCIHIGLLCVQGDPAARPVMSSVVTMLGTDTVTLQAPSKPGFFARKSGTSTTVSADDGSI

SEQ ID NO: 26304 - protein, 593 aa, Zea mays subsp. mays
  peptide (1)..(593): Ceres Seq. ID no. 13493006
  misc_feature (265)..(591): NCBI GI NO: 34898858 NR Description: OJ1058_A12.27
  misc_feature (1)..(221): NCBI GI NO: 34898858 NR Description: OJ1058_A12.27
  misc_feature (1)..(589): NCBI GI NO: 34898856 NR Description: OJ1058_A12.26
  misc_feature (266)..(584): NCBI GI NO: 34898846 NR Description: OJ1058_A12.21
  misc_feature (1)..(217): NCBI GI NO: 34898846 NR Description: OJ1058_A12.21
  misc_feature (1)..(592): NCBI GI NO: 28812101 NR Description: P0458H05.25
  misc_feature (1)..(592): NCBI GI NO: 28812097 NR Description: P0458H05.21
  misc_feature (1)..(583): NCBI GI NO: 28812099 NR Description: P0458H05.23
  misc_feature (1)..(593): NCBI GI NO: 28812096 NR Description: P0458H05.20
  misc_feature (1)..(585): NCBI GI NO: 28812103 NR Description: P0458H05.27
MLPNNVSASPVLYATAVVGAVPEQVWGMGLCRGDANASSCLACLTQAFQDLPNDCSYNKDAAIYYDPCTLHYSDVHTLADDDTGPTTMSYNINNNANVTSDPARFERLLAALVNATAEHAASNSTRRFATGEADADFDRQFPKVYALAQCTPDQTPAQCRKCLAGLISQSLDGFQNNIGGRVLWVNCTWRYETSPFFNGPAMVRLASSSSPPAAAAAGGGERKYSVFIVVLAVVLPTLAALNLVFCFCFWRRPAPQAKQSQPMYSTEAEDVETVDSMMIDVSALRAATGNFDESNKLGEGGFGAVYKGVLPDGDEIAVKRLSKSSTQGVEELKNELALVARLRHRNLVRLVGVCLEQQERLLVYEFVPNRSLDLVLFGTDTREPLSWEQRYRIINGIARGLQYLHEDSQLKVVHRDLKASNILLDVEMNPKISDFGLARIFGRDQTQAVTSRVVGTYGYLAPEYLMRGNYSVKSDAFSFGVMVLEIVTGRKNNGSSHKSGDLLTTVWEHWEAGTVAELVDPSLGGSFPEGDVLRCIHIGLLCVQGDPAARPVMSSVVTMLGTDTVTLQAPSKPGFFARKSGTSTTVSADDGSI

SEQ ID NO: 26305 - protein, 566 aa, Zea mays subsp. mays
  peptide (1)..(566): Ceres Seq. ID no. 13493007
  misc_feature (238)..(564): NCBI GI NO: 34898858 NR Description: OJ1058_A12.27
  misc_feature (1)..(194): NCBI GI NO: 34898858 NR Description: OJ1058_A12.27
  misc_feature (1)..(562): NCBI GI NO: 34898856 NR Description: OJ1058_A12.26
  misc_feature (239)..(557): NCBI GI NO: 34898846 NR Description: OJ1058_A12.21
  misc_feature (1)..(190): NCBI GI NO: 34898846 NR Description: OJ1058_A12.21
  misc_feature (1)..(565): NCBI GI NO: 28812101 NR Description: P0458H05.25
  misc_feature (1)..(565): NCBI GI NO: 28812097 NR Description: P0458H05.21
  misc_feature (1)..(556): NCBI GI NO: 28812099 NR Description: P0458H05.23
  misc_feature (1)..(566): NCBI GI NO: 28812096 NR Description: P0458H05.20
  misc_feature (1)..(558): NCBI GI NO: 28812103 NR Description: P0458H05.27
MGLCRGDANASSCLACLTQAFQDLPNDCSYNKDAAIYYDPCTLHYSDVHTLADDDTGPTTMSYNINNNANVTSDPARFERLLAALVNATAEHAASNSTRRFATGEADADFDRQFPKVYALAQCTPDQTPAQCRKCLAGLISQSLDGFQNNIGGRVLWVNCTWRYETSPFFNGPAMVRLASSSSPPAAAAAGGGERKYSVFIVVLAVVLPTLAALNLVFCFCFWRRPAPQAKQSQPMYSTEAEDVETVDSMMIDVSALRAATGNFDESNKLGEGGFGAVYKGVLPDGDEIAVKRLSKSSTQGVEELKNELALVARLRHRNLVRLVGVCLEQQERLLVYEFVPNRSLDLVLFGTDTREPLSWEQRYRIINGIARGLQYLHEDSQLKVVHRDLKASNILLDVEMNPKISDFGLARIFGRDQTQAVTSRVVGTYGYLAPEYLMRGNYSVKSDAFSFGVMVLEIVTGRKNNGSSHKSGDLLTTVWEHWEAGTVAELVDPSLGGSFPEGDVLRCIHIGLLCVQGDPAARPVMSSVVTMLGTDTVTLQAPSKPGFFARKSGTSTTVSADDGSI

SEQ ID NO: 26306 - DNA, 1752 bp, Zea mays subsp. mays
  misc_feature (1)..(1752): Ceres Seq. ID no. 12461973
gcacgagaccattacctagaacatcctaatcaaaaagtgggaactgcatgctgagagcaaacccagaaaggaaaaaggaaaaaaagaaaacagagagaggggagagtgggagacggtcggagacagaggcctcactcctccacactctcagtcgtcttccagtcccagcgctttcttggatcgcgaggaaaccactcggggagtttgcagttgcagagaactgtatcggccgaagtggttgcacggtgtgttggccttggccatgcgccacggcagggaacagagacgagcagcagggaggcagcaatggaggcgctcattgaccctgctctcgctgtaaagatagtcccgcggtgccctccgaattccacttgatccaactctcgacatgaagcggccacgcggcgctactccctccctgtctgcgatgcccaatcatcaggaagatgacggctacggcgtggtcgggatggaggcggacgtggacgtggacgtggacgaggagatgatggcgttcggcggcggcggcggcggggagaagaagcggcgcctgagcgccgagcaggtgcgcgcgctggagcggagcttcgagagtggagaacaagctggagccggagcgcaaggcgcggctggcgcgcgacctcggcctgcagccccgccaggtcgccgtctggttccagaaccgccgcgcccgctggaagaccaagcagctggagcgcgactacgccgcgctgcgccgctcctacgacgcgcttcggctcgaccacgacgcgctccgccgcgacaaggacgccctcctcgccgagatcagggagctcaaggcgaagctgggggacgacgaggacgcagcggcgagcttcacgtcggtcaaggcggagccggcggcctcggacgggccggcccccgcgggggtggggtcgtccgagatcagtgactccagcgcggtgctgaacgacgcggacccgcccgtggcggaggcgccggcgccggcgcccgaggtgcagggcacccttcttgtcgcgccggctggccccgttgccggcgcagcggcggcgaaccatggcggggtgttcttccacgggagtttcctgaaggtggaggaggacgagacgggccttttagacgacgacgggccgtgcggcgggttcttcgccgtggagcagccgccggcgatggcgtggtggaacgagcccgcggaacactggaactgaaccgaggtggacgcggcagtgcagcgtagtagaatcgggatctcggacgagcggtggaggaataaccgaatagaggaattcggagcgataaagaaggggcttttctgcaaattttgtaaaacggggttttacctagccctactttttgtcaattctcgagcgtattagcagtagacagtagtagtagtctgggtcggaacccaggtcaagctcagcgcctgggttgcgtttggactccagtgcagaattgcgtagaggatttagaggaagagcggagctgagctgagcgaggcaggagtaaaggacaacctgtatgtcactgttagtgggcccagtgccacgtgaaagtcaggcactgttggtgcccattgacggccggacttgccagcgacgcggatgggcgacgtgaacgtgtctggccgagcagtgcgctcgctccctccccccaatgggccatggcctcttccgcgaaagcgtgctcccctgtaagtatctgatttggatgctagccaaggctgctggatgattacttcgattatct

SEQ ID NO: 26307 - protein, 181 aa, Zea mays subsp. mays
  peptide (1)..(181): Ceres Seq. ID no. 12461974
  misc_feature (1)..(68): NCBI GI NO: 5006853 NR Description: homeodomain leucine zipper protein [Oryza sativa]
  misc_feature (21)..(69): NCBI GI NO: 33943626 NR Description: homeodomain leucine-zipper protein Hox8
  misc_feature (21)..(69): NCBI GI NO: 37533686 NR Description: putative homeodomain leucine zipper protein
  misc_feature (47)..(69): NCBI GI NO: 34902432 NR Description: Unknown protein
  misc_feature (14)..(68): NCBI GI NO: 21623495 NR Description: homeobox protein PpHB7 [Physcomitrella patens]
  misc_feature (14)..(68): NCBI GI NO: 27531102 NR Description: homeobox protein Pphb7 long form
  misc_feature (15)..(89): NCBI GI NO: 37534178 NR Description: putative homeotic protein
  misc_feature (46)..(68): NCBI GI NO: 15148916 NR Description: homeodomain leucine zipper protein HDZ1
  misc_feature (36)..(68): NCBI GI NO: 6091551 NR Description: homeodomain-leucine zipper protein 56
  misc_feature (27)..(68): NCBI GI NO: 8133126 NR Description: hb-6-like protein
MKRPRGATPSLSAMPNHQEDDGYGVVGMEADVDVDVDEEMMAFGGGGGGEKKRRLSAEQVRALERSFESGEQAGAGAQGAAGARPRPAAPPGRRLVPEPPRPLEDQAAGARLRRAAPLLRRASARPRRAPPRQGRPPRRDQGAQGEAGGRRGRSGELHVGQGGAGGLGRAGPRGGGVVRDQ

SEQ ID NO: 26308 - protein, 168 aa, Zea mays subsp. mays
  peptide (1)..(168): Ceres Seq. ID no. 12461975
  misc_feature (1)..(55): NCBI GI NO: 5006853 NR Description: homeodomain leucine zipper protein [Oryza sativa]
  misc_feature (8)..(56): NCBI GI NO: 33943626 NR Description: homeodomain leucine-zipper protein Hox8
  misc_feature (8)..(56): NCBI GI NO: 37533686 NR Description: putative homeodomain leucine zipper protein
  misc_feature (34)..(56): NCBI GI NO: 34902432 NR Description: Unknown protein
  misc_feature (1)..(55): NCBI GI NO: 21623495 NR Description: homeobox protein PpHB7 [Physcomitrella patens]
  misc_feature (1)..(55): NCBI GI NO: 27531102 NR Description: homeobox protein Pphb7 long form
  misc_feature (2)..(76): NCBI GI NO: 37534178 NR Description: putative homeotic protein
  misc_feature (33)..(55): NCBI GI NO: 15148916 NR Description: homeodomain leucine zipper protein HDZ1
  misc_feature (23)..(55): NCBI GI NO: 6091551 NR Description: homeodomain-leucine zipper protein 56
  misc_feature (14)..(55): NCBI GI NO: 8133126 NR Description: hb-6-like protein
MPNHQEDDGYGVVGMEADVDVDVDEEMMAFGGGGGGEKKRRLSAEQVRALERSFESGEQAGAGAQGAAGARPRPAAPPGRRLVPEPPRPLEDQAAGARLRRAAPLLRRASARPRRAPPRQGRPPRRDQGAQGEAGGRRGRSGELHVGQGGAGGLGRAGPRGGGVVRDQ

SEQ ID NO: 26309 - protein, 154 aa, Zea mays subsp. mays
  peptide (1)..(154): Ceres Seq. ID no. 12461976
  misc_feature (1)..(41): NCBI GI NO: 5006853 NR Description: homeodomain leucine zipper protein [Oryza sativa]
  misc_feature (1)..(42): NCBI GI NO: 33943626 NR Description: homeodomain leucine-zipper protein Hox8
  misc_feature (1)..(42): NCBI GI NO: 37533686 NR Description: putative homeodomain leucine zipper protein
  misc_feature (20)..(42): NCBI GI NO: 34902432 NR Description: Unknown protein
  misc_feature (1)..(41): NCBI GI NO: 21623495 NR Description: homeobox protein PpHB7 [Physcomitrella patens]
  misc_feature (1)..(41): NCBI GI NO: 27531102 NR Description: homeobox protein Pphb7 long form
  misc_feature (1)..(62): NCBI GI NO: 37534178 NR Description: putative homeotic protein
  misc_feature (19)..(41): NCBI GI NO: 15148916 NR Description: homeodomain leucine zipper protein HDZ1
  misc_feature (9)..(41): NCBI GI NO: 6091551 NR Description: homeodomain-leucine zipper protein 56
  misc_feature (1)..(41): NCBI GI NO: 8133126 NR Description: hb-6-like protein
MEADVDVDVDEEMMAFGGGGGGEKKRRLSAEQVRALERSFESGEQAGAGAQGAAGARPRPAAPPGRRLVPEPPRPLEDQAAGARLRRAAPLLRRASARPRRAPPRQGRPPRRDQGAQGEAGGRRGRSGELHVGQGGAGGLGRAGPRGGGVVRDQ

SEQ ID NO: 26310 - DNA, 1176 bp, Zea mays subsp. mays
  misc_feature (1)..(1176): Ceres Seq. ID no. 12566580
atctccatctccatcttcctcgcagcgccggcgatccatcttccgctgcctcccttcctcgcgctcgggctctcagtgacggcatcagcggtttcccctcccgcctctcgccagtcgcatcacgccctcgcctccggtccaccgcacaccggccggtgaccctgcattacttgctaatctttcttgagggcagatggccgtttcttttgcaaatgtcaacgccgaggcagggctgaaaaagcttgatgagtaccttctcactcgcagctacatcactggctaccaagcttccaaggatgacctggctgtctactcttcatttttggctgatccctcatccaagtatatcaatgtagcaaggtggtttaatcacattgatgcactcctgaggctgagtggagttaccgcagagggcctaggtgttaaggttgagccatcagcggttccttcagcttcaattcttgatgttgctgatggacaggccccagctgctgacgaggatgacgatgatgatgttgacctttttggcgaggagactgaagaggagaagaaggctgctgaagaacgtgctgcggctgccaaggcttctggcaagaagaaagaatctgggaaatcgtcagttttacttgatgtgaagccatgggacgatgagactgacatggccaagctcgaggaagctgttaggagtgtccagatggaaggactgctttggggcgcatccaagcttgtcccagttggatatggcatcaagaagctgcaaatcatgatgaccattgtcgatgaccttgtctctgttgacactctcatcgaggaccatctctgcgctgagccagtgagcgaatacgtccagagctgcgacattgtcgccttcaacaagatctaaatttccttgtgatggtggcaatggtggttggtgggcactgtaccagcctaatttataattttccatgagcatcttcaagagtttttctaaattatcatttggagtcatttacataaaaagcactttctatatctttttaatctcaacaacttttctatatcttgtttgcaccctggagagctatttacgttttctatatttagctagcgagaaacctggatggctggaatagaagataactatatttagacaatactttaaataagctgttggaagatagtaattcttgtgtc

SEQ ID NO: 26311 - protein, 229 aa, Zea mays subsp. mays
  peptide (1)..(229): Ceres Seq. ID no. 12566581
  misc_feature (140)..(229): Pfam Name: Pfam Description:  EF-1 guanine nucleotide exchange domain
  misc_feature (1)..(229): NCBI GI NO: 6166140 NR Description: ELONGATION FACTOR 1-BETA (EF-1-BETA)
  misc_feature (1)..(229): NCBI GI NO: 7711024 NR Description: putative elongation factor 1 beta
  misc_feature (1)..(229): NCBI GI NO: 3894214 NR Description: elongation factor 1 beta 2
  misc_feature (1)..(229): NCBI GI NO: 38232568 NR Description: translational elongation factor 1 subunit Bbeta
  misc_feature (1)..(229): NCBI GI NO: 6015064 NR Description: ELONGATION FACTOR 1-BETA (EF-1-BETA)
  misc_feature (4)..(229): NCBI GI NO: 25299531 NR Description: probable elongation factor 1-beta
  misc_feature (4)..(229): NCBI GI NO: 30691619 NR Description: elongation factor 1-beta -related
  misc_feature (4)..(229): NCBI GI NO: 21593028 NR Description: putative  elongation factor beta-1
  misc_feature (4)..(229): NCBI GI NO: 15224107 NR Description: putative  elongation factor beta-1
  misc_feature (4)..(229): NCBI GI NO: 480620 NR Description: translation elongation factor eEF-1 beta-A1 chain -Arabidopsis thaliana
MAVSFANVNAEAGLKKLDEYLLTRSYITGYQASKDDLAVYSSFLADPSSKYINVARWFNHIDALLRLSGVTAEGLGVKVEPSAVPSASILDVADGQAPAADEDDDDDVDLFGEETEEEKKAAEERAAAAKASGKKKESGKSSVLLDVKPWDDETDMAKLEEAVRSVQMEGLLWGASKLVPVGYGIKKLQIMMTIVDDLVSVDTLIEDHLCAEPVSEYVQSCDIVAFNKI

SEQ ID NO: 26312 - DNA, 1547 bp, Zea mays subsp. mays
  misc_feature (1)..(1547): Ceres Seq. ID no. 12409896
attttcaaacccggaaaaaccccaagcgcattgaggaagcggccagcggtggtcccttcccccctccagtctccactctccagagtccagacctccactccactgtccactccaaagcgcagcagcgggcaaaaccaggcacccgcccgatccgattcggcttccgtctcactcatctcgcccggcctccacggagagatctggcggcggaggcgatgccactgggcgacggcgcggaggcggcggacttcgtgctgccggacgagctcctggcggcgctgccgcgggacccctacgagcagctggatctggcacgccgcatcaccgcgctggcggtgtccgggcgggtgtccggcctggagcgggaggcggggcgcctgcgggcggaggccgcggggaaggaccgcgagaacgccgagctccgggagcgagtggtgctgctcgacaccgcgctgcaggagaccaacgccaggctcccgcgccgcgctcgaggacaatattaagctcagcaaggagcgagactcgctggcgcagacgtccaagaagctggcgcgcgacctgcagaagctggagtcattcaagaggcatctgatgcagtcattgcgtgatgatagttcatcaccacaggaaacagttgacattacaacatgtgaccagtcagtagcaacaaaagcatcgtctagtggagatggtggatctggcagccaccctacaacaaatatatttagtgaatctttggatgctggaagtacgaaccgagacggtacggcatcaaggcctccgatccaaaaatatgccccctcatcgcacatcactccttggcttacccccaaggccactcctaaaataatgtccacttctgcttctccaaggcaaatatctaccacagcaacaccgaagctgatgtctggtgctacctcgccaacaaaatctcgaattgaagctcacatgtcaatgacaccatggtacccatcaagcaagcagtcatcggcagctagctcacctccacgaggaggttcaaacccaggtcggactcctcgtgttgatggaaaggaattttttcgccaagccaggagtcgtctatcctatgaacaatttggagcattcttagccaacatcaaagaactcaatgcccataagcagtcccgtgaggaaactctcaagaaagctgaggacatctttggtcccgaaaacaaagatctatatctgtctttccgaggcttgctaaatcgtagcatgccgtaggctccgtatgtctcttttttgttgttgggtttgcaggtaatgaagttgccgcattggcaacttattgccatctaagttgtggatttgaagatctagttggaagttttgccccccataatccacactaggtttaacgagcgtcgagcggacctctctgaacaactgagtgcgctaacccagagttgctcctgtaagtggtgcacctgtcgagtgctaaactataggatgcatcctgtcatggtgcctacattcttcgtaaaaccatgaaacagaatcttgggagtaaaattccatctcgtctc

SEQ ID NO: 26313 - protein, 414 aa, Zea mays subsp. mays
  peptide (1)..(414): Ceres Seq. ID no. 12409897
  misc_feature (152)..(413): NCBI GI NO: 30684901 NR Description: expressed protein [Arabidopsis thaliana]
  misc_feature (163)..(409): NCBI GI NO: 15222835 NR Description: hypothetical protein; protein id: At1g56080.1
  misc_feature (182)..(412): NCBI GI NO: 38344261 NR Description: OSJNBa0008M17.14
  misc_feature (160)..(412): NCBI GI NO: 18414476 NR Description: Expressed protein; protein id: At4g15545
  misc_feature (165)..(384): NCBI GI NO: 7485048 NR Description: hypothetical protein - Arabidopsis thaliana
  misc_feature (161)..(290): NCBI GI NO: 38344261 NR Description: OSJNBa0008M17.14
  misc_feature (163)..(343): NCBI GI NO: 25404089 NR Description: hypothetical protein T6H22.12
  misc_feature (153)..(360): NCBI GI NO: 34909876 NR Description: B1143G03.2
  misc_feature (336)..(411): NCBI GI NO: 23489944 NR Description: hypothetical protein [Plasmodium yoelii yoelii]
  misc_feature (336)..(411): NCBI GI NO: 23613663 NR Description: hypothetical protein, conserved
IFKPGKTPSALRKRPAVVPSPLQSPLSRVQTSTPLSTPKRSSGQNQAPARSDSASVSLISPGLHGEIWRRRRCHWATARRRRTSCCRTSSWRRCRGTPTSSWIWHAASPRWRCPGGCPAWSGRRGACGRRPRGRTARTPSSGSEWCCSTPRCRRPTPGSRAALEDNIKLSKERDSLAQTSKKLARDLQKLESFKRHLMQSLRDDSSSPQETVDITTCDQSVATKASSSGDGGSGSHPTTNIFSESLDAGSTNRDGTASRPPIQKYAPSSHITPWLTPKATPKIMSTSASPRQISTTATPKLMSGATSPTKSRIEAHMSMTPWYPSSKQSSAASSPPRGGSNPGRTPRVDGKEFFRQARSRLSYEQFGAFLANIKELNAHKQSREETLKKAEDIFGPENKDLYLSFRGLLNRSMP

SEQ ID NO: 26314 - protein, 217 aa, Zea mays subsp. mays
  peptide (1)..(217): Ceres Seq. ID no. 12409898
  misc_feature (1)..(216): NCBI GI NO: 30684901 NR Description: expressed protein [Arabidopsis thaliana]
  misc_feature (1)..(212): NCBI GI NO: 15222835 NR Description: hypothetical protein; protein id: At1g56080.1
  misc_feature (1)..(215): NCBI GI NO: 38344261 NR Description: OSJNBa0008M17.14
  misc_feature (1)..(215): NCBI GI NO: 18414476 NR Description: Expressed protein; protein id: At4g15545
  misc_feature (1)..(187): NCBI GI NO: 7485048 NR Description: hypothetical protein - Arabidopsis thaliana
  misc_feature (1)..(93): NCBI GI NO: 38344261 NR Description: OSJNBa0008M17.14
  misc_feature (1)..(146): NCBI GI NO: 25404089 NR Description: hypothetical protein T6H22.12
  misc_feature (1)..(163): NCBI GI NO: 34909876 NR Description: B1143G03.2
  misc_feature (139)..(214): NCBI GI NO: 23489944 NR Description: hypothetical protein [Plasmodium yoelii yoelii]
  misc_feature (139)..(214): NCBI GI NO: 23613663 NR Description: hypothetical protein, conserved
MQSLRDDSSSPQETVDITTCDQSVATKASSSGDGGSGSHPTTNIFSESLDAGSTNRDGTASRPPIQKYAPSSHITPWLTPKATPKIMSTSASPRQISTTATPKLMSGATSPTKSRIEAHMSMTPWYPSSKQSSAASSPPRGGSNPGRTPRVDGKEFFRQARSRLSYEQFGAFLANIKELNAHKQSREETLKKAEDIFGPENKDLYLSFRGLLNRSMP

SEQ ID NO: 26315 - DNA, 1681 bp, Zea mays subsp. mays
  misc_feature (1)..(1681): Ceres Seq. ID no. 12373285
atcgcgtgcgctctgtggaccgtggtggcgactactgggtggccgccgccacccccgctcggccgccctacgccaggtgctcaccgtcttcgggaccttcgccggcaacgaacactcaccagggaggatgttgcccttgtttagacactgctgtgcctttggaagtcatcatcctcatcccttaatttggaggaacatcttccaaacatcgcgaagagaacaaaaacaaatcaggagttgggatgcacagtgctcagcaaatcaggatcaagcttctatagagaaatgcaatgctccaaagaatttaccaatacctgataattcacttctcgatgctcgtattctctattgtacctctcctgccctgggtcataacaaagaagcacacccagaatcgaacaaaagagttcctgtgatagttgatactcttgagaaattggagcttagtcccaagcatcgtggttcacaggttcttgaaattcaaaatttcaaccctgcttctctagatgatgttgcacgagttcattcaagatcttacatcactggactagaaaaggctatgggcagagcttcagatgaaggtctgatattgattgaagggacaggaccaacatacgctacagaaactactttccgagaatcacttctatcagctggtgccggaatcacactggttgattcagtggtcgcagcgtcaaagttaggtcctaatccgccccttggctttgcattgataaggccaccaggacatcatgctgttcctcaaggtcccatgggtttttgtgtctttgggaacattgcagtggcagctcggtacgctcagcatcaacatggactaaagcgtgtgatgataatagattttgatgttcaccatggcaatgggacgtcagattcattttatgatgatccagatatcttcttcttgtcaactcaccagcttggaagctaccctggtactggtaagatcaatgaagtcggacagggtgatggtgaaggcacgacactcaaccttcctctgcccggtggcgcaggtgactacgcaatgagatgtgcatttgatgaggtcattgctccatcggcccatcgattcaagcctgatataatccttgtatcagctggatacgacgcacacgcgctggaccctctggctggccttcagttcacaacaggcacgttctacatgctggcatccagcatcaagcaggtgaccaaggaactctgtggtggccgctgtgtcttcttcctggaaggcgggtacaacctgcagtcgctctccagctccgttgccgacacgttccgtgcattccttgatgagcccagcctcgcagcacagtttgatgatccagcgatacttttcgaagagccgactcggaagatcaaggaagcaatcgagaaggccaagagcatccactcactctaggctgtcagctaattttccccccaatccccagaaatcccggaggggtagccctaaattgggaaaaggtgctgtcagcagtgtgcactgcagaactgcaagatcttgtggcaattggcattttgcaggtaggtagtgcatagtttgaacttggaaggcatggtcattttaatttagccaattctcaccagaaaatggaattaccgttctctcaatactagctgtatatattgaccaaaagttatgtgctacattattaatttt

SEQ ID NO: 26316 - protein, 472 aa, Zea mays subsp. mays
  peptide (1)..(472): Ceres Seq. ID no. 12373286
  misc_feature (111)..(441): Pfam Name: Pfam Description:  Histone deacetylase family
  misc_feature (100)..(472): NCBI GI NO: 18418220 NR Description: putative protein; protein id: At4g33470
  misc_feature (127)..(472): NCBI GI NO: 7445481 NR Description: hypothetical protein F17M5
  misc_feature (174)..(428): NCBI GI NO: 24213615 NR Description: histone deacetylase family protein
  misc_feature (166)..(435): NCBI GI NO: 15789452 NR Description: acetoin utilization protein; Aup
  misc_feature (167)..(429): NCBI GI NO: 22962933 NR Description: hypothetical protein [Rhodopseudomonas palustris]
  misc_feature (141)..(428): NCBI GI NO: 27377764 NR Description: bll2653 [Bradyrhizobium japonicum]
  misc_feature (126)..(427): NCBI GI NO: 15964636 NR Description: CONSERVED HYPOTHETICAL PROTEIN
  misc_feature (129)..(429): NCBI GI NO: 17987787 NR Description: acetylspermidine deacetylase [Brucella melitensis]
  misc_feature (129)..(429): NCBI GI NO: 23501331 NR Description: histone deacetylase family protein
  misc_feature (127)..(471): NCBI GI NO: 11497747 NR Description: acetylpolyamine aminohydrolase (aphA)
SRALCGPWWRLLGGRRHPRSAALRQVLTVFGTFAGNEHSPGRMLPLFRHCCAFGSHHPHPLIWRNIFQTSRREQKQIRSWDAQCSANQDQASIEKCNAPKNLPIPDNSLLDARILYCTSPALGHNKEAHPESNKRVPVIVDTLEKLELSPKHRGSQVLEIQNFNPASLDDVARVHSRSYITGLEKAMGRASDEGLILIEGTGPTYATETTFRESLLSAGAGITLVDSVVAASKLGPNPPLGFALIRPPGHHAVPQGPMGFCVFGNIAVAARYAQHQHGLKRVMIIDFDVHHGNGTSDSFYDDPDIFFLSTHQLGSYPGTGKINEVGQGDGEGTTLNLPLPGGAGDYAMRCAFDEVIAPSAHRFKPDIILVSAGYDAHALDPLAGLQFTTGTFYMLASSIKQVTKELCGGRCVFFLEGGYNLQSLSSSVADTFRAFLDEPSLAAQFDDPAILFEEPTRKIKEAIEKAKSIHSL

SEQ ID NO: 26317 - protein, 430 aa, Zea mays subsp. mays
  peptide (1)..(430): Ceres Seq. ID no. 12373287
  misc_feature (69)..(399): Pfam Name: Pfam Description:  Histone deacetylase family
  misc_feature (58)..(430): NCBI GI NO: 18418220 NR Description: putative protein; protein id: At4g33470
  misc_feature (85)..(430): NCBI GI NO: 7445481 NR Description: hypothetical protein F17M5
  misc_feature (132)..(386): NCBI GI NO: 24213615 NR Description: histone deacetylase family protein
  misc_feature (124)..(393): NCBI GI NO: 15789452 NR Description: acetoin utilization protein; Aup
  misc_feature (125)..(387): NCBI GI NO: 22962933 NR Description: hypothetical protein [Rhodopseudomonas palustris]
  misc_feature (99)..(386): NCBI GI NO: 27377764 NR Description: bll2653 [Bradyrhizobium japonicum]
  misc_feature (84)..(385): NCBI GI NO: 15964636 NR Description: CONSERVED HYPOTHETICAL PROTEIN
  misc_feature (87)..(387): NCBI GI NO: 17987787 NR Description: acetylspermidine deacetylase [Brucella melitensis]
  misc_feature (87)..(387): NCBI GI NO: 23501331 NR Description: histone deacetylase family protein
  misc_feature (85)..(429): NCBI GI NO: 11497747 NR Description: acetylpolyamine aminohydrolase (aphA)
MLPLFRHCCAFGSHHPHPLIWRNIFQTSRREQKQIRSWDAQCSANQDQASIEKCNAPKNLPIPDNSLLDARILYCTSPALGHNKEAHPESNKRVPVIVDTLEKLELSPKHRGSQVLEIQNFNPASLDDVARVHSRSYITGLEKAMGRASDEGLILIEGTGPTYATETTFRESLLSAGAGITLVDSVVAASKLGPNPPLGFALIRPPGHHAVPQGPMGFCVFGNIAVAARYAQHQHGLKRVMIIDFDVHHGNGTSDSFYDDPDIFFLSTHQLGSYPGTGKINEVGQGDGEGTTLNLPLPGGAGDYAMRCAFDEVIAPSAHRFKPDIILVSAGYDAHALDPLAGLQFTTGTFYMLASSIKQVTKELCGGRCVFFLEGGYNLQSLSSSVADTFRAFLDEPSLAAQFDDPAILFEEPTRKIKEAIEKAKSIHSL

SEQ ID NO: 26318 - protein, 286 aa, Zea mays subsp. mays
  peptide (1)..(286): Ceres Seq. ID no. 12373288
  misc_feature (1)..(255): Pfam Name: Pfam Description:  Histone deacetylase family
  misc_feature (1)..(286): NCBI GI NO: 18418220 NR Description: putative protein; protein id: At4g33470
  misc_feature (1)..(286): NCBI GI NO: 7445481 NR Description: hypothetical protein F17M5
  misc_feature (1)..(242): NCBI GI NO: 24213615 NR Description: histone deacetylase family protein
  misc_feature (1)..(249): NCBI GI NO: 15789452 NR Description: acetoin utilization protein; Aup
  misc_feature (1)..(243): NCBI GI NO: 22962933 NR Description: hypothetical protein [Rhodopseudomonas palustris]
  misc_feature (1)..(242): NCBI GI NO: 27377764 NR Description: bll2653 [Bradyrhizobium japonicum]
  misc_feature (1)..(241): NCBI GI NO: 15964636 NR Description: CONSERVED HYPOTHETICAL PROTEIN
  misc_feature (1)..(243): NCBI GI NO: 17987787 NR Description: acetylspermidine deacetylase [Brucella melitensis]
  misc_feature (1)..(243): NCBI GI NO: 23501331 NR Description: histone deacetylase family protein
  misc_feature (1)..(285): NCBI GI NO: 11497747 NR Description: acetylpolyamine aminohydrolase (aphA)
MGRASDEGLILIEGTGPTYATETTFRESLLSAGAGITLVDSVVAASKLGPNPPLGFALIRPPGHHAVPQGPMGFCVFGNIAVAARYAQHQHGLKRVMIIDFDVHHGNGTSDSFYDDPDIFFLSTHQLGSYPGTGKINEVGQGDGEGTTLNLPLPGGAGDYAMRCAFDEVIAPSAHRFKPDIILVSAGYDAHALDPLAGLQFTTGTFYMLASSIKQVTKELCGGRCVFFLEGGYNLQSLSSSVADTFRAFLDEPSLAAQFDDPAILFEEPTRKIKEAIEKAKSIHSL

SEQ ID NO: 26319 - DNA, 1418 bp, Zea mays subsp. mays
  misc_feature (1)..(1418): Ceres Seq. ID no. 12382218
gcacgagaccattacctagaacatcctaatcgaaaaaaagagctcgagaccgacaggacgagactcgcagctagctgacacggccgagaagcagcttcattgcaggcgtagtacgtacccagcagcagctagcactagcagtccatcggagcgacgatggtgagaaggacggtgctggcggcgctgctggtggccgccgccctcgccggcggcgcgcgggcgcagctcaaggaggggttctacgactactcctgcccacaggcggagaagatcgtcaaggactacgtgaaggcgcacatcccccacgcgcccgacgtcgcctccaccctgctccgcacccacttccacgactgcttcgtcaggggctgcgacgcgtcagtgctgctcaacgcgacgggcggcagcgaggcggagaaggacgcggcgcccaacctgacgctgcgcggcttcggcttcatcgaccgcatcaaggcgctgctcgagaaggagtgccccggcgtggtgtcctgcgccgacatcgtcgcgctcgccgcccgcgactccgtcggcgtcatcggcggtccgttctggagcgtgccgacggggaggcgcgacggcaccgtgtccatcaagcaggaggcgctggaccagatccccgcgcccaccatgaacttcacccaactcctccagtccttccagaacaagagcctcaacctcgccgacctcgtctggctctcaggggctcacacgatcggcatctcccaatgcaactccttcagcgagcgcctgtacaacttcacggggcgcggcgggcccgacgacgcggacccgtcgctggacccgctgtacgccgcgaagttgcggctcaagtgcaagacgctgacggacaacacgacgatcgtggagatggaccccggcagcttccgcaccttcgacctgagctactaccgcggcgtgctcaagcggcggggcctgttccagtccgacgccgcgctcatcaccgacgccgcctccaaggccgacatcctcagcgtgatcaacgcgccgcccgaggtgttcttccaggtcttcgcgggctccatggtcaagatgggcgccatcgaggtcaagaccggctccgagggcgagatcaggaagcactgcgccctcgtcaacaagcactaggcggcggaattcatgcgggagatggctccattgctcgcaaaaaatccttgtgagacacacaacatgctctgcatctgcaggcgttgtcgtcaccttggtggacgtagtacatcggtgcatggattatctgttgtttaatttgtacgttcagttcattctgtttcttgtattcttttggttcctttcctcttgtttattcatggatgatgaggtgtttctgttttattctctggttcagctgtaaccatgtaacatgtaaggtgcgcgttttgtcc

SEQ ID NO: 26320 - protein, 328 aa, Zea mays subsp. mays
  peptide (1)..(328): Ceres Seq. ID no. 12382219
  misc_feature (40)..(288): Pfam Name: Pfam Description:  Peroxidase
  misc_feature (1)..(326): NCBI GI NO: 678547 NR Description: peroxidase
  misc_feature (1)..(326): NCBI GI NO: 1084405 NR Description: peroxidase (EC 1.11.1.7) TPX1 precursor - tomato
  misc_feature (6)..(326): NCBI GI NO: 7259219 NR Description: peroxidase [Spinacia oleracea]
  misc_feature (6)..(326): NCBI GI NO: 7433079 NR Description: peroxidase (EC 1
  misc_feature (11)..(326): NCBI GI NO: 4204759 NR Description: peroxidase precursor [Glycine max]
  misc_feature (11)..(326): NCBI GI NO: 4204761 NR Description: peroxidase precursor [Glycine max]
  misc_feature (7)..(326): NCBI GI NO: 15220463 NR Description: peroxidase, putative; protein id: At1g05260
  misc_feature (7)..(326): NCBI GI NO: 21536908 NR Description: putative peroxidase [Arabidopsis thaliana]
  misc_feature (1)..(324): NCBI GI NO: 1402920 NR Description: peroxidase [Arabidopsis thaliana]
  misc_feature (1)..(324): NCBI GI NO: 1546704 NR Description: peroxidase ATP7a [Arabidopsis thaliana]
MVRRTVLAALLVAAALAGGARAQLKEGFYDYSCPQAEKIVKDYVKAHIPHAPDVASTLLRTHFHDCFVRGCDASVLLNATGGSEAEKDAAPNLTLRGFGFIDRIKALLEKECPGVVSCADIVALAARDSVGVIGGPFWSVPTGRRDGTVSIKQEALDQIPAPTMNFTQLLQSFQNKSLNLADLVWLSGAHTIGISQCNSFSERLYNFTGRGGPDDADPSLDPLYAAKLRLKCKTLTDNTTIVEMDPGSFRTFDLSYYRGVLKRRGLFQSDAALITDAASKADILSVINAPPEVFFQVFAGSMVKMGAIEVKTGSEGEIRKHCALVNKH

SEQ ID NO: 26321 - protein, 165 aa, Zea mays subsp. mays
  peptide (1)..(165): Ceres Seq. ID no. 12382220
  misc_feature (1)..(125): Pfam Name: Pfam Description:  Peroxidase
  misc_feature (1)..(163): NCBI GI NO: 678547 NR Description: peroxidase
  misc_feature (1)..(163): NCBI GI NO: 1084405 NR Description: peroxidase (EC 1.11.1.7) TPX1 precursor - tomato
  misc_feature (1)..(163): NCBI GI NO: 7259219 NR Description: peroxidase [Spinacia oleracea]
  misc_feature (1)..(163): NCBI GI NO: 7433079 NR Description: peroxidase (EC 1
  misc_feature (1)..(163): NCBI GI NO: 4204759 NR Description: peroxidase precursor [Glycine max]
  misc_feature (1)..(163): NCBI GI NO: 4204761 NR Description: peroxidase precursor [Glycine max]
  misc_feature (1)..(163): NCBI GI NO: 15220463 NR Description: peroxidase, putative; protein id: At1g05260
  misc_feature (1)..(163): NCBI GI NO: 21536908 NR Description: putative peroxidase [Arabidopsis thaliana]
  misc_feature (1)..(161): NCBI GI NO: 1402920 NR Description: peroxidase [Arabidopsis thaliana]
  misc_feature (1)..(161): NCBI GI NO: 1546704 NR Description: peroxidase ATP7a [Arabidopsis thaliana]
MNFTQLLQSFQNKSLNLADLVWLSGAHTIGISQCNSFSERLYNFTGRGGPDDADPSLDPLYAAKLRLKCKTLTDNTTIVEMDPGSFRTFDLSYYRGVLKRRGLFQSDAALITDAASKADILSVINAPPEVFFQVFAGSMVKMGAIEVKTGSEGEIRKHCALVNKH

SEQ ID NO: 26322 - DNA, 1611 bp, Zea mays subsp. mays
  misc_feature (1)..(1611): Ceres Seq. ID no. 12344708
aaaagcctgtctagaaccaaacacccctctccaccgactgcaaataatccgactcccactgctgggtgccctgtcccctacctcgggttccgcgcagaggaaggtgagacaccaattccactcccaaaccccacgaaaaccctcgccgtcttcgtccaaatcactcgcttgatctctcctctccgaacccggcaaccccttgaactagggttccagcgacccaatgacggacggcgacgacgagtacaagcgcgaggagtcggtggccctgctggtcatcgtcttcctcgccgcgctctcgctcctttccgtcatcgctgccttcgcctactactgctacattactcgcaaggtctcccgtcgcctccaggcgttccatatccccaagcgttccagctcccatcatacgcttcctccccgggccctgccgccgcagcagcaggggacggacaacccgtccagtaactccaccagagatggtgtcggagcggcggcgatgtcggtggtggctgctggggagaggggcgtgcaggtgttcagctaccggcagcttcacgcggccacgggtgggtttgaccgggcgcacatggttgggcagggcagcttcgggaccgtgtaccgcggggtgctccccgacgggaggaaggtcgcggtcaagctcatggaccgcccagggaaacagggagaagatgagtttgagatggaggtggagttgctgagtaggctccgatcaccgtatttattgggcctgattggccattgttcggaaggtgaacactgtctacttgtatatgagttcatggccaatgggggtctccaggagcatctctatccaaacagaggttcatgtggtggaatctcaaaattggactgggacacaagaatgagaattgcacttgaagcagccaaaggtttggaatatcttcatgaacatgttaatccacctgttatacatagagacttcaagagtagcaatattctcctggacaaggacttccatgcaagaatttcagactttggtctagccaaacttggatctgatagagctggtggtcatgtctcaactcgagttttgggcacacaaggctatgttgcaccagagtatgcattggctgggcatttgactaccaaatcagatgtgtacagttatggtgttgtgcttttggaattgcttactggcagagtaccagttgatatgaagaggtctcctggagaaggtgttttagttaactgggcattgcctatgctcactgaccgagataaagttgtgcggatcttggatccagcatcggaaggtcaatattccttgaaagatgctgtccaagtggctgctattgctgccatgtgtgttcaaccagaggctgactataggccattaatggctgatgttgtccaatcgctggttccacttgtcaagaaccgttataatcagaaatcttgcaatcccaatgtgcaaccatcgaagccacttgactaggagaaaagctagtgtttgatctgcagtttgtgctcgtccttctggaacccttctcgagttctcgtctataacgaactactgttgagacagattcacacgcttcctaacaatgatttcgtctgctggtgccctcc

SEQ ID NO: 26323 - protein, 417 aa, Zea mays subsp. mays
  peptide (1)..(417): Ceres Seq. ID no. 12344709
  misc_feature (117)..(322): Pfam Name: Pfam Description:  Protein kinase domain
  misc_feature (99)..(400): NCBI GI NO: 11358842 NR Description: serine/threonine-specific protein kinase-likeprotein
  misc_feature (5)..(43): NCBI GI NO: 11358842 NR Description: serine/threonine-specific protein kinase-likeprotein
  misc_feature (160)..(400): NCBI GI NO: 30694859 NR Description: protein kinase family [Arabidopsis thaliana]
  misc_feature (160)..(400): NCBI GI NO: 26449989 NR Description: putative serine/threonine-specific protein kinase
  misc_feature (79)..(414): NCBI GI NO: 12322155 NR Description: protein kinase, putative [Arabidopsis thaliana]
  misc_feature (85)..(414): NCBI GI NO: 15221910 NR Description: protein kinase, putative; protein id: At1g54820.1
  misc_feature (101)..(414): NCBI GI NO: 25405773 NR Description: hypothetical protein T22H22.21
  misc_feature (91)..(413): NCBI GI NO: 34902828 NR Description: unnamed protein product
  misc_feature (9)..(414): NCBI GI NO: 20453162 NR Description: At5g56885 [Arabidopsis thaliana]
  misc_feature (9)..(414): NCBI GI NO: 22327898 NR Description: Expressed protein; protein id: At5g56890
MTDGDDEYKREESVALLVIVFLAALSLLSVIAAFAYYCYITRKVSRRLQAFHIPKRSSSHHTLPPRALPPQQQGTDNPSSNSTRDGVGAAAMSVVAAGERGVQVFSYRQLHAATGGFDRAHMVGQGSFGTVYRGVLPDGRKVAVKLMDRPGKQGEDEFEMEVELLSRLRSPYLLGLIGHCSEGEHCLLVYEFMANGGLQEHLYPNRGSCGGISKLDWDTRMRIALEAAKGLEYLHEHVNPPVIHRDFKSSNILLDKDFHARISDFGLAKLGSDRAGGHVSTRVLGTQGYVAPEYALAGHLTTKSDVYSYGVVLLELLTGRVPVDMKRSPGEGVLVNWALPMLTDRDKVVRILDPASEGQYSLKDAVQVAAIAAMCVQPEADYRPLMADVVQSLVPLVKNRYNQKSCNPNVQPSKPLD

SEQ ID NO: 26324 - protein, 326 aa, Zea mays subsp. mays
  peptide (1)..(326): Ceres Seq. ID no. 12344710
  misc_feature (26)..(231): Pfam Name: Pfam Description:  Protein kinase domain
  misc_feature (8)..(309): NCBI GI NO: 11358842 NR Description: serine/threonine-specific protein kinase-likeprotein
  misc_feature (69)..(309): NCBI GI NO: 30694859 NR Description: protein kinase family [Arabidopsis thaliana]
  misc_feature (69)..(309): NCBI GI NO: 26449989 NR Description: putative serine/threonine-specific protein kinase
  misc_feature (1)..(323): NCBI GI NO: 12322155 NR Description: protein kinase, putative [Arabidopsis thaliana]
  misc_feature (1)..(323): NCBI GI NO: 15221910 NR Description: protein kinase, putative; protein id: At1g54820.1
  misc_feature (10)..(323): NCBI GI NO: 25405773 NR Description: hypothetical protein T22H22.21
  misc_feature (1)..(322): NCBI GI NO: 34902828 NR Description: unnamed protein product
  misc_feature (1)..(323): NCBI GI NO: 20453162 NR Description: At5g56885 [Arabidopsis thaliana]
  misc_feature (1)..(323): NCBI GI NO: 22327898 NR Description: Expressed protein; protein id: At5g56890
  misc_feature (1)..(302): NCBI GI NO: 34910468 NR Description: putative protein kinase
MSVVAAGERGVQVFSYRQLHAATGGFDRAHMVGQGSFGTVYRGVLPDGRKVAVKLMDRPGKQGEDEFEMEVELLSRLRSPYLLGLIGHCSEGEHCLLVYEFMANGGLQEHLYPNRGSCGGISKLDWDTRMRIALEAAKGLEYLHEHVNPPVIHRDFKSSNILLDKDFHARISDFGLAKLGSDRAGGHVSTRVLGTQGYVAPEYALAGHLTTKSDVYSYGVVLLELLTGRVPVDMKRSPGEGVLVNWALPMLTDRDKVVRILDPASEGQYSLKDAVQVAAIAAMCVQPEADYRPLMADVVQSLVPLVKNRYNQKSCNPNVQPSKPLD

SEQ ID NO: 26325 - protein, 296 aa, Zea mays subsp. mays
  peptide (1)..(296): Ceres Seq. ID no. 12344711
  misc_feature (1)..(201): Pfam Name: Pfam Description:  Protein kinase domain
  misc_feature (1)..(279): NCBI GI NO: 11358842 NR Description: serine/threonine-specific protein kinase-likeprotein
  misc_feature (39)..(279): NCBI GI NO: 30694859 NR Description: protein kinase family [Arabidopsis thaliana]
  misc_feature (39)..(279): NCBI GI NO: 26449989 NR Description: putative serine/threonine-specific protein kinase
  misc_feature (1)..(293): NCBI GI NO: 12322155 NR Description: protein kinase, putative [Arabidopsis thaliana]
  misc_feature (1)..(293): NCBI GI NO: 15221910 NR Description: protein kinase, putative; protein id: At1g54820.1
  misc_feature (1)..(293): NCBI GI NO: 25405773 NR Description: hypothetical protein T22H22.21
  misc_feature (1)..(292): NCBI GI NO: 34902828 NR Description: unnamed protein product
  misc_feature (1)..(293): NCBI GI NO: 20453162 NR Description: At5g56885 [Arabidopsis thaliana]
  misc_feature (1)..(293): NCBI GI NO: 22327898 NR Description: Expressed protein; protein id: At5g56890
  misc_feature (1)..(272): NCBI GI NO: 34910468 NR Description: putative protein kinase
MVGQGSFGTVYRGVLPDGRKVAVKLMDRPGKQGEDEFEMEVELLSRLRSPYLLGLIGHCSEGEHCLLVYEFMANGGLQEHLYPNRGSCGGISKLDWDTRMRIALEAAKGLEYLHEHVNPPVIHRDFKSSNILLDKDFHARISDFGLAKLGSDRAGGHVSTRVLGTQGYVAPEYALAGHLTTKSDVYSYGVVLLELLTGRVPVDMKRSPGEGVLVNWALPMLTDRDKVVRILDPASEGQYSLKDAVQVAAIAAMCVQPEADYRPLMADVVQSLVPLVKNRYNQKSCNPNVQPSKPLD

SEQ ID NO: 26326 - DNA, 1524 bp, Zea mays subsp. mays
  misc_feature (1)..(1524): Ceres Seq. ID no. 12365476
agagattagtgaatccaaaaggcgaccaaacagatcccccgcaccccgctcctgtgctccgctcatggcagagaaccccctgggaaaacgcagcggagaaactctggagatcgaaaccccggcacgcagctaggcgaactgcacgcagctgcaggtcgacagtctaatcaatttcttgtcgcttcagcttctggtgctggtcttcttccagttgcatcctggttacctgtgtcaaggggcggttggtgtctggtgtagttggagggcagagcttcggcggcggcgaagaagaagagcagcagagagactctgctgacactgaccgagggagatatgatgaggaagctgagagagttgctgcagaagagcgacaaccgcgtatgtgccgactgcggcgcacctgatcccaaatgggcatcggctaacattggagtattcatttgcctaaagtgttctggtgttcacagaagcctcgggacacatgtttcaaaggtgctgtcagtcacactagatcaatggacggatgatgagatcaactccatgatagaagttggtggaaactcttatgccaatgctatatatgaagcatttctgccagagggctatcagaagccgcatccagattctagccaagaagagagagctgatttcatcaggtcgaagtatgagttgcaagaattcctgaagccaagcctaaggttagtttccagcaataagggctctttagaggctaccagtaccagctctcgaaaacataaggacaatactgtgtctctttctgctagtttcagcagtgaggctggaatggttgagttcattggaatactaaaagttaaagtgataagagggactaaactagctgtaagagacctgatgagtagtgacccctatattgtactgaccctaggacagcagaaagcaaaaacttctgtgagtaaacgtaatctgaatcctgtttggaatgaagagcttaagctgtcagttccccagcagtacgggcctctgaagcttcaagtgttcgaccacgacatgctatcgaaggatgacgagatgggtgacgcagagattgacctgcagccgatgatcagtgcagctacagcgtttggcgaccctgatctgctcgcggacatgcagatcggcaagtggctcaggtccccagataatgcgctggcaagggacagcgccgtcaatgtcgttggtggcaaggtcaagcaggaggtctctctgaggctgcagaacgtggaatcgggggaggtggaactggagctggagtggataccactcaatcagtagagttcaaatccacctgtaggctatatgtgatgcatgtttcatgtgtgccacacaagtcctgatgctcttgatcatcttcagtttgtcagggtgcctgcagtgttgtagactatctttgcggttgtagaatcagtgtcggagcccggccaccgtgactggttcagcaactctgtacaatgatagtttgaggactcaatgacttgttagtacaagtatgagactgttgtttgc

SEQ ID NO: 26327 - protein, 319 aa, Zea mays subsp. mays
  peptide (1)..(319): Ceres Seq. ID no. 12365477
  misc_feature (3)..(123): Pfam Name: Pfam Description:  Putative GTPase activating protein for Arf
  misc_feature (1)..(319): NCBI GI NO: 21594052 NR Description: putative GTPase activating protein
  misc_feature (1)..(319): NCBI GI NO: 18415638 NR Description: putative protein; protein id: At4g21160
  misc_feature (1)..(319): NCBI GI NO: 25407332 NR Description: hypothetical protein AT4g05330
  misc_feature (1)..(319): NCBI GI NO: 18412932 NR Description: putative protein; protein id: At4g05330
  misc_feature (27)..(319): NCBI GI NO: 7486586 NR Description: hypothetical protein F7J7
  misc_feature (1)..(28): NCBI GI NO: 7486586 NR Description: hypothetical protein F7J7
  misc_feature (4)..(319): NCBI GI NO: 19386828 NR Description: putative zinc finger and C2 domain protein
  misc_feature (153)..(319): NCBI GI NO: 6648206 NR Description: putative GTPase activating protein
  misc_feature (153)..(319): NCBI GI NO: 30680493 NR Description: zinc finger and C2 domain protein, putative
  misc_feature (1)..(119): NCBI GI NO: 6648206 NR Description: putative GTPase activating protein
MMRKLRELLQKSDNRVCADCGAPDPKWASANIGVFICLKCSGVHRSLGTHVSKVLSVTLDQWTDDEINSMIEVGGNSYANAIYEAFLPEGYQKPHPDSSQEERADFIRSKYELQEFLKPSLRLVSSNKGSLEATSTSSRKHKDNTVSLSASFSSEAGMVEFIGILKVKVIRGTKLAVRDLMSSDPYIVLTLGQQKAKTSVSKRNLNPVWNEELKLSVPQQYGPLKLQVFDHDMLSKDDEMGDAEIDLQPMISAATAFGDPDLLADMQIGKWLRSPDNALARDSAVNVVGGKVKQEVSLRLQNVESGEVELELEWIPLNQ

SEQ ID NO: 26328 - protein, 318 aa, Zea mays subsp. mays
  peptide (1)..(318): Ceres Seq. ID no. 12365478
  misc_feature (2)..(122): Pfam Name: Pfam Description:  Putative GTPase activating protein for Arf
  misc_feature (1)..(318): NCBI GI NO: 21594052 NR Description: putative GTPase activating protein
  misc_feature (1)..(318): NCBI GI NO: 18415638 NR Description: putative protein; protein id: At4g21160
  misc_feature (1)..(318): NCBI GI NO: 25407332 NR Description: hypothetical protein AT4g05330
  misc_feature (1)..(318): NCBI GI NO: 18412932 NR Description: putative protein; protein id: At4g05330
  misc_feature (26)..(318): NCBI GI NO: 7486586 NR Description: hypothetical protein F7J7
  misc_feature (1)..(27): NCBI GI NO: 7486586 NR Description: hypothetical protein F7J7
  misc_feature (3)..(318): NCBI GI NO: 19386828 NR Description: putative zinc finger and C2 domain protein
  misc_feature (152)..(318): NCBI GI NO: 6648206 NR Description: putative GTPase activating protein
  misc_feature (152)..(318): NCBI GI NO: 30680493 NR Description: zinc finger and C2 domain protein, putative
  misc_feature (1)..(118): NCBI GI NO: 6648206 NR Description: putative GTPase activating protein
MRKLRELLQKSDNRVCADCGAPDPKWASANIGVFICLKCSGVHRSLGTHVSKVLSVTLDQWTDDEINSMIEVGGNSYANAIYEAFLPEGYQKPHPDSSQEERADFIRSKYELQEFLKPSLRLVSSNKGSLEATSTSSRKHKDNTVSLSASFSSEAGMVEFIGILKVKVIRGTKLAVRDLMSSDPYIVLTLGQQKAKTSVSKRNLNPVWNEELKLSVPQQYGPLKLQVFDHDMLSKDDEMGDAEIDLQPMISAATAFGDPDLLADMQIGKWLRSPDNALARDSAVNVVGGKVKQEVSLRLQNVESGEVELELEWIPLNQ

SEQ ID NO: 26329 - protein, 250 aa, Zea mays subsp. mays
  peptide (1)..(250): Ceres Seq. ID no. 12365479
  misc_feature (1)..(54): Pfam Name: Pfam Description:  Putative GTPase activating protein for Arf
  misc_feature (1)..(250): NCBI GI NO: 21594052 NR Description: putative GTPase activating protein
  misc_feature (1)..(250): NCBI GI NO: 18415638 NR Description: putative protein; protein id: At4g21160
  misc_feature (1)..(250): NCBI GI NO: 25407332 NR Description: hypothetical protein AT4g05330
  misc_feature (1)..(250): NCBI GI NO: 18412932 NR Description: putative protein; protein id: At4g05330
  misc_feature (1)..(250): NCBI GI NO: 7486586 NR Description: hypothetical protein F7J7
  misc_feature (1)..(250): NCBI GI NO: 19386828 NR Description: putative zinc finger and C2 domain protein
  misc_feature (84)..(250): NCBI GI NO: 6648206 NR Description: putative GTPase activating protein
  misc_feature (84)..(250): NCBI GI NO: 30680493 NR Description: zinc finger and C2 domain protein, putative
  misc_feature (1)..(50): NCBI GI NO: 6648206 NR Description: putative GTPase activating protein
  misc_feature (1)..(50): NCBI GI NO: 30680493 NR Description: zinc finger and C2 domain protein, putative
MIEVGGNSYANAIYEAFLPEGYQKPHPDSSQEERADFIRSKYELQEFLKPSLRLVSSNKGSLEATSTSSRKHKDNTVSLSASFSSEAGMVEFIGILKVKVIRGTKLAVRDLMSSDPYIVLTLGQQKAKTSVSKRNLNPVWNEELKLSVPQQYGPLKLQVFDHDMLSKDDEMGDAEIDLQPMISAATAFGDPDLLADMQIGKWLRSPDNALARDSAVNVVGGKVKQEVSLRLQNVESGEVELELEWIPLNQ

SEQ ID NO: 26330 - DNA, 1419 bp, Zea mays subsp. mays
  misc_feature (1)..(1419): Ceres Seq. ID no. 12383193
  misc_feature (825)..(825): n is a, c, t, g, unknown, or other
  misc_feature (814)..(814): n is a, c, t, g, unknown, or other
  misc_feature (826)..(826): n is a, c, t, g, unknown, or other
  misc_feature (742)..(742): n is a, c, t, g, unknown, or other
  misc_feature (876)..(876): n is a, c, t, g, unknown, or other
  misc_feature (819)..(819): n is a, c, t, g, unknown, or other
  misc_feature (768)..(768): n is a, c, t, g, unknown, or other
  misc_feature (753)..(753): n is a, c, t, g, unknown, or other
  misc_feature (735)..(735): n is a, c, t, g, unknown, or other
gcacgagaccattacctagaacatcctaatcgaaaaattacggacacacgggcaccccgtctcctcttttttctctctgtctcctcaccaaagaaccgcagctaggaacggctcgccacagaagaacgtacggctatgaagacgaggcgcggtgcctgctactcctgccatgcggcgccgggcgagggcccggaggtgcaacgccggaagaggcgcaggacggcggccgaggcatcgccggcggctgccgaagatccaggtgtccgcctgggcgccagagacatgttcgaggatctgcccgacgatctcgtcgtctccatactgagggacgtcgccgcgtccgccggctcgccggccgatctcgccggcgccatgctcacgtgcaagagattcagggagctagtagcgcggagcaaggtggtggtgctcgcgcgggcgtcgccgcggtgcctctcggtgcgcgccaaggcctggtcggacgaggcgcaccggttcctgcagcgctgcgccgacgccggcaacctcgaagcctgctaccttctcggcatgattcggttctactgcctggggagccgcggctcgggcgcggcgctgatggcggcggcggcggtgggcgggcaccgcgaggcgctgtactcgctggccgtgatccagttcaacggcagcggcggcgggaaggacgaccgcgacctccgcgccggagccgcgctgtgcgcgcgcgcggcggcgcggggncacgtgnacgcgctccgngagctggggcactgnctgcaggacggctacggcgtgcgccggtccgtgctggacgggcggngcctnctcatnnaggcaaacgcgcgcgagctcgcggccgcctcggcggcgcacccgtgcctncttctgagcgacttggggtgccacgccggcgaggcgcacgcggccaaccggttcctggtggactggttcgcgtcgcggccgctgggcttgacgcccggcggcaacggcaacggcagcgccgggacggcgggctcggcggaggaggacggcgttggcggtctccggctgtgctcgcaggcgctgtgcgggcggcccgagacgcggcggcacgagttcaggcggtgctcggtgtgcggcgtggtgaactactgctcccgcgcgtgccaggcgctgcactggaggatggcgcacaaggcggagtgcacgcccatggaccggtggctcgacgcggtgcagcccaacgccatcgccaatgcggacgcggcggccccggcgccgtgacgttctccgttactatatatgtcagttagcggccggccgtttctctgttttgccttttgcgtcgttctctgaacctgcgtacgtacatggtttgttggcaaatgctgatgtaacgttcttctggcgcgggcgatacgtagaacataggcagtgaaatttttt

SEQ ID NO: 26331 - protein, 373 aa, Zea mays subsp. mays
  peptide (1)..(373): Ceres Seq. ID no. 12383194
  misc_feature (309)..(348): Pfam Name: Pfam Description:  MYND finger
  misc_feature (1)..(243): NCBI GI NO: 19386803 NR Description: OJ1485_B09.11
  misc_feature (239)..(355): NCBI GI NO: 19386803 NR Description: OJ1485_B09.11
  misc_feature (2)..(356): NCBI GI NO: 18408746 NR Description: F-box protein family; protein id: At1g67340
  misc_feature (51)..(357): NCBI GI NO: 15240674 NR Description: putative protein; protein id: At5g50450
  misc_feature (200)..(200): Xaa is any aa, unknown or other
  misc_feature (203)..(203): Xaa is any aa, unknown or other
  misc_feature (206)..(206): Xaa is any aa, unknown or other
  misc_feature (211)..(211): Xaa is any aa, unknown or other
  misc_feature (227)..(227): Xaa is any aa, unknown or other
  misc_feature (228)..(228): Xaa is any aa, unknown or other
  misc_feature (230)..(230): Xaa is any aa, unknown or other
  misc_feature (231)..(231): Xaa is any aa, unknown or other
  misc_feature (247)..(247): Xaa is any aa, unknown or other
MKTRRGACYSCHAAPGEGPEVQRRKRRRTAAEASPAAAEDPGVRLGARDMFEDLPDDLVVSILRDVAASAGSPADLAGAMLTCKRFRELVARSKVVVLARASPRCLSVRAKAWSDEAHRFLQRCADAGNLEACYLLGMIRFYCLGSRGSGAALMAAAAVGGHREALYSLAVIQFNGSGGGKDDRDLRAGAALCARAAARXHVXALXELGHXLQDGYGVRRSVLDGRXXLXXANARELAAASAAHPCXLLSDLGCHAGEAHAANRFLVDWFASRPLGLTPGGNGNGSAGTAGSAEEDGVGGLRLCSQALCGRPETRRHEFRRCSVCGVVNYCSRACQALHWRMAHKAECTPMDRWLDAVQPNAIANADAAAPAP

SEQ ID NO: 26332 - protein, 324 aa, Zea mays subsp. mays
  peptide (1)..(324): Ceres Seq. ID no. 12383195
  misc_feature (260)..(299): Pfam Name: Pfam Description:  MYND finger
  misc_feature (1)..(194): NCBI GI NO: 19386803 NR Description: OJ1485_B09.11
  misc_feature (190)..(306): NCBI GI NO: 19386803 NR Description: OJ1485_B09.11
  misc_feature (1)..(307): NCBI GI NO: 18408746 NR Description: F-box protein family; protein id: At1g67340
  misc_feature (2)..(308): NCBI GI NO: 15240674 NR Description: putative protein; protein id: At5g50450
  misc_feature (151)..(151): Xaa is any aa, unknown or other
  misc_feature (154)..(154): Xaa is any aa, unknown or other
  misc_feature (157)..(157): Xaa is any aa, unknown or other
  misc_feature (162)..(162): Xaa is any aa, unknown or other
  misc_feature (178)..(178): Xaa is any aa, unknown or other
  misc_feature (179)..(179): Xaa is any aa, unknown or other
  misc_feature (181)..(181): Xaa is any aa, unknown or other
  misc_feature (182)..(182): Xaa is any aa, unknown or other
  misc_feature (198)..(198): Xaa is any aa, unknown or other
MFEDLPDDLVVSILRDVAASAGSPADLAGAMLTCKRFRELVARSKVVVLARASPRCLSVRAKAWSDEAHRFLQRCADAGNLEACYLLGMIRFYCLGSRGSGAALMAAAAVGGHREALYSLAVIQFNGSGGGKDDRDLRAGAALCARAAARXHVXALXELGHXLQDGYGVRRSVLDGRXXLXXANARELAAASAAHPCXLLSDLGCHAGEAHAANRFLVDWFASRPLGLTPGGNGNGSAGTAGSAEEDGVGGLRLCSQALCGRPETRRHEFRRCSVCGVVNYCSRACQALHWRMAHKAECTPMDRWLDAVQPNAIANADAAAPAP

SEQ ID NO: 26333 - protein, 294 aa, Zea mays subsp. mays
  peptide (1)..(294): Ceres Seq. ID no. 12383196
  misc_feature (230)..(269): Pfam Name: Pfam Description:  MYND finger
  misc_feature (1)..(164): NCBI GI NO: 19386803 NR Description: OJ1485_B09.11
  misc_feature (160)..(276): NCBI GI NO: 19386803 NR Description: OJ1485_B09.11
  misc_feature (1)..(277): NCBI GI NO: 18408746 NR Description: F-box protein family; protein id: At1g67340
  misc_feature (1)..(278): NCBI GI NO: 15240674 NR Description: putative protein; protein id: At5g50450
  misc_feature (121)..(121): Xaa is any aa, unknown or other
  misc_feature (124)..(124): Xaa is any aa, unknown or other
  misc_feature (127)..(127): Xaa is any aa, unknown or other
  misc_feature (132)..(132): Xaa is any aa, unknown or other
  misc_feature (148)..(148): Xaa is any aa, unknown or other
  misc_feature (149)..(149): Xaa is any aa, unknown or other
  misc_feature (151)..(151): Xaa is any aa, unknown or other
  misc_feature (152)..(152): Xaa is any aa, unknown or other
  misc_feature (168)..(168): Xaa is any aa, unknown or other
MLTCKRFRELVARSKVVVLARASPRCLSVRAKAWSDEAHRFLQRCADAGNLEACYLLGMIRFYCLGSRGSGAALMAAAAVGGHREALYSLAVIQFNGSGGGKDDRDLRAGAALCARAAARXHVXALXELGHXLQDGYGVRRSVLDGRXXLXXANARELAAASAAHPCXLLSDLGCHAGEAHAANRFLVDWFASRPLGLTPGGNGNGSAGTAGSAEEDGVGGLRLCSQALCGRPETRRHEFRRCSVCGVVNYCSRACQALHWRMAHKAECTPMDRWLDAVQPNAIANADAAAPAP

SEQ ID NO: 26334 - DNA, 1364 bp, Zea mays subsp. mays
  misc_feature (1)..(1364): Ceres Seq. ID no. 12346003
gaaaaaaagaaccgcgagacgcaagccagcaacaacgccgtggaagatgcggtgatcgaggtcgggccagtcgagacgttcctgaatcagatcctgaacgagaagccgatgcgtttcagctccgagcaactggcggcctgcacccggaactactcgtcggagctgggatccggcggctacggcacggtctacaagggtgagctcccgaacggcctgctggtggccgtgaaggtgctcaaggtgtccatgaacaagaaggtgcaggaggcgttcatggcggagatcggcactataggccggacgtaccacgtgcacctcgtccgcctctacggcttctgcttcgacgcgaacaccaaggcactagtctacgagtatttggagaaggggtcgctggagaagtacctttactacggcgacgtggagtgcagcacgagcacgggcaaaaggcttgagtggggaacgctgcacggcatcgccgtcggcacggcgaaggggatcaggtacctgcacgaggagtgccagcagcggatcgtgcactacgacatcaagccggccaacatcctgctcacggccgatgacaccccgaaggtggccgacttcgggctggcacgactgggcgagcgcgaggacacgcacatgtcgctgaccggcggcggccgcgggacgcccgggtacgcggcgccggagctgtggatggcgctgccggcgtcggagaagtgcgacgtgtacagcttcgggatggtgctgttcgagatcctggggcagcgcaggaactacgacccctgccggggcgagagcagagagtggttcccgagatgggtgtgggagaggtacgagcagggtgagattgagtacgtcgtgtcgtgcgatgggatcggggaggcggacatggagaaggcagagatcatgtgcaaggtggcgctgtggtgcgtgcagttccagccggcggcgcggccgacgatgagcagcgtggtgcggatgctggagggggagatgccgattgtcccgcctgtgaacccattccactacgtcatggacagcagcagtggctcaactagctcggggctgtggagtgacacataccaaagtagcagagagaccattggcattgccatagacagtgagctatcggttagccctattgccaagtcgacttgattgtaagatgatgatcggactcatatgttgatgttgatgaaatcctgtactgtttgcttattataaacaaaaaaaggctgaggtttgtaaattagcatcatgcataagaatcaaagatatgcgagttgagtggattagtgtggtgtggcacatgtaggctatccctggctaataagctaagtaccgaaagatagagggcttgtttg

SEQ ID NO: 26335 - protein, 385 aa, Zea mays subsp. mays
  peptide (1)..(385): Ceres Seq. ID no. 12346004
  misc_feature (2)..(385): NCBI GI NO: 39545728 NR Description: OSJNBa0071I13.6
  misc_feature (2)..(385): NCBI GI NO: 38343972 NR Description: OSJNBb0022F16.11
  misc_feature (16)..(355): NCBI GI NO: 38343974 NR Description: OSJNBb0022F16.13
  misc_feature (16)..(367): NCBI GI NO: 38343973 NR Description: OSJNBb0022F16.12
  misc_feature (14)..(381): NCBI GI NO: 34393334 NR Description: S-receptor kinase PK3 precursor-like protein
  misc_feature (14)..(286): NCBI GI NO: 33146505 NR Description: receptor-like kinase TAK33-like protein
  misc_feature (292)..(379): NCBI GI NO: 33146505 NR Description: receptor-like kinase TAK33-like protein
  misc_feature (16)..(374): NCBI GI NO: 7434406 NR Description: S-receptor kinase homolog F10M6
  misc_feature (16)..(374): NCBI GI NO: 22329085 NR Description: S-receptor kinase -like protein
  misc_feature (24)..(341): NCBI GI NO: 34895252 NR Description: putative receptor kinase
EKKNRETQASNNAVEDAVIEVGPVETFLNQILNEKPMRFSSEQLAACTRNYSSELGSGGYGTVYKGELPNGLLVAVKVLKVSMNKKVQEAFMAEIGTIGRTYHVHLVRLYGFCFDANTKALVYEYLEKGSLEKYLYYGDVECSTSTGKRLEWGTLHGIAVGTAKGIRYLHEECQQRIVHYDIKPANILLTADDTPKVADFGLARLGEREDTHMSLTGGGRGTPGYAAPELWMALPASEKCDVYSFGMVLFEILGQRRNYDPCRGESREWFPRWVWERYEQGEIEYVVSCDGIGEADMEKAEIMCKVALWCVQFQPAARPTMSSVVRMLEGEMPIVPPVNPFHYVMDSSSGSTSSGLWSDTYQSSRETIGIAIDSELSVSPIAKST

SEQ ID NO: 26336 - protein, 349 aa, Zea mays subsp. mays
  peptide (1)..(349): Ceres Seq. ID no. 12346005
  misc_feature (1)..(349): NCBI GI NO: 39545728 NR Description: OSJNBa0071I13.6
  misc_feature (1)..(349): NCBI GI NO: 38343972 NR Description: OSJNBb0022F16.11
  misc_feature (1)..(319): NCBI GI NO: 38343974 NR Description: OSJNBb0022F16.13
  misc_feature (1)..(331): NCBI GI NO: 38343973 NR Description: OSJNBb0022F16.12
  misc_feature (1)..(345): NCBI GI NO: 34393334 NR Description: S-receptor kinase PK3 precursor-like protein
  misc_feature (1)..(250): NCBI GI NO: 33146505 NR Description: receptor-like kinase TAK33-like protein
  misc_feature (256)..(343): NCBI GI NO: 33146505 NR Description: receptor-like kinase TAK33-like protein
  misc_feature (1)..(338): NCBI GI NO: 7434406 NR Description: S-receptor kinase homolog F10M6
  misc_feature (1)..(338): NCBI GI NO: 22329085 NR Description: S-receptor kinase -like protein
  misc_feature (1)..(305): NCBI GI NO: 34895252 NR Description: putative receptor kinase
MRFSSEQLAACTRNYSSELGSGGYGTVYKGELPNGLLVAVKVLKVSMNKKVQEAFMAEIGTIGRTYHVHLVRLYGFCFDANTKALVYEYLEKGSLEKYLYYGDVECSTSTGKRLEWGTLHGIAVGTAKGIRYLHEECQQRIVHYDIKPANILLTADDTPKVADFGLARLGEREDTHMSLTGGGRGTPGYAAPELWMALPASEKCDVYSFGMVLFEILGQRRNYDPCRGESREWFPRWVWERYEQGEIEYVVSCDGIGEADMEKAEIMCKVALWCVQFQPAARPTMSSVVRMLEGEMPIVPPVNPFHYVMDSSSGSTSSGLWSDTYQSSRETIGIAIDSELSVSPIAKST

SEQ ID NO: 26337 - protein, 303 aa, Zea mays subsp. mays
  peptide (1)..(303): Ceres Seq. ID no. 12346006
  misc_feature (1)..(303): NCBI GI NO: 39545728 NR Description: OSJNBa0071I13.6
  misc_feature (1)..(303): NCBI GI NO: 38343972 NR Description: OSJNBb0022F16.11
  misc_feature (1)..(273): NCBI GI NO: 38343974 NR Description: OSJNBb0022F16.13
  misc_feature (1)..(285): NCBI GI NO: 38343973 NR Description: OSJNBb0022F16.12
  misc_feature (1)..(299): NCBI GI NO: 34393334 NR Description: S-receptor kinase PK3 precursor-like protein
  misc_feature (1)..(204): NCBI GI NO: 33146505 NR Description: receptor-like kinase TAK33-like protein
  misc_feature (210)..(297): NCBI GI NO: 33146505 NR Description: receptor-like kinase TAK33-like protein
  misc_feature (1)..(292): NCBI GI NO: 7434406 NR Description: S-receptor kinase homolog F10M6
  misc_feature (1)..(292): NCBI GI NO: 22329085 NR Description: S-receptor kinase -like protein
  misc_feature (1)..(259): NCBI GI NO: 34895252 NR Description: putative receptor kinase
MNKKVQEAFMAEIGTIGRTYHVHLVRLYGFCFDANTKALVYEYLEKGSLEKYLYYGDVECSTSTGKRLEWGTLHGIAVGTAKGIRYLHEECQQRIVHYDIKPANILLTADDTPKVADFGLARLGEREDTHMSLTGGGRGTPGYAAPELWMALPASEKCDVYSFGMVLFEILGQRRNYDPCRGESREWFPRWVWERYEQGEIEYVVSCDGIGEADMEKAEIMCKVALWCVQFQPAARPTMSSVVRMLEGEMPIVPPVNPFHYVMDSSSGSTSSGLWSDTYQSSRETIGIAIDSELSVSPIAKST

SEQ ID NO: 26338 - DNA, 1180 bp, Zea mays subsp. mays
  misc_feature (1)..(1180): Ceres Seq. ID no. 12363224
gcacgagaccattacctagaacatcctaatcaaaaaaaggggcggcattcagtgattcagccgccagtcccgctcgtctctgccaagtcccgcgcgctcgagcatcgatcagccgctggcgccgcgacgagcgacgacgccgcgccagtcgcgcgcagatggccgccgtctcgctcctgcgagccgcggcgctcgggctggttgtcctcgcgtcggcgctgccgtcggctcggccgtggagcaaggagggtcacgtgctcacatgccaaatcgcgcagggtctgctggagcctgacgccgcgcacgccgtgcggaacctgctcccggacgacgccggcggcgacctgtccggcgctgtgcgtgtggccggaccaggtgaggcactggtacaggtacatgtggacgggcccgctccacttcatcgacacccctgacgaggcctgcagcttcgactactcgagggactgccacggccccgacggcgccaaggacatgtgcgtcgccggcgccatcgccaacttcacgtcccagctgctgcactacaggcacggcagcgccgacaggagatacaacctgactgaagcccttctgttcctgtcgcacttcatgggagatgttcatcagccaatgcacgtggggttcaccagcgaccaaggcggcaactccatagagctgcggtggttccggcacaaatccaacctccaccacgtgtgggacagggagatcatacagacggctctcgccgacttctacggcaaggacatggacgccttccgcaagcagctcgagcacaacctcaccaagggtacctggtccgacgatgtatcggcttggacagactgccaagacctctcgtcttgcccaaccaagtacgcgaccgagagcataggcctggcgtgcaaatgggcgtacagcggcgtccgcgaaggggagacactgtccgacgactactttgactcgaggctgccgatcgtgtcgcggcggatcgcgcagggcggggtgcggctggccatgttcctcaaccggatcttcggcgcgcacaaccgcgacgtgccgccgccgtcttcttgattgatggatggacccgatcccgatctgcctgtcgcgtcacagactcgaagtctaatctaatccatgtggttgtagtgtctttgcttctttttaagtaaataagtaattc

SEQ ID NO: 26339 - protein, 356 aa, Zea mays subsp. mays
  peptide (1)..(356): Ceres Seq. ID no. 12363225
  misc_feature (118)..(355): NCBI GI NO: 3551956 NR Description: senescence-associated protein 6
  misc_feature (118)..(346): NCBI GI NO: 3242447 NR Description: endonuclease [Zinnia elegans]
  misc_feature (118)..(346): NCBI GI NO: 7229711 NR Description: CEL I mismatch endonuclease [Apium graveolens]
  misc_feature (88)..(344): NCBI GI NO: 15220307 NR Description: bifunctional nuclease bfn1; protein id:At1g11190
  misc_feature (88)..(344): NCBI GI NO: 4099831 NR Description: bifunctional nuclease bfn1 [Arabidopsis thaliana]
  misc_feature (233)..(355): NCBI GI NO: 39545743 NR Description: OSJNBb0034I13.4
  misc_feature (118)..(143): NCBI GI NO: 39545743 NR Description: OSJNBb0034I13.4
  misc_feature (188)..(208): NCBI GI NO: 39545743 NR Description: OSJNBb0034I13.4
  misc_feature (118)..(345): NCBI GI NO: 15221343 NR Description: putative bifunctional nuclease
  misc_feature (118)..(345): NCBI GI NO: 21554516 NR Description: putative bifunctional nuclease
ARDHYLEHPNQKKGRHSVIQPPVPLVSAKSRALEHRSAAGAATSDDAAPVARRWPPSRSCEPRRSGWLSSRRRCRRLGRGARRVTCSHAKSRRVCWSLTPRTPCGTCSRTTPAATCPALCVWPDQVRHWYRYMWTGPLHFIDTPDEACSFDYSRDCHGPDGAKDMCVAGAIANFTSQLLHYRHGSADRRYNLTEALLFLSHFMGDVHQPMHVGFTSDQGGNSIELRWFRHKSNLHHVWDREIIQTALADFYGKDMDAFRKQLEHNLTKGTWSDDVSAWTDCQDLSSCPTKYATESIGLACKWAYSGVREGETLSDDYFDSRLPIVSRRIAQGGVRLAMFLNRIFGAHNRDVPPPSS

SEQ ID NO: 26340 - protein, 224 aa, Zea mays subsp. mays
  peptide (1)..(224): Ceres Seq. ID no. 12363226
  misc_feature (1)..(223): NCBI GI NO: 3551956 NR Description: senescence-associated protein 6
  misc_feature (1)..(214): NCBI GI NO: 3242447 NR Description: endonuclease [Zinnia elegans]
  misc_feature (1)..(214): NCBI GI NO: 7229711 NR Description: CEL I mismatch endonuclease [Apium graveolens]
  misc_feature (1)..(212): NCBI GI NO: 15220307 NR Description: bifunctional nuclease bfn1; protein id:At1g11190
  misc_feature (1)..(212): NCBI GI NO: 4099831 NR Description: bifunctional nuclease bfn1 [Arabidopsis thaliana]
  misc_feature (101)..(223): NCBI GI NO: 39545743 NR Description: OSJNBb0034I13.4
  misc_feature (1)..(11): NCBI GI NO: 39545743 NR Description: OSJNBb0034I13.4
  misc_feature (56)..(76): NCBI GI NO: 39545743 NR Description: OSJNBb0034I13.4
  misc_feature (1)..(213): NCBI GI NO: 15221343 NR Description: putative bifunctional nuclease
  misc_feature (1)..(213): NCBI GI NO: 21554516 NR Description: putative bifunctional nuclease
MWTGPLHFIDTPDEACSFDYSRDCHGPDGAKDMCVAGAIANFTSQLLHYRHGSADRRYNLTEALLFLSHFMGDVHQPMHVGFTSDQGGNSIELRWFRHKSNLHHVWDREIIQTALADFYGKDMDAFRKQLEHNLTKGTWSDDVSAWTDCQDLSSCPTKYATESIGLACKWAYSGVREGETLSDDYFDSRLPIVSRRIAQGGVRLAMFLNRIFGAHNRDVPPPSS

SEQ ID NO: 26341 - protein, 192 aa, Zea mays subsp. mays
  peptide (1)..(192): Ceres Seq. ID no. 12363227
  misc_feature (1)..(191): NCBI GI NO: 3551956 NR Description: senescence-associated protein 6
  misc_feature (1)..(182): NCBI GI NO: 3242447 NR Description: endonuclease [Zinnia elegans]
  misc_feature (1)..(182): NCBI GI NO: 7229711 NR Description: CEL I mismatch endonuclease [Apium graveolens]
  misc_feature (1)..(180): NCBI GI NO: 15220307 NR Description: bifunctional nuclease bfn1; protein id:At1g11190
  misc_feature (1)..(180): NCBI GI NO: 4099831 NR Description: bifunctional nuclease bfn1 [Arabidopsis thaliana]
  misc_feature (69)..(191): NCBI GI NO: 39545743 NR Description: OSJNBb0034I13.4
  misc_feature (24)..(44): NCBI GI NO: 39545743 NR Description: OSJNBb0034I13.4
  misc_feature (1)..(181): NCBI GI NO: 15221343 NR Description: putative bifunctional nuclease
  misc_feature (1)..(181): NCBI GI NO: 21554516 NR Description: putative bifunctional nuclease
  misc_feature (1)..(181): NCBI GI NO: 4099833 NR Description: bifunctional nuclease [Zinnia elegans]
MCVAGAIANFTSQLLHYRHGSADRRYNLTEALLFLSHFMGDVHQPMHVGFTSDQGGNSIELRWFRHKSNLHHVWDREIIQTALADFYGKDMDAFRKQLEHNLTKGTWSDDVSAWTDCQDLSSCPTKYATESIGLACKWAYSGVREGETLSDDYFDSRLPIVSRRIAQGGVRLAMFLNRIFGAHNRDVPPPSS

SEQ ID NO: 26342 - DNA, 683 bp, Zea mays subsp. mays
  misc_feature (1)..(683): Ceres Seq. ID no. 12346028
acgcatccgcgaaatccaagagcagcagcagcagcagaccaagatcgagggagggaggaagacagacagacagacagagagatggagcggatgagctcgtcggtgcagtcctgggtggaggaacacaagctctcgtccatcggagccgtgtgggcgacggcggtgggcgcgtccgtggcgtacagccggcggagggcgccggcgcgggccacgagcctgcgcctcatccacgccaggatgcacgcccaggcgctcacgctcgccgtgctcgggggagccgcgctcgcgcaccgctattacggcagcagcgagaggaggcagaggcaggaggacctggactacggcttcaaatcccagctgccgccggccaccgacgccgagggcaacgagaacgagcgctggagctggtagtggcagggcagactagcagtgagtgaccagtgagccttcagatgcatacatcagatcagagagaaggaaggaagagggacaataaatagattaattagtactagtagcaataataataattgcatgcctgtttgccaatcaatgatacatgacgtggcgcctgatcctgttcgtcacggcccataaacccaggaagcagctagcccatgtatgtgtggcctgttatgcgttaccgtacttcgttttcactcgttaatagtactctagatttc

SEQ ID NO: 26343 - protein, 144 aa, Zea mays subsp. mays
  peptide (1)..(144): Ceres Seq. ID no. 12346029
ASAKSKSSSSSRPRSREGGRQTDRQRDGADELVGAVLGGGTQALVHRSRVGDGGGRVRGVQPAEGAGAGHEPAPHPRQDARPGAHARRARGSRARAPLLRQQREEAEAGGPGLRLQIPAAAGHRRRGQRERALELVVAGQTSSE

SEQ ID NO: 26344 - protein, 136 aa, Zea mays subsp. mays
  peptide (1)..(136): Ceres Seq. ID no. 12346030
  misc_feature (33)..(94): Pfam Name: Pfam Description:  Hypoxia induced protein conserved region
  misc_feature (33)..(100): NCBI GI NO: 15241035 NR Description: putative protein; protein id: At5g27760
  misc_feature (27)..(108): NCBI GI NO: 15230007 NR Description: unknown protein; protein id: At3g05550.1
  misc_feature (28)..(67): NCBI GI NO: 3282394 NR Description: anaerobically inducible early gene 2
THPRNPRAAAAADQDRGREEDRQTDREMERMSSSVQSWVEEHKLSSIGAVWATAVGASVAYSRRRAPARATSLRLIHARMHAQALTLAVLGGAALAHRYYGSSERRQRQEDLDYGFKSQLPPATDAEGNENERWSW

SEQ ID NO: 26345 - protein, 109 aa, Zea mays subsp. mays
  peptide (1)..(109): Ceres Seq. ID no. 12346031
  misc_feature (6)..(67): Pfam Name: Pfam Description:  Hypoxia induced protein conserved region
  misc_feature (6)..(73): NCBI GI NO: 15241035 NR Description: putative protein; protein id: At5g27760
  misc_feature (1)..(81): NCBI GI NO: 15230007 NR Description: unknown protein; protein id: At3g05550.1
  misc_feature (1)..(40): NCBI GI NO: 3282394 NR Description: anaerobically inducible early gene 2
MERMSSSVQSWVEEHKLSSIGAVWATAVGASVAYSRRRAPARATSLRLIHARMHAQALTLAVLGGAALAHRYYGSSERRQRQEDLDYGFKSQLPPATDAEGNENERWSW

SEQ ID NO: 26346 - DNA, 1448 bp, Zea mays subsp. mays
  misc_feature (1)..(1448): Ceres Seq. ID no. 12373281
atatccccgcagtttctagctcgattccccaaccgccgtgcttccgctctcgcaccgcgtcttccttgttcgtgtgctccttcctcagacccaggctcttcccgagtccgaatccgagtctgagatccagatccgcgctcagatccatcgctggggggcgccatgaacccgacgcgccccgcgcaggcgtcgttccgcgaccgtaccaacgagttccgcgccgcagttgagagcgcgcgccgccacgctgcaccttcctcgtcgtcggcccccaccgcggcgagcagcagctctaccgggtccctcgacgggatgatctcggccacgtcggctcgctcggagttcaacaaccgcgcgtccaagatcgggctcgggatccaccagacctcccagaagctagcccgccttgccaaattggcaaagagaacgtctgtttttgatgatcctacattagagattcaagagctgacctcagttatcaaaaaggatatcacggctttgaatactgctgtcgtagacctacaagctctctgcaattcacaaaatgagagtggcagtctctccaaggacacaacaaaccattccactacagtcgtggacaaccttaaaaatcgtctgatgagtgcaacaaaagaatttaaagaagttcttaccatgcgaaccgagaatttgaaggttcatgaaaatagaaggcaaatattttcttcgtcagctgcaaaggatgagtcaaatccattcatccgtcaacgaccccttgttgctagggatccatcggagtcctctgtgcccccagcaccatgggccagcgactctgcatctaccccactattccagaggaagaagactaatggagatcatggagcatcatcatcatctcagcctttcgtgcagcagcagcaattggcagtacaacaggacagttacatgcagagcagagctgaagctctacaaaatgtggaatcaacaatccatgagctgagcaacatctttacacagttggcaaccatggtttctcaacagggagagctagcaatcagaatcgacgagaacatggaggaaaccgtggctaacgtggagggagcgcagggccagctcctgaagtacctcaacagcatttcgtccaacaggtggctgatgatgaagatattctttgtgctgatggtgttcctcatgatcttcatattcttcgtcgcttgaccttctgcaatcattctgcccgagacgctctggctgctaaacgcatagcattcttttatttttaactcatactacaccgtgtacacaattttcacccatggatgatgagcagagtcgttcacccttttgtggtcatgtaaatcgggaggagttccagtacttaagtttactcttgattggtaatatctccactgtatttgatgtatcagtatgctgaacagtaatagtaataggcaggtggtagcagtgtt

SEQ ID NO: 26347 - protein, 344 aa, Zea mays subsp. mays
  peptide (1)..(344): Ceres Seq. ID no. 12373282
  misc_feature (257)..(319): Pfam Name: Pfam Description:  SNARE domain
  misc_feature (1)..(344): NCBI GI NO: 34906154 NR Description: putative t-SNARE SED5
  misc_feature (5)..(344): NCBI GI NO: 30687459 NR Description: syntaxin of plants SYP32 [Arabidopsis thaliana]
  misc_feature (9)..(344): NCBI GI NO: 15239228 NR Description: syntaxin SYP31; protein id: At5g05760
  misc_feature (9)..(344): NCBI GI NO: 2981439 NR Description: syntaxin of plants 31 [Arabidopsis thaliana]
  misc_feature (10)..(340): NCBI GI NO: 40747582 NR Description: hypothetical protein AN9526.2
  misc_feature (10)..(340): NCBI GI NO: 32490453 NR Description: syntaxin homologue [Aspergillus oryzae]
  misc_feature (40)..(344): NCBI GI NO: 20148780 NR Description: syntaxin 5 [Phytophthora sojae]
  misc_feature (11)..(344): NCBI GI NO: 28829569 NR Description: similar to syntaxin 5
  misc_feature (59)..(344): NCBI GI NO: 542593 NR Description: SED5 protein - fruit fly
  misc_feature (59)..(344): NCBI GI NO: 24584581 NR Description: Syntaxin 5 CG4214-PA
MNPTRPAQASFRDRTNEFRAAVESARRHAAPSSSSAPTAASSSSTGSLDGMISATSARSEFNNRASKIGLGIHQTSQKLARLAKLAKRTSVFDDPTLEIQELTSVIKKDITALNTAVVDLQALCNSQNESGSLSKDTTNHSTTVVDNLKNRLMSATKEFKEVLTMRTENLKVHENRRQIFSSSAAKDESNPFIRQRPLVARDPSESSVPPAPWASDSASTPLFQRKKTNGDHGASSSSQPFVQQQQLAVQQDSYMQSRAEALQNVESTIHELSNIFTQLATMVSQQGELAIRIDENMEETVANVEGAQGQLLKYLNSISSNRWLMMKIFFVLMVFLMIFIFFVA

SEQ ID NO: 26348 - protein, 294 aa, Zea mays subsp. mays
  peptide (1)..(294): Ceres Seq. ID no. 12373283
  misc_feature (207)..(269): Pfam Name: Pfam Description:  SNARE domain
  misc_feature (1)..(294): NCBI GI NO: 34906154 NR Description: putative t-SNARE SED5
  misc_feature (1)..(294): NCBI GI NO: 30687459 NR Description: syntaxin of plants SYP32 [Arabidopsis thaliana]
  misc_feature (1)..(294): NCBI GI NO: 15239228 NR Description: syntaxin SYP31; protein id: At5g05760
  misc_feature (1)..(294): NCBI GI NO: 2981439 NR Description: syntaxin of plants 31 [Arabidopsis thaliana]
  misc_feature (1)..(290): NCBI GI NO: 40747582 NR Description: hypothetical protein AN9526.2
  misc_feature (1)..(290): NCBI GI NO: 32490453 NR Description: syntaxin homologue [Aspergillus oryzae]
  misc_feature (1)..(294): NCBI GI NO: 20148780 NR Description: syntaxin 5 [Phytophthora sojae]
  misc_feature (1)..(294): NCBI GI NO: 28829569 NR Description: similar to syntaxin 5
  misc_feature (9)..(294): NCBI GI NO: 542593 NR Description: SED5 protein - fruit fly
  misc_feature (9)..(294): NCBI GI NO: 24584581 NR Description: Syntaxin 5 CG4214-PA
MISATSARSEFNNRASKIGLGIHQTSQKLARLAKLAKRTSVFDDPTLEIQELTSVIKKDITALNTAVVDLQALCNSQNESGSLSKDTTNHSTTVVDNLKNRLMSATKEFKEVLTMRTENLKVHENRRQIFSSSAAKDESNPFIRQRPLVARDPSESSVPPAPWASDSASTPLFQRKKTNGDHGASSSSQPFVQQQQLAVQQDSYMQSRAEALQNVESTIHELSNIFTQLATMVSQQGELAIRIDENMEETVANVEGAQGQLLKYLNSISSNRWLMMKIFFVLMVFLMIFIFFVA

SEQ ID NO: 26349 - protein, 192 aa, Zea mays subsp. mays
  peptide (1)..(192): Ceres Seq. ID no. 12373284
  misc_feature (105)..(167): Pfam Name: Pfam Description:  SNARE domain
  misc_feature (1)..(192): NCBI GI NO: 34906154 NR Description: putative t-SNARE SED5
  misc_feature (1)..(192): NCBI GI NO: 30687459 NR Description: syntaxin of plants SYP32 [Arabidopsis thaliana]
  misc_feature (1)..(192): NCBI GI NO: 15239228 NR Description: syntaxin SYP31; protein id: At5g05760
  misc_feature (1)..(192): NCBI GI NO: 2981439 NR Description: syntaxin of plants 31 [Arabidopsis thaliana]
  misc_feature (1)..(188): NCBI GI NO: 40747582 NR Description: hypothetical protein AN9526.2
  misc_feature (1)..(188): NCBI GI NO: 32490453 NR Description: syntaxin homologue [Aspergillus oryzae]
  misc_feature (1)..(192): NCBI GI NO: 20148780 NR Description: syntaxin 5 [Phytophthora sojae]
  misc_feature (1)..(192): NCBI GI NO: 28829569 NR Description: similar to syntaxin 5
  misc_feature (1)..(192): NCBI GI NO: 542593 NR Description: SED5 protein - fruit fly
  misc_feature (1)..(192): NCBI GI NO: 24584581 NR Description: Syntaxin 5 CG4214-PA
MSATKEFKEVLTMRTENLKVHENRRQIFSSSAAKDESNPFIRQRPLVARDPSESSVPPAPWASDSASTPLFQRKKTNGDHGASSSSQPFVQQQQLAVQQDSYMQSRAEALQNVESTIHELSNIFTQLATMVSQQGELAIRIDENMEETVANVEGAQGQLLKYLNSISSNRWLMMKIFFVLMVFLMIFIFFVA

SEQ ID NO: 26350 - DNA, 1974 bp, Zea mays subsp. mays
  misc_feature (1)..(1974): Ceres Seq. ID no. 12356209
atgccattccgtggtcccgaacgacgccctcgctcgtgcactctctggtctctttctcttcgcctgaccctgagcacagcgccacagacacaacaacctcggactcgggagtacgtgtagctaggcccgatcggtcgagactgagtgcctgccgtgccgagacaggatgaccaaagccaaactggccttctggctcggatggattgctctcctgcaaggctgcatggtgaaatcatctctcccgtacgagtacgactactctgcaagcatcgagtgcttgccggagccgctggagccgcagtacggcgggggcgtcctccgcaacgccgacttcagcgcgggcctgcggggctggtccgccttcggctacggcagcatcgccgagagcacgtcggcggcgggcaacgggttcgccgtcgcgctcaaccggacgcggccgtaccagagcgtcagccagaaggtgtacctgcaggccgacacgcactacaccctctccgcgtggttgcaggtcagcgacggaggcgccgacgtgcgggccgtcgtcaagaccgtcggtgacttcgtccacgccggcggcggcgtcgccaaggccgggtgctggtccatgctcaagggcggcctcaccgccgcgtcttcgggtcctgccgagctctacttcgagagcaacgctacggtggacctgtgggtggacagcgtctcgctcaagcccttctccaaggacgagtggacggcgcaccgcgccgagtccgtgtccgcggcgcgcaagaaggcggtgaggctccaggcgacggactccgcggggaatccgctggagggcgcggcggtgtccctggacgcggtccggaccaacttcccgctgggcgcggccgtgagccggtacatcctcaccaactcggcgtaccagacgtggttcgcgtcccggttcgcggtggccaccttcgagaacgagatgaagtggtacagcacggagcctgcgccgggccaagaggactacacggtcccggacgccatgatggcgttcgccaagtccaacggcatcgccgtgcgcggccacaacgtgttctgggaccagcccagccagcagccccggtgggtgcagtcgctgccgtacccgcagctgctggcggcggcgtcgcgccgcatccgctccgtagtgtcgcgctacgccggccaggtcatcggctgggacgtcgtcaacgagaacctgcacttcaacttctacgagggccgcttcggctgggacgcgtccaccgccttctacgccgccgcgcgcctgctggacgccggctccgcgctcatgttcatgaacgagttcaacaccgtggagcagccgggcgacatggccgcgctgccggcgaggtacctgcagcgcctgcagcagatcatcgccgcctacccggagaacggcgccgggatggccatcggcctcgagggccacttcaccaccaaccccaacatcccgtacatgcgcgccgccctcgacaccctcgcccaggccggcatccccgtctggctcaccgaggtcgacgtcgcgccgggcccgtcgcaggcgcagcacctcgaggaggtgctgcgcgaggcgtacgcgcacccggcggtgcaggggatcgtcatctggtcggcgtggcggcccgaggggtgctacgtcatgtgcctcaccgacaacagcttcaacaacctgccgcagggggacgtcgtggaccgcctcatcgccgagtggcgggcgactccgcgggccggctccacggacgcgcagggctacttcgaggccgagctcgtccacggcgagtataaggtcaccgtcagccacccggcgctcaacagctccatctcccggagcgtcaaggtggagctgggctcagggagtgaccactacttcattgacatgcaggtctagaccaactggttcatcagttgctaggtgtaatgtaatgtaagattacctgctgttgtcacagaactgtgaaagcttag

SEQ ID NO: 26351 - protein, 576 aa, Zea mays subsp. mays
  peptide (1)..(576): Ceres Seq. ID no. 12356210
  misc_feature (220)..(515): Pfam Name: Pfam Description:  Glycosyl hydrolase family 10
  misc_feature (29)..(568): NCBI GI NO: 23429644 NR Description: endoxylanase [Carica papaya]
  misc_feature (5)..(576): NCBI GI NO: 40363757 NR Description: putative 1,4-beta-xylanase [Triticum aestivum]
  misc_feature (44)..(576): NCBI GI NO: 37533260 NR Description: putative 1,4-beta-xylanase
  misc_feature (22)..(556): NCBI GI NO: 30689830 NR Description: glycosyl hydrolase family 10
  misc_feature (42)..(576): NCBI GI NO: 37533262 NR Description: putative 1,4-beta-xylanase
  misc_feature (30)..(556): NCBI GI NO: 7485619 NR Description: hypothetical protein F17I5
  misc_feature (37)..(569): NCBI GI NO: 15235131 NR Description: glycosyl hydrolase family 10; protein id:At4g33830
  misc_feature (35)..(561): NCBI GI NO: 15235134 NR Description: glycosyl hydrolase family 10; protein id:At4g33860
  misc_feature (1)..(561): NCBI GI NO: 22329138 NR Description: glycosyl hydrolase family 10; protein id:At4g33820
  misc_feature (147)..(355): NCBI GI NO: 22329142 NR Description: glycosyl hydrolase family 10; protein id:At4g33850
MTKAKLAFWLGWIALLQGCMVKSSLPYEYDYSASIECLPEPLEPQYGGGVLRNADFSAGLRGWSAFGYGSIAESTSAAGNGFAVALNRTRPYQSVSQKVYLQADTHYTLSAWLQVSDGGADVRAVVKTVGDFVHAGGGVAKAGCWSMLKGGLTAASSGPAELYFESNATVDLWVDSVSLKPFSKDEWTAHRAESVSAARKKAVRLQATDSAGNPLEGAAVSLDAVRTNFPLGAAVSRYILTNSAYQTWFASRFAVATFENEMKWYSTEPAPGQEDYTVPDAMMAFAKSNGIAVRGHNVFWDQPSQQPRWVQSLPYPQLLAAASRRIRSVVSRYAGQVIGWDVVNENLHFNFYEGRFGWDASTAFYAAARLLDAGSALMFMNEFNTVEQPGDMAALPARYLQRLQQIIAAYPENGAGMAIGLEGHFTTNPNIPYMRAALDTLAQAGIPVWLTEVDVAPGPSQAQHLEEVLREAYAHPAVQGIVIWSAWRPEGCYVMCLTDNSFNNLPQGDVVDRLIAEWRATPRAGSTDAQGYFEAELVHGEYKVTVSHPALNSSISRSVKVELGSGSDHYFIDMQV

SEQ ID NO: 26352 - protein, 557 aa, Zea mays subsp. mays
  peptide (1)..(557): Ceres Seq. ID no. 12356211
  misc_feature (201)..(496): Pfam Name: Pfam Description:  Glycosyl hydrolase family 10
  misc_feature (10)..(549): NCBI GI NO: 23429644 NR Description: endoxylanase [Carica papaya]
  misc_feature (1)..(557): NCBI GI NO: 40363757 NR Description: putative 1,4-beta-xylanase [Triticum aestivum]
  misc_feature (25)..(557): NCBI GI NO: 37533260 NR Description: putative 1,4-beta-xylanase
  misc_feature (3)..(537): NCBI GI NO: 30689830 NR Description: glycosyl hydrolase family 10
  misc_feature (23)..(557): NCBI GI NO: 37533262 NR Description: putative 1,4-beta-xylanase
  misc_feature (11)..(537): NCBI GI NO: 7485619 NR Description: hypothetical protein F17I5
  misc_feature (18)..(550): NCBI GI NO: 15235131 NR Description: glycosyl hydrolase family 10; protein id:At4g33830
  misc_feature (16)..(542): NCBI GI NO: 15235134 NR Description: glycosyl hydrolase family 10; protein id:At4g33860
  misc_feature (1)..(542): NCBI GI NO: 22329138 NR Description: glycosyl hydrolase family 10; protein id:At4g33820
  misc_feature (128)..(336): NCBI GI NO: 22329142 NR Description: glycosyl hydrolase family 10; protein id:At4g33850
MVKSSLPYEYDYSASIECLPEPLEPQYGGGVLRNADFSAGLRGWSAFGYGSIAESTSAAGNGFAVALNRTRPYQSVSQKVYLQADTHYTLSAWLQVSDGGADVRAVVKTVGDFVHAGGGVAKAGCWSMLKGGLTAASSGPAELYFESNATVDLWVDSVSLKPFSKDEWTAHRAESVSAARKKAVRLQATDSAGNPLEGAAVSLDAVRTNFPLGAAVSRYILTNSAYQTWFASRFAVATFENEMKWYSTEPAPGQEDYTVPDAMMAFAKSNGIAVRGHNVFWDQPSQQPRWVQSLPYPQLLAAASRRIRSVVSRYAGQVIGWDVVNENLHFNFYEGRFGWDASTAFYAAARLLDAGSALMFMNEFNTVEQPGDMAALPARYLQRLQQIIAAYPENGAGMAIGLEGHFTTNPNIPYMRAALDTLAQAGIPVWLTEVDVAPGPSQAQHLEEVLREAYAHPAVQGIVIWSAWRPEGCYVMCLTDNSFNNLPQGDVVDRLIAEWRATPRAGSTDAQGYFEAELVHGEYKVTVSHPALNSSISRSVKVELGSGSDHYFIDMQV

SEQ ID NO: 26353 - protein, 430 aa, Zea mays subsp. mays
  peptide (1)..(430): Ceres Seq. ID no. 12356212
  misc_feature (74)..(369): Pfam Name: Pfam Description:  Glycosyl hydrolase family 10
  misc_feature (1)..(422): NCBI GI NO: 23429644 NR Description: endoxylanase [Carica papaya]
  misc_feature (1)..(430): NCBI GI NO: 40363757 NR Description: putative 1,4-beta-xylanase [Triticum aestivum]
  misc_feature (1)..(430): NCBI GI NO: 37533260 NR Description: putative 1,4-beta-xylanase
  misc_feature (1)..(410): NCBI GI NO: 30689830 NR Description: glycosyl hydrolase family 10
  misc_feature (1)..(430): NCBI GI NO: 37533262 NR Description: putative 1,4-beta-xylanase
  misc_feature (1)..(410): NCBI GI NO: 7485619 NR Description: hypothetical protein F17I5
  misc_feature (1)..(423): NCBI GI NO: 15235131 NR Description: glycosyl hydrolase family 10; protein id:At4g33830
  misc_feature (1)..(415): NCBI GI NO: 15235134 NR Description: glycosyl hydrolase family 10; protein id:At4g33860
  misc_feature (1)..(415): NCBI GI NO: 22329138 NR Description: glycosyl hydrolase family 10; protein id:At4g33820
  misc_feature (1)..(209): NCBI GI NO: 22329142 NR Description: glycosyl hydrolase family 10; protein id:At4g33850
MLKGGLTAASSGPAELYFESNATVDLWVDSVSLKPFSKDEWTAHRAESVSAARKKAVRLQATDSAGNPLEGAAVSLDAVRTNFPLGAAVSRYILTNSAYQTWFASRFAVATFENEMKWYSTEPAPGQEDYTVPDAMMAFAKSNGIAVRGHNVFWDQPSQQPRWVQSLPYPQLLAAASRRIRSVVSRYAGQVIGWDVVNENLHFNFYEGRFGWDASTAFYAAARLLDAGSALMFMNEFNTVEQPGDMAALPARYLQRLQQIIAAYPENGAGMAIGLEGHFTTNPNIPYMRAALDTLAQAGIPVWLTEVDVAPGPSQAQHLEEVLREAYAHPAVQGIVIWSAWRPEGCYVMCLTDNSFNNLPQGDVVDRLIAEWRATPRAGSTDAQGYFEAELVHGEYKVTVSHPALNSSISRSVKVELGSGSDHYFIDMQV

SEQ ID NO: 26354 - DNA, 1648 bp, Zea mays subsp. mays
  misc_feature (1)..(1648): Ceres Seq. ID no. 12352702
gtcctgcagtctccatggccgccgcagtcgacaccgcggccgtggcgggcgcgaccgggaggctcagggtgttcttcctgccctccttcatccggggacacctcatcccgcagaccgacatggcgtgccgcgtcgccgcggcaaggcccgcggaggtggaggcgaccgtggtcgtgacgccggccaacgcggccctcatcgcgccgaccgtggcgcgcgccgcggccgccggccacgccgtgcgcgtgctctgctacccgttcccggacgtcggcctcggggagggcgtggagtgcctcgccaccgccaccgcgcgcgacgcgtggcgcgtctaccgcgccatggaggtggtgcagccgtcccacgagtcgctgctccgggaccaccgccccgacgccatcgtcgccgacgtgccgttctggtggaccaccggtgtcgccgccgagctcggggtgccgcgcctcacgttccaccctgtcggaatcttcgctctgctcgccatgaacagcctgttcaccatacggcccgacatcatcggccgggccagctccgacgccgctgggacggtgctgtccgtgccgggcttgcccgggaaggagatcacgatcccggtgtccgagctcccgaccttcttggtccaggacgaccacctctccaaggcgtggcagcggatgagggcgtgccagctcactggcttcggcgtcatcgtcaacaccttcgccgacctggagcagccctactgcgaggaattcagccgcgtggaggcgcgccgcgcctacttcgtcgggcccctgggaaagccatcgcgctccaccatgcaccgcggcggcagcggcaacgcggactgcctgagctggttgtccaccaaaccgagccggtcggtagtgttcgtctgcttcgggagctgggccgagttctcagcgactcagacaagagagctcgccctggggctcgaggcgtcgaaccagccattcctgtgggttgtccgctccaatgactccagcgatgaccagtgggcaccggagggctgggagcagcgcgtcgccaaccgtggcctggtcgtccacggatgggccccgcagctggccgttctggcccacccgtcggtgggcgcgttcgtgacgcactgcggttggaactcggtcctcgaagccgcgtccgccggcgtgccggtgctcacgtggccgttagtgttcgagcagttcatcaacgagcggctggccaccgaggtggccgccttcggcgtgcgcctgtgggacggcggcaggcgcagcgagagggccgaggatgcggagatcgtgccggcggaggcgatcgcgcgggccgtggccggtttcatggaaggcggagagcagcgcgacaagttgaacgccagggccggggaactagcggagcgcgcgcgcgccgctgtcagtgaggacgggtcgtcgtggcgtgacataaaccgcctgatcgatgatctcctgcaggcgagagcgtcagggctgccacaaatgaattccgtccagcttgagtgatttaaattattctacacagacattgtacgcaaatgcaaggctaaaaataaagagtgaagttaaggtggtgtttggttcatctaaatgtaacgtaaatagtttacatgggtaatggataccgctaattttgt

SEQ ID NO: 26355 - protein, 504 aa, Zea mays subsp. mays
  peptide (1)..(504): Ceres Seq. ID no. 12352703
  misc_feature (23)..(487): Pfam Name: Pfam Description:  UDP-glucoronosyl and UDP-glucosyl transferase
  misc_feature (10)..(498): NCBI GI NO: 30017585 NR Description: putative immediate-early salicylate-inducedglucosyltransferase
  misc_feature (5)..(493): NCBI GI NO: 30103010 NR Description: putative immediate-early salicylate-inducedglucosyltransferase
  misc_feature (21)..(493): NCBI GI NO: 15290056 NR Description: putative glucosyltransferase IS5a
  misc_feature (20)..(487): NCBI GI NO: 27530875 NR Description: anthocyanin 3'-glucosyltransferase
  misc_feature (19)..(494): NCBI GI NO: 7433906 NR Description: glucosyltransferase IS5a (EC 2
  misc_feature (19)..(494): NCBI GI NO: 13492674 NR Description: phenylpropanoid:glucosyltransferase 1
  misc_feature (19)..(494): NCBI GI NO: 7433905 NR Description: glucosyltransferase IS10a (EC 2
  misc_feature (19)..(494): NCBI GI NO: 13492676 NR Description: phenylpropanoid:glucosyltransferase 2
  misc_feature (19)..(487): NCBI GI NO: 5763524 NR Description: UDP-glucose: flavonoid 7-O-glucosyltransferase
  misc_feature (24)..(491): NCBI GI NO: 7433911 NR Description: probable glucosyltransferase twi1 (EC 2
PAVSMAAAVDTAAVAGATGRLRVFFLPSFIRGHLIPQTDMACRVAAARPAEVEATVVVTPANAALIAPTVARAAAAGHAVRVLCYPFPDVGLGEGVECLATATARDAWRVYRAMEVVQPSHESLLRDHRPDAIVADVPFWWTTGVAAELGVPRLTFHPVGIFALLAMNSLFTIRPDIIGRASSDAAGTVLSVPGLPGKEITIPVSELPTFLVQDDHLSKAWQRMRACQLTGFGVIVNTFADLEQPYCEEFSRVEARRAYFVGPLGKPSRSTMHRGGSGNADCLSWLSTKPSRSVVFVCFGSWAEFSATQTRELALGLEASNQPFLWVVRSNDSSDDQWAPEGWEQRVANRGLVVHGWAPQLAVLAHPSVGAFVTHCGWNSVLEAASAGVPVLTWPLVFEQFINERLATEVAAFGVRLWDGGRRSERAEDAEIVPAEAIARAVAGFMEGGEQRDKLNARAGELAERARAAVSEDGSSWRDINRLIDDLLQARASGLPQMNSVQLE

SEQ ID NO: 26356 - protein, 500 aa, Zea mays subsp. mays
  peptide (1)..(500): Ceres Seq. ID no. 12352704
  misc_feature (19)..(483): Pfam Name: Pfam Description:  UDP-glucoronosyl and UDP-glucosyl transferase
  misc_feature (6)..(494): NCBI GI NO: 30017585 NR Description: putative immediate-early salicylate-inducedglucosyltransferase
  misc_feature (1)..(489): NCBI GI NO: 30103010 NR Description: putative immediate-early salicylate-inducedglucosyltransferase
  misc_feature (17)..(489): NCBI GI NO: 15290056 NR Description: putative glucosyltransferase IS5a
  misc_feature (16)..(483): NCBI GI NO: 27530875 NR Description: anthocyanin 3'-glucosyltransferase
  misc_feature (15)..(490): NCBI GI NO: 7433906 NR Description: glucosyltransferase IS5a (EC 2
  misc_feature (15)..(490): NCBI GI NO: 13492674 NR Description: phenylpropanoid:glucosyltransferase 1
  misc_feature (15)..(490): NCBI GI NO: 7433905 NR Description: glucosyltransferase IS10a (EC 2
  misc_feature (15)..(490): NCBI GI NO: 13492676 NR Description: phenylpropanoid:glucosyltransferase 2
  misc_feature (15)..(483): NCBI GI NO: 5763524 NR Description: UDP-glucose: flavonoid 7-O-glucosyltransferase
  misc_feature (20)..(487): NCBI GI NO: 7433911 NR Description: probable glucosyltransferase twi1 (EC 2
MAAAVDTAAVAGATGRLRVFFLPSFIRGHLIPQTDMACRVAAARPAEVEATVVVTPANAALIAPTVARAAAAGHAVRVLCYPFPDVGLGEGVECLATATARDAWRVYRAMEVVQPSHESLLRDHRPDAIVADVPFWWTTGVAAELGVPRLTFHPVGIFALLAMNSLFTIRPDIIGRASSDAAGTVLSVPGLPGKEITIPVSELPTFLVQDDHLSKAWQRMRACQLTGFGVIVNTFADLEQPYCEEFSRVEARRAYFVGPLGKPSRSTMHRGGSGNADCLSWLSTKPSRSVVFVCFGSWAEFSATQTRELALGLEASNQPFLWVVRSNDSSDDQWAPEGWEQRVANRGLVVHGWAPQLAVLAHPSVGAFVTHCGWNSVLEAASAGVPVLTWPLVFEQFINERLATEVAAFGVRLWDGGRRSERAEDAEIVPAEAIARAVAGFMEGGEQRDKLNARAGELAERARAAVSEDGSSWRDINRLIDDLLQARASGLPQMNSVQLE

SEQ ID NO: 26357 - protein, 465 aa, Zea mays subsp. mays
  peptide (1)..(465): Ceres Seq. ID no. 12352705
  misc_feature (1)..(448): Pfam Name: Pfam Description:  UDP-glucoronosyl and UDP-glucosyl transferase
  misc_feature (1)..(459): NCBI GI NO: 30017585 NR Description: putative immediate-early salicylate-inducedglucosyltransferase
  misc_feature (1)..(454): NCBI GI NO: 30103010 NR Description: putative immediate-early salicylate-inducedglucosyltransferase
  misc_feature (1)..(454): NCBI GI NO: 15290056 NR Description: putative glucosyltransferase IS5a
  misc_feature (1)..(448): NCBI GI NO: 27530875 NR Description: anthocyanin 3'-glucosyltransferase
  misc_feature (1)..(455): NCBI GI NO: 7433906 NR Description: glucosyltransferase IS5a (EC 2
  misc_feature (1)..(455): NCBI GI NO: 13492674 NR Description: phenylpropanoid:glucosyltransferase 1
  misc_feature (1)..(455): NCBI GI NO: 7433905 NR Description: glucosyltransferase IS10a (EC 2
  misc_feature (1)..(455): NCBI GI NO: 13492676 NR Description: phenylpropanoid:glucosyltransferase 2
  misc_feature (1)..(448): NCBI GI NO: 5763524 NR Description: UDP-glucose: flavonoid 7-O-glucosyltransferase
  misc_feature (1)..(452): NCBI GI NO: 7433911 NR Description: probable glucosyltransferase twi1 (EC 2
MACRVAAARPAEVEATVVVTPANAALIAPTVARAAAAGHAVRVLCYPFPDVGLGEGVECLATATARDAWRVYRAMEVVQPSHESLLRDHRPDAIVADVPFWWTTGVAAELGVPRLTFHPVGIFALLAMNSLFTIRPDIIGRASSDAAGTVLSVPGLPGKEITIPVSELPTFLVQDDHLSKAWQRMRACQLTGFGVIVNTFADLEQPYCEEFSRVEARRAYFVGPLGKPSRSTMHRGGSGNADCLSWLSTKPSRSVVFVCFGSWAEFSATQTRELALGLEASNQPFLWVVRSNDSSDDQWAPEGWEQRVANRGLVVHGWAPQLAVLAHPSVGAFVTHCGWNSVLEAASAGVPVLTWPLVFEQFINERLATEVAAFGVRLWDGGRRSERAEDAEIVPAEAIARAVAGFMEGGEQRDKLNARAGELAERARAAVSEDGSSWRDINRLIDDLLQARASGLPQMNSVQLE

SEQ ID NO: 26358 - DNA, 1578 bp, Zea mays subsp. mays
  misc_feature (1)..(1578): Ceres Seq. ID no. 13492685
attcgatcgcctcacccgaagcacatcccgtcgcatcccatcccactaccacccatctcgtcgtccgccgattcgatccggttcttccaacccaggggcagtgatggcgacgaagaggagcgtgggcaccctcggcgaggcggatctgaaggggaagaaggtgttcgtgcgcgccgacctcaacgtcccgctcgacgatgcccagaagatcaccgacgacacccgcatccgcgcctccgtccccaccatcaagttcctcctcgagaagggcgccaaggtcatcctcgccagccacctgggtcgtccaaaaggtgtcaccccaaagtacagcttgaagcctcttgttccacgcttgtctgagctccttggagttgaagtcgtgatggccaatgattgcattggtgaggaagtcgagaagttggctgccgctttgccagaaggtggagttctgctcctagagaatgttagattctacaaggaggaagagaagaacgaacctgagtttgctaagaagcttgcatctgttgctgacctttatgtcaatgatgcttttggcacggcacacagagctcatgcttcaaccgaaggagttaccaagtatttgaagcctgctgttgctggcttcctcatgcagaaggaacttgactaccttgttggagctgttgccaacccaaagaagccatttgccgccattgttggtggatccaaggtctcaactaagattggtgtcattgagtcgttgctggcgaaggtcgatatcctcatccttggtggtggtatgatctacacattttacaaggcacagggatattctgttggaaaatctctcgtggaagaggataaactcgagctcgcaacttctcttattgagaaggcgaaggcaaagggggtttctcttttgcttcccactgatattgtagtagcggacaagtttgcagccgatgctgagagcaagattgtccctgccactgctatccctgatgactggatgggtcttgatgttggccctgatgccaccaaaacattcgacgaagcattggacaccaccaagactgttatttggaacggccccatgggagtgtttgagttccagaagtttgcagctggcaccgaggcgattgccaagaagctagctgagcttacaaccacgaagggtgtcactaccatcatcggcggtggcgactctgtcgctgctgtcgagaaggctgggctggccgacaagatgagccacatttcgaccggcggcggtgcgagcttggaactcttggaaggcaagactctacctggtgtccttgccctcgatgacgcctagatccgctgctgctgctgctactcaggttctgccagctttgcgtgtcatcttgtttcggaccttggtgtagcactgcaaggctaaggtttactcctccacacatggactttcgaggataggcttgccaccgtgttttgctagatgagtcgtgaaataagcttttacttcctcgctgctgtgggtgaagtgactggaattcggaaatttggaactaacaaaaccccccgtggatttgtatgatacgttttgttcgacagtttgcgtcc

SEQ ID NO: 26359 - protein, 436 aa, Zea mays subsp. mays
  peptide (1)..(436): Ceres Seq. ID no. 13492686
  misc_feature (37)..(436): Pfam Name: Pfam Description:  Phosphoglycerate kinase
  misc_feature (35)..(436): NCBI GI NO: 129916 NR Description: Phosphoglycerate kinase, cytosolic
  misc_feature (35)..(436): NCBI GI NO: 21536853 NR Description: phosphoglycerate kinase, putative
  misc_feature (35)..(436): NCBI GI NO: 15219412 NR Description: phosphoglycerate kinase -related
  misc_feature (35)..(436): NCBI GI NO: 3738257 NR Description: cytosolic phosphoglycerate kinase 1
  misc_feature (35)..(436): NCBI GI NO: 2499498 NR Description: Phosphoglycerate kinase, cytosolic
  misc_feature (35)..(436): NCBI GI NO: 9230771 NR Description: cytosolic phosphoglycerate kinase [Pisum sativum]
  misc_feature (35)..(436): NCBI GI NO: 29124969 NR Description: 3-phosphoglycerate kinase [Populus tremuloides]
  misc_feature (35)..(436): NCBI GI NO: 3738259 NR Description: cytosolic phosphoglycerate kinase 1
  misc_feature (28)..(436): NCBI GI NO: 7434544 NR Description: phosphoglycerate kinase (EC 2
  misc_feature (24)..(435): NCBI GI NO: 3738261 NR Description: chloroplast phosphoglycerate kinase
FDRLTRSTSRRIPSHYHPSRRPPIRSGSSNPGAVMATKRSVGTLGEADLKGKKVFVRADLNVPLDDAQKITDDTRIRASVPTIKFLLEKGAKVILASHLGRPKGVTPKYSLKPLVPRLSELLGVEVVMANDCIGEEVEKLAAALPEGGVLLLENVRFYKEEEKNEPEFAKKLASVADLYVNDAFGTAHRAHASTEGVTKYLKPAVAGFLMQKELDYLVGAVANPKKPFAAIVGGSKVSTKIGVIESLLAKVDILILGGGMIYTFYKAQGYSVGKSLVEEDKLELATSLIEKAKAKGVSLLLPTDIVVADKFAADAESKIVPATAIPDDWMGLDVGPDATKTFDEALDTTKTVIWNGPMGVFEFQKFAAGTEAIAKKLAELTTTKGVTTIIGGGDSVAAVEKAGLADKMSHISTGGGASLELLEGKTLPGVLALDDA

SEQ ID NO: 26360 - protein, 402 aa, Zea mays subsp. mays
  peptide (1)..(402): Ceres Seq. ID no. 13492687
  misc_feature (3)..(402): Pfam Name: Pfam Description:  Phosphoglycerate kinase
  misc_feature (1)..(402): NCBI GI NO: 129916 NR Description: Phosphoglycerate kinase, cytosolic
  misc_feature (1)..(402): NCBI GI NO: 21536853 NR Description: phosphoglycerate kinase, putative
  misc_feature (1)..(402): NCBI GI NO: 15219412 NR Description: phosphoglycerate kinase -related
  misc_feature (1)..(402): NCBI GI NO: 3738257 NR Description: cytosolic phosphoglycerate kinase 1
  misc_feature (1)..(402): NCBI GI NO: 2499498 NR Description: Phosphoglycerate kinase, cytosolic
  misc_feature (1)..(402): NCBI GI NO: 9230771 NR Description: cytosolic phosphoglycerate kinase [Pisum sativum]
  misc_feature (1)..(402): NCBI GI NO: 29124969 NR Description: 3-phosphoglycerate kinase [Populus tremuloides]
  misc_feature (1)..(402): NCBI GI NO: 3738259 NR Description: cytosolic phosphoglycerate kinase 1
  misc_feature (1)..(402): NCBI GI NO: 7434544 NR Description: phosphoglycerate kinase (EC 2
  misc_feature (1)..(401): NCBI GI NO: 3738261 NR Description: chloroplast phosphoglycerate kinase
MATKRSVGTLGEADLKGKKVFVRADLNVPLDDAQKITDDTRIRASVPTIKFLLEKGAKVILASHLGRPKGVTPKYSLKPLVPRLSELLGVEVVMANDCIGEEVEKLAAALPEGGVLLLENVRFYKEEEKNEPEFAKKLASVADLYVNDAFGTAHRAHASTEGVTKYLKPAVAGFLMQKELDYLVGAVANPKKPFAAIVGGSKVSTKIGVIESLLAKVDILILGGGMIYTFYKAQGYSVGKSLVEEDKLELATSLIEKAKAKGVSLLLPTDIVVADKFAADAESKIVPATAIPDDWMGLDVGPDATKTFDEALDTTKTVIWNGPMGVFEFQKFAAGTEAIAKKLAELTTTKGVTTIIGGGDSVAAVEKAGLADKMSHISTGGGASLELLEGKTLPGVLALDDA

SEQ ID NO: 26361 - protein, 309 aa, Zea mays subsp. mays
  peptide (1)..(309): Ceres Seq. ID no. 13492688
  misc_feature (1)..(309): Pfam Name: Pfam Description:  Phosphoglycerate kinase
  misc_feature (1)..(309): NCBI GI NO: 129916 NR Description: Phosphoglycerate kinase, cytosolic
  misc_feature (1)..(309): NCBI GI NO: 21536853 NR Description: phosphoglycerate kinase, putative
  misc_feature (1)..(309): NCBI GI NO: 15219412 NR Description: phosphoglycerate kinase -related
  misc_feature (1)..(309): NCBI GI NO: 3738257 NR Description: cytosolic phosphoglycerate kinase 1
  misc_feature (1)..(309): NCBI GI NO: 2499498 NR Description: Phosphoglycerate kinase, cytosolic
  misc_feature (1)..(309): NCBI GI NO: 9230771 NR Description: cytosolic phosphoglycerate kinase [Pisum sativum]
  misc_feature (1)..(309): NCBI GI NO: 29124969 NR Description: 3-phosphoglycerate kinase [Populus tremuloides]
  misc_feature (1)..(309): NCBI GI NO: 3738259 NR Description: cytosolic phosphoglycerate kinase 1
  misc_feature (1)..(309): NCBI GI NO: 7434544 NR Description: phosphoglycerate kinase (EC 2
  misc_feature (1)..(308): NCBI GI NO: 3738261 NR Description: chloroplast phosphoglycerate kinase
MANDCIGEEVEKLAAALPEGGVLLLENVRFYKEEEKNEPEFAKKLASVADLYVNDAFGTAHRAHASTEGVTKYLKPAVAGFLMQKELDYLVGAVANPKKPFAAIVGGSKVSTKIGVIESLLAKVDILILGGGMIYTFYKAQGYSVGKSLVEEDKLELATSLIEKAKAKGVSLLLPTDIVVADKFAADAESKIVPATAIPDDWMGLDVGPDATKTFDEALDTTKTVIWNGPMGVFEFQKFAAGTEAIAKKLAELTTTKGVTTIIGGGDSVAAVEKAGLADKMSHISTGGGASLELLEGKTLPGVLALDDA

SEQ ID NO: 26362 - DNA, 1191 bp, Zea mays subsp. mays
  misc_feature (1)..(1191): Ceres Seq. ID no. 13492990
cttccagttcgcaagggtttcccagccaaagaaccagcatcctggttgtgaaaatggggggtgtgcgtagctacttcttcatcatcgccgccgcggtcgttgccgtcgtcctcgcgcttctcccggccggcgccacaggtgccggcctcaaggtcggcttctacagcaagacatgcccgtcggcggagtccctggtgcagcaggcggtggctgccgccttcaagaacaacagcggcatcgccgccggcctcatccgcctgcacttccatgactgcttcgtcaggggctgcgacggctcggtgctgatcgactcgacggcgaacaacacggcggagaaggacgcggtcccgaacaacccgagcctgcggggcttcgaggtcatcgacgccgccaagaaggcggtggaggcacggtgccccaagacggtgtcctgcgccgacatcctggcgttcgcggcgcgggacagcatcgcgctggcggggaacaacctgacgtacaaggtccccgcggggcggcgcgacgggcgggtgtccagggacacggacgccaacagcaacctcccctcgccgctctccaccgccgccgagctcgtcggcaacttcacgcgcaagaacctcaccgccgaggacatggtggtgctctccggcgcgcacaccgtcggccgctcccactgctcctccttcaccaaccgcctctacggcttcagcaacgccagcgacgtcgaccccaccatcagctccgcctacgccctcctgctgcgggccatctgcccgtccaacaccagccagttcttccccaacaccaccaccgacatggacctcatcacgcccgcgctgctcgacaacaggtactacgtcggcctcgccaacaacctcggcctcttcacgtccgaccaggctctgctcaccaacgccacgctcaagaagtccgtcgacgccttcgtcaagagcgaaagcgcgtggaagaccaagttcgccaagtccatggtcaagatgggcaatatcgacgtgctcacgggcaccaagggggagatcaggctcaactgcagggtcatcaacagcggcagcagcagctctggattattccagcttcacacggcaaccgcctctgacgaggaattcgcccacgttgcaactaactagcagctactatatctctatccgtagaggatctagtgatctactgctaccc

SEQ ID NO: 26363 - protein, 379 aa, Zea mays subsp. mays
  peptide (1)..(379): Ceres Seq. ID no. 13492991
  misc_feature (65)..(316): Pfam Name: Pfam Description:  Peroxidase
  misc_feature (34)..(371): NCBI GI NO: 34894766 NR Description: putative peroxidase
  misc_feature (36)..(357): NCBI GI NO: 12056452 NR Description: peroxidase [Zea mays]
  misc_feature (32)..(374): NCBI GI NO: 34894752 NR Description: putative peroxidase
  misc_feature (27)..(358): NCBI GI NO: 34894758 NR Description: putative peroxidase
  misc_feature (32)..(358): NCBI GI NO: 34894760 NR Description: putative peroxidase
  misc_feature (28)..(357): NCBI GI NO: 34894748 NR Description: putative peroxidase
  misc_feature (40)..(378): NCBI GI NO: 12056448 NR Description: peroxidase [Zea mays]
  misc_feature (47)..(352): NCBI GI NO: 4760700 NR Description: peroxidase 1 [Scutellaria baicalensis]
  misc_feature (16)..(352): NCBI GI NO: 7453849 NR Description: peroxidase prx12 precursor [Spinacia oleracea]
  misc_feature (14)..(350): NCBI GI NO: 37536450 NR Description: putative peroxidase
SSSQGFPSQRTSILVVKMGGVRSYFFIIAAAVVAVVLALLPAGATGAGLKVGFYSKTCPSAESLVQQAVAAAFKNNSGIAAGLIRLHFHDCFVRGCDGSVLIDSTANNTAEKDAVPNNPSLRGFEVIDAAKKAVEARCPKTVSCADILAFAARDSIALAGNNLTYKVPAGRRDGRVSRDTDANSNLPSPLSTAAELVGNFTRKNLTAEDMVVLSGAHTVGRSHCSSFTNRLYGFSNASDVDPTISSAYALLLRAICPSNTSQFFPNTTTDMDLITPALLDNRYYVGLANNLGLFTSDQALLTNATLKKSVDAFVKSESAWKTKFAKSMVKMGNIDVLTGTKGEIRLNCRVINSGSSSSGLFQLHTATASDEEFAHVATN

SEQ ID NO: 26364 - protein, 362 aa, Zea mays subsp. mays
  peptide (1)..(362): Ceres Seq. ID no. 13492992
  misc_feature (48)..(299): Pfam Name: Pfam Description:  Peroxidase
  misc_feature (17)..(354): NCBI GI NO: 34894766 NR Description: putative peroxidase
  misc_feature (19)..(340): NCBI GI NO: 12056452 NR Description: peroxidase [Zea mays]
  misc_feature (15)..(357): NCBI GI NO: 34894752 NR Description: putative peroxidase
  misc_feature (10)..(341): NCBI GI NO: 34894758 NR Description: putative peroxidase
  misc_feature (15)..(341): NCBI GI NO: 34894760 NR Description: putative peroxidase
  misc_feature (11)..(340): NCBI GI NO: 34894748 NR Description: putative peroxidase
  misc_feature (23)..(361): NCBI GI NO: 12056448 NR Description: peroxidase [Zea mays]
  misc_feature (30)..(335): NCBI GI NO: 4760700 NR Description: peroxidase 1 [Scutellaria baicalensis]
  misc_feature (1)..(335): NCBI GI NO: 7453849 NR Description: peroxidase prx12 precursor [Spinacia oleracea]
  misc_feature (1)..(333): NCBI GI NO: 37536450 NR Description: putative peroxidase
MGGVRSYFFIIAAAVVAVVLALLPAGATGAGLKVGFYSKTCPSAESLVQQAVAAAFKNNSGIAAGLIRLHFHDCFVRGCDGSVLIDSTANNTAEKDAVPNNPSLRGFEVIDAAKKAVEARCPKTVSCADILAFAARDSIALAGNNLTYKVPAGRRDGRVSRDTDANSNLPSPLSTAAELVGNFTRKNLTAEDMVVLSGAHTVGRSHCSSFTNRLYGFSNASDVDPTISSAYALLLRAICPSNTSQFFPNTTTDMDLITPALLDNRYYVGLANNLGLFTSDQALLTNATLKKSVDAFVKSESAWKTKFAKSMVKMGNIDVLTGTKGEIRLNCRVINSGSSSSGLFQLHTATASDEEFAHVATN

SEQ ID NO: 26365 - DNA, 1212 bp, Zea mays subsp. mays
  misc_feature (1)..(1212): Ceres Seq. ID no. 12349007
aacggtcgcgagagtgaaggcaaggaaaaacacccaaacggccaaaccccaggaagccccgtcggaccctacagaccctaaccctagcgctcccgacgcgccgcggagcgatggcgatggacgcggagcggcggcaggcggagctgatcgcgcagttctccgctcaggcggcggcgctttcgtccgcgccccagctcgccgcgctggtgcttgaggccacctcccacccggccctcttcgccttctccgagctcctcaccctcccggccctctccaagctcactggcacgcagtacgcgtcgtcactggacttgctccggctcttcgcctacggtaccctgaatgactacaagagtaattctggattccttccagcactgttgcctgaccaggtccgaaagctaaagcagctcagcgtgctaactctggcagagtcaactaagatactaccgtatgatcagctcatgcaagagttagacgtttcaaatgtaagagaactcgaagatttcctaatcaatgagtgcatgtattcgggtatcgttagaggcaaactggatcagctgagaaggtgctttgaggtacaatttgcagctggaagagatcttacacctgatcagctaaagaacatgatagagactttgtctgattggttgggaacatcagatagactgttgcatcaaattcaggagaaaatcaagtgggctgacacaatgagtgaggtgaacaagaagcaccagaaagaatttgaagacagagtggaagaggccaaaaaatcaatcaagcaggcagacattgacttacgggggcatgacgagtttctctctgaatctggaggaataatggattttgaagaggaccgcgtccgaccaaaaaggaggaggcaaccaccggcgtagtttcaattagcccttaccaatctctcccagaatgggacctgctgataccttgattgagacattttgacgccggagttgagtaaactttgtacatctgtcgtgtgatgcctccactgtagcgagtctgtttattttgccttctggtcttggtggggacgtacaaggccaaacctaggcgttatgttgcatttatttggtagtaaatggcccatggaagaaataacgttgttatgattatggcactgggttattctcaagtgtactgaacgataacagaagcacctctgttaaatgatgattgactcgaggcttgctg

SEQ ID NO: 26366 - protein, 261 aa, Zea mays subsp. mays
  peptide (1)..(261): Ceres Seq. ID no. 12349008
  misc_feature (66)..(159): Pfam Name: Pfam Description:  PCI domain
  misc_feature (3)..(259): NCBI GI NO: 18378920 NR Description: COP9 complex subunit, FUS5; protein id:At1g02090
  misc_feature (3)..(223): NCBI GI NO: 30678240 NR Description: COP9 complex subunit, FUS5 [Arabidopsis thaliana]
  misc_feature (1)..(224): NCBI GI NO: 37589772 NR Description: Unknown (protein for IMAGE:4786730) [Danio rerio]
  misc_feature (6)..(224): NCBI GI NO: 12232385 NR Description: COP9 constitutive photomorphogenic homolog subunit7B
  misc_feature (6)..(224): NCBI GI NO: 15215085 NR Description: Similar to COP9
  misc_feature (6)..(224): NCBI GI NO: 34877558 NR Description: similar to Cops7b protein [Rattus norvegicus]
  misc_feature (6)..(224): NCBI GI NO: 27764886 NR Description: COP9
  misc_feature (6)..(224): NCBI GI NO: 3309176 NR Description: COP9 complex subunit 7b [Mus musculus]
  misc_feature (18)..(229): NCBI GI NO: 31239493 NR Description: ENSANGP00000011626 [Anopheles gambiae]
  misc_feature (7)..(224): NCBI GI NO: 34858454 NR Description: similar to COP9 complex subunit 7a; COP9
MAMDAERRQAELIAQFSAQAAALSSAPQLAALVLEATSHPALFAFSELLTLPALSKLTGTQYASSLDLLRLFAYGTLNDYKSNSGFLPALLPDQVRKLKQLSVLTLAESTKILPYDQLMQELDVSNVRELEDFLINECMYSGIVRGKLDQLRRCFEVQFAAGRDLTPDQLKNMIETLSDWLGTSDRLLHQIQEKIKWADTMSEVNKKHQKEFEDRVEEAKKSIKQADIDLRGHDEFLSESGGIMDFEEDRVRPKRRRQPPA

SEQ ID NO: 26367 - protein, 259 aa, Zea mays subsp. mays
  peptide (1)..(259): Ceres Seq. ID no. 12349009
  misc_feature (64)..(157): Pfam Name: Pfam Description:  PCI domain
  misc_feature (1)..(257): NCBI GI NO: 18378920 NR Description: COP9 complex subunit, FUS5; protein id:At1g02090
  misc_feature (1)..(221): NCBI GI NO: 30678240 NR Description: COP9 complex subunit, FUS5 [Arabidopsis thaliana]
  misc_feature (1)..(222): NCBI GI NO: 37589772 NR Description: Unknown (protein for IMAGE:4786730) [Danio rerio]
  misc_feature (4)..(222): NCBI GI NO: 12232385 NR Description: COP9 constitutive photomorphogenic homolog subunit7B
  misc_feature (4)..(222): NCBI GI NO: 15215085 NR Description: Similar to COP9
  misc_feature (4)..(222): NCBI GI NO: 34877558 NR Description: similar to Cops7b protein [Rattus norvegicus]
  misc_feature (4)..(222): NCBI GI NO: 27764886 NR Description: COP9
  misc_feature (4)..(222): NCBI GI NO: 3309176 NR Description: COP9 complex subunit 7b [Mus musculus]
  misc_feature (16)..(227): NCBI GI NO: 31239493 NR Description: ENSANGP00000011626 [Anopheles gambiae]
  misc_feature (5)..(222): NCBI GI NO: 34858454 NR Description: similar to COP9 complex subunit 7a; COP9
MDAERRQAELIAQFSAQAAALSSAPQLAALVLEATSHPALFAFSELLTLPALSKLTGTQYASSLDLLRLFAYGTLNDYKSNSGFLPALLPDQVRKLKQLSVLTLAESTKILPYDQLMQELDVSNVRELEDFLINECMYSGIVRGKLDQLRRCFEVQFAAGRDLTPDQLKNMIETLSDWLGTSDRLLHQIQEKIKWADTMSEVNKKHQKEFEDRVEEAKKSIKQADIDLRGHDEFLSESGGIMDFEEDRVRPKRRRQPPA

SEQ ID NO: 26368 - protein, 143 aa, Zea mays subsp. mays
  peptide (1)..(143): Ceres Seq. ID no. 12349010
  misc_feature (1)..(141): NCBI GI NO: 18378920 NR Description: COP9 complex subunit, FUS5; protein id:At1g02090
  misc_feature (1)..(105): NCBI GI NO: 30678240 NR Description: COP9 complex subunit, FUS5 [Arabidopsis thaliana]
  misc_feature (1)..(106): NCBI GI NO: 37589772 NR Description: Unknown (protein for IMAGE:4786730) [Danio rerio]
  misc_feature (1)..(106): NCBI GI NO: 12232385 NR Description: COP9 constitutive photomorphogenic homolog subunit7B
  misc_feature (1)..(106): NCBI GI NO: 15215085 NR Description: Similar to COP9
  misc_feature (1)..(106): NCBI GI NO: 34877558 NR Description: similar to Cops7b protein [Rattus norvegicus]
  misc_feature (1)..(106): NCBI GI NO: 27764886 NR Description: COP9
  misc_feature (1)..(106): NCBI GI NO: 3309176 NR Description: COP9 complex subunit 7b [Mus musculus]
  misc_feature (1)..(111): NCBI GI NO: 31239493 NR Description: ENSANGP00000011626 [Anopheles gambiae]
  misc_feature (1)..(106): NCBI GI NO: 34858454 NR Description: similar to COP9 complex subunit 7a; COP9
MQELDVSNVRELEDFLINECMYSGIVRGKLDQLRRCFEVQFAAGRDLTPDQLKNMIETLSDWLGTSDRLLHQIQEKIKWADTMSEVNKKHQKEFEDRVEEAKKSIKQADIDLRGHDEFLSESGGIMDFEEDRVRPKRRRQPPA

SEQ ID NO: 26369 - DNA, 1725 bp, Zea mays subsp. mays
  misc_feature (1)..(1725): Ceres Seq. ID no. 13577779
gaccgttgtgcttgcggcttcgctcgttcccctccaccactccgtctccttcctattgctgagtgcggcacccttgcctataataaaccccgccgcacgcccgcaccggagaagaaagctcccaagtcccaatccacgttcctcgccccctgccgctccggagagtcatggccaccgccgtttccacccccgcggacctgtcgcccacgcctgccccgagacggcggggccggccgccgaagaaccccgccccagccgaggccccaggcagcccggcggaccaagcggaggtgattggggactacgagcgcgagagggacgcgaggatccgggagaacatggagcggatgcagaagctcggcatcctcgacctcgcgcacaccctcagccactgcgccgccgcctcgggtctgggtaccggcagcgggcggtggcgccggaagcccgtggagccggggtctgctggtggggccagggtgaagcccgcgtcgccggcgccctcgcggagatcgctcaggttgaaggacgtggaaccggttacctatcgtgaaattgagccaaagaaagagaaacgctctgaaggtggcaaaactgttttaatggaggtgggagccaaggaagaaatatacactgaagagcatgacaagcttttgggtacatgcaacactccttggactctctttgttgatggttatggcaaagatggaaaacgcatttatgatcaagtgaggggtcaaacctgtcatcagtgccgtcagaagactcttggtcatcatacaagctgctgtaaatgccagattgtccaaggacagttctgtggagactgtttgtacatgaggtatggtgaaaatgtgttagaggttaagaagaatcctaactggatatgtccagtttgccgtggcatctgtaattgcagtctatgcagaactaagaaaggatggttccctactgggtctgcgtataggaaggcgatcggacttgggtacaaatctgtggcacactttctaattgcaacacatcgagcatcatcagtcaattcaagctcagtcgacaataacaagctgccgtttgctaaatctgaaacctcgtgcatttctgaccatgccaatgagagcccagaggatggagaaacgaccagcaaagctaagcagaacaaagcaactcgccgccgagtgaggaagagttctgatggcgacaacgatagcagaagtgggtccgtggtgacatctgactgccaggatgatcaagccaacaaggatgctgggtgtgtgactccgtcgtctaagccagcgtcaacgaagaggaagtacgttgaacgaagccctgactgcatcgcaagcaggctgcggtctcggctcaatatgccatgagcccatgaagatgtgatcaggatcatgtatctcttttactgcctgaccgcaggctctgtcccttcttgcgatgatgttgtggctctttcatctacaagcagttcatggtttgccagtaacgatgttctgcgcgagtaagaaggtgattgttatagtctcttgcgcagctgtgttaagagcttgaaactagactcagtcatgtgtagtatttgtaccattagtgccaactgtggtctctggcattagtgcctactgtggtttgtgagctatgagttgacgcgatagcctgtagctttaatgtacaattcatgatatgcaagtgaatatgttcattttcagctggaaagaaaaaagg

SEQ ID NO: 26370 - protein, 400 aa, Zea mays subsp. mays
  peptide (1)..(400): Ceres Seq. ID no. 13577780
  misc_feature (15)..(312): NCBI GI NO: 30690864 NR Description: expressed protein [Arabidopsis thaliana]
  misc_feature (118)..(312): NCBI GI NO: 25407788 NR Description: hypothetical protein AT4g37110
  misc_feature (46)..(377): NCBI GI NO: 15227848 NR Description: hypothetical protein [Arabidopsis thaliana]
  misc_feature (182)..(280): NCBI GI NO: 11360288 NR Description: hypothetical protein DKFZp762L0311
  misc_feature (1)..(280): NCBI GI NO: 22122529 NR Description: hypothetical protein MGC11998 [Mus musculus]
  misc_feature (181)..(280): NCBI GI NO: 15929382 NR Description: Unknown (protein for IMAGE:3829029) [Homo sapiens]
  misc_feature (182)..(280): NCBI GI NO: 27651995 NR Description: transcription factor RAM2 splice variant b
  misc_feature (180)..(280): NCBI GI NO: 15220539 NR Description: F12A21.9 [Arabidopsis thaliana]
  misc_feature (181)..(280): NCBI GI NO: 22027514 NR Description: cell division cycle associated protein 7 isoform 2
  misc_feature (180)..(341): NCBI GI NO: 9828631 NR Description: F1N21.9 [Arabidopsis thaliana]
MATAVSTPADLSPTPAPRRRGRPPKNPAPAEAPGSPADQAEVIGDYERERDARIRENMERMQKLGILDLAHTLSHCAAASGLGTGSGRWRRKPVEPGSAGGARVKPASPAPSRRSLRLKDVEPVTYREIEPKKEKRSEGGKTVLMEVGAKEEIYTEEHDKLLGTCNTPWTLFVDGYGKDGKRIYDQVRGQTCHQCRQKTLGHHTSCCKCQIVQGQFCGDCLYMRYGENVLEVKKNPNWICPVCRGICNCSLCRTKKGWFPTGSAYRKAIGLGYKSVAHFLIATHRASSVNSSSVDNNKLPFAKSETSCISDHANESPEDGETTSKAKQNKATRRRVRKSSDGDNDSRSGSVVTSDCQDDQANKDAGCVTPSSKPASTKRKYVERSPDCIASRLRSRLNMP

SEQ ID NO: 26371 - protein, 343 aa, Zea mays subsp. mays
  peptide (1)..(343): Ceres Seq. ID no. 13577781
  misc_feature (1)..(255): NCBI GI NO: 30690864 NR Description: expressed protein [Arabidopsis thaliana]
  misc_feature (61)..(255): NCBI GI NO: 25407788 NR Description: hypothetical protein AT4g37110
  misc_feature (1)..(320): NCBI GI NO: 15227848 NR Description: hypothetical protein [Arabidopsis thaliana]
  misc_feature (125)..(223): NCBI GI NO: 11360288 NR Description: hypothetical protein DKFZp762L0311
  misc_feature (1)..(223): NCBI GI NO: 22122529 NR Description: hypothetical protein MGC11998 [Mus musculus]
  misc_feature (124)..(223): NCBI GI NO: 15929382 NR Description: Unknown (protein for IMAGE:3829029) [Homo sapiens]
  misc_feature (125)..(223): NCBI GI NO: 27651995 NR Description: transcription factor RAM2 splice variant b
  misc_feature (123)..(223): NCBI GI NO: 15220539 NR Description: F12A21.9 [Arabidopsis thaliana]
  misc_feature (124)..(223): NCBI GI NO: 22027514 NR Description: cell division cycle associated protein 7 isoform 2
  misc_feature (123)..(284): NCBI GI NO: 9828631 NR Description: F1N21.9 [Arabidopsis thaliana]
MERMQKLGILDLAHTLSHCAAASGLGTGSGRWRRKPVEPGSAGGARVKPASPAPSRRSLRLKDVEPVTYREIEPKKEKRSEGGKTVLMEVGAKEEIYTEEHDKLLGTCNTPWTLFVDGYGKDGKRIYDQVRGQTCHQCRQKTLGHHTSCCKCQIVQGQFCGDCLYMRYGENVLEVKKNPNWICPVCRGICNCSLCRTKKGWFPTGSAYRKAIGLGYKSVAHFLIATHRASSVNSSSVDNNKLPFAKSETSCISDHANESPEDGETTSKAKQNKATRRRVRKSSDGDNDSRSGSVVTSDCQDDQANKDAGCVTPSSKPASTKRKYVERSPDCIASRLRSRLNMP

SEQ ID NO: 26372 - protein, 340 aa, Zea mays subsp. mays
  peptide (1)..(340): Ceres Seq. ID no. 13577782
  misc_feature (1)..(252): NCBI GI NO: 30690864 NR Description: expressed protein [Arabidopsis thaliana]
  misc_feature (58)..(252): NCBI GI NO: 25407788 NR Description: hypothetical protein AT4g37110
  misc_feature (1)..(317): NCBI GI NO: 15227848 NR Description: hypothetical protein [Arabidopsis thaliana]
  misc_feature (122)..(220): NCBI GI NO: 11360288 NR Description: hypothetical protein DKFZp762L0311
  misc_feature (1)..(220): NCBI GI NO: 22122529 NR Description: hypothetical protein MGC11998 [Mus musculus]
  misc_feature (121)..(220): NCBI GI NO: 15929382 NR Description: Unknown (protein for IMAGE:3829029) [Homo sapiens]
  misc_feature (122)..(220): NCBI GI NO: 27651995 NR Description: transcription factor RAM2 splice variant b
  misc_feature (120)..(220): NCBI GI NO: 15220539 NR Description: F12A21.9 [Arabidopsis thaliana]
  misc_feature (121)..(220): NCBI GI NO: 22027514 NR Description: cell division cycle associated protein 7 isoform 2
  misc_feature (120)..(281): NCBI GI NO: 9828631 NR Description: F1N21.9 [Arabidopsis thaliana]
MQKLGILDLAHTLSHCAAASGLGTGSGRWRRKPVEPGSAGGARVKPASPAPSRRSLRLKDVEPVTYREIEPKKEKRSEGGKTVLMEVGAKEEIYTEEHDKLLGTCNTPWTLFVDGYGKDGKRIYDQVRGQTCHQCRQKTLGHHTSCCKCQIVQGQFCGDCLYMRYGENVLEVKKNPNWICPVCRGICNCSLCRTKKGWFPTGSAYRKAIGLGYKSVAHFLIATHRASSVNSSSVDNNKLPFAKSETSCISDHANESPEDGETTSKAKQNKATRRRVRKSSDGDNDSRSGSVVTSDCQDDQANKDAGCVTPSSKPASTKRKYVERSPDCIASRLRSRLNMP

SEQ ID NO: 26373 - DNA, 1020 bp, Zea mays subsp. mays
  misc_feature (1)..(1020): Ceres Seq. ID no. 12566601
agacacccatactgattcgctggcggcaggccgacggctacggagacggaagtggcgaccggttccggcgaggcgcaggcgacagataggggacagggcgaccatttctagcgaggcaggagcgcgggaagatccggaagctgcgatgtcgaagcggctgctgtcgcggctgctcggcatgttccaatcgcggacgcaggtgggcgtcgacaaggccggcaaccgctacttcacccgcgttgaggaggtcgacggcacaatgaaggagaggcgctgggtggagttcaagggcgcagaccaggactcgaccaccgttccagtcgagtggatttgctggctgaatggccaaaggaagaaagctccaacaccagaggaattggctgagctggaggcaagacgtgaacgtgtcaagcaaaacattcagcttctcaaaaagaaagaagaagaggaaagaaaaactggtatccaaccagtcaagaaaattgggaaagctgaatctccaaatctccaaagtttcgtgaagcagcagttctcgggtactcctccagatcagcagaaagttaacactctaggacctgaggataggcctaaggacacaactcatacagaagatgctacgacagacaatgagaggtatactgaaccaacgggaactggtgccactttcaagccagggacttggcagccaccaacatgaatgccaacatgaactttagaagatgaaggacggtgtaccggagcattttcctttcacctatctgtgtaacattttaacatttgctctgaaagaatcactagcctatgttccttctttcagatggttacccatctgatggagttatagccttaagttccttcttttagatgcttacccatctgatggagttataggtgatcgggggctcccacggtatgctgttttttttgtggctaaattgtcctctgtaatctttactgtgatagcaactgtaataaactggaccagtgttttgcttcagggctctcttagagacactgttc

SEQ ID NO: 26374 - protein, 231 aa, Zea mays subsp. mays
  peptide (1)..(231): Ceres Seq. ID no. 12566602
  misc_feature (52)..(231): NCBI GI NO: 30687433 NR Description: NADH:ubiquinone oxidoreductase family
  misc_feature (64)..(197): NCBI GI NO: 34854147 NR Description: hypothetical protein XP_342191 [Rattus norvegicus]
  misc_feature (52)..(203): NCBI GI NO: 29789409 NR Description: hypothetical protein LOC91942 [Homo sapiens]
DTHTDSLAAGRRLRRRKWRPVPARRRRQIGDRATISSEAGAREDPEAAMSKRLLSRLLGMFQSRTQVGVDKAGNRYFTRVEEVDGTMKERRWVEFKGADQDSTTVPVEWICWLNGQRKKAPTPEELAELEARRERVKQNIQLLKKKEEEERKTGIQPVKKIGKAESPNLQSFVKQQFSGTPPDQQKVNTLGPEDRPKDTTHTEDATTDNERYTEPTGTGATFKPGTWQPPT

SEQ ID NO: 26375 - protein, 183 aa, Zea mays subsp. mays
  peptide (1)..(183): Ceres Seq. ID no. 12566603
  misc_feature (4)..(183): NCBI GI NO: 30687433 NR Description: NADH:ubiquinone oxidoreductase family
  misc_feature (16)..(149): NCBI GI NO: 34854147 NR Description: hypothetical protein XP_342191 [Rattus norvegicus]
  misc_feature (4)..(155): NCBI GI NO: 29789409 NR Description: hypothetical protein LOC91942 [Homo sapiens]
MSKRLLSRLLGMFQSRTQVGVDKAGNRYFTRVEEVDGTMKERRWVEFKGADQDSTTVPVEWICWLNGQRKKAPTPEELAELEARRERVKQNIQLLKKKEEEERKTGIQPVKKIGKAESPNLQSFVKQQFSGTPPDQQKVNTLGPEDRPKDTTHTEDATTDNERYTEPTGTGATFKPGTWQPPT

SEQ ID NO: 26376 - protein, 172 aa, Zea mays subsp. mays
  peptide (1)..(172): Ceres Seq. ID no. 12566604
  misc_feature (1)..(172): NCBI GI NO: 30687433 NR Description: NADH:ubiquinone oxidoreductase family
  misc_feature (5)..(138): NCBI GI NO: 34854147 NR Description: hypothetical protein XP_342191 [Rattus norvegicus]
  misc_feature (1)..(144): NCBI GI NO: 29789409 NR Description: hypothetical protein LOC91942 [Homo sapiens]
MFQSRTQVGVDKAGNRYFTRVEEVDGTMKERRWVEFKGADQDSTTVPVEWICWLNGQRKKAPTPEELAELEARRERVKQNIQLLKKKEEEERKTGIQPVKKIGKAESPNLQSFVKQQFSGTPPDQQKVNTLGPEDRPKDTTHTEDATTDNERYTEPTGTGATFKPGTWQPPT

SEQ ID NO: 26377 - DNA, 800 bp, Zea mays subsp. mays
  misc_feature (1)..(800): Ceres Seq. ID no. 12409878
ggtttctctgattctctccctcccttgccttcgtctccgcctccgtctttcctcaagaagtcgattcccttccccaagaacccaagcccctaccatgacaagctcctcctctccttcccgaaaggcgctgagcaagatcgcttgcaatcggctgcagaaggaactcgccgagtggcaactcagcccccctgctggattcaagcacaaggtctccgataacctacaaaggtgggtaattgaggtcactggagcggcgggcaccctttacgccggcgagacctaccagttgcaggttgacttccctgagcattatcctatggaggcacctcaggtcatttttctcaatccagcgccaatgcatccacacatctacagcaacgggcacatctgcttagatattttgtatgactcgtggtctccagcgatgaccgtgagctctgtctgtatcagtatcctgtctatgttgtctagttcgccagcaaagcaacgtccagtggacaatgaccgctatgtcaggaactgccgcaacgggaggtcgccgaaggagaccagatggtggttccatgacgacacggtgtaattgagcgcctgacagccttccttgctgtggtatatctcgtcaaggggagattggggatgatttaggcctatttgtaagcatccctctatcggattgcgaagcttaccttgctgtggtggtgtgttaaatgagttgcacacatgtgtcgagtctgagaatacatattaccatcatcaatgatataagtaatatagaataagcatgagtgtaccctgcctgc

SEQ ID NO: 26378 - protein, 192 aa, Zea mays subsp. mays
  peptide (1)..(192): Ceres Seq. ID no. 12409879
  misc_feature (32)..(192): NCBI GI NO: 481811 NR Description: ubiquitin-conjugating enzyme UBC2-1
  misc_feature (32)..(192): NCBI GI NO: 18401461 NR Description: E2, ubiquitin-conjugating enzyme 15
  misc_feature (32)..(192): NCBI GI NO: 18422281 NR Description: E2, ubiquitin-conjugating enzyme 18
  misc_feature (32)..(192): NCBI GI NO: 18410856 NR Description: E2, ubiquitin-conjugating enzyme 16
  misc_feature (32)..(192): NCBI GI NO: 4090259 NR Description: ubiquitin-conjugating enzyme E2
  misc_feature (32)..(192): NCBI GI NO: 2801444 NR Description: ubiquitin-conjugating enzyme 16
  misc_feature (32)..(192): NCBI GI NO: 18419831 NR Description: E2, ubiquitin-conjugating enzyme 17
  misc_feature (32)..(161): NCBI GI NO: 34897008 NR Description: putative ubiquitin-conjugating enzyme E2
  misc_feature (96)..(192): NCBI GI NO: 25293670 NR Description: ubiquitin-conjugating enzyme 18
  misc_feature (32)..(133): NCBI GI NO: 25293672 NR Description: protein F27F5.13 [imported] - Arabidopsis thaliana
VSLILSLPCLRLRLRLSSRSRFPSPRTQAPTMTSSSSPSRKALSKIACNRLQKELAEWQLSPPAGFKHKVSDNLQRWVIEVTGAAGTLYAGETYQLQVDFPEHYPMEAPQVIFLNPAPMHPHIYSNGHICLDILYDSWSPAMTVSSVCISILSMLSSSPAKQRPVDNDRYVRNCRNGRSPKETRWWFHDDTV

SEQ ID NO: 26379 - protein, 161 aa, Zea mays subsp. mays
  peptide (1)..(161): Ceres Seq. ID no. 12409880
  misc_feature (1)..(161): NCBI GI NO: 481811 NR Description: ubiquitin-conjugating enzyme UBC2-1
  misc_feature (1)..(161): NCBI GI NO: 18401461 NR Description: E2, ubiquitin-conjugating enzyme 15
  misc_feature (1)..(161): NCBI GI NO: 18422281 NR Description: E2, ubiquitin-conjugating enzyme 18
  misc_feature (1)..(161): NCBI GI NO: 18410856 NR Description: E2, ubiquitin-conjugating enzyme 16
  misc_feature (1)..(161): NCBI GI NO: 4090259 NR Description: ubiquitin-conjugating enzyme E2
  misc_feature (1)..(161): NCBI GI NO: 2801444 NR Description: ubiquitin-conjugating enzyme 16
  misc_feature (1)..(161): NCBI GI NO: 18419831 NR Description: E2, ubiquitin-conjugating enzyme 17
  misc_feature (1)..(130): NCBI GI NO: 34897008 NR Description: putative ubiquitin-conjugating enzyme E2
  misc_feature (65)..(161): NCBI GI NO: 25293670 NR Description: ubiquitin-conjugating enzyme 18
  misc_feature (1)..(102): NCBI GI NO: 25293672 NR Description: protein F27F5.13 [imported] - Arabidopsis thaliana
MTSSSSPSRKALSKIACNRLQKELAEWQLSPPAGFKHKVSDNLQRWVIEVTGAAGTLYAGETYQLQVDFPEHYPMEAPQVIFLNPAPMHPHIYSNGHICLDILYDSWSPAMTVSSVCISILSMLSSSPAKQRPVDNDRYVRNCRNGRSPKETRWWFHDDTV

SEQ ID NO: 26380 - DNA, 1748 bp, Zea mays subsp. mays
  misc_feature (1)..(1748): Ceres Seq. ID no. 12406975
gcacgagaccattacctagaacatcctaatcgaaaataaaaaagaggcgtggtagtgtacagtgtgagctgacagggacagtgcccaccaatggtccccttctcacggtcacgctagcagcagtagccctcccccatcaccgaggagagagaagcctgtcgccgcgcgaccgccccacatggctaccgcgctcggtggggagcccaaccccaccgccgacgccatggaggtcgaccctccgcgcgcctccgccgacgagaagcatgtcgccactattattgcggggggtagtgatgcagtgacaggccacataatatcgactacgattgggggaaagaatggtgaaccaaagaggaccatcagctatatggctgagcgagttgttggaactggatcgtttggggttgtcttccaggcaaaatgcattgagactggtgaaactgttgcaattaagaaggttctacaggacaaaagatacaagaatagggagttacaaataatgcgatcaattgaccattgcaatgtcatttccctgaagcattgtttcttctctaccacaagtagggatgaacttttccttaacttagtcatggagtttgttccagagtcactttatcgcgttctgaaacactacaaagacatgaagcagaggatgccccttatatatgttaaattgtatatgtaccagatattccggggactagcttatattcatactgtaccaggaatttgtcaccgagatattaagcctcagaatatcttggtggatcctctttcccaccaagtcaaggtttgtgacttcgggagtgctaaaatcttgattaaaggtgaagctaatatatcatatatatgctcacgctattatcgtgctcctgagctcatatttggtgcaactgaatacacaacatctattgatatatggtcagctggatgtgttcttgctgagcttcttcttagtcaaccattatttcctggggaaagtgctgtggaccagctggttgagattatcaaggttttgggcaccccaacacgagaggaaattcgttgtatgaatcccaactatacagaattcaagtttcctcagataaaagcatgtccatggcacaagatcttccacaagagaatgcctccagaagcaatagatcttgtttcccgtcttcttcagtattcgccgaatctgcgatgtagtgcacttgaggtgtgtgctcattcattctttgacgaattacgagaatcacatgcaagactccctaacggacgcccatttcctccactattcaactttaagcaggaactagcaaacgcaccaccggagcttgtcagcaggctattaccagagcatgctcgacggcattcaggattcggttccttatttgggagtggaccgtagcccgtaggaaaatctcgttttaatgttgggctgctgtacgccgtcagagggcaatctgcatatcccaaatctaagttttagaacctgaccatcttgtcgaaaagttaccagccttagaaaaacccgaggtggcctcttgtgtccatgttctgccagtagcggcacataatgctggggggatggttaggtgtaattgttaagcacagagggtaactgactgagctaatgtattttcacgtttcagtctgtatcgaacttgtacctgtgtaccctgtaccaatcgcagctgatgtaatcatgtaaatgcttctaaactacttcaagttatcatgatggccaattcgcaattttacagtgc

SEQ ID NO: 26381 - protein, 403 aa, Zea mays subsp. mays
  peptide (1)..(403): Ceres Seq. ID no. 12406976
  misc_feature (63)..(347): Pfam Name: Pfam Description:  Protein kinase domain
  misc_feature (1)..(395): NCBI GI NO: 7434281 NR Description: probable shaggy-like protein kinase etha (EC2
  misc_feature (1)..(403): NCBI GI NO: 15224593 NR Description: putative shaggy-like protein kinase dzeta
  misc_feature (1)..(403): NCBI GI NO: 21593135 NR Description: putative shaggy-like protein kinase dzeta
  misc_feature (1)..(403): NCBI GI NO: 12643750 NR Description: Shaggy-related protein kinase delta
  misc_feature (25)..(402): NCBI GI NO: 15233984 NR Description: shaggy-like protein kinase etha (EC 2
  misc_feature (25)..(402): NCBI GI NO: 18700188 NR Description: AT4g18710/F28A21_120 [Arabidopsis thaliana]
  misc_feature (25)..(402): NCBI GI NO: 12643751 NR Description: Shaggy-related protein kinase eta (ASK-eta)
  misc_feature (21)..(396): NCBI GI NO: 15221476 NR Description: shaggy-like kinase, putative; protein id:At1g06390
  misc_feature (26)..(398): NCBI GI NO: 15230058 NR Description: shaggy related protein kinase, ASK-GAMMA
  misc_feature (19)..(397): NCBI GI NO: 15236918 NR Description: Shaggy related protein kinase tetha
MATALGGEPNPTADAMEVDPPRASADEKHVATIIAGGSDAVTGHIISTTIGGKNGEPKRTISYMAERVVGTGSFGVVFQAKCIETGETVAIKKVLQDKRYKNRELQIMRSIDHCNVISLKHCFFSTTSRDELFLNLVMEFVPESLYRVLKHYKDMKQRMPLIYVKLYMYQIFRGLAYIHTVPGICHRDIKPQNILVDPLSHQVKVCDFGSAKILIKGEANISYICSRYYRAPELIFGATEYTTSIDIWSAGCVLAELLLSQPLFPGESAVDQLVEIIKVLGTPTREEIRCMNPNYTEFKFPQIKACPWHKIFHKRMPPEAIDLVSRLLQYSPNLRCSALEVCAHSFFDELRESHARLPNGRPFPPLFNFKQELANAPPELVSRLLPEHARRHSGFGSLFGSGP

SEQ ID NO: 26382 - protein, 388 aa, Zea mays subsp. mays
  peptide (1)..(388): Ceres Seq. ID no. 12406977
  misc_feature (48)..(332): Pfam Name: Pfam Description:  Protein kinase domain
  misc_feature (1)..(380): NCBI GI NO: 7434281 NR Description: probable shaggy-like protein kinase etha (EC2
  misc_feature (1)..(388): NCBI GI NO: 15224593 NR Description: putative shaggy-like protein kinase dzeta
  misc_feature (1)..(388): NCBI GI NO: 21593135 NR Description: putative shaggy-like protein kinase dzeta
  misc_feature (1)..(388): NCBI GI NO: 12643750 NR Description: Shaggy-related protein kinase delta
  misc_feature (10)..(387): NCBI GI NO: 15233984 NR Description: shaggy-like protein kinase etha (EC 2
  misc_feature (10)..(387): NCBI GI NO: 18700188 NR Description: AT4g18710/F28A21_120 [Arabidopsis thaliana]
  misc_feature (10)..(387): NCBI GI NO: 12643751 NR Description: Shaggy-related protein kinase eta (ASK-eta)
  misc_feature (6)..(381): NCBI GI NO: 15221476 NR Description: shaggy-like kinase, putative; protein id:At1g06390
  misc_feature (11)..(383): NCBI GI NO: 15230058 NR Description: shaggy related protein kinase, ASK-GAMMA
  misc_feature (4)..(382): NCBI GI NO: 15236918 NR Description: Shaggy related protein kinase tetha
MEVDPPRASADEKHVATIIAGGSDAVTGHIISTTIGGKNGEPKRTISYMAERVVGTGSFGVVFQAKCIETGETVAIKKVLQDKRYKNRELQIMRSIDHCNVISLKHCFFSTTSRDELFLNLVMEFVPESLYRVLKHYKDMKQRMPLIYVKLYMYQIFRGLAYIHTVPGICHRDIKPQNILVDPLSHQVKVCDFGSAKILIKGEANISYICSRYYRAPELIFGATEYTTSIDIWSAGCVLAELLLSQPLFPGESAVDQLVEIIKVLGTPTREEIRCMNPNYTEFKFPQIKACPWHKIFHKRMPPEAIDLVSRLLQYSPNLRCSALEVCAHSFFDELRESHARLPNGRPFPPLFNFKQELANAPPELVSRLLPEHARRHSGFGSLFGSGP

SEQ ID NO: 26383 - protein, 340 aa, Zea mays subsp. mays
  peptide (1)..(340): Ceres Seq. ID no. 12406978
  misc_feature (1)..(284): Pfam Name: Pfam Description:  Protein kinase domain
  misc_feature (1)..(332): NCBI GI NO: 7434281 NR Description: probable shaggy-like protein kinase etha (EC2
  misc_feature (1)..(340): NCBI GI NO: 15224593 NR Description: putative shaggy-like protein kinase dzeta
  misc_feature (1)..(340): NCBI GI NO: 21593135 NR Description: putative shaggy-like protein kinase dzeta
  misc_feature (1)..(340): NCBI GI NO: 12643750 NR Description: Shaggy-related protein kinase delta
  misc_feature (1)..(339): NCBI GI NO: 15233984 NR Description: shaggy-like protein kinase etha (EC 2
  misc_feature (1)..(339): NCBI GI NO: 18700188 NR Description: AT4g18710/F28A21_120 [Arabidopsis thaliana]
  misc_feature (1)..(339): NCBI GI NO: 12643751 NR Description: Shaggy-related protein kinase eta (ASK-eta)
  misc_feature (1)..(333): NCBI GI NO: 15221476 NR Description: shaggy-like kinase, putative; protein id:At1g06390
  misc_feature (1)..(335): NCBI GI NO: 15230058 NR Description: shaggy related protein kinase, ASK-GAMMA
  misc_feature (1)..(334): NCBI GI NO: 15236918 NR Description: Shaggy related protein kinase tetha
MAERVVGTGSFGVVFQAKCIETGETVAIKKVLQDKRYKNRELQIMRSIDHCNVISLKHCFFSTTSRDELFLNLVMEFVPESLYRVLKHYKDMKQRMPLIYVKLYMYQIFRGLAYIHTVPGICHRDIKPQNILVDPLSHQVKVCDFGSAKILIKGEANISYICSRYYRAPELIFGATEYTTSIDIWSAGCVLAELLLSQPLFPGESAVDQLVEIIKVLGTPTREEIRCMNPNYTEFKFPQIKACPWHKIFHKRMPPEAIDLVSRLLQYSPNLRCSALEVCAHSFFDELRESHARLPNGRPFPPLFNFKQELANAPPELVSRLLPEHARRHSGFGSLFGSGP

SEQ ID NO: 26384 - DNA, 1388 bp, Zea mays subsp. mays
  misc_feature (1)..(1388): Ceres Seq. ID no. 12409874
acagaggggcagccgcctgcgcggtggccagcatcgtccggccgggttcgtcgggaagcgacccaaccccacgcccgcttccaacctcgttctgaccgacggcgaccgccgtgccgcgccaccgctatacttacatctgctccatcatccctcgccgcgaccaccaacctcggcagggaaatccaactccggtttctcctcctcgcagcgtctctcccgcagtcggggagatccgggttggcccgcccggtaatccatccctcgccctcgtgccgcctgtaatttcgcctcctaacccgaccgccgggggccacagcggcgccggaggcggtggagtggggacgatggggatcggggcggtgtcggacgagttgctgggcacgttcgtgccgatcgccgtgtactggctctactcagggctctacgtcgcgctggatggggtggggcggctcgacggataccggctgcacaccagggaggaggccgctacgaagaacgtcgtctccaaggccgccgtcgtcagaggcgttctcgtccagcaggtcttccaggtcgccgtctcgctcaccctctttgcggttattggtgatgagagtagtactggacagaagcaacctcctgttcttgtcatagtgttgcagtttataactgcaatggttgttatggacacatggcagtacttcatgcacagatacatgcacattaacaagtttctgtataaacacatccattctaagcaccatactcttgtagtcccttattcctttggagctctatacaaccatcctcttgagggccttattttggacaccattggtggtgcactctcattcctcgtctctggtatgactccacggacatccatattctttttctcctttgcaaccatcaaaactgtggatgatcattgtgggctgtggcttcctggtaatatcctccaggcgctgttcagcaataacagtgcttatcatgacattcaccatcagctctatggaaacaagtacaacttttcacaacccttctttgtgatgtgggacaagattctcggaacttacatgccctactctattgaacaacgaaaaggaggggggatcgaatcaaaaccagctaaactcgactgagctgaggataccaagactgattagtacatgcatgcatagtttctattttttttttttgacttgtccaatactcatgccttgtggtactgctgactgcgcaaatgatgtacacaccctgtgtcataacttcatatagtgaggctgcttttgctctctacatttcttgttttgttttttagggtgttctatcttgtaacaagatacagtgagtaaagtattgtaatgtaccaaagaatactcaacaccacttggatttgtgttctgttg

SEQ ID NO: 26385 - protein, 258 aa, Zea mays subsp. mays
  peptide (1)..(258): Ceres Seq. ID no. 12409875
  misc_feature (1)..(256): NCBI GI NO: 22330531 NR Description: acid phosphatase, putative; protein id:At1g69640
  misc_feature (1)..(256): NCBI GI NO: 25404823 NR Description: probable sterol desaturase T6C23.16
  misc_feature (6)..(257): NCBI GI NO: 18394095 NR Description: acid phosphatase, putative; protein id:At1g14290
  misc_feature (6)..(257): NCBI GI NO: 25511716 NR Description: F14L17.5 protein - Arabidopsis thaliana
  misc_feature (11)..(256): NCBI GI NO: 34913184 NR Description: similar to acid phosphatase
  misc_feature (85)..(254): NCBI GI NO: 34911990 NR Description: P0694A04.28
  misc_feature (3)..(83): NCBI GI NO: 34911990 NR Description: P0694A04.28
  misc_feature (37)..(203): NCBI GI NO: 5360721 NR Description: acid phosphatase [Lupinus albus]
  misc_feature (98)..(257): NCBI GI NO: 40746027 NR Description: hypothetical protein AN0640.2
  misc_feature (3)..(95): NCBI GI NO: 40746027 NR Description: hypothetical protein AN0640.2
MGIGAVSDELLGTFVPIAVYWLYSGLYVALDGVGRLDGYRLHTREEAATKNVVSKAAVVRGVLVQQVFQVAVSLTLFAVIGDESSTGQKQPPVLVIVLQFITAMVVMDTWQYFMHRYMHINKFLYKHIHSKHHTLVVPYSFGALYNHPLEGLILDTIGGALSFLVSGMTPRTSIFFFSFATIKTVDDHCGLWLPGNILQALFSNNSAYHDIHHQLYGNKYNFSQPFFVMWDKILGTYMPYSIEQRKGGGIESKPAKLD

SEQ ID NO: 26386 - protein, 155 aa, Zea mays subsp. mays
  peptide (1)..(155): Ceres Seq. ID no. 12409876
  misc_feature (1)..(153): NCBI GI NO: 22330531 NR Description: acid phosphatase, putative; protein id:At1g69640
  misc_feature (1)..(153): NCBI GI NO: 25404823 NR Description: probable sterol desaturase T6C23.16
  misc_feature (1)..(154): NCBI GI NO: 18394095 NR Description: acid phosphatase, putative; protein id:At1g14290
  misc_feature (1)..(154): NCBI GI NO: 25511716 NR Description: F14L17.5 protein - Arabidopsis thaliana
  misc_feature (1)..(153): NCBI GI NO: 34913184 NR Description: similar to acid phosphatase
  misc_feature (1)..(151): NCBI GI NO: 34911990 NR Description: P0694A04.28
  misc_feature (1)..(100): NCBI GI NO: 5360721 NR Description: acid phosphatase [Lupinus albus]
  misc_feature (1)..(154): NCBI GI NO: 40746027 NR Description: hypothetical protein AN0640.2
  misc_feature (1)..(136): NCBI GI NO: 19113281 NR Description: hypothetical integral membrane protein
  misc_feature (1)..(133): NCBI GI NO: 37722567 NR Description: sphinganine hydroxylase [Pichia ciferrii]
MVVMDTWQYFMHRYMHINKFLYKHIHSKHHTLVVPYSFGALYNHPLEGLILDTIGGALSFLVSGMTPRTSIFFFSFATIKTVDDHCGLWLPGNILQALFSNNSAYHDIHHQLYGNKYNFSQPFFVMWDKILGTYMPYSIEQRKGGGIESKPAKLD

SEQ ID NO: 26387 - protein, 152 aa, Zea mays subsp. mays
  peptide (1)..(152): Ceres Seq. ID no. 12409877
  misc_feature (1)..(150): NCBI GI NO: 22330531 NR Description: acid phosphatase, putative; protein id:At1g69640
  misc_feature (1)..(150): NCBI GI NO: 25404823 NR Description: probable sterol desaturase T6C23.16
  misc_feature (1)..(151): NCBI GI NO: 18394095 NR Description: acid phosphatase, putative; protein id:At1g14290
  misc_feature (1)..(151): NCBI GI NO: 25511716 NR Description: F14L17.5 protein - Arabidopsis thaliana
  misc_feature (1)..(150): NCBI GI NO: 34913184 NR Description: similar to acid phosphatase
  misc_feature (1)..(148): NCBI GI NO: 34911990 NR Description: P0694A04.28
  misc_feature (1)..(97): NCBI GI NO: 5360721 NR Description: acid phosphatase [Lupinus albus]
  misc_feature (1)..(151): NCBI GI NO: 40746027 NR Description: hypothetical protein AN0640.2
  misc_feature (1)..(133): NCBI GI NO: 19113281 NR Description: hypothetical integral membrane protein
  misc_feature (1)..(130): NCBI GI NO: 37722567 NR Description: sphinganine hydroxylase [Pichia ciferrii]
MDTWQYFMHRYMHINKFLYKHIHSKHHTLVVPYSFGALYNHPLEGLILDTIGGALSFLVSGMTPRTSIFFFSFATIKTVDDHCGLWLPGNILQALFSNNSAYHDIHHQLYGNKYNFSQPFFVMWDKILGTYMPYSIEQRKGGGIESKPAKLD

SEQ ID NO: 26388 - DNA, 1822 bp, Zea mays subsp. mays
  misc_feature (1)..(1822): Ceres Seq. ID no. 12406971
attccaccctcctccgtctccgatcctcgccttcaactccactccctcgctctctcgggccttcttccctagcacgacggggtgatcactgattcactgccgcccgcgccaggtcggcccagaactagtgggcgccaaacatcatagcgatcatggaggtggtctcttgcagccactcctgctcggcattacatcaaacaccagcaagcacatggaggcttcggggcagtgctcttggccttggtcttgggcatgccagcccttcccggaccagaagatacacagttgcgtgtgtaggaaccacgagtggagcttcgaatccgggtggttccggcaaggtccatgcagcccagggattccatgtaagcgacgtggatgcagccctgcagggcattccttccatgaaagccggggaggccgagagggtgatgattcaaggccttccggaaggccctgacagctccccgatcagtactgggttctgggagtggaagccgaagctgactgtgtactacgagaggtccggcatgaagaacagcaaggcacctgcggtgctcttcctgccggggttcggagtcgggacgttccatttcgagaagcagctgagggatcttggtcgcgatcatcgggtgtggacgatggattttctcgggcaggggatgtcgctgcctggtgaagatcctgctcctagtagcatagcgagcgaagatgcgttttggggctttggacaagattcccagccttgggcagaggagctggtgtattctgtggatttatggcaaaaccaagttcagcatttcattgaggaggttatccgtgaaccagtttatattgtggggaactctcttggaggttttgttgctctgtattttgctgcatccagtccacaccttgtaaaaggtgtcacactgcttaatgcaacaccgttttggggattctttcccaaccctgctacatctccccgattgtcaaagattttcccatgggctgggacatttccgcttccatcatttgtgaggaaaattactgaagcagtttggcaaaagataagtgacccaaaaagtattcaggacatactcaaacaagtatacgctgaccattcaacaaatgtggacaaagtattctctcgtattgtggagataacacaacacccagcagctgctgcatcgtttgcctccattatgtttgctccaaggggtcagatatccttccaagaggccatctctaggtgccaagaccaaggcattcctatatctctcatgtatggaagagaagatccttggattagacctatttggggccttaaagttaaacagcaagtgcccgaagcaccttattatgaaattagccccgctggtcattgtcctcatgatgaggtccctgaggttataaactacttgctccgtgggtggctgaagaacctcgagtctgagggctcagtcgacctgccgtttctagaagaacgcagctatgctgagcgtggtgtatccagggagctggagtttgtcagagaaggatcaaggaagtcagttagtgtgcggctctatggtaccaagatttccctatggagccagctaagctcattcttgaacacacgtgtccccaagtcacggatagtcttgagataatccatcctcaactccaatagatctcaatcttagaagctttgattcagatattgtatttattactttattaaattggtcagcagacagtgtttccagaattcctagcgcatgtaaatattggcactacagtggtagtttcgaatttatcatgattcatatcatgtcaagatatgcttgaagttctgttcatagct

SEQ ID NO: 26389 - protein, 491 aa, Zea mays subsp. mays
  peptide (1)..(491): Ceres Seq. ID no. 12406972
  misc_feature (158)..(419): Pfam Name: Pfam Description:  alpha/beta hydrolase fold
  misc_feature (85)..(472): NCBI GI NO: 15240707 NR Description: putative protein; protein id: At5g13800
  misc_feature (190)..(421): NCBI GI NO: 23040754 NR Description: hypothetical protein
  misc_feature (110)..(171): NCBI GI NO: 23040754 NR Description: hypothetical protein
  misc_feature (190)..(424): NCBI GI NO: 16330114 NR Description: unknown protein [Synechocystis sp. PCC 6803]
  misc_feature (108)..(171): NCBI GI NO: 16330114 NR Description: unknown protein [Synechocystis sp. PCC 6803]
  misc_feature (190)..(424): NCBI GI NO: 37521904 NR Description: hypothetical protein gll2335
  misc_feature (111)..(169): NCBI GI NO: 37521904 NR Description: hypothetical protein gll2335
  misc_feature (190)..(426): NCBI GI NO: 23126297 NR Description: hypothetical protein [Nostoc punctiforme]
  misc_feature (101)..(171): NCBI GI NO: 23126297 NR Description: hypothetical protein [Nostoc punctiforme]
  misc_feature (190)..(424): NCBI GI NO: 17229548 NR Description: hypothetical protein [Nostoc sp. PCC 7120]
MEVVSCSHSCSALHQTPASTWRLRGSALGLGLGHASPSRTRRYTVACVGTTSGASNPGGSGKVHAAQGFHVSDVDAALQGIPSMKAGEAERVMIQGLPEGPDSSPISTGFWEWKPKLTVYYERSGMKNSKAPAVLFLPGFGVGTFHFEKQLRDLGRDHRVWTMDFLGQGMSLPGEDPAPSSIASEDAFWGFGQDSQPWAEELVYSVDLWQNQVQHFIEEVIREPVYIVGNSLGGFVALYFAASSPHLVKGVTLLNATPFWGFFPNPATSPRLSKIFPWAGTFPLPSFVRKITEAVWQKISDPKSIQDILKQVYADHSTNVDKVFSRIVEITQHPAAAASFASIMFAPRGQISFQEAISRCQDQGIPISLMYGREDPWIRPIWGLKVKQQVPEAPYYEISPAGHCPHDEVPEVINYLLRGWLKNLESEGSVDLPFLEERSYAERGVSRELEFVREGSRKSVSVRLYGTKISLWSQLSSFLNTRVPKSRIVLR

SEQ ID NO: 26390 - protein, 408 aa, Zea mays subsp. mays
  peptide (1)..(408): Ceres Seq. ID no. 12406973
  misc_feature (75)..(336): Pfam Name: Pfam Description:  alpha/beta hydrolase fold
  misc_feature (2)..(389): NCBI GI NO: 15240707 NR Description: putative protein; protein id: At5g13800
  misc_feature (107)..(338): NCBI GI NO: 23040754 NR Description: hypothetical protein
  misc_feature (27)..(88): NCBI GI NO: 23040754 NR Description: hypothetical protein
  misc_feature (107)..(341): NCBI GI NO: 16330114 NR Description: unknown protein [Synechocystis sp. PCC 6803]
  misc_feature (25)..(88): NCBI GI NO: 16330114 NR Description: unknown protein [Synechocystis sp. PCC 6803]
  misc_feature (107)..(341): NCBI GI NO: 37521904 NR Description: hypothetical protein gll2335
  misc_feature (28)..(86): NCBI GI NO: 37521904 NR Description: hypothetical protein gll2335
  misc_feature (107)..(343): NCBI GI NO: 23126297 NR Description: hypothetical protein [Nostoc punctiforme]
  misc_feature (18)..(88): NCBI GI NO: 23126297 NR Description: hypothetical protein [Nostoc punctiforme]
  misc_feature (107)..(341): NCBI GI NO: 17229548 NR Description: hypothetical protein [Nostoc sp. PCC 7120]
MKAGEAERVMIQGLPEGPDSSPISTGFWEWKPKLTVYYERSGMKNSKAPAVLFLPGFGVGTFHFEKQLRDLGRDHRVWTMDFLGQGMSLPGEDPAPSSIASEDAFWGFGQDSQPWAEELVYSVDLWQNQVQHFIEEVIREPVYIVGNSLGGFVALYFAASSPHLVKGVTLLNATPFWGFFPNPATSPRLSKIFPWAGTFPLPSFVRKITEAVWQKISDPKSIQDILKQVYADHSTNVDKVFSRIVEITQHPAAAASFASIMFAPRGQISFQEAISRCQDQGIPISLMYGREDPWIRPIWGLKVKQQVPEAPYYEISPAGHCPHDEVPEVINYLLRGWLKNLESEGSVDLPFLEERSYAERGVSRELEFVREGSRKSVSVRLYGTKISLWSQLSSFLNTRVPKSRIVLR

SEQ ID NO: 26391 - protein, 399 aa, Zea mays subsp. mays
  peptide (1)..(399): Ceres Seq. ID no. 12406974
  misc_feature (66)..(327): Pfam Name: Pfam Description:  alpha/beta hydrolase fold
  misc_feature (1)..(380): NCBI GI NO: 15240707 NR Description: putative protein; protein id: At5g13800
  misc_feature (98)..(329): NCBI GI NO: 23040754 NR Description: hypothetical protein
  misc_feature (18)..(79): NCBI GI NO: 23040754 NR Description: hypothetical protein
  misc_feature (98)..(332): NCBI GI NO: 16330114 NR Description: unknown protein [Synechocystis sp. PCC 6803]
  misc_feature (16)..(79): NCBI GI NO: 16330114 NR Description: unknown protein [Synechocystis sp. PCC 6803]
  misc_feature (98)..(332): NCBI GI NO: 37521904 NR Description: hypothetical protein gll2335
  misc_feature (19)..(77): NCBI GI NO: 37521904 NR Description: hypothetical protein gll2335
  misc_feature (98)..(334): NCBI GI NO: 23126297 NR Description: hypothetical protein [Nostoc punctiforme]
  misc_feature (9)..(79): NCBI GI NO: 23126297 NR Description: hypothetical protein [Nostoc punctiforme]
  misc_feature (98)..(332): NCBI GI NO: 17229548 NR Description: hypothetical protein [Nostoc sp. PCC 7120]
MIQGLPEGPDSSPISTGFWEWKPKLTVYYERSGMKNSKAPAVLFLPGFGVGTFHFEKQLRDLGRDHRVWTMDFLGQGMSLPGEDPAPSSIASEDAFWGFGQDSQPWAEELVYSVDLWQNQVQHFIEEVIREPVYIVGNSLGGFVALYFAASSPHLVKGVTLLNATPFWGFFPNPATSPRLSKIFPWAGTFPLPSFVRKITEAVWQKISDPKSIQDILKQVYADHSTNVDKVFSRIVEITQHPAAAASFASIMFAPRGQISFQEAISRCQDQGIPISLMYGREDPWIRPIWGLKVKQQVPEAPYYEISPAGHCPHDEVPEVINYLLRGWLKNLESEGSVDLPFLEERSYAERGVSRELEFVREGSRKSVSVRLYGTKISLWSQLSSFLNTRVPKSRIVLR

SEQ ID NO: 26392 - DNA, 1490 bp, Zea mays subsp. mays
  misc_feature (1)..(1490): Ceres Seq. ID no. 12409866
aaagagggacgagggagacgttggggaggggagcgagcgagccgtaacatccgagctgttccaatggcgacccctgccgttgctttcgtcgccagcgctttgttggggcggtggtagcgctaggagcggagcagtactaggttggtaggtggttgtagctttgcgcgtgacccgagcgcgcgctcgctcgctcctgtgcctctctacctcgcttgcgtgcgccgggaaggcagtgggtggctggtcggttctcgcaagaggttgctggtgctgttcctcctcccccggttgatgagcatggggcattgctccgagcagcggacggggttcgaggtgactaaggactggaacggcgccgaccagttcgcgatccggtcccccgcggggggcgtccgttcgggtctgcctgcacggcgggcaggtcgtctcgtggaggaaccaccgcggcgaggaactcctcttcagcagcagcaaggcaatcttcaagccgccaagagcgacccgtggtggcattccgatatgcttcccacagtttggaaactgtggaacattggagcagcatggatttgcaaggaacaagatatggacaatagacgatgaggctccacctctaaattatggtgataataacagcaacaaagcttctgttgaccttctgctaaagccatctgaagatgacctgaagtgctggccacactgttttgagttacgtctcagagtctctctttcaatggatggagacctttcactgatatcacgggtcagaaatgttaatgggaagccattcagtttcgcatttgcttaccatacatacctttctgtttctgacatcagtgaagtgaggatagaaggtctggagacccttgattatcttgacaaccttagccagcgggaacgttttaccgaacagggagatgccataacatttgaatcagaggttgatcgagtctatgttggctgcccaggcgtaatagctgttcttgaccatggaaagaaacgcacattcatcgtgcggaaagaagggcttcctgatattgttgtgtggaacccctgggagaagaagtccaagacgatggcagacttcggcgacgacgagtacaagcagatgctgtgcgtggatgcagccgcggtcgagagggccatcacgctgaagcccggggaggagtggacggggaagctggagctctccgccgtggcgtcgaccaactgcagcgaccacctggatcgcccgggcaggctgtagagcgctgggtgggtgggttcgttcgcccctgacgaaaggcatgtactagttttttttcatgtacatgggggcgctaggtccggcccttgcaggctgcagtatcatctacctgtcaggtgtgtcatgtgtgagtttaaacttatgtcagatccaagtattgctgtgatcgacatgttcgatgttcctggactgcgaagtctcaagcgcaggctgttcgtttggctggctttaatccgaaacggcatct

SEQ ID NO: 26393 - protein, 170 aa, Zea mays subsp. mays; identical to SEQ ID NO: 23185
  peptide (1)..(170): Ceres Seq. ID no. 12409867
  misc_feature (1)..(153): Pfam Name: Pfam Description:  Aldose 1-epimerase
  misc_feature (1)..(165): NCBI GI NO: 15233165 NR Description: putative protein; protein id: At3g61610.1
  misc_feature (1)..(170): NCBI GI NO: 19387263 NR Description: putative apospory-associated protein C
  misc_feature (1)..(165): NCBI GI NO: 40253263 NR Description: putative Aldose 1-epimerase
  misc_feature (1)..(158): NCBI GI NO: 15236591 NR Description: putative protein; protein id: At4g23730
  misc_feature (1)..(165): NCBI GI NO: 2501555 NR Description: POSSIBLE APOSPORY-ASSOCIATED PROTEIN C
  misc_feature (1)..(165): NCBI GI NO: 15242099 NR Description: apospory-associated protein C
  misc_feature (1)..(170): NCBI GI NO: 38344152 NR Description: OSJNBa0041A02.19
  misc_feature (1)..(19): NCBI GI NO: 34911992 NR Description: P0694A04.29
  misc_feature (98)..(167): NCBI GI NO: 34911992 NR Description: P0694A04.29
  misc_feature (1)..(165): NCBI GI NO: 18395868 NR Description: expressed protein; protein id: At3g01590

SEQ ID NO: 26394 - protein, 102 aa, Zea mays subsp. mays
  peptide (1)..(102): Ceres Seq. ID no. 12409868
  misc_feature (8)..(32): NCBI GI NO: 15233165 NR Description: putative protein; protein id: At3g61610.1
  misc_feature (3)..(57): NCBI GI NO: 34911992 NR Description: P0694A04.29
MSMGHCSEQRTGFEVTKDWNGADQFAIRSPAGGVRSGLPARRAGRLVEEPPRRGTPLQQQQGNLQAAKSDPWWHSDMLPTVWKLWNIGAAWICKEQDMDNRR

SEQ ID NO: 26395 - protein, 100 aa, Zea mays subsp. mays
  peptide (1)..(100): Ceres Seq. ID no. 12409869
  misc_feature (6)..(30): NCBI GI NO: 15233165 NR Description: putative protein; protein id: At3g61610.1
  misc_feature (1)..(55): NCBI GI NO: 34911992 NR Description: P0694A04.29
MGHCSEQRTGFEVTKDWNGADQFAIRSPAGGVRSGLPARRAGRLVEEPPRRGTPLQQQQGNLQAAKSDPWWHSDMLPTVWKLWNIGAAWICKEQDMDNRR

SEQ ID NO: 26396 - DNA, 1559 bp, Zea mays subsp. mays
  misc_feature (1)..(1559): Ceres Seq. ID no. 12409862
gcacgagaccattacctagaacatcctaatcgaaaagcccgcccccaaaccaaagggaaaccctcaccacgcttcccgaaacttctcctttctccatcctcaaccctactcccccttcatccgcacgaacgaagcagcgcgagcgaggagcagacgatccttcccgacctcgaagcctaccccccttccagctgcggccatggcgaccgtcatgcagaagatcaaggacatcgaggacgagatggcaaggacacagaagaataaagccactgctcaccatcttggtcttcttaaggctaaacttgcaaaattgcggcgggagttgctcactccaacatccaaaggtggtggtggtgcaggtgaaggatttgatgtgacgaagagtggagatgcacgtgttggtttagttggctttccttcggttgggaaatcaacattgttgaacaagctaacagggacattttcagaggttgcttcctacgagtttacaactttaacatgtattcctggagttatcatgtataagggtgctaaaatccagcttctagatctcccagggatcatcgaaggtgctaaagatggaaagggcagaggaagacaggttatcagcacagctaggacatgcaatgttattttgattgttcttgatgccataaaaccaataactcacaagcgtcttattgagaaggagcttgaaggatttggcattaggttgaacaaaacaccacccaatttgactttcagaagaaaggacaagggtggaatcaacttcacatcaacagtgacgaacacacatttggaccttgatacagtaaaagcaatctgtagcgagtacaggatacataatgctgatgtctccctgagatatgatgctacagcagatgatctcatagatgttattgaaggaagccggatttacactccttgcgtatatgttgtcaacaagattgatcagataacactcgaggagctggaaatcttggacaaacttccccattactgcccggttagtgctcatcttgaatggaatcttgatggacttctggagaaggtatgggaatacttggatttggttaggatatacacaaaacctaaagggctgaacccagattatgaggatcctgttatcgtatcatctaagaagaaaaccgtggaagatttctgcgacagaatccacaaggacatggtcaaacaatttaaatacgctctggtatggggttccagtgtgaaacataagcctcagagagttggcaaggagcatgagcttgacgatgaggacgtcgttcagatcattaagaaaatataggcgtatcatgtggtggaacaaaacctgttttttctggaaaactgggagcgttgaggattttgttgagtagtagcctcgcgagaagagcttgaactcggcctttgcttgttggtgaggctcatatgtaatgttccctgttctcagaaaatttgctttgatccaaagacaatgtgagtcggcatttacttatatacaacgagtcatgtagctgtgatgtaacttcctctaacttggtgccatgtggactggagcc

SEQ ID NO: 26397 - protein, 368 aa, Zea mays subsp. mays
  peptide (1)..(368): Ceres Seq. ID no. 12409863
  misc_feature (1)..(368): NCBI GI NO: 15235111 NR Description: GTP-binding - like protein; protein id: At4g39520
  misc_feature (1)..(368): NCBI GI NO: 30585289 NR Description: Homo sapiens developmentally regulated GTP binding protein 1
  misc_feature (1)..(367): NCBI GI NO: 4758796 NR Description: developmentally regulated GTP binding protein 1
  misc_feature (1)..(367): NCBI GI NO: 24586704 NR Description: developmentally regulated GTP binding protein 1
  misc_feature (1)..(367): NCBI GI NO: 6681225 NR Description: developmentally regulated GTP binding protein 1
  misc_feature (1)..(367): NCBI GI NO: 18089152 NR Description: developmentally regulated GTP binding protein 1
  misc_feature (1)..(367): NCBI GI NO: 346685 NR Description: GTP-binding protein DRG [validated] - mouse
  misc_feature (1)..(367): NCBI GI NO: 1169421 NR Description: Developmentally regulated GTP-binding protein 1
  misc_feature (1)..(367): NCBI GI NO: 26348781 NR Description: unnamed protein product [Mus musculus]
  misc_feature (3)..(367): NCBI GI NO: 23613265 NR Description: developmentally regulated GTP-binding protein 1
MATVMQKIKDIEDEMARTQKNKATAHHLGLLKAKLAKLRRELLTPTSKGGGGAGEGFDVTKSGDARVGLVGFPSVGKSTLLNKLTGTFSEVASYEFTTLTCIPGVIMYKGAKIQLLDLPGIIEGAKDGKGRGRQVISTARTCNVILIVLDAIKPITHKRLIEKELEGFGIRLNKTPPNLTFRRKDKGGINFTSTVTNTHLDLDTVKAICSEYRIHNADVSLRYDATADDLIDVIEGSRIYTPCVYVVNKIDQITLEELEILDKLPHYCPVSAHLEWNLDGLLEKVWEYLDLVRIYTKPKGLNPDYEDPVIVSSKKKTVEDFCDRIHKDMVKQFKYALVWGSSVKHKPQRVGKEHELDDEDVVQIIKKI

SEQ ID NO: 26398 - protein, 364 aa, Zea mays subsp. mays
  peptide (1)..(364): Ceres Seq. ID no. 12409864
  misc_feature (1)..(364): NCBI GI NO: 15235111 NR Description: GTP-binding - like protein; protein id: At4g39520
  misc_feature (1)..(364): NCBI GI NO: 30585289 NR Description: Homo sapiens developmentally regulated GTP binding protein 1
  misc_feature (1)..(363): NCBI GI NO: 4758796 NR Description: developmentally regulated GTP binding protein 1
  misc_feature (1)..(363): NCBI GI NO: 24586704 NR Description: developmentally regulated GTP binding protein 1
  misc_feature (1)..(363): NCBI GI NO: 6681225 NR Description: developmentally regulated GTP binding protein 1
  misc_feature (1)..(363): NCBI GI NO: 18089152 NR Description: developmentally regulated GTP binding protein 1
  misc_feature (1)..(363): NCBI GI NO: 346685 NR Description: GTP-binding protein DRG [validated] - mouse
  misc_feature (1)..(363): NCBI GI NO: 1169421 NR Description: Developmentally regulated GTP-binding protein 1
  misc_feature (1)..(363): NCBI GI NO: 26348781 NR Description: unnamed protein product [Mus musculus]
  misc_feature (1)..(363): NCBI GI NO: 23613265 NR Description: developmentally regulated GTP-binding protein 1
MQKIKDIEDEMARTQKNKATAHHLGLLKAKLAKLRRELLTPTSKGGGGAGEGFDVTKSGDARVGLVGFPSVGKSTLLNKLTGTFSEVASYEFTTLTCIPGVIMYKGAKIQLLDLPGIIEGAKDGKGRGRQVISTARTCNVILIVLDAIKPITHKRLIEKELEGFGIRLNKTPPNLTFRRKDKGGINFTSTVTNTHLDLDTVKAICSEYRIHNADVSLRYDATADDLIDVIEGSRIYTPCVYVVNKIDQITLEELEILDKLPHYCPVSAHLEWNLDGLLEKVWEYLDLVRIYTKPKGLNPDYEDPVIVSSKKKTVEDFCDRIHKDMVKQFKYALVWGSSVKHKPQRVGKEHELDDEDVVQIIKKI

SEQ ID NO: 26399 - protein, 354 aa, Zea mays subsp. mays
  peptide (1)..(354): Ceres Seq. ID no. 12409865
  misc_feature (1)..(354): NCBI GI NO: 15235111 NR Description: GTP-binding - like protein; protein id: At4g39520
  misc_feature (1)..(354): NCBI GI NO: 30585289 NR Description: Homo sapiens developmentally regulated GTP binding protein 1
  misc_feature (1)..(353): NCBI GI NO: 4758796 NR Description: developmentally regulated GTP binding protein 1
  misc_feature (1)..(353): NCBI GI NO: 24586704 NR Description: developmentally regulated GTP binding protein 1
  misc_feature (1)..(353): NCBI GI NO: 6681225 NR Description: developmentally regulated GTP binding protein 1
  misc_feature (1)..(353): NCBI GI NO: 18089152 NR Description: developmentally regulated GTP binding protein 1
  misc_feature (1)..(353): NCBI GI NO: 346685 NR Description: GTP-binding protein DRG [validated] - mouse
  misc_feature (1)..(353): NCBI GI NO: 1169421 NR Description: Developmentally regulated GTP-binding protein 1
  misc_feature (1)..(353): NCBI GI NO: 26348781 NR Description: unnamed protein product [Mus musculus]
  misc_feature (1)..(353): NCBI GI NO: 23613265 NR Description: developmentally regulated GTP-binding protein 1
MARTQKNKATAHHLGLLKAKLAKLRRELLTPTSKGGGGAGEGFDVTKSGDARVGLVGFPSVGKSTLLNKLTGTFSEVASYEFTTLTCIPGVIMYKGAKIQLLDLPGIIEGAKDGKGRGRQVISTARTCNVILIVLDAIKPITHKRLIEKELEGFGIRLNKTPPNLTFRRKDKGGINFTSTVTNTHLDLDTVKAICSEYRIHNADVSLRYDATADDLIDVIEGSRIYTPCVYVVNKIDQITLEELEILDKLPHYCPVSAHLEWNLDGLLEKVWEYLDLVRIYTKPKGLNPDYEDPVIVSSKKKTVEDFCDRIHKDMVKQFKYALVWGSSVKHKPQRVGKEHELDDEDVVQIIKKI

SEQ ID NO: 26400 - DNA, 1217 bp, Zea mays subsp. mays
  misc_feature (1)..(1217): Ceres Seq. ID no. 12409859
gcaaattaaggcttcagctcgcgcgagacctcagctttcactcgagtgagtgcgagtccatcgccggagagagagagagcgagagcacgcaatcgagttaaacaagccctgtctcttggttctctgtccacggcgggagagtggtagagatgggcaggcagccgtgctgcgagaagatcggtatcaagaaggggccgtggaccgcggaggaggaccagaagctggtcaccttcctcctgtctcacggccattgctgctggcggctcgtccccaagctcgcggggctgctgaggtgcgggaagagctgccggctgcggtggaccaactacctgaggccggacctcaagcgcggcctcctctcggaggaggaagaggcgctggtcatcgacctccacgcgcagctcggcaaccggtggtccaagatcgcggcgcggctgccggggaggacggacaacgagataaagaaccactggaacacccacatcaagaagaagctcaagaagatgggcatcgaccccgtcacccacgggccgctcgcgccggccactcaacctctggcgctggcgcagcagcgcgatcctccgcaggtggtgcgagaagaggaacgttgcgacgacgaccccagcaagcaggcatcgtcgcaagggctggcggcgggcgccgacgaggacgacgacgtggaggagacgccggcgagcgccgcccagccgcacggcgcgacgaccacctcccctgcttccgcagcggctggatccgtctcgccgtcctgctcctcctcggcctccggcgcggacgcggacgcggccgcctggcccggccccatcgacctcttcctcgaagtggacggcatcatggacatggactgggcgggcatcctttcgggctgcggcgatgacgacgccgcggacataagcgtcgatcttttcgaccattacgcaggcgatggctttgatgaacaagtctggatgtgatgcttgctcttcctgcaggtagcagcagtacactgggcggtaggatggttagaactgtgttgtgttgttactggtgatcgtatctctgctcttgcgtttgcgtgtccagttgcctctcttgttttcttgggtcaattcaagttcgcccgcgtccatgcatgcatggttgctggtatgggggagaggcacggcctggtttgtgtggtacgttcttcgtgaagattgaggaaatgaattgtgattgcg

SEQ ID NO: 26401 - protein, 273 aa, Zea mays subsp. mays
  peptide (1)..(273): Ceres Seq. ID no. 12409860
  misc_feature (14)..(61): Pfam Name: Pfam Description:  Myb-like DNA-binding domain
  misc_feature (1)..(238): NCBI GI NO: 7446182 NR Description: probable myb factor - rice
  misc_feature (1)..(235): NCBI GI NO: 23343575 NR Description: Myb51 protein [Oryza sativa]
  misc_feature (1)..(153): NCBI GI NO: 19073330 NR Description: typical P-type R2R3 Myb protein [Sorghum bicolor]
  misc_feature (1)..(156): NCBI GI NO: 19073332 NR Description: typical P-type R2R3 Myb protein [Sorghum bicolor]
  misc_feature (1)..(197): NCBI GI NO: 23343577 NR Description: Myb13 protein [Oryza sativa]
  misc_feature (1)..(155): NCBI GI NO: 19072740 NR Description: typical P-type R2R3 Myb protein [Zea mays]
  misc_feature (1)..(176): NCBI GI NO: 7446177 NR Description: myb-related transcription factor - tomato
  misc_feature (1)..(141): NCBI GI NO: 19073336 NR Description: typical P-type R2R3 Myb protein [Sorghum bicolor]
  misc_feature (1)..(178): NCBI GI NO: 34147926 NR Description: R2R3-MYB transcription factor [Pinus taeda]
  misc_feature (1)..(212): NCBI GI NO: 15219601 NR Description: myb family transcription factor
MGRQPCCEKIGIKKGPWTAEEDQKLVTFLLSHGHCCWRLVPKLAGLLRCGKSCRLRWTNYLRPDLKRGLLSEEEEALVIDLHAQLGNRWSKIAARLPGRTDNEIKNHWNTHIKKKLKKMGIDPVTHGPLAPATQPLALAQQRDPPQVVREEERCDDDPSKQASSQGLAAGADEDDDVEETPASAAQPHGATTTSPASAAAGSVSPSCSSSASGADADAAAWPGPIDLFLEVDGIMDMDWAGILSGCGDDDAADISVDLFDHYAGDGFDEQVWM

SEQ ID NO: 26402 - protein, 155 aa, Zea mays subsp. mays
  peptide (1)..(155): Ceres Seq. ID no. 12409861
  misc_feature (1)..(120): NCBI GI NO: 7446182 NR Description: probable myb factor - rice
  misc_feature (1)..(117): NCBI GI NO: 23343575 NR Description: Myb51 protein [Oryza sativa]
  misc_feature (1)..(35): NCBI GI NO: 19073330 NR Description: typical P-type R2R3 Myb protein [Sorghum bicolor]
  misc_feature (1)..(38): NCBI GI NO: 19073332 NR Description: typical P-type R2R3 Myb protein [Sorghum bicolor]
  misc_feature (1)..(79): NCBI GI NO: 23343577 NR Description: Myb13 protein [Oryza sativa]
  misc_feature (1)..(37): NCBI GI NO: 19072740 NR Description: typical P-type R2R3 Myb protein [Zea mays]
  misc_feature (1)..(58): NCBI GI NO: 7446177 NR Description: myb-related transcription factor - tomato
  misc_feature (1)..(23): NCBI GI NO: 19073336 NR Description: typical P-type R2R3 Myb protein [Sorghum bicolor]
  misc_feature (1)..(60): NCBI GI NO: 34147926 NR Description: R2R3-MYB transcription factor [Pinus taeda]
  misc_feature (1)..(94): NCBI GI NO: 15219601 NR Description: myb family transcription factor
MGIDPVTHGPLAPATQPLALAQQRDPPQVVREEERCDDDPSKQASSQGLAAGADEDDDVEETPASAAQPHGATTTSPASAAAGSVSPSCSSSASGADADAAAWPGPIDLFLEVDGIMDMDWAGILSGCGDDDAADISVDLFDHYAGDGFDEQVWM

SEQ ID NO: 26403 - DNA, 1527 bp, Zea mays subsp. mays
  misc_feature (1)..(1527): Ceres Seq. ID no. 12356270
aacgcaacacttccgtgccctacgccccagaacctcccaccgcatcggagggctccgcgcctccgctacgccgatggcgtcccagccgccgccagagcccgcaccggccgaggcgggtctggaaagcatggagggcctcgtcctcgacacggtcatctcaagagccggcgcgcgccccgcagcggcgctcgcctgcgccagcacgcgcctccgcaccgccgttgccgacgactccctctggcgcagattctgcggtgaggacctggggctcgacgctcccgtcgatccagagggccggcctcttccctccttccaggttgcatataaactttggttggagtcttttggcatgtaccctctacctatggtaaagagagtgagacaattctggacttcaatgaaaacttggttgtctgaaaactttcctgaggcatacaaaacgttatgcgaaggtgtttctgaagctcaattaaagtcagcagaggatgatcttggtttcaagctccctatgcccacaaagctgttgtatcgcttttgcaatgctcaactgccttttagtgaggaccatgacacaaataaaagcatttccactcatggattgattgggggctatgcgttttatgatcattgggtgaatgtgcatttgtcaccgcttgagcaaatagttgaagagacgaaggactctatcgggagttccctgatgtatttcatgggcgcaaattcattgtagtggcaacttcatggtttcatccgaaaacatttcttctagattgctcaaatggtgaactttatgttggtacatacaacttaccgataggaggaatgcttccctgtgtgcccaaagcattgataaagccagcaggtaatgatctagcacaagatggactacttctgtggttagaagaacaccttaggcgtttacagagtggcatgatcaagacccgtatgctgatggcatcgagatatatcagcttatatccagaagcacctccatcatgcagttcagctgttacaaatggcattaaggtacgctcatctgctgtctttgtgccagaacatcctgggaggcctggggaaaaatttatgttcacttactcaattcgcatgtcagttccagaggcatgcatgctaggtggcgtgtactattcttcctgccagctttgctcccgccactggaccatcagatcgtgtgacagggttgtttctgatgtgagcggaggaggggttattggagagtatcctctactgttacctggcgaggatgagtttgtctacgagagttgcacgccactgccccaagtacctggatctgtggagggctctttttcgtttgtgcctggcaagttgagccgacctgaagggaagccgttcgaagtcatggtggctcctttccctcttgatgtgccagaatacatcttctgatgatcacagcagaaataaatgtatgtatgcttgttggggaaaagtccggatgcttgtaataaccttattggagtaatgtaaaataaggaaccgtgcgctcttcgt

SEQ ID NO: 26404 - protein, 242 aa, Zea mays subsp. mays
  peptide (1)..(242): Ceres Seq. ID no. 12356271
  misc_feature (39)..(228): NCBI GI NO: 18390613 NR Description: F-box protein family; protein id: At1g06110
  misc_feature (36)..(182): NCBI GI NO: 12859828 NR Description: unnamed protein product [Mus musculus]
  misc_feature (36)..(182): NCBI GI NO: 10181216 NR Description: f-box only protein 3; F-box protein FBA
  misc_feature (36)..(182): NCBI GI NO: 12835784 NR Description: unnamed protein product [Mus musculus]
  misc_feature (36)..(182): NCBI GI NO: 26340912 NR Description: unnamed protein product [Mus musculus]
  misc_feature (36)..(182): NCBI GI NO: 26389339 NR Description: unnamed protein product [Mus musculus]
  misc_feature (36)..(182): NCBI GI NO: 34856605 NR Description: similar to F-box protein FBA [Rattus norvegicus]
  misc_feature (32)..(182): NCBI GI NO: 6103643 NR Description: F-box protein FBX3 [Homo sapiens]
  misc_feature (32)..(182): NCBI GI NO: 15812188 NR Description: F-box only protein 3 isoform 2; F-box protein FBX3
  misc_feature (32)..(182): NCBI GI NO: 13124239 NR Description: F-box only protein 3
TQHFRALRPRTSHRIGGLRASATPMASQPPPEPAPAEAGLESMEGLVLDTVISRAGARPAAALACASTRLRTAVADDSLWRRFCGEDLGLDAPVDPEGRPLPSFQVAYKLWLESFGMYPLPMVKRVRQFWTSMKTWLSENFPEAYKTLCEGVSEAQLKSAEDDLGFKLPMPTKLLYRFCNAQLPFSEDHDTNKSISTHGLIGGYAFYDHWVNVHLSPLEQIVEETKDSIGSSLMYFMGANSL

SEQ ID NO: 26405 - protein, 218 aa, Zea mays subsp. mays
  peptide (1)..(218): Ceres Seq. ID no. 12356272
  misc_feature (15)..(204): NCBI GI NO: 18390613 NR Description: F-box protein family; protein id: At1g06110
  misc_feature (12)..(158): NCBI GI NO: 12859828 NR Description: unnamed protein product [Mus musculus]
  misc_feature (12)..(158): NCBI GI NO: 10181216 NR Description: f-box only protein 3; F-box protein FBA
  misc_feature (12)..(158): NCBI GI NO: 12835784 NR Description: unnamed protein product [Mus musculus]
  misc_feature (12)..(158): NCBI GI NO: 26389339 NR Description: unnamed protein product [Mus musculus]
  misc_feature (12)..(158): NCBI GI NO: 26340912 NR Description: unnamed protein product [Mus musculus]
  misc_feature (12)..(158): NCBI GI NO: 34856605 NR Description: similar to F-box protein FBA [Rattus norvegicus]
  misc_feature (8)..(158): NCBI GI NO: 6103643 NR Description: F-box protein FBX3 [Homo sapiens]
  misc_feature (8)..(158): NCBI GI NO: 15812188 NR Description: F-box only protein 3 isoform 2; F-box protein FBX3
  misc_feature (8)..(158): NCBI GI NO: 13124239 NR Description: F-box only protein 3
MASQPPPEPAPAEAGLESMEGLVLDTVISRAGARPAAALACASTRLRTAVADDSLWRRFCGEDLGLDAPVDPEGRPLPSFQVAYKLWLESFGMYPLPMVKRVRQFWTSMKTWLSENFPEAYKTLCEGVSEAQLKSAEDDLGFKLPMPTKLLYRFCNAQLPFSEDHDTNKSISTHGLIGGYAFYDHWVNVHLSPLEQIVEETKDSIGSSLMYFMGANSL

SEQ ID NO: 26406 - protein, 200 aa, Zea mays subsp. mays
  peptide (1)..(200): Ceres Seq. ID no. 12356273
  misc_feature (1)..(186): NCBI GI NO: 18390613 NR Description: F-box protein family; protein id: At1g06110
  misc_feature (1)..(140): NCBI GI NO: 12859828 NR Description: unnamed protein product [Mus musculus]
  misc_feature (1)..(140): NCBI GI NO: 10181216 NR Description: f-box only protein 3; F-box protein FBA
  misc_feature (1)..(140): NCBI GI NO: 12835784 NR Description: unnamed protein product [Mus musculus]
  misc_feature (1)..(140): NCBI GI NO: 26340912 NR Description: unnamed protein product [Mus musculus]
  misc_feature (1)..(140): NCBI GI NO: 26389339 NR Description: unnamed protein product [Mus musculus]
  misc_feature (1)..(140): NCBI GI NO: 34856605 NR Description: similar to F-box protein FBA [Rattus norvegicus]
  misc_feature (1)..(140): NCBI GI NO: 6103643 NR Description: F-box protein FBX3 [Homo sapiens]
  misc_feature (1)..(140): NCBI GI NO: 15812188 NR Description: F-box only protein 3 isoform 2; F-box protein FBX3
  misc_feature (1)..(140): NCBI GI NO: 13124239 NR Description: F-box only protein 3
MEGLVLDTVISRAGARPAAALACASTRLRTAVADDSLWRRFCGEDLGLDAPVDPEGRPLPSFQVAYKLWLESFGMYPLPMVKRVRQFWTSMKTWLSENFPEAYKTLCEGVSEAQLKSAEDDLGFKLPMPTKLLYRFCNAQLPFSEDHDTNKSISTHGLIGGYAFYDHWVNVHLSPLEQIVEETKDSIGSSLMYFMGANSL

SEQ ID NO: 26407 - DNA, 709 bp, Zea mays subsp. mays
  misc_feature (1)..(709): Ceres Seq. ID no. 12412856
aaaaaacgaaacggctaagaaatccccaccttcacccacaaactagccggacaagcgaacaaaaggtgtaagagcttacgaccgacgcggccaaatagagataagagcaagatgacgtcgtcgacggcgttcagccaactgttcccttccgccgctgcggtatcccccgtccctcgctgcgtctccctgcagctcttctgcgccagcggtggagttgtccctggatggaggagaagatgccgccgcatggccatggtgcgcgcggcaaccgcggatgctgcggcgcccgcctacacctccgattccctcatcctctacttcaaggcggagggcaccatggaggagagggccattcccaagatcacagaatctcttgagggtatggagggagtcaaggacctggaggtgctcattgaagaaggcatcggaagtgttgtgttaacaaaggagacaactgtgcaagctactggagtagcctcgaacctggtggaagctatccagggagctgggttcaagctgcaaactctaagcttgagcttcgatgatttcgacgagccagcagcaggagcgggaggcactgtccaatccagcgagtgagctaatttgtggtgccgtgcgtggtgccaaatgcatataattcggtctcctgattttgtttaccctgctccttacctttgatttccgaagcacgatcttgtttttttttggc

SEQ ID NO: 26408 - protein, 161 aa, Zea mays subsp. mays
  peptide (1)..(161): Ceres Seq. ID no. 12412857
  misc_feature (1)..(148): NCBI GI NO: 18417512 NR Description: putative protein; protein id: At5g14910
  misc_feature (1)..(148): NCBI GI NO: 11346179 NR Description: hypothetical protein F2G14_30 - Arabidopsisthaliana
MTSSTAFSQLFPSAAAVSPVPRCVSLQLFCASGGVVPGWRRRCRRMAMVRAATADAAAPAYTSDSLILYFKAEGTMEERAIPKITESLEGMEGVKDLEVLIEEGIGSVVLTKETTVQATGVASNLVEAIQGAGFKLQTLSLSFDDFDEPAAGAGGTVQSSE

SEQ ID NO: 26409 - protein, 116 aa, Zea mays subsp. mays
  peptide (1)..(116): Ceres Seq. ID no. 12412858
  misc_feature (1)..(103): NCBI GI NO: 18417512 NR Description: putative protein; protein id: At5g14910
  misc_feature (1)..(103): NCBI GI NO: 11346179 NR Description: hypothetical protein F2G14_30 - Arabidopsisthaliana
MAMVRAATADAAAPAYTSDSLILYFKAEGTMEERAIPKITESLEGMEGVKDLEVLIEEGIGSVVLTKETTVQATGVASNLVEAIQGAGFKLQTLSLSFDDFDEPAAGAGGTVQSSE

SEQ ID NO: 26410 - protein, 114 aa, Zea mays subsp. mays
  peptide (1)..(114): Ceres Seq. ID no. 12412859
  misc_feature (1)..(101): NCBI GI NO: 18417512 NR Description: putative protein; protein id: At5g14910
  misc_feature (1)..(101): NCBI GI NO: 11346179 NR Description: hypothetical protein F2G14_30 - Arabidopsisthaliana
MVRAATADAAAPAYTSDSLILYFKAEGTMEERAIPKITESLEGMEGVKDLEVLIEEGIGSVVLTKETTVQATGVASNLVEAIQGAGFKLQTLSLSFDDFDEPAAGAGGTVQSSE

SEQ ID NO: 26411 - DNA, 1356 bp, Zea mays subsp. mays
  misc_feature (1)..(1356): Ceres Seq. ID no. 12373716
gtcttaccgcagcctcgtcctatccgtttgacgctcatccctggtatcccactcccctccctccccagccaacgacctccgccgccggccaccgcctgcctcagatcccccgccccgcccttccgttactcccagcgcgacgcggctgcgtccatgacgccctcctccgctctagccctcgcgctccaggccgcggcgtccccgctcccggcctccacgccgcggtcctcgcccaggtccagctcgctgagcctgggccgggggaccgccgggaacggcccgcgccgtcttgccgcagcagcgcccccacgggcgttcttctcatcgtccccctaccagccgccccaaccggaggggttctcgccacacccgggagtacggcctggtccccatggtgatcgaaaccacctcccgcggggagcgcgcctacgacatcttctcgcgcctgctgaaggagcgcatcgtctgcatcaacgggcccatcgccgacgacacggcctcgcttgtcgtcgcacagctgctcttcctcgagtccgagaacccactcaagcccgtccacctctatatcaactcccccgggggtgtcgtcaccgcggggctcgccatctacgacaccatgcagtacatccgctgccccgtcaccacgctctgcatcggccaggcggcctccatgggctcgctcctcctcgcggctggggcgccgggtgagaggcgcgcgctgcccaacgccagggtcatgatccaccagccctcgggcggcgcgcaggggcaggccactgacatcgccatccaggccaaggagatcctcaagctgcgcgaccgcctcaacaagatctaccagaagcacacgcgccagcccatcgacaagatcgagcagtgcatggagagggacctcttcatggatcccgacgaggcgcgcgactggggcctcatcgacgaggtcatcgagaaccgacctgcctcgctcatgcccgacggaatcgttggaggcctcgatgtgcccagcctcggtggcggtgggggcgggggcggacggggaagcgacgtcgaggagccttcggcggtgtgagaattggcctcaaaggtgaaatcccgttcgcatccggtggctttgttgtttgttgttagatctgaaggttcgattcttaccgtacaaggttaaccttgttattctggttacggaggcatccggctccccattctccttgttgcttcaattgcctgaattgagctattggtgatataattattacaactccaaggaaattctgttctgctggtactgataaattgacaaagtattgtgtatgttgtactatactactatattagtatcaattccatgccagggcattg

SEQ ID NO: 26412 - protein, 235 aa, Zea mays subsp. mays
  peptide (1)..(235): Ceres Seq. ID no. 12373717
  misc_feature (19)..(235): Pfam Name: Pfam Description:  Atrophin-1 family
  misc_feature (95)..(121): NCBI GI NO: 38344435 NR Description: OSJNBa0038O10.7
VLPQPRPIRLTLIPGIPLPSLPSQRPPPPATACLRSPAPPFRYSQRDAAASMTPSSALALALQAAASPLPASTPRSSPRSSSLSLGRGTAGNGPRRLAAAAPPRAFFSSSPYQPPQPEGFSPHPGVRPGPHGDRNHLPRGARLRHLLAPAEGAHRLHQRAHRRRHGLACRRTAALPRVREPTQARPPLYQLPRGCRHRGARHLRHHAVHPLPRHHALHRPGGLHGLAPPRGWGAG

SEQ ID NO: 26413 - protein, 225 aa, Zea mays subsp. mays
  peptide (1)..(225): Ceres Seq. ID no. 12373718
  misc_feature (7)..(188): Pfam Name: Pfam Description:  Clp protease
  misc_feature (1)..(223): NCBI GI NO: 38344435 NR Description: OSJNBa0038O10.7
  misc_feature (1)..(197): NCBI GI NO: 18420643 NR Description: ATP-dependent Clp protease proteolytic subunit
  misc_feature (1)..(189): NCBI GI NO: 8393156 NR Description: caseinolytic protease
  misc_feature (1)..(196): NCBI GI NO: 6685315 NR Description: ATP-dependent Clp protease proteolytic subunit
  misc_feature (1)..(189): NCBI GI NO: 34882298 NR Description: similar to ClpP protease [Rattus norvegicus]
  misc_feature (1)..(189): NCBI GI NO: 5174419 NR Description: endopeptidase Clp precursor
  misc_feature (1)..(191): NCBI GI NO: 23014984 NR Description: hypothetical protein
  misc_feature (1)..(196): NCBI GI NO: 20129427 NR Description: CG5045-PA [Drosophila melanogaster]
  misc_feature (1)..(196): NCBI GI NO: 22967580 NR Description: hypothetical protein [Rhodospirillum rubrum]
  misc_feature (1)..(188): NCBI GI NO: 23474550 NR Description: hypothetical protein
MVIETTSRGERAYDIFSRLLKERIVCINGPIADDTASLVVAQLLFLESENPLKPVHLYINSPGGVVTAGLAIYDTMQYIRCPVTTLCIGQAASMGSLLLAAGAPGERRALPNARVMIHQPSGGAQGQATDIAIQAKEILKLRDRLNKIYQKHTRQPIDKIEQCMERDLFMDPDEARDWGLIDEVIENRPASLMPDGIVGGLDVPSLGGGGGGGGRGSDVEEPSAV

SEQ ID NO: 26414 - protein, 184 aa, Zea mays subsp. mays
  peptide (1)..(184): Ceres Seq. ID no. 12373719
  misc_feature (1)..(184): Pfam Name: Pfam Description:  Atrophin-1 family
  misc_feature (44)..(70): NCBI GI NO: 38344435 NR Description: OSJNBa0038O10.7
MTPSSALALALQAAASPLPASTPRSSPRSSSLSLGRGTAGNGPRRLAAAAPPRAFFSSSPYQPPQPEGFSPHPGVRPGPHGDRNHLPRGARLRHLLAPAEGAHRLHQRAHRRRHGLACRRTAALPRVREPTQARPPLYQLPRGCRHRGARHLRHHAVHPLPRHHALHRPGGLHGLAPPRGWGAG
